(19) United States
(12) Patent Application Publication
(10) Pub. No.: US 2025/0122569 A1
(43) Pub. Date: Apr. 17, 2025

(54) DIAGNOSIS AND TREATMENT OF DISEASES AND CONDITIONS OF THE INTESTINAL TRACT

(71) Applicant: Flagship Pioneering Innovations VI, LLC, Cambridge, MA (US)

(72) Inventors: Douglas Gowers COLE, Wayland, MA (US); Jason PARK, West Newton, MA (US); Sabrina Yusang YANG, Cambridge, MA (US); Boris HAYETE, Needham, MA (US); Andrew John GASPARRINI, Boston, MA (US)

(21) Appl. No.: 18/694,601

(22) PCT Filed: Sep. 23, 2022
(86) PCT No.: PCT/US2022/076931

§ 371 Date: Mar. 22, 2024

Related U.S. Application Data
(60) Provisional application No. 63/247,448, filed on Sep. 23, 2021.

(51) Int. Cl. C12Q 1/6883

(52) U.S. Cl. CPC C12Q 1/6883; C12Q 2600/106; C12Q 2600/158

(57) ABSTRACT

The invention relates to methods of predicting a patient's responsiveness to treatment (e.g., vedolizumab treatment) for inflammatory bowel disease (IBD).

### SEQUENCE LISTING

[0001] The instant application contains a Sequence Listing which has been submitted electronically in XML format and is hereby incorporated by reference in its entirety. Said XML copy, created on Sep. 15, 2022, is named 51373-018WO1_Sequence_Listing_9_15_22.xml and is 26,504,024 bytes in size.

### FIELD OF THE INVENTION

[0002] The invention relates to methods of predicting a patient's responsiveness to treatment (e.g., vedolizumab treatment) for inflammatory bowel disease (IBD).

### BACKGROUND

[0003] Mammals are colonized by microorganisms in the gastrointestinal (GI) tract, on the skin, and in other epithelial and tissue niches. The gastrointestinal tract of a healthy individual harbors an abundant and diverse microbial community. It is a complex system, providing an environment or niche for a community of many different species or organisms, including diverse strains of bacteria. Hundreds of different species may form a commensal community in the GI tract in a healthy person, and this complement of organisms evolves from the time of birth and is believed to form a functionally mature microbial population by about 3 years of age. Interactions between microbial strains in these populations and between microorganisms and the host, e.g., interactions with the host's immune system, shape the community structure, with availability of and competition for resources affecting the distribution of microorganisms.

[0004] A healthy microbiome may provide a subject with multiple benefits, including colonization resistance to a broad spectrum of pathogens, essential nutrient biosynthesis and absorption, and immune stimulation that plays a role in maintaining a healthy gut epithelium and appropriately controlled systemic immunity. Conversely, an unhealthy (e.g., dysregulated) microbiome may be associated with a disease state.

[0005] There is a need for methods for addressing problems in healthcare through assessment of the microbiome.

### SUMMARY OF THE INVENTION

[0006] In one aspect, the disclosure features a method of identifying a subject having an inflammatory bowel disease (IBD) who is likely to respond to treatment with an anti-integrin or other IBD therapy, the method comprising determining a level of one or more of SEQ ID NOs: 1-1171 in a sample from the subject, wherein a level of one or more of SEQ ID NOs: 1-1171 that is changed relative to a respective reference level for SEQ ID NOs: 1-1171 indicates that the subject is likely to respond to treatment with the anti-integrin or other IBD therapy.

[0007] In another aspect, the disclosure features a method for determining that a subject having an IBD is likely to respond to treatment with an anti-integrin therapy or other IBD therapy, comprising the steps of (a) measuring the nucleic acid level of one or more of SEQ ID NOs: 1-1171 in a sample collected from the subject using amplification and one or more pairs of primers specific for each of the one or more of SEQ ID NOs: 1-1171; and (b) using the amplification results to determine whether the level of one or more of SEQ ID NOs: 1-1171 is changed relative to a respective reference level for SEQ ID NOs: 1-1171, thereby determining that the subject is likely to respond to treatment with an anti-integrin therapy or other IBD therapy.

[0008] In some embodiments, a level of one or more of SEQ ID NOs: 1-1171 is changed relative to the respective reference level for SEQ ID NO: 1-1171 in the sample from the subject and the method further comprises administering an anti-integrin or other IBD therapy to a subject.

[0009] In some embodiments, the method comprises determining or measuring a level of at least two, at least three, at least four, at least five, at least six, at least seven, at least eight, at least nine, at least ten, at least fifteen, at least 20, at least 30, at least 40, at least 50, at least 60, at least 70, at least 80, at least 90, at least 100, at least 110, at least 120, at least 130, at least 140, at least 150, at least 200, at least 250, at least 300, at least 350, at least 400, at least 450, at least 500, at least 550, at least 600, at least 650, at least 700, at least 750, at least 800, at least 850, at least 900, at least 950, at least 1000, at least 1050, at least 1100, or at least 1150 of SEQ ID NOs: 1-1171 in the sample from the subject.

[0010] In some embodiments, the method comprises determining or measuring a level of all 1171 of SEQ ID NOs: 1-1171 in the sample from the subject.

[0011] In some embodiments, the anti-integrin therapy targets integrin α₄β₇. In some embodiments, the anti-integrin therapy is vedolizumab.

[0012] In some embodiments, the method further comprises treatment comprising fecal microbiota transplantation (FMT).

[0013] In some embodiments, the reference level is a pre-assigned level.

[0014] In some embodiments, the reference level is a level in a set of samples from a reference population. In some embodiments, the reference population is a population of healthy subjects.

[0015] In some embodiments, the level of each of SEQ ID NOs: 1-1171 that is determined or measured in the sample from the subject is a nucleic acid level. In some embodiments, the nucleic acid level is a DNA level.

[0016] In some embodiments, the change is a decrease relative to the reference level. In some embodiments, the levels of at least 10%, at least 20%, at least 30%, at least 40%, at least 50%, at least 60%, at least 70%, at least 80%, at least 90%, or more than 90% of the sequences for which a level is determined or measured are decreased relative to a respective reference level for the sequence.

[0017] In some embodiments, the change is an increase relative to the reference level. In some embodiments, the levels of at least 10%, at least 20%, at least 30%, at least 40%, at least 50%, at least 60%, at least 70%, at least 80%, at least 90%, or more than 90% of the sequences for which a level is determined or measured are increased relative to a respective reference level for the sequence.

[0018] In some embodiments, the sample comprises a sample of the microbiota of the subject.

[0019] In some embodiments, the sample is a fecal sample.

[0020] In another aspect, the disclosure features a kit for identifying a subject having an inflammatory bowel disease (IBD) who is likely to respond to treatment with an anti-integrin or other IBD therapy, the kit comprising: (a) polypeptides or polynucleotides capable of determining the level of one or more of SEQ ID NOs: 1-1171 in a sample from the subject; and (b) instructions for use of the polypeptides or polynucleotides to determine the level of one or more of SEQ ID NOs: 1-1171 in a sample from the subject, wherein a level of one or more of SEQ ID NOs: 1-1171 that is changed relative to a respective reference level for SEQ ID NOs: 1-1171 indicates that the subject is likely to respond to treatment with the anti-integrin or other IBD therapy.

[0021] In some embodiments, the kit comprises polypeptides or polynucleotides capable of determining the level of at least 5%, at least 10%, at least 15%, at least 20%, at least 25%, at least 30%, at least 35%, at least 40%, at least 45%, at least 50%, at least 55%, at least 60%, at least 65%, at least 70%, at least 75%, at least 80%, at least 85%, at least 90%, at least 95%, at least 99%, or more than 99% of SEQ ID NOs: 1-1171 in a sample from the subject.

[0022] In another aspect, the disclosure features a method of identifying a subject having an inflammatory bowel disease (IBD) who is likely to respond to treatment with an anti-integrin or other IBD therapy, the method comprising determining a level of each of SEQ ID NOs: 1-1171 in a sample from the subject, wherein a level of at least 50% of SEQ ID NOs: 1-1171 that is changed relative to a respective reference level for SEQ ID NOs: 1-1171 indicates that the subject is likely to respond to treatment with an anti-integrin or other IBD therapy.

[0023] In some embodiments, a level of at least 50% of SEQ ID NOs: 1-1171 is changed relative to a respective reference level for SEQ ID NOs: 1-1171 in the sample from the subject and the method further comprises administering an anti-integrin or other IBD therapy to a subject.

[0024] In some embodiments, a level of at least 60%, 70%, 80%, 90%, or 95% of SEQ ID NOs: 1-1171 that is changed in a sample from the subject relative to a respective reference level for SEQ ID NOs: 1-1171 indicates that the subject is likely to respond to treatment with an anti-integrin or other IBD therapy.

[0025] In some embodiments, the anti-integrin therapy targets integrin α₄β₇. In some embodiments, the anti-integrin therapy is vedolizumab.

[0026] In another aspect, the disclosure features a method of treating a subject having an IBD using an anti-integrin therapy or other IBD therapy, wherein the subject was determined to be likely to respond to treatment with an anti-integrin therapy or other IBD therapy by any of the methods provided herein.

[0027] In another aspect, the disclosure features a method of treating a subject having an IBD using an anti-integrin therapy or other IBD therapy, the method comprising the steps of (a) measuring the nucleic acid level of one or more of SEQ ID NOs: 1-1171 in a sample collected from the subject using amplification and one or more pairs of primers specific for each of the one or more of SEQ ID NOs: 1-1171; (b) using the amplification results to determine whether the level of one or more of SEQ ID NOs: 1-1171 is changed relative to a respective reference level for SEQ ID NOs: 1-1171, thereby determining an increased likelihood of response to treatment with an anti-integrin therapy or other IBD therapy for the subject; and (c) treating a subject who has been determined to have an increased likelihood of response to treatment with an anti-integrin therapy or other IBD therapy with the anti-integrin therapy or other IBD therapy.

[0028] In some embodiments, the nucleic acid level of the one or more of SEQ ID NOs: 1-1171 in the sample collected from the subject are measured using amplification and one or more pairs of primers specific for each of the one or more of SEQ ID NOs: 1-1171, and the amplification results are used to determine whether the level of one or more of SEQ ID NOs: 1-1171 is changed relative to a respective reference level for SEQ ID NOs: 1-1171.

[0029] In some embodiments, the method comprises measuring the nucleic acid level of at least two, at least three, at least four, at least five, at least six, at least seven, at least eight, at least nine, at least ten, at least fifteen, at least 20, at least 30, at least 40, at least 50, at least 60, at least 70, at least 80, at least 90, at least 100, at least 110, at least 120, at least 130, at least 140, at least 150, at least 200, at least 250, at least 300, at least 350, at least 400, at least 450, at least 500, at least 550, at least 600, at least 650, at least 700, at least 750, at least 800, at least 850, at least 900, at least 950, at least 1000, at least 1050, at least 1100, or at least 1150 of SEQ ID NOs: 1-1171 in the sample from the subject. In some embodiments, the method comprises measuring the nucleic acid level of all 1171 of SEQ ID NOs: 1-1171 in the sample from the subject.

[0030] In some embodiments, the reference level is a pre-assigned level. In some embodiments, the reference level is a level in a set of samples from a reference population. In some embodiments, the reference population is a population of healthy subjects.

[0031] In some embodiments, the nucleic acid level is a DNA level.

[0032] In some embodiments, the change is a decrease relative to the reference level. In some embodiments, the levels of at least 10%, at least 20%, at least 30%, at least 40%, at least 50%, at least 60%, at least 70%, at least 80%, at least 90%, or more than 90% of the sequences for which a level is measured are decreased relative to a respective reference level for the sequence.

[0033] In some embodiments, the change is an increase relative to the reference level. In some embodiments, the levels of at least 10%, at least 20%, at least 30%, at least 40%, at least 50%, at least 60%, at least 70%, at least 80%, at least 90%, or more than 90% of the sequences for which a level is measured are increased relative to a respective reference level for the sequence.

[0034] In some embodiments, the sample comprises a sample of the microbiota of the subject. In some embodiments, the sample is a fecal sample.

[0035] In another aspect, the disclosure features a method of treating a subject having an IBD, the method comprising the steps of (a) measuring the nucleic acid level of each of SEQ ID NOs: 1-1171 in a sample collected from the subject, wherein a level of at least 50% of SEQ ID NOs: 1-1171 that is changed relative to a respective reference level for SEQ ID NOs: 1-1171 indicates that the subject is likely to respond to treatment with an anti-integrin therapy or other IBD therapy; and (b) treating a subject who has been determined to be likely to respond to treatment with an anti-integrin therapy or other IBD therapy with the anti-integrin therapy or other IBD therapy.

[0036] In some embodiments, the nucleic acid levels of each of SEQ ID NOs: 1-1171 in the sample collected from the subject are measured using amplification and one or more pairs of primers specific for each of SEQ ID NOs: 1-1171, and the amplification results are used to determine whether the level of each of SEQ ID NOs: 1-1171 is changed relative to a respective reference level for SEQ ID NOs: 1-1171.

### BRIEF DESCRIPTION OF THE DRAWING

[0037] FIG. 1 is a graph showing the out-of-cohort performance (as percent specificity and sensitivity) of metagenomic markers for distinguishing patients who were to be responders vs. non-responders to treatment with the anti-integrin therapy vedolizumab.

### DETAILED DESCRIPTION OF THE INVENTION

### Definitions

[0038] The term “changed,” as used herein, refers to an observable difference in the level of a marker in a subject (e.g., in a sample from the subject), as determined using techniques and methods known in the art for the measurement of the marker. A marker level that is changed in a subject may result in a difference of at least 1% (e.g., at least 5%, 10%, 15%, 20%, 25%, 30%, 35%, 40%, 45%, 50%, 55%, 60%, 65%, 70%, 75%, 80%, 85%, 90%, 95%, or 100%, or at least 2.5-fold, 3-fold, 4-fold, 5-fold, 6-fold, 7-fold, 8-fold, 9-fold, 10-fold, 15-fold, 20-fold, 25-fold, 50-fold, 75-fold, 100-fold, or more than 100-fold) more or less than a reference level (e.g., a level from a healthy subject or a level prior to treatment) (e.g., up to 100% or up to 100-fold relative to the reference level). In some embodiments, the change is an increase in the level of a marker in a subject. Increasing the marker level in a subject may result in an increase of at least 1% (e.g., at least 5%, 10%, 15%, 20%, 25%, 30%, 35%, 40%, 45%, 50%, 55%, 60%, 65%, 70%, 75%, 80%, 85%, 90%, 95%, 98%, 99%, or 100%, or at least 2.5-fold, 3-fold, 4-fold, 5-fold, 6-fold, 7-fold, 8-fold, 9-fold, 10-fold, 15-fold, 20-fold, 25-fold, 50-fold, 75-fold, 100-fold, or more than 100-fold) relative to the reference level (e.g., up to 100% or up to 100-fold relative to the reference level). In other embodiments, the change is a decrease the level of a marker in a subject. Decreasing the marker level in a subject may result in a decrease of at least 1% (e.g., at least 5%, 10%, 15%, 20%, 25%, 30%, 35%, 40%, 45%, 50%, 55%, 60%, 65%, 70%, 75%, 80%, 85%, 90%, 95%, or 100%, or at least 2.5-fold, 3-fold, 4-fold, 5-fold, 6-fold, 7-fold, 8-fold, 9-fold, 10-fold, 15-fold, 20-fold, 25-fold, 50-fold, 75-fold, 100-fold, or more than 100-fold) relative to the reference level (e.g., up to 100% or up to 100-fold relative to the reference level).

[0039] In embodiments in which a level is increased or decreased (or reduced) in a subject following a step of administering a therapy described herein, the increase or decrease may take place and/or be detectable within a range of time following the administration (e.g., within six hours, 24 hours, 3 days, a week or longer), and may take place and/or be detectable after one or more administrations (e.g., after 2, 3, 4, 5, 6, 7, 8, 9, 10, or more administrations, e.g., as part of a dosing regimen for the subject).

[0040] In some embodiments, the change in the level of a portion of the markers analyzed is an increase, while the change in the level of another portion of the markers analyzed is a decrease. In some embodiments, the change in at least 10%, 20%, 30%, 40%, 50%, 60%, 70%, 80%, 90%, 95%, or more (e.g., 100%) of the markers analyzed is an increase relative to a reference level. In some embodiments, the change in at least 10%, 20%, 30%, 40%, 50%, 60%, 70%, 80%, 90%, 95%, or more (e.g., 100%) of the markers analyzed is a decrease relative to a reference level.

[0041] The term “pharmaceutical composition,” as used herein, represents a composition formulated with a pharmaceutically acceptable excipient. For example, a “pharmaceutical composition” can be a composition that is manufactured or sold with the approval of a governmental regulatory agency as part of a therapeutic regimen for the treatment of a disease, disorder, or condition in a mammal, intended for such use, or in development for such use. In some examples, the pharmaceutical composition is a pre-approved composition.

[0042] The term “subject,” as used herein, represents a human or non-human animal (e.g., a mammal).

[0043] “Treatment” and “treating,” as used herein, refer to the medical management of a subject with the intent to improve, ameliorate, stabilize, prevent, or cure a disease, disorder, or condition. This term includes active treatment (treatment directed to improve the disease, disorder, or condition); causal treatment (treatment directed to the cause of the associated disease, disorder, or condition); palliative treatment (treatment designed for the relief of symptoms of the disease, disorder, or condition); preventative treatment (treatment directed to minimizing or partially or completely inhibiting the development of the associated disease, disorder, or condition); and supportive treatment (treatment employed to supplement another therapy).

[0044] The term “inflammatory bowel disease” or “IBD,” as used herein, refers to a condition of the bowel, e.g., the small intestine, large intestine, mouth, esophagus, stomach, rectum, and/or anus, that is characterized by inflammation. Examples of IBD include ulcerative colitis (UC) and Crohn's disease. Other examples include microscopic colitis (e.g., collagenous colitis or lyphocytic colitis), diversion colitis, Behçet's disease, or indeterminate colitis.

### I. Methods for Predicting Responsiveness to Therapy in Inflammatory Bowel Disease

[0045] The invention is based, in part, on the discovery that levels of gut microbiome biomarkers (i.e., markers of bacterial origin), which may be referred to as co-evolved molecules, can be used to identify patients having an inflammatory bowel disease (IBD) who are likely to respond to treatment with an anti-integrin or other IBD therapy. Accordingly, the disclosure provides methods of diagnosing, treating, and monitoring subjects (e.g., human patients) based on this discovery.

### Diagnostic Methods and Methods of Treatment

[0046] In some aspects, the disclosure features a method of identifying a subject having an inflammatory bowel disease (IBD) who is likely to respond to treatment with an anti-integrin or other IBD therapy, the method comprising determining a level of one or more of SEQ ID NOs: 1-1171 in a sample from the subject, wherein a level of one or more of SEQ ID NOs: 1-1171 that is changed relative to a respective reference level for SEQ ID NOs: 1-1171 indicates that the subject is likely to respond to treatment with the anti-integrin or other IBD therapy. SEQ ID NOs: 1-1171 are bacterial sequences.

[0047] In some aspects, the disclosure features a method for determining that a subject having an IBD is likely to respond to treatment with an anti-integrin therapy or other IBD therapy, comprising the steps of (a) measuring the nucleic acid level of one or more of SEQ ID NOs: 1-1171 in a sample collected from the subject using amplification and one or more pairs of primers specific for each of the one or more of SEQ ID NOs: 1-1171; and (b) using the amplification results to determine whether the level of one or more of SEQ ID NOs: 1-1171 is changed relative to a respective reference level for SEQ ID NOs: 1-1171, thereby determining that the subject is likely to respond to treatment with an anti-integrin therapy or other IBD therapy.

[0048] In some aspects, the disclosure features a method of treating a subject having an IBD using an anti-integrin therapy or other IBD therapy, wherein the subject was determined to be likely to respond to treatment with an anti-integrin therapy or other IBD therapy by any of the methods provided herein.

[0049] In some aspects, the disclosure features a method of treating a subject having an IBD using an anti-integrin therapy or other IBD therapy, the method comprising the steps of (a) measuring the nucleic acid level of one or more of SEQ ID NOs: 1-1171 in a sample collected from the subject using amplification and one or more pairs of primers specific for each of the one or more of SEQ ID NOs: 1-1171; (b) using the amplification results to determine whether the level of one or more of SEQ ID NOs: 1-1171 is changed relative to a respective reference level for SEQ ID NOs: 1-1171, thereby determining an increased likelihood of response to treatment with an anti-integrin therapy or other IBD therapy for the subject; and (c) treating a subject who has been determined to have an increased likelihood of response to treatment with an anti-integrin therapy or other IBD therapy with the anti-integrin therapy or other IBD therapy.

[0050] In some aspects, the disclosure features a method of treating a subject having an IBD, the method comprising the steps of (a) measuring the nucleic acid level of each of SEQ ID NOs: 1-1171 in a sample collected from the subject, wherein a level of at least 50% of SEQ ID NOs: 1-1171 that is changed relative to a respective reference level for SEQ ID NOs: 1-1171 indicates that the subject is likely to respond to treatment with an anti-integrin therapy or other IBD therapy; and (b) treating a subject who has been determined to be likely to respond to treatment with an anti-integrin therapy or other IBD therapy with the anti-integrin therapy or other IBD therapy.

[0051] In some embodiments, the sample comprises a sample of the microbiota (e.g., the gut microbiota) of the subject. In some embodiments, the sample is a fecal sample. In some embodiments, the sample is a colon or rectal biopsy.

[0052] In some embodiments, the method comprises determining or measuring a level of at least 2, at least 3, at least 4, at least 5, at least 6, at least 7, at least 8, at least 9, at least 10, at least 15, at least 20, at least 25, at least 30, at least 35, at least 40, at least 45, at least 50, at least 55, at least 60, at least 65, at least 70, at least 75, at least 80, at least 85, at least 90, at least 95, at least 100, at least 105, at least 110, at least 115, at least 120, at least 125, at least 130, at least 135, at least 140, at least 145, at least 150, at least 155, at least 160, at least 165, at least 170, at least 175, at least 180, at least 185, at least 190, at least 195, at least 200, at least 205, at least 210, at least 215, at least 220, at least 225, at least 230, at least 235, at least 240, at least 245, at least 250, at least 255, at least 260, at least 265, at least 270, at least 275, at least 280, at least 285, at least 290, at least 295, at least 300, at least 305, at least 310, at least 315, at least 325, at least 350, at least 375, at least 400, at least 425, at least 450, at least 475, at least 500, at least 525, at least 550, at least 575, at least 600, at least 625, at least 650, at least 675, at least 700, least 725,at least 750, at least 775, at least 800, at least 825, at least 850, at least 875, at least 900, at least 925, at least 950, at least 975, at least 1000, at least 1025, at least 1050, at least 1075, at least 1100, or at least 1150 of SEQ ID NOs: 1-1171 in a sample from the subject, e.g., comprises determining a level of 1-5, 5-10, 10-15, 15-20, 20-25, 25-30, 30-35, 35-40, 40-45, 45-50, 50-55, 55-60, 60-65, 65-70, 70-75, 75-80, 80-85, 85-90, 90-95, 95-100, 100-105, 105-110, 110-115, 115-120, 120-125, 125-130, 130-135, 135-140, 140-145, 145-150, 150-155, 155-160, 160-165, 165-170, 170-175, 175-180, 180-185, 185-190, 190-195, 195-200, 200-205, 205-210, 210-215, 215-220, 220-225, 225-230, 230-235, 235-240, 240-245, 245-250, 250-255, 255-260, 260-265, 265-270, 270-275, 275-280, 280-285, 285-290, 290-295, 295-300, 300-305, 305-310, 310-315, 315-320, 325-350, 350-375, 375-400, 400-425, 425-450, 450-475, 475-500, 500-525, 525-550, 550-575, 575-600, 600-625, 625-650, 650-675, 675-700, 700-725, 725-750, 750-775, 775-800, 800-825, 825-850, 850-875, 875-900, 900-925, 925-950, 950-975, 975-1000, 1000-1025, 1025-1050, 1050-1075, 1075-1100, 1100-1125, 1125-1150, or 1150-1170 of SEQ ID NOs: 1-1171 in the sample from the subject. In some embodiments, the method comprises determining a level of all 1171of SEQ ID NOs: 1-1171 in a sample from the subject.

[0053] In some embodiments, a change in the a level of at least 2, at least 3, at least 4, at least 5, at least 6, at least 7, at least 8, at least 9, at least 10, at least 15, at least 20, at least 25, at least 30, at least 35, at least 40, at least 45, at least 50, at least 55, at least 60, at least 65, at least 70, at least 75, at least 80, at least 85, at least 90, at least 95, at least 100, at least 105, at least 110, at least 115, at least 120, at least 125, at least 130, at least 135, at least 140, at least 145, at least 150, at least 155, at least 160, at least 165, at least 170, at least 175, at least 180, at least 185, at least 190, at least 195, at least 200, at least 205, at least 210, at least 215, at least 220, at least 225, at least 230, at least 235, at least 240, at least 245, at least 250, at least 255, at least 260, at least 265, at least 270, at least 275, at least 280, at least 285, at least 290, at least 295, at least 300, at least 305, at least 310, at least 315, at least 325, at least 350, at least 375, at least 400, at least 425, at least 450, at least 475, at least 500, at least 525, at least 550, at least 575, at least 600, at least 625, at least 650, at least 675, at least 700, least 725, at least 750, at least 775, at least 800, at least 825, at least 850, at least 875, at least 900, at least 925, at least 950, at least 975, at least 1000, at least 1025, at least 1050, at least 1075, at least 1100, or at least 1150 of SEQ ID NOs: 1-1171 in a sample from the subject, e.g., a change in the level of 1-5, 5-10, 10-15, 15-20, 20-25, 25-30, 30-35, 35-40, 40-45, 45-50, 50-55, 55-60, 60-65, 65-70, 70-75, 75-80, 80-85, 85-90, 90-95, 95-100, 100-105, 105-110, 110-115, 115-120, 120-125, 125-130, 130-135, 135-140, 140-145, 145-150, 150-155, 155-160, 160-165, 165-170, 170-175, 175-180, 180-185, 185-190, 190-195, 195-200, 200-205, 205-210, 210-215, 215-220, 220-225, 225-230, 230-235, 235-240, 240-245, 245-250, 250-255, 255-260, 260-265, 265-270, 270-275, 275-280, 280-285, 285-290, 290-295, 295-300, 300-305, 305-310, 310-315, 315-320, 325-350, 350-375, 375-400, 400-425, 425-450, 450-475, 475-500, 500-525, 525-550, 550-575, 575-600, 600-625, 625-650, 650-675, 675-700, 700-725, 725-750, 750-775, 775-800, 800-825, 825-850, 850-875, 875-900, 900-925, 925-950, 950-975, 975-1000, 1000-1025, 1025-1050, 1050-1075, 1075-1100, 1100-1125, 1125-1150, or 1150-1170 of SEQ ID NOs: 1-1171 in the sample from the subject relative to a respective reference level for SEQ ID NOs: 1-1171 indicates that the subject is likely to respond to treatment with an anti-integrin or other IBD therapy. In some embodiments, a change in the level of all 1171 of SEQ ID NOs: 1-1171 relative to a respective reference level for SEQ ID NOs: 1-1171 indicates that the subject is likely to respond to treatment with an anti-integrin or other IBD therapy.

[0054] In some embodiments, a change in the level of at least 5%, at least 10%, at least 15%, at least 20%, at least 25%, at least 30%, at least 35%, at least 40%, at least 45%, at least 50%, at least 55%, at least 60%, at least 65%, at least 70%, at least 75%, at least 80%, at least 85%, at least 95%, at least 98%, at least 99%, or 100% of the total number of SEQ ID NOs: 1-1171 measured in a sample from the subject relative to a respective reference level for SEQ ID NOs: 1-1171 indicates that the subject is likely to respond to treatment with the anti-integrin or other IBD therapy.

[0055] In some embodiments, a threshold number of one or more of SEQ ID NOs: 1-1171 is changed relative to the respective reference level for SEQ ID NO: 1-1171 in the sample from the subject (e.g., a number of SEQ ID NOs: 1-1171 that has been determined to indicate that the patient is likely to respond to treatment with an anti-integrin or other IBD therapy, e.g., a level of at least 1, at least 2, at least 3, at least 4, at least 5, at least 6, at least 7, at least 8, at least 9, at least 10, at least 15, at least 20, at least 25, at least 30, at least 35, at least 40, at least 45, at least 50, at least 55, at least 60, at least 65, at least 70, at least 75, at least 80, at least 85, at least 90, at least 95, at least 100, at least 105, at least 110, at least 115, at least 120, at least 125, at least 130, at least 135, at least 140, at least 145, at least 150, at least 155, at least 160, at least 165, at least 170, at least 175, at least 180, at least 185, at least 190, at least 195, at least 200, at least 205, at least 210, at least 215, at least 220, at least 225, at least 230, at least 235, at least 240, at least 245, at least 250, at least 255, at least 260, at least 265, at least 270, at least 275, at least 280, at least 285, at least 290, at least 295, at least 300, at least 305, at least 310, at least 315, at least 325, at least 350, at least 375, at least 400, at least 425, at least 450, at least 475, at least 500, at least 525, at least 550, at least 575, at least 600, at least 625, at least 650, at least 675, at least 700, least 725, at least 750, at least 775, at least 800, at least 825, at least 850, at least 875, at least 900, at least 925, at least 950, at least 975, at least 1000, at least 1025, at least 1050, at least 1075, at least 1100, or at least 1150 of SEQ ID NOs: 1-1171 in a sample from the subject (e.g., a level of 1-5, 5-10, 10-15, 15-20, 20-25, 25-30, 30-35, 35-40, 40-45, 45-50, 50-55, 55-60, 60-65, 65-70, 70-75, 75-80, 80-85, 85-90, 90-95, 95-100, 100-105, 105-110, 110-115, 115-120, 120-125, 125-130, 130-135, 135-140, 140-145, 145-150, 150-155, 155-160, 160-165, 165-170, 170-175, 175-180, 180-185, 185-190, 190-195, 195-200, 200-205, 205-210, 210-215, 215-220, 220-225, 225-230, 230-235, 235-240, 240-245, 245-250, 250-255, 255-260, 260-265, 265-270, 270-275, 275-280, 280-285, 285-290, 290-295, 295-300, 300-305, 305-310, 310-315, 315-320, 325-350, 350-375, 375-400, 400-425, 425-450, 450-475, 475-500, 500-525, 525-550, 550-575, 575-600, 600-625, 625-650, 650-675, 675-700, 700-725, 725-750, 750-775, 775-800, 800-825, 825-850, 850-875, 875-900, 900-925, 925-950, 950-975, 975-1000, 1000-1025, 1025-1050, 1050-1075, 1075-1100, 1100-1125, 1125-1150, or 1150-1170) of SEQ ID NOs: 1-1171 is changed relative to the respective reference level for SEQ ID NO: 1-1171 in the sample from the subject and the method further comprises administering an anti-integrin or other IBD therapy to a subject.

[0056] In some aspects, the anti-integrin therapy targets integrin daß7. In some aspects, the anti-integrin therapy is vedolizumab. In some aspects, the method further comprises treatment by fecal microbiota transplant (FMT).

[0057] IBD therapies that may be used in the invention further include a biologic therapy (e.g., vedolizumab (ENTYVIO®), infliximab (REMICADE®), adalimumab (HUMIRA®), golimumab (SIMPONI®), certolizumab (CIMZIA®), risankizumab (SKYRIZI®), or ustekinumab (STELARA®)); an anti-inflammatory agent (e.g., a corticosteroid or an aminosalicylate, such as mesalamine (e.g., DELZICOL®, ROWASA®, others), balsalazide (COLAZAL®), or olsalazine (DIPENTUM®)); an antibiotic, e.g., ciprofloxacin (cipro) or metronidazole (Flagyl); or an immune system suppressor (e.g., azathioprine (AZASAN®, IMURAN®), mercaptopurine (PURINETHOL®, PURIXAN®), methotrexate (TREXALL®), tofacitinib (XELJANZ®), upadacitinib (RINVOQ®), or ozanimod (ZEPOSIA®)). Any one or more of these therapies may optionally be used in any of the methods described herein as employing an IBD therapy.

[0058] In some embodiments, the respective reference level for SEQ ID NOs: 1-1171 is a pre-assigned level of one of SEQ ID NOs: 1-1171.

[0059] In some embodiments, the respective reference level for SEQ ID NOs: 1-1171 is a level in a set of samples from a reference population, e.g., a population of healthy subjects (e.g., a population of subjects not having an inflammatory bowel disease (IBD) (e.g., not having ulcerative colitis and/or not having Crohn's disease) and/or a population of subjects having a healthy gut microbiome). In some embodiments, the reference subjects are human subjects.

[0060] In some embodiments, the level of each of SEQ ID NOs: 1-1171 that is determined or measured in a sample from the subject is a nucleic acid level, e.g., a DNA level or an RNA level. In some embodiments, the nucleic acid level is a DNA level, which may be detected, e.g., using a PCR-based method. In other embodiments, detection of a level of one or more of SEQ ID NOs: 1-1171 can optionally comprise, for example, detection of RNA levels, which can be achieved by, e.g., RT-PCR, RNA-Seq, and/or methods including the use of microarrays, as are known in the art. In other embodiments, the methods can focus on the detection of protein levels, which can be carried out using standard approaches (e.g., immunoassay-based approaches).

[0061] In some embodiments, the change in a level of one or more of SEQ ID NOs: 1-1171 in the sample from the subject is a decrease relative to the respective reference level for SEQ ID NOs: 1-1171 (e.g., a decrease of at least 1%, 2%, 3%, 4%, 5%, 6%, 7%, 8%, 9%, 10%, 11%, 12%, 13%, 14%, 15%, 16%, 17%, 18%, 19%, 20%, 21%, 22%, 23%, 24%, 25%, 26%, 27%, 28%, 29%, 30%, 31%, 32%, 33%, 34%, 35%, 36%, 37%, 38%, 39%, 40%, 41%, 42%, 43%, 44%, 45%, 46%, 47%, 48%, 49%, 50%, 51%, 52%, 53%, 54%, 55%, 56%, 57%, 58%, 59%, 60%, 61%, 62%, 63%, 64%, 65%, 66%, 67%, 68%, 69%, 70%, 71%, 72%, 73%, 74%, 75%, 76%, 77%, 78%, 79%, 80%, 81%, 82%, 83%, 84%, 85%, 86%, 87%, 88%, 89%, 90%, 91%, 92%, 93%, 94%, 95%, 96%, 97%, 98%, 99%, or 100%, e.g., a decrease of, e.g., at least 2.5-fold, 3-fold, 4-fold, 5-fold, 6-fold, 7-fold, 8-fold, 9-fold, 10-fold, 15-fold, 20-fold, 25-fold, 50-fold, 75-fold, 100-fold, or more than 100-fold) relative to the respective reference level for SEQ ID NOs: 1-1171; or a decrease of 1-5%, 5-10%, 10-15%, 15-20%, 20-25%, 25-30%, 30-35%, 35-40%, 40-45%, 45-50%, 50-55%, 55-60%, 60-65%, 65-70%, 70-75%, 75-80%, 0-85%, 85-90%, 90-95%, or 95-100% relative to the respective reference level for SEQ ID NOs: 1-1171).

[0062] In some aspects, the levels of at least 5%, at least 10%, at least 15%, at least 20%, at least 25%, at least 30%, at least 35%, at least 40%, at least 45%, at least 50%, at least 55%, at least 60%, at least 65%, at least 70%, at least 75%, at least 80%, at least 85%, at least 90%, at least 95%, at least 99%, or more than 99% of the sequences for which a level is determined or measured in the sample from the subject (i.e., one or more of SEQ ID NOs: 1-1171) are decreased relative to a respective reference level for the sequence, e.g., 5-10%, 10-15%, 15-20%, 20-25%, 25-30%, 30-35%, 35-40%, 40-45%, 45-50%, 50-55%, 55-60%, 60-65%, 65-70%, 70-75%, 75-80%, 0-85%, 85-90%, 90-95%, or 95-100% of the sequences for which a level is determined or measured are decreased relative to a respective reference level for the sequence.

[0063] In some embodiments, the change in a level of one or more of SEQ ID NOs: 1-1171in the sample from the subject is an increase relative to the respective reference level for SEQ ID NOs: 1-1171 (e.g., an increase of at least 1%, 2%, 3%, 4%, 5%, 6%, 7%, 8%, 9%, 10%, 11%, 12%, 13%, 14%, 15%, 16%, 17%, 18%, 19%, 20%, 21%, 22%, 23%, 24%, 25%, 26%, 27%, 28%, 29%, 30%, 31%, 32%, 33%, 34%, 35%, 36%, 37%, 38%, 39%, 40%, 41%, 42%, 43%, 44%, 45%, 46%, 47%, 48%, 49%, 50%, 51%, 52%, 53%, 54%, 55%, 56%, 57%, 58%, 59%, 60%, 61%, 62%, 63%, 64%, 65%, 66%, 67%, 68%, 69%, 70%, 71%, 72%, 73%, 74%, 75%, 76%, 77%, 78%, 79%, 80%, 81%, 82%, 83%, 84%, 85%, 86%, 87%, 88%, 89%, 90%, 91%, 92%, 93%, 94%, 95%, 96%, 97%, 98%, 99%, 100%, or more than 100%, e.g., an increase of, e.g., 2.5-fold, 3-fold, 4-fold, 5-fold, 6-fold, 7-fold, 8-fold, 9-fold, 10-fold, 15-fold, 20-fold, 25-fold, 50-fold, 75-fold, 100-fold, or more than 100-fold, relative to the respective level for SEQ ID NOs: 1-1171; or an increase of 1-5%, 5-10%, 10-15%, 15-20%, 20-25%, 25-30%, 30-35%, 35-40%, 40-45%, 45-50%, 50-55%, 55-60%, 60-65%, 65-70%, 70-75%, 75-80%, 0-85%, 85-90%, 90-95%, 95-100%, or more than 100%, relative to the respective reference level for SEQ ID NOs: 1-1171).

[0064] In some aspects, the levels of at least 5%, at least 10%, at least 15%, at least 20%, at least 25%, at least 30%, at least 35%, at least 40%, at least 45%, at least 50%, at least 55%, at least 60%, at least 65%, at least 70%, at least 75%, at least 80%, at least 85%, at least 90%, at least 95%, at least 99%, or more than 99% of the sequences for which a level is determined or measured in the sample from the subject (i.e., one or more of SEQ ID NOs: 1-1171) are increased relative to a respective reference level for the sequence, e.g., 5-10%, 10-15%, 15-20%, 20-25%, 25-30%, 30-35%, 35-40%, 40-45%, 45-50%, 50-55%, 55-60%, 60-65%, 65-70%, 70-75%, 75-80%, 0-85%, 85-90%, 90-95%, or 95-100% of the sequences for which a level is determined or measured are increased relative to a respective reference level for the sequence.

[0065] In some aspects, a level of at least 50%, 51%, 52%, 53%, 54%, 55%, 56%, 57%, 58%, 59%, 60%, 61%, 62%, 63%, 64%, 65%, 66%, 67%, 68%, 69%, 70%, 71%, 72%, 73%, 74%, 75%, 76%, 77%, 78%, 79%, 80%, 81%, 82%, 83%, 84%, 85%, 86%, 87%, 88%, 89%, 90%, 91%, 92%, 93%, 94%, 95%, 96%, 97%, 98%, or 99% of SEQ ID NOs: 1-1171 that is increased in a sample from the subject relative to a respective reference level for SEQ ID NOs: 1-1171 indicates that the subject is likely to respond to treatment with the anti-integrin or other IBD therapy.

[0066] In another aspect, the disclosure features a method of identifying a subject having an inflammatory bowel disease (IBD) who is likely to respond to treatment with an anti-integrin or other IBD therapy, the method comprising determining a level of each of SEQ ID NOs: 1-1171 in a sample from the subject, wherein a level of at least 50% of SEQ ID NOs: 1-1171 that is changed (e.g., increased or decreased) relative to a respective reference level for SEQ ID NOs: 1-1171 indicates that the subject is likely to respond to treatment with an anti-integrin or other IBD therapy.

[0067] In some aspects, a level of at least 50% of SEQ ID NOs: 1-1171 is increased relative to a respective reference level for SEQ ID NOs: 1-1171 in the sample from the subject and the method further comprises administering an anti-integrin or other IBD therapy to a subject.

[0068] In some aspects, a level of at least 60%, 70%, 80%, 90%, or 95% of SEQ ID NOS: 1-1171 that is increased in a sample from the subject relative to a respective reference level for SEQ ID NOs: 1-1171 indicates that the subject is likely to respond to treatment with an anti-integrin or other IBD therapy.

[0069] Determination of whether a difference detected is significant can be carried out using standard methods, as well as statistical analysis. In some embodiments, a difference detected is a change of at least 5%, 10%, 20%, 30%, 40%, 50%, 75%, 100%, or more, e.g., at least 2.5-fold, 3-fold, 4-fold, 5-fold, 6-fold, 7-fold, 8-fold, 9-fold, 10-fold, 15-fold, 20-fold, 25-fold, 50-fold, 75-fold, 100-fold, or more than 100-fold, relative to a reference level.

### II. Articles of Manufacture and Kits

[0070] In another aspect of the invention, an article of manufacture or kit containing materials useful for the diagnosis, prognostic assessment, and/or treatment of individuals is provided.

[0071] In one aspect, the disclosure features a kit or article of manufacture for identifying a subject having an inflammatory bowel disease (IBD) who is likely to respond to treatment with an anti-integrin or other IBD therapy, the kit comprising (a) reagents for determining a level of one or more of SEQ ID NOs: 1-1171 in a sample from the subject (e.g., polynucleotides or polypeptides capable of use in determining the level of one or more of SEQ ID NOs: 1-1171 in a sample from the subject); and optionally (b) instructions for use of the polynucleotides or polypeptides to determine the level of one or more of SEQ ID NOs: 1-1171 in the sample from the subject, wherein a change in the level of one or more of SEQ ID NOs: 1-1171 relative to a respective reference level for SEQ ID NOs: 1-1171, as described herein, indicates that the subject is likely to respond to treatment with the anti-integrin or other IBD therapy.

[0072] In some aspects, the reagents for determining a level of one or more of SEQ ID NOs: 1-1171 in a sample from the subject comprise one or more polynucleotides (e.g., PCR primers) that hybridize to a complement of a locus of one or more of SEQ ID NOs: 1-1171 under stringent conditions and may be used to amplify all or a portion of any one or more of SEQ ID NOs: 1-1171, as described herein. In some aspects, the instructions indicate that the one or more oligonucleotides (e.g., PCR primers) may be used to evaluate the presence and/or level of one or more of SEQ ID NOs: 1-1171 in a sample from the subject and provide instructions for using the polynucleotide(s) for evaluating the presence and/or level of one or more of SEQ ID NOs: 1-1171 in the sample. In some embodiments, reagents are included for determining a level of at least 5%, at least 10%, at least 15%, at least 20%, at least 25%, at least 30%, at least 35%, at least 40%, at least 45%, at least 50%, at least 55%, at least 60%, at least 65%, at least 70%, at least 75%, at least 80%, at least 85%, at least 90%, at least 95%, at least 99%, or more than 99% of the sequences of SEQ ID NOs: 1-1171.

[0073] For polynucleotide-based articles of manufacture or kits, the article of manufacture or kit may include, for example: (1) an oligonucleotide, e.g., a detectably labeled oligonucleotide, which hybridizes to a nucleic acid sequence encoding a protein, (2) a pair of primers useful for amplifying a nucleic acid molecule, or (3) a microarray comprising multiple oligonucleotide probes. For protein-based articles of manufacture or kits, the article of manufacture or kit may include, for example, one or more antibody-based reagents. The article of manufacture or kit can also include, e.g., a buffering agent, a preservative, or a protein-stabilizing agent. The article of manufacture or kit can further include components necessary for detecting the detectable label (e.g., an enzyme or a substrate). The article of manufacture or kit can further include components necessary for analyzing the sequence of a sample (e.g., a restriction enzyme or a buffer). The article of manufacture or kit can also contain a control sample or a series of control samples that can be assayed and compared to the test sample (e.g., a reference sample, as described herein). Each component of the article of manufacture or kit can be enclosed within an individual container and all of the various containers can be within a single package, along with instructions for interpreting the results of the assays performed using the kit.

[0074] The following examples are meant to illustrate the invention. They are not meant to limit the invention in any way.

### III. Examples

### Example 1. Identification of Markers

### A. Assembly and Annotation of Metagenomic Markers

[0075] Paired end reads from healthy Human Microbiome Project 1 (HMP1; Human Microbiome Project Consortium, Nature, 486(7402): 207-214, 2012) individuals were downloaded from the National Center for Bioinformatics (NCBI) Short Read Archive (SRA) and assembled using metaSPAdes (cab.spbu.ru/software/spades/). Metagenomic markers were annotated using antiSMASH4.0 (docs.antismash.secondarymetabolites.org/) with the following non-default parameters: -c 3--smcogs--disable-embl. Annotated metagenomic markers were clustered using all vs. all diamond (https://github.com/bbuchfink/diamond) blastx. Blastx results were filtered using a python script requiring (a) E-value <1×10⁻⁵, (b) 90% coverage of length of coding sequence, and (c) >50% of coding sequences in a metagenomic marker present. Metagenomic markers were then grouped using markov clustering, resulting in a dereplicated library of 8,211 representative metagenomic markers identified in healthy human gut metagenomes.

### B. EMP Selection

[0076] A subset of metagenomic markers prevalent in healthy cohorts, referred to as essential microbial products (EMPs), were identified by clustering metagenomic markers presence/absence across 592 healthy patients from various geographic, genetic, and lifestyle backgrounds. Clusters with a mean prevalence >0.7 and z-score >10 within cohort were selected. To take sample imbalance into account, a proportion test was performed to assess stability across cohorts. This resulted in 1321 EMPs. For diagnostic analyses, metagenomic markers were subsetted from the full dataset, resulting in 1171 EMPs. Metagenomic markers were further subsetted, resulting in 590 EMPs.

### Metagenomic Data

[0077] Raw metagenomic reads from Ananthakrishnan et al., Cell Host Microbe, 21(5): 603-610.e3, 2017 were made available via ASPERAR transfer from the Broad Institute. There were 83 baseline (week 0, pretreatment) samples (43 Crohn's disease and 40 ulcerative colitis), 81 of which had baseline metagenomes available. The Ananthakrishnan et al. study presents the results of an analysis of disease activity and stool metagenomes in patients having Crohn's disease (CD) or ulcerative colitis (UC) who were treated with the anti-integrin therapy vedolizumab.

### C. Quantification of Metagenomic Markers Across Cohorts

[0078] To quantify metagenomic marker abundance across metagenomes, raw forward reads were mapped to the library of 8,211 metagenomic markers using diamond as described above. Normalized abundance of metagenomic markers was calculated such that abundance equals number of reads mapping divided by cumulative length of coding sequences in kilobase pairs divided by number of raw reads mapped.

### D. Data Preprocessing

[0079] EMP abundance data were transformed using rank-based inverse normal transformation (Blom), and centered and scaled.

### E. Modeling

[0080] Lasso models of the form treatment response at week 54˜gender+diagnosis+EMPs at baseline were fit using leave-one-out cross-validation with the glmnet package in R. Area under the receiver operating characteristic (ROC) curve was calculated using the pROC package in R, and the p-value of the ROC curve was computed using the Mann-Whitney method as previously described. The model achieved a sensitivity of 75% and a specificity of 75% at the point of maximum discrimination. These metrics were used for a post-hoc analysis of trial results from Sands et al., N Engl J Med, 381:1215-1226, 2019 to determine that 58% of patients selected using our model would have been responsive to treatment.

### F. Conclusions

[0081] A set of 1171 metagenomic markers (SEQ ID NOs: 1-1171) were found to be significant predictors in a model discriminating between IBD (CD and UC) patients who were likely to be responders vs. non-responders to treatment with the anti-integrin therapy vedolizumab (FIG. 1).

### Other Embodiments

[0082] Various modifications and variations of the described invention will be apparent to those skilled in the art without departing from the scope and spirit of the invention. Although the invention has been described in connection with specific embodiments, it should be understood that the invention as claimed should not be unduly limited to such specific embodiments. Indeed, various modifications of the described modes for carrying out the invention that are obvious to those skilled in the art are intended to be within the scope of the invention.

[0083] Other embodiments are in the claims.

What is claimed is:

1. A method of identifying a subject having an inflammatory bowel disease (IBD) who is likely to respond to treatment with an anti-integrin therapy or other IBD therapy, the method comprising determining a level of one or more of SEQ ID NOs: 1-1171 in a sample from the subject, wherein a level of one or more of SEQ ID NOs: 1-1171 that is changed relative to a respective reference level for SEQ ID NOs: 1-1171 indicates that the subject is likely to respond to treatment with the anti-integrin or other IBD therapy.

2. A method for determining that a subject having an IBD is likely to respond to treatment with an anti-integrin therapy or other IBD therapy, comprising the steps of:
(a) measuring the nucleic acid level of one or more of SEQ ID NOs: 1-1171 in a sample collected from the subject using amplification and one or more pairs of primers specific for each of the one or more of SEQ ID NOs: 1-1171; and
(b) using the amplification results to determine whether the level of one or more of SEQ ID NOs: 1-1171 is changed relative to a respective reference level for SEQ ID NOs: 1-1171, thereby determining that the subject is likely to respond to treatment with an anti-integrin therapy or other IBD therapy.

3. The method of claim 1 or 2, wherein a level of one or more of SEQ ID NOs: 1-1171 is changed relative to the respective reference level for SEQ ID NO: 1-1171 in the sample from the subject and the method further comprises administering an anti-integrin or other IBD therapy to a subject.

4. The method of any one of claims 1-3, wherein the method comprises determining or measuring a level of at least two, at least three, at least four, at least five, at least six, at least seven, at least eight, at least nine, at least ten, at least fifteen, at least 20, at least 30, at least 40, at least 50, at least 60, at least 70, at least 80, at least 90, at least 100, at least 110, at least 120, at least 130, at least 140, at least 150, at least 200, at least 250, at least 300, at least 350, at least 400, at least 450, at least 500, at least 550, at least 600, at least 650, at least 700, at least 750, at least 800, at least 850, at least 900, at least 950, at least 1000, at least 1050, at least 1100, or at least 1150 of SEQ ID NOs: 1-1171 in the sample from the subject.

5. The method of claim 4, wherein the method comprises determining or measuring a level of all 1171 of SEQ ID NOs: 1-1171 in the sample from the subject.

6. The method of any one of claims 1-5, wherein the anti-integrin therapy targets integrin 04B7.

7. The method of claim 6, wherein the anti-integrin therapy is vedolizumab.

8. The method of any one of claims 1-7, wherein the method further comprises treatment comprising fecal microbiota transplantation (FMT).

9. The method of any one of claims 1-8, wherein the reference level is a pre-assigned level.

10. The method of any one of claims 1-9, wherein the reference level is a level in a set of samples from a reference population.

11. The method of claim 10, wherein the reference population is a population of healthy subjects.

12. The method of any one of claims 1-11, wherein the level of each of SEQ ID NOs: 1-1171 that is determined or measured in the sample from the subject is a nucleic acid level.

13. The method of claim 12, wherein the nucleic acid level is a DNA level.

14. The method of any one of claims 1-13, wherein the change is a decrease relative to the reference level.

15. The method of claim 14, wherein the levels of at least 10%, at least 20%, at least 30%, at least 40%, at least 50%, at least 60%, at least 70%, at least 80%, at least 90%, or more than 90% of the sequences for which a level is determined or measured are decreased relative to a respective reference level for the sequence.

16. The method of any one of claims 1-13, wherein the change is an increase relative to the reference level.

17. The method of claim 16, wherein the levels of at least 10%, at least 20%, at least 30%, at least 40%, at least 50%, at least 60%, at least 70%, at least 80%, at least 90%, or more than 90% of the sequences for which a level is determined or measured are increased relative to a respective reference level for the sequence.

18. The method of any one of claims 1-17, wherein the sample comprises a sample of the microbiota of the subject.

19. The method of any one of claims 1-18, wherein the sample is a fecal sample.

20. A kit for identifying a subject having an inflammatory bowel disease (IBD) who is likely to respond to treatment with an anti-integrin or other IBD therapy, the kit comprising:
(a) polypeptides or polynucleotides capable of determining the level of one or more of SEQ ID NOs: 1-1171 in a sample from the subject; and
(b) instructions for use of the polypeptides or polynucleotides to determine the level of one or more of SEQ ID NOs: 1-1171 in a sample from the subject, wherein a level of one or more of SEQ ID NOs: 1-1171 that is changed relative to a respective reference level for SEQ ID NOs: 1-1171 indicates that the subject is likely to respond to treatment with the anti-integrin or other IBD therapy.

21. The kit of claim 20, wherein the kit comprises polypeptides or polynucleotides capable of determining the level of at least 5%, at least 10%, at least 15%, at least 20%, at least 25%, at least 30%, at least 35%, at least 40%, at least 45%, at least 50%, at least 55%, at least 60%, at least 65%, at least 70%, at least 75%, at least 80%, at least 85%, at least 90%, at least 95%, at least 99%, or more than 99% of SEQ ID NOs: 1-1171 in a sample from the subject.

22. A method of identifying a subject having an inflammatory bowel disease (IBD) who is likely to respond to treatment with an anti-integrin or other IBD therapy, the method comprising determining a level of each of SEQ ID NOs: 1-1171 in a sample from the subject, wherein a level of at least 50% of SEQ ID NOs: 1-1171 that is changed relative to a respective reference level for SEQ ID NOs: 1-1171 indicates that the subject is likely to respond to treatment with an anti-integrin or other IBD therapy.

23. The method of claim 22, wherein a level of at least 50% of SEQ ID NOs: 1-1171 is changed relative to a respective reference level for SEQ ID NOs: 1-1171 in the sample from the subject and the method further comprises administering an anti-integrin or other IBD therapy to a subject.

24. The method of claim 22 or 23, wherein a level of at least 60%, 70%, 80%, 90%, or 95% of SEQ ID NOs: 1-1171 that is changed in a sample from the subject relative to a respective reference level for SEQ ID NOs: 1-1171 indicates that the subject is likely to respond to treatment with an anti-integrin or other IBD therapy.

25. The method of any one of claims 22-24, wherein the anti-integrin therapy targets integrin α₄β₇.

26. The method of claim 25, wherein the anti-integrin therapy is vedolizumab.

27. A method of treating a subject having an IBD using an anti-integrin therapy or other IBD therapy, wherein the subject was determined to be likely to respond to treatment with an anti-integrin therapy or other IBD therapy by the method of any one of claims 1-19 and 22-26.

28. A method of treating a subject having an IBD using an anti-integrin therapy or other IBD therapy, the method comprising the steps of:
(a) measuring the nucleic acid level of one or more of SEQ ID NOs: 1-1171 in a sample collected from the subject using amplification and one or more pairs of primers specific for each of the one or more of SEQ ID NOs: 1-1171;
(b) using the amplification results to determine whether the level of one or more of SEQ ID NOs: 1-1171 is changed relative to a respective reference level for SEQ ID NOs: 1-1171, thereby determining an increased likelihood of response to treatment with an anti-integrin therapy or other IBD therapy for the subject; and
(c) treating a subject who has been determined to have an increased likelihood of response to treatment with an anti-integrin therapy or other IBD therapy with the anti-integrin therapy or other IBD therapy.

29. The method of claim 28, wherein the nucleic acid level of the one or more of SEQ ID NOs: 1-1171 in the sample collected from the subject are measured using amplification and one or more pairs of primers specific for each of the one or more of SEQ ID NOs: 1-1171, and the amplification results are used to determine whether the level of one or more of SEQ ID NOs: 1-1171is changed relative to a respective reference level for SEQ ID NOs: 1-1171.

30. The method of claim 28 or 29, wherein the method comprises measuring the nucleic acid level of at least two, at least three, at least four, at least five, at least six, at least seven, at least eight, at least nine, at least ten, at least fifteen, at least 20, at least 30, at least 40, at least 50, at least 60, at least 70, at least 80, at least 90, at least 100, at least 110, at least 120, at least 130, at least 140, at least 150, at least 200, at least 250, at least 300, at least 350, at least 400, at least 450, at least 500, at least 550, at least 600, at least 650, at least 700, at least 750, at least 800, at least 850, at least 900, at least 950, at least 1000, at least 1050, at least 1100, or at least 1150 of SEQ ID NOs: 1-1171 in the sample from the subject.

31. The method of claim 30, wherein the method comprises measuring the nucleic acid level of all 1171 of SEQ ID NOs: 1-1171 in the sample from the subject.

32. The method of any one of claims 28-31, wherein the reference level is a pre-assigned level.

33. The method of any one of claims 28-32, wherein the reference level is a level in a set of samples from a reference population.

34. The method of claim 33, wherein the reference population is a population of healthy subjects.

35. The method of any one of claims 28-34, wherein the nucleic acid level is a DNA level.

36. The method of any one of claims 28-35, wherein the change is a decrease relative to the reference level.

37. The method of claim 36, wherein the levels of at least 10%, at least 20%, at least 30%, at least 40%, at least 50%, at least 60%, at least 70%, at least 80%, at least 90%, or more than 90% of the sequences for which a level is measured are decreased relative to a respective reference level for the sequence.

38. The method of any one of claims 28-35, wherein the change is an increase relative to the reference level.

39. The method of claim 38, wherein the levels of at least 10%, at least 20%, at least 30%, at least 40%, at least 50%, at least 60%, at least 70%, at least 80%, at least 90%, or more than 90% of the sequences for which a level is measured are increased relative to a respective reference level for the sequence.

40. The method of any one of claims 28-39, wherein the sample comprises a sample of the microbiota of the subject.

41. The method of any one of claims 28-40, wherein the sample is a fecal sample.

42. A method of treating a subject having an IBD, the method comprising the steps of:
(a) measuring the nucleic acid level of each of SEQ ID NOs: 1-1171 in a sample collected from the subject, wherein a level of at least 50% of SEQ ID NOs: 1-1171 that is changed relative to a respective reference level for SEQ ID NOs: 1-1171 indicates that the subject is likely to respond to treatment with an anti-integrin therapy or other IBD therapy; and
(b) treating a subject who has been determined to be likely to respond to treatment with an anti-integrin therapy or other IBD therapy with the anti-integrin therapy or other IBD therapy.

43. The method of claim 42, wherein the nucleic acid levels of each of SEQ ID NOs: 1-1171 in the sample collected from the subject are measured using amplification and one or more pairs of primers specific for each of SEQ ID NOs: 1-1171, and the amplification results are used to determine whether the level of each of SEQ ID NOs: 1-1171 is changed relative to a respective reference level for SEQ ID NOs: 1-1171.

44. The method of any one of claims 26, 28, and 42, wherein the IBD therapy comprises an anti-integrin therapy.

45. The method of claim 44, wherein the anti-integrin therapy targets integrin α₄β₇.

46. The method of claim 44 or 45 wherein the anti-integrin therapy is vedolizumab.

47. The method of any one of claims 26, 28, and 42, wherein the IBD therapy comprises a biologic therapy, an anti-inflammatory agent, an antibiotic, or an immune system suppressor.

48. The method of claim 47, wherein the biologic therapy is vedolizumab (ENTYVIO®), infliximab (REMICADE®), adalimumab (HUMIRA®), golimumab (SIMPONI®), certolizumab (CIMZIA®), risankizumab (SKYRIZI®), or ustekinumab (STELARA®); the anti-inflammatory agent is a corticosteroid or an aminosalicylate; the antibiotic is ciprofloxacin (cipro) or metronidazole (Flagyl); or the immune system suppressor is azathioprine (AZASAN®, IMURAN®), mercaptopurine (PURINETHOL®, PURIXAN®), methotrexate (TREXALL®), tofacitinib (XELJANZ®), upadacitinib (RINVOQ®), or ozanimod (ZEPOSIA®).

49. The method of any one of claims 26, 28, 42, and 44 to 48, wherein the IBD therapy further comprises treatment by fecal microbiota transplant (FMT).

The application's sequence listing, which the Patent Office published only in electronic form, follows.

SEQUENCE LISTING (1171 sequences)

SEQ ID NO: 1 - DNA, 10862 bp, unidentified
  source 1..10862: mol_type = unassigned DNA
atggaaaaaacattgaagggcatagtacaatatgctcgtaaaaactatttcagctattgggctattcttgggattgacacagcactgtctgttttatgttcattactcgcctatgctgtaattcactacatggcatacgtcccgatgagtgactggatactttgcaaatttatttgcgtgtctttggtgtcaagtgttgcaggagccttattattccatacttatcgaaatacgatccgtttttctcaagcacgagagttatggcgtattatgtgtgccgtattattcaagatagcctgtttgtcggttattgcatattgggtaatctatgagactgaattaccggataattataggatatcttatcttttgtttgatggtttattaactctggtaacattaactgtttttcgtgtatctcttataatcatatatgattttttattggattgggtaaataaaaagaatactcgtattcttatttatgggattgatgaaaaaagtgtagccttaaaacttcgtcttcgtgatagtgcgcattataaggttgtaggtttttatatttatggtaaaaataatcgtagacgtcgattggcagatcttcctatttattattttgaaacagaagaagactttaattatgtcataaaaaaacatggtattcatggcattttatttgctcgttatgaagatacccgcttggaggagaaccgccttttagagtattgtaaaagtaatgctgtcaagacttttattgctcctactatcagtgaagcggattctgacgggaactttcatcagtggatacgtcctattaaaattgaagatttattgggacgtgctgaaatcaatataaaccttagtcaggtcgcagaagaattcagaggaaaagttgtattagtgaccggtgctgcaggcagtatcggtagcgagctttgccgtcaattggtgcaaatgggtattcaaaaactcatcatgtttgactctgcagagactcctttgcataatgtccgtttggaatttgagaaaaattatcctgctatcgattttgttccggtgattggtgatgtacgtgtgaaagaacgtgtgcgtatggtattcgaactttatcatcctcaaattgtcttccacgccgctgcttataaacatgttcctttaatggaagaaaatccttgcgaagctgtacttgtcaatgtcacgggttcgcgtcaggtcgccgatatggcggtggagtatggtgcagaaaaaatgataatggtttctaccgacaaagctgtgaacccgactaatgtgatgggatgttccaaacgtttggcggaaatctatgtacagagcttggggtgtgctatccgtgagggaaagataaaaggacatactaaatttattactacacgttttggaaacgtattaggcagtaacggttctgtaatcccgcgcttcaaggaacagattgagaacggtggtcctgtcacagtgactcaccctgatattattcgtttttttatgacgattcccgaagcttgtcgtttggttatggaggctgttacaatgggagagggtaatgaaatctttgtctttgaaatgggcaaggccgttaagattgtcgacttggctacccgtatgattgaattggcgggttatcgcccggatgaagatataaagattgaatttactggcttgcgaccgggtgagaaactctatgaagaagtgctgagtgataaagaaaatacgattcctaccgagaataaaaaaattatgatagctaaagtacgtcggtatgaatatgctgatattcttgatatatatgcggagtttgagaagttgtcccgtgctgtgcggattatagacacggtcagattgatgaaaaaagttgttccggagttcaaatcgaagaattcgaaatttgaggtactggataaagaataataaacttgagaaatttatgtataatttgttttgtatttgtgcaagtagagtaagtagaaaggggaggggggtatttccctgtttagttgcgatattgctgttcgcttcctgccagtcgtataagaaagttccttatttacaagatgcaaaagttgtagaacagactgctcaacaggaaaatctatatgatgcaaagataatgcctaaagatctgcttactattgtagtgtcatgtaccagcccggaattggctgttccgtttaacctcacggtagctactcaaaataatgtagctataaccagtacaacctcccaaccgatattgcagcaatatctcgtagataacgatggaaaaataaattttccggtactaggtgagttgagggtaggtggcttgaccaagaaagaggcggagcaactgattgtggagaaactgaaaccttatatcaaagaaacgccgatagtcactgtccgtatggtaaactataaaatctccgtattgggtgaggttgcccgtccgggaacttttactatcagtaacgagaaagtgaatttgttggaagcgcttgctatggcgggtgacatgacggtttggggagttcgcgacaatgtaaagctgattcgtgaaagtgctgatggcaaacaggaaattataacactggatttgaacagtgcggagaccattctttctccctattactggttgcagcagaacgatatcgtttatgtgactccgaacaaggcaaaagcacgcaactcggatattggtaacagtacaagcctctggttctccgctacttctattttagtgtcattggcaagtttattagtaacaattttcagataatagcattgtatgattgatgaaagaaaagataaattaggggaacagtccgaagaacaggttaatattcaggaacttcttttccgttatctgattcactggccttggtttgtagtatcgataattatttgtattgcttgtgcatggggatacctacgtctgacaacacctatatataatatttctgccactgtccttattaaggacgaaaagaaaggtggtggtgcaagtatgtcttccgatttagaaaagatgggattggagggtttcgtctcttcatctagcaatgtagataatgaaatcgaagtacttcgttcaaagtctttgtccagagaggtggtaaacaatctgggactgttcgtgacttatatggatgaagacgaatttccaagcaaagagctttatcatacatctcctgttttagtgagtctgactcatcaggaagcggataaacttccgggtagaatggaaataaatatgattcttcaaccaacgggtgcgttgggggtacaaattacagtaggcgaaaaagagtaccggaaacagtttgataaattgcctgctgtatttccgacagatgagggtacggttgcttttttcgcaaataacgataccttgtcagcagtttgtccggaaaatataaccaaagaacgtcatatcacagcttttattaacagacctttttctgtgttgaaagaatatgttaactctttgtcaatagcccccacttcaaagactacttctgtagttgttatttcactggaaaatacaaatacccggcgtggtagagattatatcaataaactgcttgaaatgtataatatcaatgccaataatgacaagaatgaggtggctcagaaaactgctgaatttattgacgaacgtattggtattatttctaaagaattaggcagtacagaacaggatttggagaacttcaaacgtagtgcgggaattactgatttgagcagtgaagcacagatagccttgacaggcaatgctgaatatgaaaagaaacgcgtggaaaatcagactcagataaatctggtgatggacttgcaacgctatatgaaaggtaatgaatatgaagtattaccgagtaatatcggcttacaggatgcagcatcagccggtgcgatagaccgttataatcaaatgctggttgaaaggaaacgtctgttgcgtacttcgacggagaataatccgaccataatcaatctggataccagtatccgtgcaatgagaaccaatgtgcaagctaccttagatgctacattgaaaggattgcagattaccaaagaagatctggctcgtgaagcaagccgttattcccgccgtatcaatgatgcgcccactcaggaacgccagtttgtaagcattgcccgccagcaagagattaaatcgggtttgtatctgatgttgcttcaaaaacgtgaggagaatgccatcactttggcggctactgccaataacgcgaagattattgatgaagcgttagcagatgacaatccgatttctcccaaaaagatgttggtttatttggctgctttagtcttaggtgtgggacttccggtaggagttatttatctgataggtttgacaaaattcaagattgaaggtcgtgctgacgttgagaaattgacttcacttcctgttgttggtgatattccgttagcagatgaaaagactggttctatagcggtatttgagaatcagaataatctgatgagtgagactttccggaatgtccgtactaatctccagtttatgcttgagaatggtaagaatgtaattctggtaacttctactatcagtggtgaaggtaagtctttcatatctgctaatttagcaattagtctttctttattagggaagaaagtggtgatagtaggactggatattcgtaaaccggggttgaataaagtcttcaatatacctaaaaaggaacatggtattactcaatatctgacaaacacaactgcgaatttaatggattttgtgcagccttctgatataaacaaaaatctgtttattcttcccggtggtacagttccacctaatccgacagaattattggctcgtggagggttagagaaagccattgaaacattgaaggcgaattttgattatgtgatattggatacagcgccggtgggtatggtaaccgatactttacttataggacgtgtcgcagatttatccgtatatgtatgtcgtgctgattatacccataaggcagagtttactttgattaatgaattggctgaaaataacaaattgcctaatctctgtattgctatcaatggtttggatctgaacagtaggaagtatggttattactatggctatggaaaatatggcaagtattatggttatggaaaacgttacggttatggttacggatatggagagaagcatggaggtgaaaaataattaaatcaaacaaaatatgcgtgattttaaagacattaagattgccgtagccggtacgggctatgtggggctgagcatagcaacgctgctatcacaacatcatcatgtaaccaccgtggatgtaattcccgaaaaggtggaaaaactgaataataagatttctccaatccaggacgattatatcgagaagtatcttgctgaaaaggatcttaacctcacagcaactctcgatggtgccgcagcttacaaggatgcagattatgtagtaatcgctgctccaactaactatgacccacagaaaaactttttcgatacacatcatatcgaggacgtgatcgacctcgttttgagtgtgaatcctggtgcagtgatggtaatcaaatctactattcctgtaggatattgccgttcactttacgtgaagtatgcgctcaagttcttgaccgatccttcactcaagggcaagaagttcaatttgcttttctctccagagttccttcgcgagagcaaggcactttacgataatctctacccatctcgtatcattgttggctatccaaagatattgccggctgatcgcaataagaagtgggatgaggaaaatgcatctattgaggcaattagtaatgctgacgctgagaaaaatgcaaaaacatttgccgcactccttcaggaaggcgcaattaaggaaaatattgatactcttatcatgggtatgactgaagcagaggctgttaagctatttgctaatacgtatcttgcacttcgcgtgtcttatttcaatgagttggatacttatgctgaagtaaagggcttggattctcaggcaatcatctcaggtgtagggctcgatccacgtatcggaacacactataataatccttcattcggttatggtggctactgcttgccaaaagatacaaagcagttgttggctaactatgcagacgttcctcaaaacatgatgagcgctatcgtggagtcaaaccgcacgcgtaaggactttattgctgatgaagttcttcgtaaagccggttactataccgccaatagcgactggaatgaatcttcagagaaggaagttacagtcggtgtattccgccttactatgaagtcaaattctgacaacttccgccagagtgccattcagggcatcatgaaacgcgtaaaggcaaagggtgccaacatcatcatctacgagccaacacttactgatggtgaaacattcttcggctctaagattgtcaacaaccttgatgaattcaagaaactcagcaatgctatcattgctaatcgctatgataccgcattggatgacgtaaaggacaaggtttacacacgtgacatcttccagcgcgactaaggatttccaaaaacaaactataaactaacatggccaatttccaatatcacatattctcaccttaccgtgtttgccctgatgatggtgcaaaatttgttgaggaataaaaatctctaattcgagacaagaaaaatcaaagaataccagctgcatcatgtgtcatgagcaaccatctatagagaaactccagcgcactggagtcattgtcgttgatgacaacatgcgcgtactcaatatgtaagaaaaaccgcaagagccaaaatctcattgggctgttcctccattctatgtatattttaaaaaaaaatttgggccttgtttgcaattcagttgctaatggttgtggaaaggatgccccaggcaatcttgcccattacatggttgacaatactaaaatgcatgcatggaaaatgtcagcaggccgtttcaacatcggatctctcgatacttactatgaagcagtaaaaaaatacggaaaataaacatggtaaaatttaatttagatttaaacggaaagactattttggtaacaggtgctgctggatttatcggtagtaatcttgcaaaacgtcttataaacgattataaagatataaaggtaatcggtcttgataccatgaccgattattatgatgttaatattaagaaagagcgtcttcgtggaatagaggctcttggtggcaattggtcattcgtggaggaatctattgcaaacaaagaggttatcgataaaatattcacaaaaaatcggatttcagtagtagttaaccttgccgcacaggctggtgtacgctacagcattactaatccagatgcttatattcaaagcaatctcattggtttttataacattcttgaagcatgtcgtcatcatgaagtagatcacttggtttatgcttcatcgtcaagcgtatatggtagcaataagaaagttccatactctacagaggacaaggtggataatcctgtttcactttatgcagcaaccaagaagagcaacgagttgatggctcacgcttattcaaagctttataatattccatctacaggtcttcgcttcttcactgtttatggccctgctggtcgtccagatatggcttactttggcttcaccaacaagttgcgtgagggcaaaactattcagatcttcaactatggcaactgcaagcgcgacttcacctatgtagatgatatcgtagaaggtgtactgcgtgtgatgcaacatgcaccagaaaaagccaatggtgaggatggattaccaatcccaccatataaggtttacaacattggtaacaattcaccagagaatctccttgatttcgtaactatccttcaggaagaattgattcgtgcaggagtattgccatttgattacgatttcgatgctcacaaagagcttgtacctatgcaaccaggtgatgttcctgtaacatttgcagatacaacaccactagaagatgatttcggatataagccaaacacgccattgcgtgagggcttacgaaagttctctgagtggtataaacaatactatggataatataataaaccatatgagtttatatgtattagcattcaaataaactcatatggtattctggcagcacaggtaggcgaaaggcgaggttcgatacttcctgccagatcaaatataatttgaaatatgaatattcttttaacaggtggagcaggtgctgatggacgtgcagaagtctgatcctgagtggaatgtggtgctgcttcgttatttcaatcctattgacgctcacgagagtggtttgataggtgagaatccgaatggcattccaaacaacctgatgccttatatcacgcaaacggctattggcatgtgcaaggaactgggtatttttggtaatgattacgatactcctgatggaactggtattcgtgacttcatacatgttgtagatttggcgaaaggccatgtatgcgcattaaaggctatcgttgagaacaagaggtataatatagagtggataagtataactagaatgagatccctactttttccacacattcagcaatgattactctcaaaattaaattgctataggtaggatctcattcttttacttattatgataagaaatagggaagatcttaggttttatttaaaagaagacatgtctcagtattctttgtctttttggaaatatattgcttatcttatttatggatttgaaaatgcatatatagaaatatttaaggcttttgagatactgtgaatatcattataattgtcaccacaaaataagatttcatttatataatattaggagacaacatttgggattgaaattaaacattgacattccattaaatgtttgtggttatggcttacgtattcgtcacctttctggtggtggtgggattttactaaatgctagaaaaataggaaattattgctcttttaattcgggagttttgttaggcaacaaggatgataatagtaagaaaccgatattaggtgaacgtgtctcgtttggtccatctgctaaagcctttggtgatattgtaattgaggacgatgtttttgttgctcctggtgcaattgtaactaagtctgttagtaaatcacagattgttggtggaatacctgcaaaactattaaaaaacaaatagattcatatatgaatagatattttttagatgatcaaaaagctcctttgaaaaaacttatatggcagatattcttcgtttttttcttcgtttatgaagttcaaccatttggagtgcctgacatgttgacttcgcgaaagatagttttttacattgctggttttacatttattacaaggtttttaaagcgttttaattcaaagacctttgatgatgttaattttaaaaggacatcaaaaaaattaatttcgattggttttgtcgttttcttatggcaaactctgataactttactacattcaggtacaggcagtggtcaacctatgtggggtaaaacattactgtttttgttattaacttcatttttttgtaccttttcttatttcttttttaataatattaaacagtttctacttgcgatgttttacgcaactgtgattcaatcagttatttgcattgcagatttcttttcatttgaagtgaaagtgtttctttataaccattttatggttgatgcaaattttggttatttgtctagctcaagagcttacggtttaggcgccgcagagtcactgttggctataaatctttttttgggtcttgttccaactgcaattttgatcattggatgttcaaaaaatgtattttatatttttggatatattgcaatattatttgctgctttattggtgggttcaactggttttattttgggaattctattgctaatcttgactataggcttagtctttatttatggtagtttctaccaaaaatcaagcttagcaattattggaacagttggtttttttatcttgttttctttggcagctgtgtttttttcagatattgaagagtttggtaattttcataagatattagcctttcaagaggttggaattgaaaatcaaaatacagttcatactttaagagaacaagctgtagctcctatttgtctgcatactttattgggaacatcatattatcgtggaacggttgatggattaacaacaatgtcggacactggctatttacaatcatattttggaaacggcttaatcttaactcttgttttttatttttatttatatcgacttatgtttataaatgttagatatataaaaaatcgagttatttgtatattattggggtttctttttctatctattgtttttgcggaaggaaaagaaccttacatttatcattatggtaatacctttgttttctttttagcttgtttcctttcgaataaacctcataaacagttgattaagtgatatgattagtgtcattgttccaatatataatgttgaacgttacattaataaatgtattgattctattattcatcagtcttataaaaatttggaaattattttagtcgatgatggatctcctgataaatgtggcgaaattattgatgagtattcaagaattgataaacgaattcatgtaatacataaatctaatggaggtttaagttctgcccgaaatgctgggttggatattgcttctggtgattttattggttttgttgatagtgatgattggattgagcctaccatgtatgaagaaatgctttcatttatggaaaaggaacaattggaccttgttgagtgcggaataaatttggttactaataatattagtaataaa

SEQ ID NO: 2 - DNA, 27183 bp, unidentified
  source 1..27183: mol_type = unassigned DNA
cttttagctcagttggtagagcacctgactcttaatcagggtgtccagggttcgagcccctgaaggcgcactaaggacactgtttttgcggacattgcgattgccgcggggacggtgttttttgttgttttacatcagggtaattcagtatgatttttgagatacagggattgacatacacagatttaagaagtattataacaataaccaaagaagtgatgatacaagatagtacaatgaaaccccatggaggaccagtccatggggtttcgtttacgctagctgtcgttacgattccgatctaaccatttgcatatgtagtaaccaactacacttgccgcaatcgaaatcaaaaaagtgatgataatatccaaaatagtacacctccttcctgctggaaagagtcgacagcatgattattatatcccgattattagcagatctccagaacattatggactccatttggccagggtgtccagggttcgagcccctgaaggtgcactaagaacactgtttttgcggacattgcgattgccgcggggacggtgtttttttgttgcaattagcatttgctcagagtagaatagtgaaaaatcagcaaacactgataaatgaaagaatatatttttatataaaaacccagatattttttgcggaaaagatatgatatactaacacacaagaaaaatgtatgagaggaaacggaatgaaaaacctgaacaatacagagggaatcgactttgtgattacctgggtagatggcagtgatcctgcgtggcagcaggaaaagagaaagacgcttgaggcttgtgggttgaagtcagcggcagatgacagaaaagagagatacagagactgggataaccttcaatactggttccgtggtgtggagcagtttgctccgtgggtacgtaaagttcattttgtgacctgggggcatcttccggaatggctgaacacatctgcaccgaaactgaatatcgttaatcacgaggattttattccagaagaattccgccctacatttaattctcatactattgagtggaacctgcacaggattcagggattatctgaacgcttcgtctattttaatgatgatatgtttctgctggacaaggtaaaaccaggggatttctttcagggggaaaagccggtagatatgcttgccctgcagcctgatgtggcaaatatagataatgcagttatgccgtatatttatctgaataatgccatggttcttgcaaaatattttaagaaatatgagaatgtaaagaaacagccgggggcatattttcatataggctatccgccgatatattttttctataattttatggagatggcatttccgagatttaccggtttttatacggttcatggtgcttcaccgttgaagaagcagacattcgaaacactgtggaagctggaaccggaacttctgacaaaagtatgcagtcatgcttttcggcataaagaagatatcagccagtatgtacttcgggagtatcagaagttaaaaggtgattttgtgccaagaaatatccgtaaactgtgcagttattatgatgtttcgcagaacaatgaaaaactgcttcgtaccattaccgaacacagaaataagatggtctgtattaatgacagtaaccatgaaatagattttgaaaaggcaaaaaaagagattaatactgcactggaacagagactaagccaaaaatcttcatacgaaaaataaaaggagcacggaagaggaagaataatgaacatcctgttggtgggaggctcatgcagcctgatggacagtatgatcctgaaacttcgaaaagaaggacacaaggtatatatactgaccggagataagtataaacataataaatatgagagagtatttgaaaaatatgaatttccatatgacacagaaaatctaaattctatttttgaaagtgtcaatccggatgcgacaattcttatgggtgcttttgacactaattatcactggaatgaagaagagagagaatctgttcgttttgtgtctcatctggtcaacattctggtggcacattctacagttaggaaagggaaacttatttttctttcctcagatgaggtttatagtggaaactatataaatgacattgaagaaacagaaaaaactctcggatttggaatgagggcagacatcctggcacaggcagaggagatatgcgagaatttcagaaagaaccgaagtacggatattgtggttctcagactggatcatctgtattgcattccgagagacaggaaagatgtaaataatatttgtgcccggatgtgtctggaatgtctgagtgagggatacatcaaagccgacacagaccatacgttttcactgttgtttgaaaaagacgcagtagaatatatttataaagttgtcagtaccggaaaacatgaatattcgctttatcagctttcttccaatgacgtggtcagtgagctggagctggcagccatggtacaggagcatatggcggacagtgccaatattgtgacttcatctggaggtatcggccgttgtgtcctgtccggaacacgattcgagaaagaatacggtgtacatgcctttggtgatctgaacagaaatattgaaaaaatggcagcgtatatgcagaagcacaaggctgtttttgtaaatgaagataaactggaacttccatggtggaaggtcttgtggaaccaatggaaatggctgctcagtgttctgtttccgtttgtggagaatctgatttgttttattccgttctttatgatgaataacagaacggtaggtagccgatatttcgcgaacctggatccgtttcttctgtatgttctgctatttgcgatcgtgtatggacagcagcaggcaactttttctgcaatatgtgcagtggctggatatatgttccggcagatgtacacgcggagtggatttgaagttcttctggattataacacttatgtgtggatcgcacagctgtttattcttggccttgtagtcggatatatgcgggatcagatcaagactatgcgtatggaaagcgaggagctggaagttcatctgtcaaggcagattgcagatatcaaggacattaatgaaagcaatgcccgcctcaaaggcgttatggagcagcagctgatcgaccagaaagacagtatcggcaagatttatacgatcacacatacactggatcagtatatgccggatgaggttatgttctatgcggtagaaatgctgatgaagctgatgaggaccagggatgtggcgttgtacaatgtcgtcaaccaggattatgctcgaattttctcagcaagttccgccaaagcaagaagtcttggaaattcaatccgttacagggaaatgacagaagtgtatgaggaactgacagaagaaaaggtttatatcaacaaaaatatggatccacgttaccctctgatggcccgtgctatctatgagaatggagatattaaaatgatcatcatgctctggggactcagttgggaaaaaatgactctgggacaggcaaactttcttactgtagtcagttatctgatccagaatgcagttctgagggcacagcgatatatgcaggcactcgaggagaatcgatacagtgaagaaggatcgaggattctcagagaggatgcatttaaaccactggtgaaagcctatatggatgcagaagcaaaagatctggcagaatgcgtatttctgaagatagatgccgatccggaacagtacagacagatagatcagcttatggcaaaaaaactgcgagacagtgattatcttggaatccttccagatggaaagttatatgcacttcttgcaaatacaacaaaagaaaatgccggttttgtgcaggaaagatttgaacagaatggctatagtacagaaattgtggagaaaattgcagtatgtccggaagaatgaagctgtttacaattttacttattctgaatcttctggtggttgtggtgtatcttatctggaatcacctcagaagaaaagaaaaaagcttaagtacatggatgaaagcaggaatgatgctgttatgtccgattgtaggaccgacctttgtgtttgtggcattctggtttagcagattctttatgaggatgcctatggatctttctgatgtggtattcagtaaggaaagggtagaaacattcatacgtcctgatgaagagacagaaaaaaatatgatttcacttgaagaagcactggaagttaccgacaaaaaaaatcttcgtagttttatccttaatgtaattcgcggtgattataaaaattcactgtcatccattgcattggcattgaacagtgaagacacagagactgcacattatgctgcgtcaattcttcaggatgtgctgagtgattttcgtgtcggtgtacaggaaaaataccgtaccctggacgaagacgaggagcatatcgcagagaactgcgttaatcttctggaatatatgaatcctgttgttgaacagaaggttctgactgatctggagcagcgttccatggcagagcgtatggatgaagttctgcagaaggcatggacggcagacagacagaagataagcagttccgtctatgagaaggtgtgtcagagacttcttgagactgaagattatgaaaactgtcgcaaatggtgtgcccgtgccagagagcagtatccggaggctctttccagctatacctgtcagctcaagctgttcttttcctgcgacgaccgggaaaattttttccgtgtcatgcaggaactcaaagaatctgatattacgattgataatgagacactggaacttatcagaatatttatgtagaggatgaaattaaagtgatggtttcaaagaggaaatttttcagtattgcgatcatgatgtttgtcttattttttctgtttcagttttccatggtgctcagggacagcaagaacacctatgatataaattccagtcttacaaagaaaaaggccgatggtgagaatcagtggacaccttccgacagtgtaacaggggctgacagttctgttgtttttgttggaaataaggctggcgatatgggaacagctgtcagcagatggtgtacttatgccaaacgaaaactgatctcctgtaaatccgtaagtacatataaatcagatgacaaaaatctaccggaaatgatgattctggaatctgagaaatatgcagatggcgacaaccttactacactggaaacactggaaaagaaaggcgtaattattgtcttcggctgtctggaaaacgcaaaaaatattcagaataacaaggctttgatgaaatttcttgggattcagaaggttgttgcagaggaaacgcatcttgcaggtgtgaagctgtttgaaggactgctccttggaggagaagtgacctataatacatcgaaagataaagaggaaaagaaacgtcaggatctggaactcgatgttccctggtatcaggtaggaagcggaaccaaaacctatatggtgggacttcttgatgaaaaaacaggaaaaaatgttgaaaatgaggatcttccgacaatcatctggcgaaatggaatagattacggaagtgtctttgcggtagtcggagattatatgaaggacagcacagctcttggacttctggatggaatgcgggcagaagcactgcaatatacaatttatccaatcgtcaacgcacagaatctttccatggttaattttcccgtttttgcagacgaaaacaatactgaaatgctgaaactatacagtcaatctgtaactggtattgcgagagatatcatgtggcctgcattgatttctgttgtcgagaaaagcgatatgaaaatgacctgtttcattcagccgcaggcagattacacagacgacatagaacccaaatccgggaacctggagttttatctgaagcagatgaaggagcagagtgctgaggcaggaatctctctggaatatcagaagctggacaaagcggaagataaggtcacaaaggatacggagttttttgaaaaggagaagataaactatcgttttggtgcagcgtttgcaaaagaaaaagatctgaaaggaattctgaaagacacggattccggtcttcttggagatgtcggaactctggtctgtgactatacagagaaccagccggtggtctcttattacagtgattctgtaacattacagactgttacaagtgacggtatgaattacgcctacagtgatgatatccggatgcgaagcattcagaccgcgcttggatatacaaatgttatgctggatatgtatgatattttctggccccaggaaaaaacggaccgatgggaagtcatgcagaagcgtttttccagtaaccttctgacatattggaaaaatttcagagattttgacagcaccactctttctgagagcaatgcaagaatcagaacgttccttaatctggtatatagtcagtctcgagaagataatacgatcacgcttcagacatcagaggtgggaagctggtttatcttaaggacgcatggcgaagaaattgatgagattgacggcggcagccagacagaaatagaagcggatgcatatctgatctgtgccgaagatactacagtaaaaatccgtctaaaagagcaggagctttactatgatacccgcaaaaactgatgtagagagaggtaagacatgaaggtttgcttagtggcagagggctgctatccatatgtggtcggtggtgtttccggatggatcaacagcctgatcaaatcctttccaaatatagaatttatcctgcttgcaattgtggcaaacagatctcagagaggaaagtttgtgtatgagcttccgaaaaacctgacacaggtatatgaactgtatctggacgactgtgagtgggatgaaggaagaaaaacgagaaagaacagaagaaaatcccgtctttccaggaaagaatatgaagaagtcctgaacatggttctcaatagaaaaaccgactggggagttgtttttgatctgtttcaccatggcggcatctctgtggacagctttctgatgggaccggacttttttgagattgccagagagtgttataacagacagtatccgaatattatattttcagatttcctctggacactccgttccatttatctgccactgttctgggcattaaagatggatgtgccaaaagctgatctgtaccattgtgttgctaccggttatgcaggtgtactcggaagtatggcaaagcatttccacggaagctcgcttctgatctccgagcatggaatctatacccgagagagagaagaggagctgatcaaagcacagtgggtaaaaggtgtttacaaaaatatctggatcgaacagttcaagaagatgtcacttctggcgtatgataaggcagatgctgttacctgtctctttgaacgtgccagaacgcttcagatggaactcggttgtccggaagaaaaaattcaggtgacgccaaatggaattgatgtagatggttttgcagatataccaggcaaaaatccagaagaacagatgatcaatataggagctgttcttcgtgtcagcccgatcaaggatgtaaagacgatgatacaggcatttgcttttgccaaaaaaagtgtgccgaagttaaaactctggatcatgggtccgaccgatgaggatgaaaaatatgcacaggaatgttttgaccttgtggattctcttggagtatccgatattgaatttacaggaagggtcaatgtgaaagaatatctagggaggatggattttacgattcttaccagtatcagtgagggacagccgctgacaattctggaaagctatgcggcacataagccgacgattgcgacagatgtcggaaactgccgggaactgatctatggcaatgatgatggatttggagcagcaggtattctgacccacatcatgaatctggaggaaatcgcccaggcaatgatagaccttgccatagatccggaaggacgggaacagatgggtgaggccggatataagagggttacttccttttaccggattgagcagatgaaggaaacttataaagagatttaccgtagatttgcagaggagcagcaggttgaatggacagaagaaccctttcaactgaaacgatagaaaacaggatggagacaggataatggctggaatcggtgttaaattaaacaatatatatggaaaaagaacgctgacaacaaatatcatcggcatgggttacagtacggtcatgaccattgctccaatgcttaccgtgattggtgcactttgtattatggagcattttcttggctttgattcagtcggatatgctacgagagagttgttctcctgtacagtactgtatatctttatattctcgctccttacagcatcgccgttcaactctgtattatccaagtacatgtcggatatcatctatgaggaaacctttgaggatatccttccgtgctattatgtcgggatgatcctgaatattacattcagtgcactttttggaatttcgttctgtatccacgagtatctggtgggaaatgtggatatcatctatgtttttaccggatattgtggatttgttgccttggtactggtgttttattctatgctgtacctgtcgatctgtaaagattataagaaaatttcctttttcttcatgatcggtatgactgtgacagtactgttgtcttttctgtttgtaaaagtcattcatatgagtatcacctatggaatgcttcttgcactggccattggtttctggctgatcgcctgtctggaatttgctctgatacgaagctatttccgggagaacagcggaagataccgaagggtatttcactatttcagagagtactggccgcttgtgcttactaatttcctgtatacgctgggactgtacatccataactttgtattctggacgacagaccttcatatggtgatagtcagaagctttgtatgtgtgacgacctatgatatggcaacctgtcttgcgatgttcacaaatatttctgcgagtgtgatctttatcagcagggtggagatgaacttccatgaaaggtacaaagcgtactcggaagctgttatcggaggcaggggagccgatattgagatcaccaagaaacgaatgttccggcttctggcagaggaactgttaagtcttgccagaatacagttcattattacgctggttattttcctgttatgtatgatctttcttccgcaggtcggatttgggggcatgacgcttcgaatctatccctgccttgcagcaggatatttcattttgtttttgatgtatgcagagattatttttctgtattatttcgatgattttaagggttctgtacttaccggtctgtccttctgtatcgggacattgatcgggagcataattgctacacactttccggatatctggtatggaatcggactgacagtcggaagttttatcggttttgcagtcgcgtatcgcaggcttcggtggatggaaaagaacctggatatacacattttctgtaatggacatctgcttcagaaatcaaaaggaagctgtccttcaccgaaggtatttgacagatatgaacaaaattagaggagggaaaaaatgacattgggagatttgttaacgatatttttgatagtgatgggaatttttcttctggtgatggcaatattatcactggcaaagagaaaaatgacggaaccgttctgtcttgcgtgggctattgtatcagtgttgcttgtcatatgcggaattctgatagagccttcagagctggagcggtatgtaagtctcaggattttgatcttaatttttcttataacgattggagcggcatggactctttggttcataagcacacagctttcaatcctgatgagaaagaatcaggaactggcgatgcagatatcccttcttaatcgggacagtgaaagaatgatgaagaaattagaagaactggaaaaaaggatcgaccagcattttgcaggaggtgatgacttacaaaaatgaaaaaaattctttttgtgatcaatacgcttggaggggcaggagccgaaaaagctctgatcgagcttctgaaacatttcccgagggaacagtatgaagtatcactgtatgttcttcttgatcagggagaactgatctctcagattccggaacatgtaaaggttcttaacagggaatattcagatgcctctgttctctcaaaagaagggaaaaaagttcttaacagaaagatatggaagcgtctctggattcggggagcggtgctcagaaatttaccgtttcttctcagaaatacctttgttatgttaaaaaaaggcaagctaagtccggataagcttctctggcgtgtaatgtcagacagtggacagagtatcaaagaacattatgatatggcagtcgcctatcttgagggtggagcgacctattatgtccatgatcatattaatgctgaccggaagtttacatttctccatgtagactatggatttgccggttataccagagagctggacaaaaactgctatccggattttgacaggatttttacagtgtccgatgaagtgaagaaaagctttgtcaaggtgtatccggagtgtagccaaaatacatatgtatttcataacctcatagatcagaaagaaatccgaaggaaagcagaacttccgggaggatttgaagattcctatgatgggaagaggattctcaccgttggaaggctgacagcacagaaggcatatgagatttcgattgatgcaatgaaaatcctcaaagatcatggtgtaaaagccagatggtatgttcttggagagggagaactgagagaaaagctgcagagccagatcaaccgtcttggtctgcaggaagatttcgtgcttctgggagcaaagacgaatccttatccgtattacagacaatgtaacctgtatgtccatgcgactcgttttgaagggaagagtattgcaatacaggaagcacagactcttggatgtacgatccttgtgtcggacagcagcggaaacagggagcaggtcattcagggagaagacggaatgatgtgcagcctgactccggaggcagtcagcagaaacatagaagaactgctgaaaaatccacagaaatgcagagagcttgggcagaaagcctctgttaaattatcatcagaagataaagatgtactgaaactattccaaatttgaacaacaaaagaaagactgagtatatggaaaagaaaaaagaagtattgattattattccggcctataatgaagaaaagacaattacggcacttttggagcagcttgaaaaacctgagatttcagaacttgcagatgttctggtcatgaatgatgcttcctcggattcaacgaactggatcacaaagaagagaaatcatgcagtggtaacgcatgtgtttaatctggggtatggaagtggtctgcagcttggatataaatatgcagtccgcaaaaagtatcagtatgtgatccagatggatgcagacggacagcatgatgtatgtaatattccggctatttataaagcactgacaacaccggataaagacggaacagttccggatattgttctgggatcgcgatttatggaaggaagcacagaattcccggtttccgcggcaaaaaaaattgccttcgtgtggtttcgcttcctgcttcgcagaggaacaggtaaagattttacagatccaaccacaggacttcagggtctgaactggaaaacatttctgttttattccaaatataataactttgacgataagtatccggatgcaaatatgctgatgcagatgtctcttcttggatttcatataagagaaattccggcagtcatgcatccgcgtgttactggagtcagcatgcattccggactgaaaccgtttgtctatatgtttcgaatgaccttctcactcatttcggtgtggatacgggaaaaaatcctcaaaatggatgtagacaaaggatatgatctggaaaaacattaaaaacgaaaacttttaccatacagatgagtttcatctggagtacatatataagggaaaggattagtgaagattgaaacagaaatcgaggacagaatattctgttatgaatacaagcgttgcatttgtggcgcagatatcggcgatcctgatgggattcttcacgagagtagtttttaccagaatgctcagtgaaggatacgttggaatcaacggactgtttaccgacatcttaaatatactgtcattgtcggaactgggggttggaacagcgatcacctatgccctttacagaccgattgcggaaaatgacatttcaaagcagcagatccttatgcgtatgttccggatgttctaccggataactgccggatttgtactggtagcagggatgtgccttattccatttttggatattctgatgaaagaccgtccggatgtagatcatcttgtgctgatctatcttttgtatcttttgaattctgtggtctcatatctgctgatctataaaaaaacacttatagatgcacatcagatgaattatatcacagtgttgtatcataatgggtttctggtgctgcaggatatctgccagattattatactgatcacgaccaggaattttgtgctgtttctgattgttgcggtagtgtgcacgattacaggaaacgtcttcatgtccagaaaagcagatgcactgtttccttacctcaaagaaccctgtcatgaaaaactgccacaggaagaacgacaggatatcttaaaaaatgtcagagccatgcttatgcataagcttggaaatgttgtggtcaacaatacggataatctgttgatctccagttttgttggcgtaattactgcgggaatttactcgaattattatctggtgataggttccatccgacaggttctggatcaggcactgcagggtgtggcagcaagtgtcggaaaccttggagctacagaagattccgagaaagtgagcaggatttttgaccagttattttttatcggttactggatatatggctttgccggaatctgtctgtttgaactgctgaatccgtttgtggagctggcctttggaaaacaatatctgtttcagcgggaggtagtgcttgttctgtgcattaatttctttgtcaacggaacaagaaaagctgtgctgatatttaaggaatctatgggactgttctggtatgaccgttacaaagcaatcgcggaggcagtcctgaaccttggaatttcgattcttctggttacacattttggtgtggttggtgtttttgccggaaccttctgcagcacagtgcttacgtctgtatgggtggagccttacatcatttatagatatcgtttccagaaaccggttcggaagtattttggaagatacagcttgtatcttatcgttatggcagttgcctgggcagttacagaattttgctgccagatagtcaatggaagtgcagtttttaatctgttttacagagcagtgatctgtataattgttccgaatagtttgctttggctgatatttcgaagaacagaaaactggaaaaaaacatcaggacttttgtgcagggttattactaaggtatatagaagagttcggaaataaaaataggaggctgataattagaaaatgggatactggattggtgaatttgtgaaggtccttattggatatatttttctgatgtatttatggcctactgttgtttttagaaaaaaattagcgggcaagaatctgacctatcgatttgcattttgttctacaatttcaattttactgattaatacgattatactgggtttgggattgttccatatattaaaagggcggatcgtactctgtgtcttttatggagtctttttgttgtctatcttgaaagaaagagatttatggaaatattttcttttacatgtcagaacctttttttctgggacgcagggatggaagaccttaattctttgtttgatacaagatatagtaagtggtgttggtggttttttgaaacgagtaaataaaaaagtaaaaggtagaagattggaatatggaattctaattgtccttcttggttttgctgttatttatttttcttatggtgcttttaattgtccttcatatggctggggagatatgtatgttcatcatgcatggatttatgggctgaaaaaggggcagattttttctgcgggagtttatccagaagcaatgcattgctttatttatgctataaatatcatgtttggaatacctatatatagctgcctgttgtttctgggagaaattcatgttgttactttgcttgtggcagtgtattgtttgctgcgagaagtaatgaaatcaaaatatacggcatatttcatattaactgcatttttgacgttagatgttgtgtgcatagatgagatttatggaatatcaagattacagtacacaattccacaggaatttggattgtatacgcagttcttgtgcgcattatatctgattcgttttttgagaagagattcagaatctgacagaaaatttaatgatgatttatttttatttatgacagcattggcatcctctcttgccattcatttctatgttacaattatggcgttttttctatgtgcatcttttgcagtttttggcctcaccagggtgtttagaagaaaaaaaattttcgcacttataatagctgttattgttggtgttgtgatttcgacgacgcctatggtattggcatttgcatcaggaataccacttcagggatctttgaactggggtatgaatattataaatggtaccgatacaaaagagggaaggactcaggtggtacagagcgaagatgaagaagaaacgtcagaagaagagatgatggaggatacaacagaagaacagactgatcaattagaacagataaagtcattaacagacgtaaagcaaaatgtacaaaacatagaagttgagaaaagaaatccaataaaagagattacagaaaaaataaaatcttttgtacagctcacatatagctgcggatatgtacagctctatggcgtaatgcgggcaggatggctgattaaatttactttgcttgcagtaatccttacacttataaatatgaccgttaaagtcgtacgttttcgggaatttccttttgaaatgtatgcaggaataacctttgcttcggttctttttatgattctatatgcggcaccttttttaggactgcctgagattattgctggctcacgtctgtgtctgacagaacagatattgcttctgtcgatgatggcactttctgttgatgagatatttttcttattaagtaaaacaaaagcagagagactgtttccctgtctgacattgataggagtagcaggaatttatgcaggaacaaattattttggcgtgtaccatggatatttatattatgaactgacacgatataattcagttgtagaacttaccaacgaaatcataaaaaaatatcctcaatataattatacaattatatccacaacagaagaattatatcaagttatagaggatggacgacatgaggaactacttgattttcataataaatcaaagcaggataaatatattatccctacagagtatttgtttttttatgtagagaaaaatccgattgaatacgcacagtatcatttctttgacggcccaagatggcttgcacaggcaaagtatattccgaattataaatattcgacggctattttgagtgagggagatgatattaagcattccaaaattgcagaaaaatatgtagataactcactggagattatggggaaagcatcagatgcttatacaaatattaaaaacagaagaattctggaatcagaagtgtactattggtgtcaggagtttaagaagcgttttccaaatgaaataaaagtttattatgaggatgaagattttatatgttatatagtaaaacaaaatccagaacatttatatgatctaggaatctaatccaatgaggatagtgttcgaatataaagatgggaaaatttctatggtgatttttagatgaaaaaggtttcaagtggaaagatatctgttattattccagtacataatgcggaaaaatatatagacaaagcagtccagagtgtaatggaacaaaattatacaaactgggaattacttttaattgaaaatggatctgaggatgcgagtttggacatatgcaaaaaaaatgctgagaaagattccagaatacaggtgctaaaagaaaaaaataaaggtgccggatctgcaagaaataccggattatgcagtgcagaaggagaatatattgtctttattgatgcagatgattatctgccggacaagagtgtatttcaacgatatatgaatatagcaaagcagataagagcagatattatcgtgagtaattatgtaagactctggaatgggaaaatattaccggcagcagggcatgattcattttcggtatacagtccagattcggaagagttccgttttcggggatttttttccgtaggtacactgtcatatgtctggggaaaactgtatcggaagtcttttctggatcagaataggattactttttcggagtatccttatgcagaggataagttgtttaacatgcagtgttatgtctgtggggcaaagtatgcatttatagaacagatcggaaatgtttatcgcaaaaatgaggactctgtctcttataaatacaatccggaatccagcagatgctggctgggaatcgcacagaccttcaagaactggatggaagaagaggggaaagatgtcgagcagtatgagggactgatacaatatactgttttttttgcctccttttttgacgccaagatggaatatcagaagcgatggaaatcaatatggatgatctggaaaatacttaggatttacggtaatgattctattggaaaagattgttttgcgaaacttgcctgtgatagaaagtgcattcctcagttgaaccagaaaatatggaggattgtaataaagggattttccaggggaatgaaatggaagtgttatctggcattgtcatttgggataaaacaattgatcgaacatagggtagatgaaaaattgtcagatacaggattaagagaataaaaaacagtaactcccagatcaggagtcactgttatcaaagatacgtatcagtttggttttctgattgctttttttgaaattatggagcgtctgtcgtaaagtggtatttcgtattttgtaagtatttcgaatgaaacacaaaaaagtaacacaccacaaaaccggccagagaaccgggcagcggctggctttcggaaagcggaccttcatctgcacatgtccttctttaaagtaagtgatcagattgaccttctgataagaagtacttccaacaagttcactggaaacatccgtgcccatatctccatctttaagaacacggataagaaattccttacagtcctgtgaatcatagtgaatcctggagtcaatatgctgtgggagtccaaaataaatccggcaggtttccagaacaatctcataaagatgactgatgcgggaatcctggcaccagttatgtatcttatgaaaatcgatttcatccgcatgcttcctgaggtaaaaggtaaaatcacacagcagacggataccgaaaccactgtacagataatgcttcagcatatgatggatcatataaaaaacatattccgaaggcggcagaacagagtaggtaaaatcattgatcgtctgtgataccggaacaagattttcaaaggaatacacctgatctacaatctggttggcacgctcatactgatacattccaactacgcgataatgcagttcaagaaggaatctgcgccctgtttttggaaacgtatagtgataggtcagatgatggtcactgagctcattttccgcgatatatccatgggattccagaagtttctgagctttggaaatatcggatttccggctgatataaagatccagatcgccaagcttacgatattcgggaacaggatagcaggaagcaaggctgattcccttaagaaggatgcagtcgattccgttgtcttcaagaagggagaccgtatgacgagtaaactggtcaatctgataataattcagcatcatgctgcgtgtccgctggagcatggaagagtaaaaaggtgtgcctcgaaaagaagacaggacaaagggaaccgtgcagtgctcttcggcaagtcgtgcaaggtcggccagttcttcagatggaatggtgacaggtccttcatgaccggtacaggtatttttgatgatctttaaataatgtttatatgatggctgcatgaaaaactcctgaaaataaatgataatagataactattcagctggaatgcattttgactcataactgtgaggctactgaatagttgtgataatagagtataacacgaagtatttgctaaataaagggggagaatatgaaaaaaacagaaggatatcggatcaggaaactggaggatgaatatgtggttcttccgtttggaaagagagcagaggaagtaaacgaagtaatctctctgagtgagacagccggatttatgtatcttcatgcagaagaagctgactcggcagaggaacttgcagaactggtcagcaaagcatatgaggtagaaaaatccgtagtgtatgaagatgtggtgtcggttgtcagaactctgagggaaaaaggtcttttactttgaccttgtacgtcgcaaaaaagcagtcagtctgaaacaaaaaggacgtactggcagcatcagaagccagagagcagagagaaagcggtatacaggattcctgacagagatttctttcccattgcggacgaaagcaatgagtttgcccctgaactgatccgggcgaagtggtccttcaatctcatactgattatctccggtcatataatagccgttggcagtaacacgaacgatacggtgcagaaccagaattccctgatcgcggcggtagagagccacatcatttctcttaagtgaggtgacaggaacctgctggatcagagcctcatctcttccgggaatgaagaggggatacatgctgaaaccctgtggtttgagacggataatatttccttcctggagaagctgttcgagatctgttttgaaatctcctgtgttctttttcataaaaaatcctcatttccagtgtgattttacattagcaaatacattataatatgctaaagaaaaaaagacaagaaaatggagaaaaatggcttaaataaagggtttgcgggttgacttttgaaggaattctgtataatatataagaaaaaatgacattgaaaaacaatgaaatatgaaccgacgaaagagaggaaataaagatgatgaacacgtacaaaaagccggttgtgactgtagatgcaggaatggcagagggagtttatgccgcaagtggggcagcacagggaacattgaatgttacctattatggtgtatgggacagatggggtacgaatggtggtaaaggccttgcaatggcagactggtctgatctgaacggaacgattactctgaatattacttttaatgatactgtagatcaggctgaaacagatgatgcatccgtacaggcatcctggtcaggaaagactgctacatttacatttgcaagtacagcatctaatccgctgacaatcggaattcacatagaccatggaacaagcattgatgatcttaagatgacaggatttacatattctgtgaattaacaggaaattaaatttataagctgttctgcaggatcaggatagctcaggcacagaacccgcgggttctgtgccttttttaaaattctttcaccatcttctcaatttccacttcgtccagtacctcacacctcttatcgcgtatcgcataaactctcgtacagatatttaataccgtaggacgatgggttgtcacaatacaggtccttggataggtatcctgcatgatgtttttgagaacctttctttcggtggcaacatcaagtgccgaagttgcctcatccagaagaaggatcggagacttgcggagaagtgctcttgcaatagaaagtctctgtgcctgtccctcagaaaaaccaccgccgcgttcttttacaacgctctgaataccattgggaagtttttccacgaaatcccatgcacaggagagtttgagagcctctatgatttcctcatctgtggcatcaggctttacgtttcgcatattttctgcgatggttcccgaaaacatggtatttccctgcggaacataggaaaaaagctttctggtcgaaggtgacatattcagtttttgattatgatcacttccggcacaaatctgaaattctccgctctgtgcccgaagaagtgacaggatcagccggagcatagttgtttttccttcaccggaaggtccgaccagggcgatgatctcatgtggataagcttccatagaagcatgggcaaaaacttccgttccactgtgataggtatagctcagatccttcattgtgagaccgataccgctggttttgtgctgcttttcaaagagttttactgcatgatcctggctgtaatcttcctgcggcatttccacgatatccatcagacgtccggcagagatcgtgagagaaatcgcggaaggaatcaggctcgtgagggagtttacggagcttgtcagtgttccggaaagagacaaaaacatggtcatggttccgtaactgatcgcattgctccatacacggtaaattccccatccgtaacagctgtaggatacgataaaaccaacgatcgacatcaggacagaggtcaggatcgacattcgctggaattccagacgcatgctgatatagtccttctggagcgttttgagccggtccgtataaaaatggatcagatcaaatgccttgatcgtctggatattggagaaagcctcctgattgaaaccatacattttggcattcatggcagcacttttctggttgttgttccgcattctgcgtagcagcggacgcgacatcagagcactgaacgggataccgagaagtgcaaacagggcaaaggtcggatcgtaatacagaacaaccgcaagagcactgatgaaccggaaggtatagatgatcagatttggtacccagttcagaataccgttggaaatattggaagcatccgagctccagcgggtaacaaggtcaccggtgtgatattccgtcagagattcccagtccgtgacgagcatttttgcaaaaatatcgttcttgatctcggagtcaaccttaagactgataaaggtcgaagcataaccggatgcctgtgagaccagaagatttgcaatcgcaaagccgatcattgctgcaaaggtagacagcagacgtccggtctgatgacctgtgatgatatcgacgagatctttggagatcaggctggaagcaagtgaaacacaggatcccataacacccagcagtgtatagagaatcatagatttccagtaacgtctgccatactggtagatccatatagtttgtttccacattttctggaggcttccctgtctgagatgtttcatgataagctggagtttctctctcattgtggttcctccagagtatctatttccctctgaactgtataaacagcagatggatttctggtgcagagcagatgcagaatcggcacctgtccggcaattttttccgcaaagtcaaggttcatggagaagaagcgttctttccaggaaggggagatcatgcgctgcataatccggatgactttttctgaaggagacagctcctgaagaaaatctttctccgaatcgcgtccgagaaggacgataccgccaagttcatgatcagtggtcgtataaattccggaagttccgcaccatggaatcccgtagacgatgattttgccggattccatgccaaggagattgagatcaccgttcagatatggagtctgcagaagatcatgccacatttgggtgtgtgttgatttacccataccggaatgtccggagaacagccatgctttttctttataaagaatcgatgcagaatgaatggcaaatttcccgtgcttttgtgcaacaaacaggaaaaagagccggattgcatgaaaaatattttcctgtgctgactcagaggtttccggagtacagtagaatctcacgtaacttccgtccagactcatatgtacctgatgaatgtttgacatctgcgggaaaagaatcacatagcggtcagtattttcaaaaattgtcatatctgaattgcgaaggaggacttttccataagatttgctggctggcggagttgtaaaaaactcaatttcctggtccgcatctttcgcaggattcatttcgcggaacttatcgaagtatccggagaaaagctgcgaagcgccatggaagtgaaggtgaagccctgcaatcaggatgcataaggaggcttcttccgactgaagacgaagagtttcggtcagcattcccatggactgcagctgccgcagaaaatcaagaatgtcctcgcggagcatgggaaaatcctcctcctcaagtccatatctgcgtgcaagcatctcggtcagcatttccaggtcagcaccttcattatgctggatcacattccacagaaaagcactggtttcgttcaggatggttcctttgcgctggtcggcaatctgctgtccgaaaggaagaatgtaactgacaccttttattttacgaagggtatagccttcttgacatttgaacataaaaaaatcctttctgaaaagtacagttttatacagaaagaattataacatccggcaaaatctcatacaagaaaataactccaaaaaagagggaaagctgcgttgttttgttaccgtgaacagtaacgttgttcttgcaataagcatctgctcagggtaaaatattacaaactgagatggatacagatatccggaggcaggatctttgaagccgctgggagacgtatgacaagtataatggagaacaggatgattaaaaaaagagcaatactgtgtctgaccgtgattctgacagttgtattggcagcaggagtggaaatgttctggcttagcagacaaaagacagtaaaagaatataaggaaagccaggcggctttcgggaatccgcttatgggatatgcgagaaatgcatggtatgataaagtttcggaagacatttctcttttgtatatggacattacctgggcagaactggaaccggaggagggtgtttatgactgggaggccatcgagaaaaaaaatcagctcgcacgatggaaaagcgaggggaagcatctggtattgagattcgtctgtgatattccgggacaggaagagcatatggacataccggaatggctgtacgaaaaaagtggaaaagccggtcaatggtatgctggaggatatgggaaaggctttgctccggattataacaatccgacgatcatttcttgtcatgagcaggcagtaaaggcacttggagagcacctggggcaggatgggctgatcagttatattgagcttggaagccttggacactggggagagtggcatgtaaactacagcgagggaattcagaggattccgggagaagaggtaagagaacaatatattctcccatggatggaggcctttccggatgccataattctcatgcggagaccatttgctgctgcaaaaaaacatggatttgggttatataatgatatgaccggacatccacagggaacccagagctggcttgactggatcagcaatggcggtgagtatgatcagacaggtgaaaaaaatgcaatggtgtccatgaaggatttctggaaaaccgcaccatccggcggagaatttacaagttctttctcgatggaggagatgatggacacagatttgtcagagactgtggaaatgatccgtgaagcacatacaacctttctgggcccgaagatcccggatgaggattatgcagaaggatacaaagaagtcctcaaaaacatggggtatcgtctgtggatttcaaagtcagaactaaaaagcacccgaaacagcagcagtctgaagcttatctgggaaaattcaggagtggcaccactatataaagactggccggcatatatttatattgaagatgagaagggaaaacttgtcgaaaagaaaaatatcgaaataaaaatgtcgtctgtgcttccggaagaagaaatatcaacctcaaccacactgaagacagagaaactgaacagccttctgaaaaagggatatcgtctttccatcggaattgaagatcctatgacagagaaagtgggtgttcgtctggcaatgaataccttatatcaggaaggcaaaaattatctctggaaataagagaacagagagaatgcaaaaagctccaaaaagaaggagggccgggcgtctgtgcccggcgagtatgaaaaagaaaaatatatgtaaaaaagcattcgctttatttgcttattactatactgtgaatctgtgatgaaactgtgatgagagattgaagaaagagtgatgcttttctaaagaagaaataaattttcttttggaaaaataaaaaaattcattccagcgagcaattagccgttgtaaaagtaggtttactcatttataatgagaatcagattcaaaagagagattatacaggaaacaggaggcaagccttgaaaaaagaattagttattgtcattgattttggcggtcagtacaatcagctggttgcgcgacgtgtcagagaatgtaacgtatactgcgaaatctattcttacaagaccgatcttgagaagatcaaagcgatgaatcctaaaggaattatccttaccggcggtccgaacagctgctatgaggcggattcaccgacttaccagaaagaactgtttgaacttggcgttccggtactgggactttgctatggcgcacagcttatgatgcatgtccttggcggcaaagttgaaaaagccgatgtcagcgaatatggtaagacagaacttcttgttgataagacagattccaaaattttcgaaaatgtatccaataaaacaatcgtatggatgagccatacagactacatttccaaaccggcaccgggatttgagatcgctgcacatacagcagactgtccggtggctgttgctgagaatgcagatcagaaactgtatgcgatccagtatcatccggaagtacttcacaccgtagaaggcaagaccatgctgtccaacttcgtacttggtgtctgtggatgtgccggagactggaagatggatgctttcgttgaaaacaccatcaaagagatccgcgaaaaagtcggcgacggcaaagtgctcctcgcactgtccggtggagttgactcttccgttgcagcaggactcctttccagagcgatcggcaagcagcttacctgcgtattcgtggaccacggccttcttcgtaaagacgaaggcgatgaagtagagggcgtattcggactaaacggtcagttcgatctgaactttattcgtgtcaatgcacagcagagatactatgacaagcttgcaggcgttacagagcctgaagcaaaacgtaagatcatcggtgaagagttcatccgtattttcgaagaagaagcaaagaagatcggagcagtggatttcctcgcacagggaaccatctatcctgacgttgtagagagcggtcttggcggagaatccgcagtgatcaaatctcaccacaacgtaggcggtcttccggatttcgtagatttcaaagaaatcatcgaaccgctccgtgacctcttcaaagacgaagtccgcaaagccggactggagcttggaattccggaaagactggtattccgtcagccattcccgggcccgggtcttggaatccgtatcatcggagaagtaaccgaagagaaagtacgcatcgttcaggacgcagactacatctaccgtgaagaagtcgacaaagcagccgccgactacaagaaagaacacggagaagacccatcctggatgccaaaccagtactttgcagccctcaccaacatgcgaagcgtaggtgtcatgggcgacttcagaacctacgattatgcagttgcactccgcgcagtcaagaccatcgacttcatgaccgcagagtccgctgagattccgtatgaggtactgaacagggttatgaatcgtgttattaacgaagttaagggagttaaccgcgtattctacgatctgaccagcaagccgccgggaacgattgagtttgaataatatattagagccaagaaatgcctattttacgggctttcttggctctttctatgtccgttgacaatcaaatgacaatacttttttaatattattgtaaataatttctttttatttagctgggaattgacttttccagtctaaataatctttttctgtaatctcttcatttctgaatttctggtacatatcagcccatgctccaatattatccagcatatttaaagaatcatgtcctttgtctttaaacatgagttgtggtacgccggattcatcccggtaggcgtgcagaccatattgatcctctaaagcaaataatgcgtgcatgacactaacataagtatcaaagtttggatcagacatggcgtatggactgatctttaatgagtttgctattttttccaattgttctgatgatggaaaacgattcccaagttcataatttctaattgccgattcgctcaagccggacatgattgccaattctttctgtgtatatccttgatcgatccggaattttcttattttctcacctactgtcataagaaaacactcctttgctgattgttacttaaaagtatagcataaacagttcaaaaatgaaatataaaaataaaccgttcatttttgaaattattctattgacagtacggaaatgaaatgttatgatgcatatacaccgttcgataatgaactgaaaaaagaaaggagggatatagatggctagtaaattatttatatcagcaaaagaagtagcgaaagaattagaagtatctgattcctatgcgtatcgtttgatccgtcagttaaatgctgaattggagcaaaaaggtttcgttgttgtcaa

SEQ ID NO: 3 - DNA, 30247 bp, unidentified
  source 1..30247: mol_type = unassigned DNA
  misc_difference 5097: note = a, c, g, or t
  misc_difference 5098: note = a, c, g, or t
  misc_difference 5099: note = a, c, g, or t
  misc_difference 5100: note = a, c, g, or t
  misc_difference 5101: note = a, c, g, or t
  misc_difference 5102: note = a, c, g, or t
  misc_difference 5103: note = a, c, g, or t
  misc_difference 5104: note = a, c, g, or t
  misc_difference 5105: note = a, c, g, or t
  misc_difference 5106: note = a, c, g, or t
  misc_difference 11652: note = a, c, g, or t
  misc_difference 11653: note = a, c, g, or t
  misc_difference 11654: note = a, c, g, or t
  misc_difference 11655: note = a, c, g, or t
  misc_difference 11656: note = a, c, g, or t
  misc_difference 11657: note = a, c, g, or t
  misc_difference 11658: note = a, c, g, or t
  misc_difference 11659: note = a, c, g, or t
  misc_difference 11660: note = a, c, g, or t
  misc_difference 11661: note = a, c, g, or t
ttacttgctcaggttgatgatcgaagcgaccatcgccgccagagacgccgtcgaggacatcattcccatcacgttagccagcccgttccccttgcgctcctgtttcatcggaacgatcacttgacagccgggctccactttcggataacgcttgcagaggaatccgccgcgggtagccgccaccttgccgttcatgtagacgacgaaaggacgcctgcgcgcctcctgcttgtaaccgccggcctgataaatataatccttcactttcgaccggtcgtacacgacggtattctggtacaacacggctcccgacacgcgcaccgtactattgaatttcggaataaagatgcggtcgccgtcctgcaggatgatatcgtcgttggaacccggattcttaacggccgccattacgtcgatccccaccggataataatcggggatctcgacggactgcgtcgatacggaatccttccccttgttcgtattggcaatcgccatcacggctgcgactttggcgcggtcgtcggcagtcagccgccgctgcacgctcgccccgacgacataagcttccggcgtaaaaccacccgctttcttgatgatatcggacagccgttccccggccgaagcgagcacatactcgccgccgaaaagtatttcgccggtaatcgccacgctttgctgctcggaataccccggagaccggcggatatagatctcgtcgaacggctcgatcagaaaccggctgtcttccggcgcgatcttcaaatcttccgatatctcgaaagaataattttccgcgattttaggcgaataggaagtcgattggggatccttgatccggcgggccacctcgatcttggccagcgaggccgattcccgcaaaccgccgcagatcaggacgacgtcttccacggtcatccccttgcggaaagtaaacgtatgcgggttgttgacctctcccttcaccgtaaccgtatattcttcccgcaaatcgtagatattcggaatgtaaacccgatccaggttttgcagcgcgatgtccgtctgtccgccgacgatctcccgaacgtcgaacgggatcaccgtataattgttcgccatatccacccgggtgatctgtccccgcgaggcgaactcgctgcccttcaacccttcggcttttgcgatcaactgcgacaatgtcgcgattttttcggaaaattcgtactcgcccggacgccatacggctccttcgatcgcaaccatgttcgcatacatcggcagcaccttcccgatgctcacgctatcgccgtccaacagctcgaacgtcccgaaatcggctttatccaccgtcagaatggtcagcatccggccgctcttgcggtgcaccgtcacgttgtcgctgtaagcatccccggtaaaaccacccccgaaatcgatcagccgggccagcgtctcgccgtctttcatgtcgtaaatacgctcccgcttgatctttcccccgatcgtcacgtggttgtcataaggcggcacgatgatcatatcgttgtcttccagccggatattcgtctcgtatttcccgttgatcaggtagtcgtacacatccagatcggcgatttgcttgctgttccggaaaacctgaatatgccggagcgacccgatcccgttgaccccgccggccgaatagatcgcattgaacagcgtcgccagcgaaggcagcgtataagtccccggagtaacgacctccccggaaatattgaccttgatgctgcgaatctgccccagcgacaccttcacctgtccgttcatgatctcgtgaatccgggattcgacccttttttgggcttcggcaaccgtcaatccggccaaattgatcgggccgaccccctggatgctgatactgccttccggggaaattttctcctgtacgcgcgattccgcctcgccccagacttcgatgatcacctcgtcgccgggccccagcacgtaactgggcggagtagccatgttgtaactcggcgcgaaagtcaggttcttcgtcgaaaatatctcctgtccgaaaacggtattccgggtgagggaatcgaccgaacggcgctgaacggcagtcttatcctccgatgcctgccgctgatcggcggaagcttcccgtcgtacttcgttcccgcccgtgtccgcggacgtatccgcccgggaagattgagaagaagagggagaagtcgcatgcatcgccgcattgatctgggcgtccgaagctcccatcgctttcgcctgctgcaccattcccggcgtaacgaccacctggcccgacgcgcccgttagcatcaacaaggcccctatgagtaaagcataacctgatttacgtgtcgaattcatatgaaatattataattttatcaaaaaaacggttcggattagtaaaacgcaactgccctgattctattatccgctcacttcccggtcggatttgttttgcgattgcccagtatgtccagcaagcgaatcaacaaaatgcccagcacgatatcgatcgcaaagagcaaattgatattcaaatctttcaacaagatgttcaacaaaataaaaccggcctgcaaagcgataatcaccatcgcgctgcggaaatgagtcagcccgatccgcagcattttatgatgaatatgtctcttgtcggggtaaaacggggagagccccgccttgatccgcacgcaaaaaacgcgaagcgtatcgaaggccgggataaacaccatccccaggaatacggccggagccgaccgtatgtgaaacatatcggtattgatattcatgttgtagaattccaacccgaaaaaagcgatcaggtagcccagcgtcagcgacccggtatcccccatgaatattttcatccgctttcccgacacgttgtaaaagaaaaagacgctcaccacgccggcgatccccatcgtcatcatgccgtaaacatacagttcgttccagcagaaccatccgcccagcgtccccagggcgagcagggcaagccccgaacaaaggccgtcgatcccgtcgatcaggttatacgcattgaccagcaaaaccaccaccaacaccgtcaggatacagcccgcccataccgggatctgatacagtccgaaaagaccgcccaagttctcgattcctatcccgccgaaaatcagcagaatagccaccgcgatctgcatcacgaacttgcttttgtacgacacgcccgacaaatcgtccgacagtccggtgaaaaaaatgaacgtggaacccgctatcaggaacatgatctcgcggaaaacatccgtttccagcgcggtcgccgtgatatcgtaacccagatagtaccgcagtcccatcatcagcgaaaccgagaacaggaaagccgggaagaaagcgacgccgcccaaacggggaatattcgtatgatggagcttacgttcggaaaactcatcgaaaagcttcttttttttagcgatcaggatgattttcggaatcgtcaaacgtccgaccagagccgaaatcagaaacgtagctatgacaaacaatttcaacattgcgtattcagtagaaacaaagccttgcaaaaatacgaattatgtttgacattctgccggtctgcattccatttttattcgtttcggccgaaaacgtcatttttcaacgataaaaccctgtttttataaaataaaacgttattttcaccgcttgtattgagccggagcaggaatacggggaaccctgcttttcaaaaactgtaaatcaatgagaattgcgattgtcggcagcgggtacgtcggattggtatcgggcacctgcttcgcggaaatgggaatcaaagtcacctgcatagatacgaatccggagaagatcgaacgcctgcaaaacggaaaggttccgatctacgaaccggaactggacacgttgatccaaaaaaacatgcgggcgggacgcctgtcgttcggaaccgatttgggcgcggtcgtcaacagcgtcgacgtcgtcttcatcgcggtcggcacgccgccggacgaagacgggggggcggatctgagccatgtgctcgacgtcgcgaaaacgttcggggcgagcgtttcgaagtatacgctgctggtcaccaaaagcacggtaccggtaggcaccgccgcgaaggtcagggaaacggtcgaacgggaactggcggcgcgcggaatcgaagtcccgttcgacgtggcttccaatccggaatttctgaaagagggaaatgccatcaaagatttcatgagtcccgaccgcgtgatcgtaggaatcgacagcgaacgggcccgcaaactgatgacccggctctaccggcctttcctgctgaacaacttccgtgtgatcttcatggacatcccgtccgcagaaatgaccaaatacgcggccaactgcatgttggctacgcggatcagcttcatcaacgacatcgccaacctgtgcgaactggtcggagccgacatccacatggttcgcaaagggatcggcagcgatccgcgaatcggcagcaaattcctctatccgggctgcggttatggggggtcctgcttcccgaaagacgtcaaggcgctgattcatacggcagaacagcgcggataccggatgcaggtgctccacgcggtcgaaagcgtcaaccagcagcagaaacgcgtgctgttcgacaagttgatgcgttatttcggcggcgatctgaccggcaagcggatcgcgatgtggggcgtcgccttcaaaccgcagacggacgacatccgcgaagctccgtcgctggtgctgatcgacctgatcctccgggccggcggccggatcaccgtatacgacccggtagcgatggacgaatgccgccgcgtcgtcggagacaaagtcgcctatgcgaaggacatgtacgaagcggtcgtcgatgcggacgccctgctgctggtcaccgaatggaaagaattccggataccgtcctggccggtcatcgaacggacgatgcgctgtccggcgctgttcgacggccgcaacatttacgacaaacacgaattcgacggcacgtcgatcgtctaccactacatcgggggctgatccgaggcggccccgtttcccggctgcagttccgggcaaaaannnnnnnnnnaaaacggcggagtctgttcaagactccgccggattcatatttttgacggtcgtcagaatcccacgccgatccggaaaccgaaattattcaactggtcggtcttgtatttcaacaccgtcccgctgttggtcgcatagctataataaagagcgaagtgaaacccgaagccggatgccccgaacgggcgaacgttcagaccgatttccggcgacatatagaatccccacgtcttttcataggcttccaatatgtagaagttggaagaaatgcgcgcgtaattggcgccgagtttcagggctacgtaaggttccagcacgttcgtctgcaagaaacgataacgtccggtggcgccgaacggcaactggaagaccgaatgctgctggtcggtagtcaccgtcgaagtctcgccgaccggaaaagtctgcctcggaatgtactcgttgttggtatggtaagcgatgaacgcacccacgccgaaattattcgggaaataataaccgccctcgaagttcattccccagccgctcgatttatcggcgaagctggctccgagcggcacgttgtactgccagtcgatattcagatagatgttgtcgttgccctgagcacgaccgacggacggcagcaacaacgccgcaacggcaaccgctgcccatcccgttaatttgctttttatgtttttcatgatattctgctgtttttaaattctacatgggttgaaacggaacttattccccgactgcggcgcttctaaccagatagggggactgcacgaacgactgattgatagcccttacggtcagttccatgttgaacgcgtccgatccgctcagcaatccgctcaggaagctgttccagacgacggtcagtttccggtcggcgctgggcgacgtactcaggtcgaccatctcggtcagcagcgaaccgacgctgtaactgtacacgaccggataagggtaataccagtatccccaatcgccccagtagccgggaagccaataaccgggatattcgttccaccaataaggattgcggtaatccacgaaataggcgacgctctgcacgtagctgatctgcaaaccgacgtcggcttccgatttatcgtccgtacggacataaccgcaggcctgcatgttatcctcataggctttcaggatatcggcggccttgctgcccgtccagtattccggatctttcgtatcgccgatcaccatcacgctgtcgggcatataataacgggtgaaacggttgaaatccgccttgccgtcgtaattggtaaacaccagaaaatcactgctcagatctcccagatccggatcctcccgacaagaggtcagtgcaaaaacggcaatcaaaacgtaaattaattttttcatactctttgctatttaataaggttttcgaattctataaatactacaaccgaatctatttcaaaatccgttccacactactttcgccccgtctgccgaaaccgcgccgaccggcggcaaatctcctcccaaacttcctgcttttgcgcccgaacgcgacgtttttgcattcccgaaaccgctccccgataaatctttattttgttccgaaaagactttcttaaggcataaatcttgcgatgcacgacaaaaattcgtatctttgagcagatgagacgttttctgtaattattctaactttcgagaaagatggtgctggatgccgggaatatcctgttggtgggagcggttttattgtttgtgagtattgtcgcgggaaaagccggttacaagttcggcgtgccgatgttgctactttttctcggcgtggggatggcattcggcagcgacggcgtgggcatccagttcaacagcccgacgatcgcccagttcatcggaatgatcgcactgagcgtcattctgttttccgggggcatggacaccaagttcaaagagatccgcccggttctcggacagggaatcatcctcgctacgttgggcgtcatgctgaccaccgccatcaccggaggagccatctacttgattacggattaccttttcccgagtttttcgctgacgctttacgaatcgctgctgctggccgccgtaatgtcgtcgaccgattcggcctcggtattctcgatattgcgatcgaaaggactgaaactcaaagagaacatgcgtccgctgctggaattcgaaagcggcagcaacgacccgatggccaacatcctgacgatcctgttcatccagatcatccaggtcggcgaaatgagtttcggcgagtcggtttcgatcctgctgttgcagatctcgatcggggccgtcgccggatacgtgctcggacgcgtctcgttgctgctgatcaaccggctgaacatcgacaaccgctccttttaccccgtgttgctgctggcctgcgtcttctttatcttttcgttcacgaatctgattcagggcaacggctatttggccgtttacatcgccgggctggtcgtcggcaacaacaaaatgccgcatcatcgcagcacagcgacctttttcgacgtcatcgcctggctgtcgcagttggtcatgttcctcacgctcggactgctcgtcaatccgaaagaactgatcccggtaatggcgatcgggctgctgatctcggtcgtaatgatcttcctggcccgcccggcgaccgtattcctatgcctgcttccgttccgcaaaatgagtacccgcgccaaatcctacgtgtcgtgggtcggtctgcgcggcgccgtaccgatcattttcgccacttatccgctcacggcgggtatcgaaaacgcatcgctgatcttcaacatcgtattcttcatcacgatcgtctcgctggtcgtacagggcacgacggtgaacttcatggctaaaaaactgaaactgacggacgacacggcttccaaaagccggaaattcaacttcgaagaactgccggcggagatcaaatccaccctgtccgaaatcgacgtgaccgccgacatgctggtcaaaggcgaccggctgatggacctgccgctgccggacgacgaactggtcgtgaccgtcaagcgcgacgacaccttctttattccgaacggacgcagcaagctttatctgaacgacaagctgatgatcatttcgcacagcaaaaaaaatccggacacggaagtcccggattccaatactccgtccgaaccggcatcctgaatgccggaaacctaacggcggacgtaatccaaaaaaacgaaaggatgttcgaacttttcgccgcgttcgcgacgttcctcgcgtaccggcgtccaatcggccggattccacgccgggaaaagggtatcgccttcgtaatcggcctccacccgcgtcaggtaaaagcggtcggccagcggcaacgcctgggcataaatctgcgcgccgccgatcacgaaaatctcttcggacggatcgaaacgccggatcgcatcctccaacgaaccggcgacgacgcacccttcggcgcggtaaccggtctgccgggtcaccacgacgttgatccggttcggcagcggacgcccgagcgattcgaaagtcttgcgtcccataatcaccggatgcccggtagtaatcgccttgaaccggcgtaaatcttccgaaatatgccagatcagccggttgcgatccccgatcaccccgttgcgcgctacggccacgataatcgagatcatacggcgatcggcgctttaatagacggccagggatcgtagccttcgagcgaaaaatcctcgtaacggaagtcgaagaccgatttgacgtcggggttgatcttcatcaccggcaacggtcgcggcgtgcgcgccagttgcaggtcgacctgttcggtatgattcaggtagatgtgcgcatcgccgagcgtatgcacgaactcgccgggccgcaggccggtcgcctgcgcgatcatcatcgtcaacagcgcatacgaagcgatattgaacggcacgccgagaaaaacgtccgcgctgcgctggtaaagctgacaggagagtttgccgtccgccacgtagaactggaacagcgcatggcacggcggcagcgccatcctatcgatctcggccacgttccacgcgctgacgatcagccggcgcgagtccggattgctgcggatctggtcgaccacctgcgcgatctggtcgatatggctgccgtccggcgcgggccaactgcgccactggtatccgtaaataggtccgaggtcgccgttggcatcggcccattcgtcccaaatcgtcacgttgttgtcgtgcagatagcggatgttggtatcgccgcgcaggaaccacagcagctcatgaataatcgaacgcaagtgcagctttttggtcgtcaacgccggaaaccccgctccgaggtcgaaacgcatctgatagccgaacgtgctgatcgtaccggtacccgtgcggtcgcctttcacggtgccgcaggtcttgatatggcggagcaggtcgagatattgttgcatgtcgttatgatgttgtcggatagctgttcagcgtaaatccgttttgatccagtttgccgtaagtggggcggtcgatccactcgccgaggaatgcgatccggctgccgcccgcgagcggaacgatctccgcgcaatgaatatgcccgcaaacgaacaggtcgatccccggatgttctttcaggaaatcggaggcgaaacgcacgatcggctcttctgcgccgcggaacgcatgccggatcggtttcgccttacggttcgaaccgctccaccaatggccgaaacgcatcgccgcattcggatggacgaatgtcgagaaaacccactggatcgcccggctgcgaaacacccggctcagcagccgtcccccgcgcccccgcttgccgaacacatcgccgtgtccgatgaaaacccgtttcccggccaacgcgagaatttcgtaatcggctcggtgcagtaccaccccgcactcggtctgcaagtagtcgaacgcccagaggtcgtggttaccgggaaaaaaatggacggcgacccctcggtcggtcagttccgacagttttcccagcagccgcgtgaaccctttcggcacgacgcgccgatactcgtaccagaaatcgaaaacatcgcccaccagaaaaatcgcctcggcatccgcagacacttcgtcgagccagcggacgaacaaccgctcgcgcgtggcgtgcgtctgccccaccttgaggcccaaatggatatccgatgcgaaatagtacattacctgaccagttcggcgactttatttttcagttgatccccgaaaaggttacgagccacgatcgcaccgtcggaactgatcagcacgttcgacggcacggcctggacgttatagctcatggccgcgataccgcccgtgccgcgcggatcgaacacgttgatccacgggagcttctgatcctgcaccaccgtcacccagtcggctttctcgtcgtccagcgatacctgatagatggccagtcctcggtctttataagttttatacagctccctcatttcggcgttttgcaccggatagcgggaatcccgggtcgaccagaaactgacgaggattgtttttccgtccagcgaagacaacttctgatccttgccgtacacatcctgcaagtcgatttccggataattcagcgcgttccccgactggttctgtatccggtcggccagttcgagcacctttttccgctcttcgatctctttttgaagcaccttcacgcgcgaagcatcgggatagcgcaccgacgacgaatccgcgacgatccggtaatagatcagatcggttttttcattgaacagccacgggtcgtccggcaaccgttggtacagcgcataaacggcagccatcgacgaaggatgggccataatgaaagcgatgtgctcgcgcttgatccggtaatactccgccaggtactgatccagcaggtttttccgccgcttttcggtatccgccaccacgggcgtattccggtaaatcttcgacaacgaatcgagcgtcgcgacgccgttgccgtactgcgtattgaactgcttgagcaactgcgactcctcggagccttcgaccgtgtagttccgggccaggtcgcacagcgagttgacctcgatccggtctccgggcgtcacgatcagcggaatcgcactgccgtcgcaaagcaggttgtaaaatacggggcctttctcgggcagcttcacccgaaaacggaaatcgcccccttggtcgataacggtcgaatccacgatccggcgtccctgcgtcgtaaccatttccagcaacacggtatcgtgagacagtcccgagaaagagccctggacacgcgctttgcgatcctgtccgcaagatgcgatcaacacggtcagggtaatgaccgaaagaatctttttcatacagtttcctctcgtattatcaatacggtcgtcacggccgggccgaagcacgaaacccgtgacttttttaaagttacaaaaatagattaattttctcacaatataaaacgattttcccggcatttatagtatctccgaaacaaagcgggccgggttagatcggaagagcgnnnnnnnnnnctttgcagaacagcgttcccgcccgtcaggcgggaaccgattcctgcatcgtttccttatatttccggtcgacctcgatctcgaaatcgctcagcacgttcatgtaattgatgaacgcttcgtaaggcgactcgtacgggttgaaatagctgtgaacgtcgccgtccgagaaccatttcgtcgccatgtaataaaaatgatccgacacttgcatgaaattccacgcatggtaaaaatcgggatgattaatcgcccggatcttatctttcaacgcataaagttttttgaacgcttcgttctggagttcgttgccgagccaggccgtgatgtcccgctcctcgtcggcccacgaaattgggtagggagcgtgcaagatagccaccggctggaactttttggatacctcggtcggcgtggcgaacttcagcgacccggtcgccagcgccgcattcggcaggtgtttcatgaattcgaagatcccgctgtcggccttctgatgctccccgaacgtctcgtagtccataaacaggttgatcacctcgcccggaagttccggattgttcagccagctcacgtatttctcggccgtcagcggccactgcgaccatccccggtcggaaaaacggaacgcgatatcgtcgctcagcttgaaattccgcagcagcaggtgcaacttctggtcaatcgcattggcatagacgtaattcggacttttccatcccagaacgtgcttggcgccttcggccaacatcgtgcggaaccccatcgaagcgaccacttcgccgatatgatccgaatagatcagttcggtattgcgaaaagccgtgggctttacgccgaattccttctccatcaacgcacagtgctgcttcacctgagccacgaattcgtcccggtcggccagcgccgccagcgaatgcgaatacgtttcggccaagaactcgacgcagcccgtacgcgccaacgcctggaagctgtccagcacttcgggcgcatacatcctgaactgttcgaccgcgatcccggaaatcgaaaaactgactttgaactttttgccgtttttgcggatcagtccggctaacagctcgttcatcggcaggtagcattcccgcgccactttctgcatgatcgcacgattggcgtaatcgtccaggtactcgtggtccttacccatattgaaaaaacggtactttttcagtctcatcggctgatgtacctgaaaatagatgcagattgttttcataacctcgtattttatagtccgtcccttatccgaccaaactgcggtaaacatcgagcacttcgccggccgcgttgtcccatttcagattaatcacttcgcttttccccttttcggccgacatcgccgccagcgacggatatttcaacaggccgtaaatcgcgtccgccatcgcgtccacatcccaataatcgaccttgatcgcgtaatcgagcacttcggccactcccgactgtttcgaaatgatcaccgggacgttcgacttcatcgcttccagcggcgaaattccgaacggttccgacaccgacggcatcacatacacatcgctcataccgaacatcttttgcacttcgtccccgcgcagaaacccggtaaaatggaaccggtcggcaatccccagcttggcgacgcgccggatcacatggaccaacatatcgccgctgcccgccatgacgaaacggacgttcggcaaccgtttgagcactttggccgccgcctcgacgaaatagtcggggcctttctggtaggtgatcctcccgaggaacgtcacgatcttatcctccacgttccgttcgctctccccggaatcccgcttgtcgaaacgcaccgcattgtgcacggtcacgactttgtccgccggaatcccgtatttctcgatcacgatgttgcgcgtcaggttgctcacggcaatcacgcggtcggcggcttccatgccggcccgttcgatgttatagaccgactggttgacatgctcgccgctacgatcgaactcggtcgcgtgcatgtgtaccaccagcggcttgccggacacccgtttggcggcgatccccgcatagtaggtcagccagtcgtgcgcatggatcacatcgaactccccggccctatcccgggcgatctgcgcggcgaccatcgcatagcgcgccacttcctccatcaggttcggcccgtattttccggaaaaagcataacgctctttccatacgtcgtgtcgcccgggcaactccccggtttcgcggaactgcctcgaataatcgtcgaactcctcgggagacacatagggcaccatattggaatccacatggataaacgtcagcttctcccaaatttctttctcccgcgtatcgtccgcggacacttccacgtcgctcgcgttgacgacccgtacgaaacggccgtcctcgtccccgtaagccttcggcaccacgaagatcaccccgacgtcgtgcttggccagtccccgggtcaatccgtagcatgcggttcccagtcctcccgcgatatgcggcggaaattcccatccgaacatcaatactctcatctgctttatggtttttattattttatatcaattcgttttcctcttttccacaccgacccataaacagcggagctttttctgaaattttccggaaaatccggtttgccggcctcaaccgttccttcaaaaaacaattcccttgcaaacaacctgccgtccggtttccgcacccccttttcccggctttattttttagatttacactcctgtatcatctggtcgatccgcaaaacggcgcctacgctccacgcctgcgaaacggaacccctcggacagtgcggaggatctccgtcgtaaatctcattgatcgaagcgattccgctgacactgatatcttcttcgaaattcttcagaatatcctccgcttcgttcaggaacttcttcccgtgcatatcgaagccggccttcacatagtgttccagcaaccagggccatacggttccctgatggtatgcgcggtcgcgggtcggctgatctccgccgtagtgccctttgtaaaggggattgcgcggcgaaagcgtccgcagccccttgggcgtcaacaggtgacgatgcactttgtcgatcacgtcgagcttcatcgcgtcgctgagcataccgtacggcagcgagcaggcgatgatctggttcggccggataaatcggttctgcccctgttcgtccacataatccgccaggaacgactcttccggataccagaaaagcccgacgaacgactccttgatacgttcgggcatccgctcccaacggctcacgaaatcggtatccttgtttttccgcgccagttcgagcgtataacaaatcgcattgtaccacaatgcgttgatctctacttgataaccctcgcgtcccgtcaccgggcggccgtccacgacggcgtccatccaggtcatcgcataattcggatgcgcggcccataccagtccgttctcgcgcacctgcacccactcgcctccgcgcatatacgactccagtatctctttcatcggcttgccgtaggccttccacagcttacgtccgccgccgatatgcttttcgaggcattgcaacgtccagaaaaaccacaacggagcgtccaccgaattgtaggcgctgcccatattcggaaacatgccgtctttcatctcgcgcaccatcgtatcgatcacctcgcaacacgactcgacaccgccctgggtcagcgtgatgcccggcagcgcgatgaacgtatcgcgtccccaccggccgaaccacggatatccggccaccacttcggtcttatcgccgtgacgcacgatgaattgcctggccgaatgccgcagacacgacaagaaatcgatcttgttcgaccgacgcgccaactcttccatgaaatccttttcgagcgtcgccggatcgacctcctcggtcgaacacgagaaaataacgctctgccccttgacgatatccgtttcgaaataaccggtcgtcaacaggtcctcgtgccccggataaccgcgatcgatctcctcggcatattcgaagttataataccaatccggcgcagcgacgaattcgcatggaacgttcatctgcatatgcaaccacgggaatccctcgtagagccggctccgcacgccgccgggaatcgggtagctgcgaccgtccgcgaacaggttggccttactcagcccgtgccggtcgcggaacgccaggaagggccgcagcctcaactgcgtatccgagcgggcgtccagcaacgtataacggatcagcaactgcgtccgcgaatgaatccacagcaactcttttttcagcacgaccccgcccacgcggtacgtaatcgccggcgtcggcgtataggtaaaatcggtaatatacttatgcccccggggttcgtacacgccgggaaaacggtggatcgccaggttgaacgtctgatcgtgctgaacgaccgtttcatccaccgacgacagcagcacgtaattattctcgtcgtcatcgtctttcgggcacaccatcagcccgtggtatttccgcgtattgcagcatacgatcgtcgtactcatataccctcccgcgcggttggtactgagcatctcgcgctgaagcgaatactccagattccccaactcgtttttgtcgaaatgcaaaactgccatatcctccatttattttctatatctacgcgtaaatttaagaaaaaattgcgcgaaatccaataaaaatttgcggcgccgaaaagcctttccgacagcgagggagcgctcttcgccgacacgctcctcatcgaacgcgtcgttcggacatcaggctgattatcaaccccatttcaccagagcgaaatccatccggtgcggcagtttcgcgttcttcgggaacacgcggatcgccatatcgaacgaaccggtcgcctcgggggtggactggatcgaataataggcctgagtaccctcctcgcgcacgaaattcagttcgcgtttggcgaccacccgcacgttgccgtcgatgatctggtcggaaagaatcatttccacgccgatgtcctccggagcgagcccgtcgatgtccacgatcacctcgatgtcgtaactatgcccgatcaagatggcctctttgcccatgtcgagccgctttacgctgatcacatgcaccttgtcccaccggctgctgacccgccgtttccaggccgcgatctcgcgcgcctgcgtatagtcgtgggctaccatctgctggttccggtcgtacagcttatggtaaaaacgctcctcgtaatcggtcagcatccgattggtcgtaaagttggccgcaatatccgccacgcagatcttgaccgattcgatccagtcgttcggaatgttctcctcgtcgcggcggtagtatttcggcacgatctcctcctcgatcgtattgtagatcaattcggcgtccatttcgtcctggaaaccctggtcgtcgaacgtccgttccatcggcagcatccatccgccgcctttgcgatatccctcgacccaccagccgtccaacacgctgaactgcatcacgccgttcatgacggccttttcgccgctggtgccggacgcttccagcggacgggtcggcgtattgagccatacgtcgacaccctgcaccatccggcgggccagctccatatcgtaattctgcaggaagatgatcttcccggtaaactgcggcatcgcggccacttcgacgatccgtttgatcaggtcctggccgggtttgtcgttcggatgcgccttgccggcgaaaatgaactgcacgggacacgtcggattgttgacgatgttgttcagccgatcgaggttcgtaaagagcaggtgcgcgcgtttgtacgtggcgaagcggcgtgcgaaaccgatcgtcagtacgtcgggcttcagcgcctcctgaatccggatcatctgccgcggcgagtcgaaccggaactgcttcggatcgctgacgcgttttttgatatggtcaatcagcttgtttttcagcacgagacgggcgtcccacaactcccggttactgatattatgcactttctgccatgccgagatcttgtaatccttttcgaggaacccgtccccgaaaaaccgggcgtacagccggcgcaggttcgcggcgcaccaggtcgggaaatgcactccgttggtcacgtagccgatatgcagctcgtccttgaagtaccccggccacatgccgccgaggatctccttgctgacctcgccgtgcagccagctcaccccgttgacctcctgcgaaaggttgcaggccaaaaagctcatcgagaacttttcgttcggatcgttcggattcgtcttgccgaggttgatgaactgctcccacgtgatctccagccggtcggggtagtgggacatgtactgccggatcatcgattcggggaaagcgtcgtgtccggccggaaccggcgtatgcgtcgtgaacaacgacgacgaacgcaccacctccagggcttcgctgaacgacagctttttattgtggatcaggttgcggatccgttcgatcccggtgaaagccgcatggccttcgttgcaatggtacacatcctgccgaatgcccagcgcccgcaacgcccggataccgccgatgccgagcaggatctcctgcttgagccggttttcccagtcgccgccgtacaggtggaacgtaatcgaacggtcctcctcctggttcaggtcgtgatcggtatcgagcagatacagctcggtgcgccccacgtcgcagcgccagatgcgcgccgtaatgtcccgtcccgggaaagcgatccggatatccatccagttcccctcctcgtcgcgcaccggcgtgatcggcagcttcaggaaattctgggcctcgtagctggcttcctgagcgccggaagccgacaaccgctgcgtgaaataaccgtaacggtacagcaatccgaccgccaccatcggcacgttcttgtcgctggcttctttcaggtaatctccggccagaatcccgagtccgcccgaatagattttcagcgaactgtgcagtccgtactccatgctgaaataggcgatcttcggcccttcggcatcggctttctgccgcatataatcctcgaactgcgcgtacaccgcatccattttgccgaggaatacttcgtctttttcaagcgccagaatccgcgaataggtcagcttgtcgagaaagtcgatcggattcttttcgcatttgacccacagcgcgttgtcgatgtattcgaacagctcgtaagcgctcatcgtccacgaccaccacaggtttttcgaaagttcttccaacggacgcagtcgttcgggcagcttgcgttcgaccatcaggcgcgtccacgacggggtattgctaaccaactgttgtttgacgaagttgatctgctcggtatgcgcgccgcccccgtcgtatgcggcgcggttgttccgcgtcgtcgcccggtcgttggccttccggtacgcctcgtaataaaattcgatcaggtttttccacagcgcgatcttcgatatctcaagggccgacacccggtacgaatcgtattgctgccgatccatcgcgcaataatttttcagcgcgtccgagatggccgcaactacttccgaatcgttcgtatcgttgcgcgcgatcacgtcgacgcccttgtgttctttcagtttgccgtcgacccacaggccgaacccggtcagcgacgtagtgatcgtcggcaccgagaaagcgatgctttccagcggagtatacccccacggctcgtaataggacgggaataccgtcacgtccatgccgcacagcaattcgtagtagtgtttgttgaaaatcccgtcgtctccgttcagatacgaaggcacgaacaccaactgtaccggacacgccgggtccatcaggcgggaatttttgatccggccgatgatcgggtcccactccggagccgaaagataatgcgtcgtattgcgcagcacgttcggatcgatcgggttgttcggatcgttcaggtgcgcctgcaagtctttgcgcggcccgttgtttccggccggcacggttacgtaggccagcaccggacgttgcaacgaatcgtcttcggagagcttcaacagcgaatcgacgaacacgtccagtcccttgttcttgaactcgtaacgcccgctggttccgacgatcagcggttcgcggtcgtatttgacgccgagacaggcttcggcgacttcgatcatcgccttgcgcgccgaagcgcgtttctcgagcaactcggcctcttcccagacaatgtcgtcctcgaagccgttcggcgtaacgacgtcgacctctttgccgagcagatagcggcactcgcgcgccgtcaggtcgctgaccgtcgcgaaacagtcgaaattggcggccgacgtcttttccagcgaatgtttggcaaccacgttgaaccgccgcgccagttcgtcggcgttcaaccgcgtcatatcgccgtacagcggcagtccgttgccggcgatacaacgccccatgaccgtcgcatgggtagtaaataccgtggcgacgtaaggggaatgtttctgtaggtacaatccgccgctggccgtcatccattcgtggaaatgagccaccacccggtcggtcgccgaacagaaataattcacgtagctctcgatcaccttgccggccgccgcaccgaacagcacgggctcgatataatcccactgcccgctgatcgaatcgacccggtaactctcccacaggaatttcaacacatcgtccttgctcgagaaaaactggctgaaatcgaccaggatcgtcaacggcttccctttgactttccaccggccggtcttgacccgtatgttatgattggcgaacagcacttgtttccactccttgagcagcgccgggtcctcctcgaattcgaggttgacatcctcgcggtgcacgtcgggtccgatcaggatgtaatggtctcccagctgtttcgaaattgtcaacgctttggttgcgatcacggtatggatgccgccgaccttgttgcacacctcccaactcacctcgaacagatagtcgggcatcttcttaacttcttcgttgtttgacattttcatctatttttagatatacttgattttcaatttaacgttcctaacaaagatacgttttgtttccggaatcccggcgtcattccacataaaaaagatcggatatcaccgtatccgaaatcagatagtgttcaaacggaatgcgatacgcggagcccgtgcgtaccagcgtcccttcggccagaaatttaacggccagccgcgtgaaatattgcaatttccgtgccccgaatcggcgttccagcacgtcggcgtcgagccccgacgccgtcctcagcgacgtcatcacgaactcgttgtaggcggcatgttccgacagcgtttcgctttcgaaatgctcctgccgcggttcgcgctccaagtagagccgcacgtccgccgcattccactgccggagcgccccgtcgaacgaatgcgccgacggcccgacgccgaggtaacgggtgccgttccagtaattgccgttgtgctgcgatcggaatcccgtccgggcgaaattcgaaatctcgtaatgttcgaacccggctccggtcagcatctcgtgcaacaagcggtactgcgctacgctccgttccggatcgatttcgcgcaacgcgccgcggcgcaggcgtttgccgaaaacggttcccggctcgaccgaaaggtgataggccgaaatatgctgtacgccgagccggatcgcctgtccgacgttttgttcccactccgcgaggctcatctgcgggatgccgtaaatcaggtccaccgtcaggttttcgaagccggcccgctgcgcctccccgacggcccgcacggccgatgccgcatcgtggcgccggtgcatccaccgcaaatcgcggtcgatgaacgactgaattccgatgctgagccgattcacgccctcgactcgcagcgcggtcagccaatccgccgtcaggtcgtccggattggcttcgacggttacctcctgcagcccggatacgtcgtaaacgtcccgaatacggccgatcaacgcccccagttccgacggcgtgcagagcgacggcgtgccgccgccgacgtaaaccgtccgcaccggttcgccctgcagaaaaccggcacgacaggccaactcgtccgcaacggcagcgagcacggcctcttttttggcaagcaacgtgcaggaataaaaatcgcagtaatggcatttacttttgcaaaacgggatatgaatgtaaatgccggccataaaatctggggtattaaaacaatccgtacggttattatgcatacctttgcgggcggtttccgcacggattccgatgattacaaaaatatggaaaaaaagagacatataaaggtcgccggggtcctttttttcgtctggacggcggtaattctctacgggtcgctaagtccgggcgacgatttgcccccgatgggatggttggcccggatcccccatttcgacaagatcgtccacttctgtttctatctcggacaggtgcttctgttgctgctgtggctgcaaccgtcgcgcggaaaccggatctgggtcgccttgtgcgccattattttttccggaaccatcgaactgctgcaaggggagtacttcgaccggagcgccgactggctggacttcgcggccaattcggccggagcgctggcggggattccgctcgcccggctggccgaacgactgatttttaaaaaagattccgggaacgaaacgcccccgaacaacgacaattaactgcttaacagaaatttatcggagcgaaccgataataatttttttttaatattttaattgttattttggtaacaatacgtatctttgccgctgattaccggataaaaccggactgaacgatacttccgaaagaggagcattaactaaataaattaaaattatgtcaaagattgatttgagcaagtacgggatcacgggcgttaccgagatcgtacacaatccctcttacgatcaactgttcgcagaggagaccaaaccgggtctgcaaggtttcgaaaaaggacaggtaaccgatatgggagccgtaaacgtgatgaccggcgtttacaccggccgctctccgaaagataaatttttcgtgaaagacgccgtaaccgagaacacgatctggtggacttccgacgaatacaagaacgacaacaagccgatcagcgaaaagagctggaaagtgctgaaagacatcgccaccgacgagctttcgaaaaaacgcctgttcgtcgtcgacacgttctgcggagccaacgaaaacagccgcctgaagatccgcttcatcatggaagtggcctggcaagctcatttcgtgaccaatatgttcattcgcccgaccgccgaagagttggccgactacggcgaacccgacttcgtcgtactgaacgcgtcgaaagccaaagtggaaaactacaaggaactggggctgaactccgaaacggcggtcgtattcaacctgaccgaaaagatgcaggtcatcatcaacacctggtacggcggcgaaatgaaaaaaggcatgttctcttacatgaactacctgctgccgctcaaaggcatggcttcgatgcactgctcggccaacaccgacctgaagggcggtaacaccgcaatcttcttcgggctgtccggcaccggcaaaaccaccctttcgaccgacccgaaacgtctgctgatcggcgacgacgagcacggctgggacaacgacggcgtcttcaacttcgagggcggctgctacgcgaaagtgatcaacctcgacaaggatagcgaaccggacatctggaacgccatcaagcgcgacgcgctactcgaaaacgtaacggtgcgtgcggacggttcgatcgatttcgccgacaagtcggtaaccgaaaacacccgcgtttcgtatccgatctaccacatcgagaacatcgttaaaccggtttcgaaaggcccggctgccgaaaaggtgatcttcctgtcggccgacgctttcggcgtgctgcctccggtttcgatcctgaccccggaacagaccaaatactacttcctgtccggcttcaccgccaaactggccggaaccgaacgcggcatcaccgaaccgactccgaccttctcggcctgcttcggcgcagccttcctgtcgctgcatccgaccaaatacggggaggaactggtgaaaaaaatgcaggcttccggcgcaaaggcctatctggttaacaccggatggaacggaaccggcaagcgtatttcgatcaaggacacccgcggaatcatcgacgcgatcctcgacggttcgatagacaaggctccgaccaaaaagatgccgtacttcgacttcgaagttccgaccgcgctgccgggcgtagacccgaagatcctcgatccgcgcgacacctatgcggaagccgcgcagtgggatgccaaagccaaagacctggccgaacgcttcatcaagaacttcaagaaattcgaaggcaacgaagccggcaagaaactggttgccgccggcccgaaactttaagacgagaatcctttctttataaccgaaaaaatcccggcgcaaaaacgccgggatttttttcttcggcccgcatccgatctccgcaccaaaatcattacctttagtcattagacaaacctgcgtccggacccgaaaccgccggaacatgaaacgaacccaaccgatgaatctgtttgaaaccgaaacgtggagagcgtttttcccgaactttatcgccgtagtggccagtatcgtcctgactttcgggacggacagggccatccaggagtacaaccaccgtcaggacatccgggaagtcatcgcggtactgaaagcggatgcacgcgaatcgttcgagtattaccgggaaaccgccgacaactgccgccgcatctgctcttccaccgaccgcatcgtacgggccggcgaccgctacgacacgttgccgcccgaaatgctcggaaaattcctgacgctgttgctcgaaaaaaacgtattcacctccacgtcggcctcggaagacatcctgaaacaatcggggacgatgcagtacatggagcccgaactgctgtcggtcatcgacgatatccggctggccgaaaattcgatcaacgacgccatcgcgggatgcgtatcggatatggaaacgatacgcacgggcctgtacatggattcccgccgctttcccgaagcgctccgggatacgctcccgtcgggagaagggaccgtggcggccgtaaggttcgtgatggagtatccgccttgccacaactacacggtcaaaaatccgttcggcgacctggcccggtcgatcgaaaagagttgcgccgacctggaagatgtgctgaaccggatcacggaggcaggatactgacgatcgcgcggcgcatcccgccatcgggacaaaaatttaagggacggtttttcgaaaaaccgtcccttatcgattcatgcgatcgaaaatcttactgccttctggcaatcccgatatagtagatcagcgtcacgaccgccgacagagccgcgaccaaataggtgcgcgccgcccatgccaacgcctctttcgcctgcgcggcctgttcacccttcaacgtgtagctgccggtcagccattccatcgcgcgagccgaagcattgtactcgaccggcagggtgatgagactgaaaacggccgatacggcgatcataccgatcccgatccaaaacagcgccggataggtattcagcagcaacattccggcaataatcacccacatcgcccactgcgacgaaaaactaaccaccggcaccagcgccgaacgcattttcagcggagcgtactcgcgggcgtgctgcacggcatggccgcactcgtgggcggctacggccgctgcggccacactgttgctgctataaaccgactcgctgagattgacggtcttcgtggccggattgtagtgatcggtcaggtgccccggcgtcgaaaccaccttcacgtcgtaaatcccgttgtcgtgcagcatccgttcggccacgtccttaccggtcagaccgccgggaaacatcactttggaatactttttaaaaaccgattggagcttcgcctgcacgataaaaccgacgatcgcaataacgatcagcaacacccattccgcattgattggtcctaaatacatttttcaacttttttctttgtgcacgctgcaagacgtgcggtttcaacttatgatctgtttttaagaataaaacgtttttgctcgcgctttattacgttgtttcggattcctgtttccggaaagtcatataggcattggcctgctgcgacggcattacctcgatgtcgttgatattgacgtgcggcggcagcgaaacgacccatgcgacgatcccggcaatgtcgtcgccggtcagcggttcgacgccgcggtacacctccgcggcccgtttcttatccccgtggaaacgcaccgtcgaaaattcggtatcgaccataccgggacggatctcggtcactttgatcccgtgactcaggaaatccatccgcatcccctgtgaaagcgcgtgcacggcatgtttcgaagcacagtaaacggctccgttctcataagcctgcgttccggcgatcgaaccgaggtttacgatatgccctcccttgccgcgccggatcatccaccccgacacgacgcgggtcacgtacagcaaccctttgacgttcgtgtcgatcatccgttcccagtcgtgcgggtcgccctcgtcgaggtgctcgaaaccggacgccagtcccgcattgttgaccagcaggtccacttcccggaaacggtcgggcaacgcgctcagcgcgccttcggtctgaaaacggtcccggatgtcgaatcccagcacatgcactttcacgccgtactccctttccagttcgtcgttgagtttctgcaaacggtcggtgcgcctcccggtgattacgaggtcgtaccccagccgcgccagtgcgcgggcggtggcagtccctattcccgaggaagcgccggtaaccaaagctgtcttttccataacggcattttattaatacggtagcgttttttcgcccgttctgcgcgcaggcgcaaaaaccaacctcccgattatatgcaaaaatacgaaattttacgttactttgtagcttttaaactattttacggcggatatgggcagactgaacctcgaatatttcctggcgcggcgaatcgcgacgcaaaccggcgggcgcaaaaacaacgtgatggtgcgcatcgccacgctgagcgtcgcgatcggcatcgccgtaatgatcatatcgctcagcgtgattttcggattcaagcgagagatcgccgcgaaactgagcggattcggctcccatgttcagatcgtcaacctcgacgggaacgtttcgtacgaaacggttcccatttcgaaaaaccagccgttcctgtcgcaaatccgcagcgtgcggaatttttcgggaatgtatccctatgccgttacgatcggcattccgcgcggagaacgcgcgatgcagggcgtcgtactgaagggagtggacagcacgtacgactggtcgtttttccgacaaaacctcgtggagggcgaactgcccgacgtgcaaagcggcgtccgcaccaaggatatcgcggtctcccgttcgctggcggacctgctcgaagtttcggtcggggatccgctggaaatgctgttcatccaggatccgccgcggcgcgacctcttccgggtcgcgggcatttacgacacgcagttcagcgaaatagaccacatgatggtgctgaccgacctacgcaacgtccagcgactcaacggatgggattcgacgcagatcaccgggttcgaaatcgccacgtccgatttcggacggctggagccttttacggacgacgtctaccaagtcgttttcgacaacctgacgggagacgaacacgactcgttgcgcgtcatcaacatccgggagcgtttcccgatgatcttcgactggctcgacgcgcacaacgtcaacgccggagtcatcattacggtgatgctgctcgtggcgctgttcaacatgatcgccgccctgctgatcatcctgctcgaacgcacgtcgatgatcggcacgctgaaagcgctcggcatggggaaccgcgccctgcagaagatgttcgtgatccgctcgtcgttcgtcattataaaaggaatgttttggggcaacgtggtcggcatcggcctgtgtctcttacagtactgcaccggatggatttcgctgagccaggagggatatttcctgaccaccgtaccgattttcatcgactgggggtggctggcgctgctgaatgccgcgaccttcctgttcattgtagcgctgctggctttgccgacgatgataatttcactaattttgccggagaaaacgatccgcttcgaatagtgccgaacgatgaaaccctataaccagacggaaagcaaaaaagaacaggtgcgaacgatgttcgacgggatcgcccgccggtacgacctgctgaaccacttgttgtcgctcggcatcgaccggggatggcgccgccgggtggtgcgaatggtgcgcctgcaccggcccgccgaaatcctggatatggcgaccggcacgggcgacctggccatcatgctggccgaagcgtgtcccgcagcgcagatcaccggcatcgacctctccgaacggatgctggccatcggccgcgaaaaggtggaacggaaaggactctccggccgcatccggctgtcgcagggagacgccgagacgccccgatacggcgaaggaaggttcgacgccgccaccgtagcgttcggcgtccgcaacttcgaagacttgccgggcggaatgaccggcctgtaccgggccctgaagcccggcggaaggctttacgtgctggaattcggtatgccgcagaaccggatcttcagagcctgttacggattctactttctccgggtgctgccccggatcggcggaatgatctcgaaagacggcgcggcctacgcctacttgcccgaatcggtcggcgaatttccctacgggaaacgcttcaccgaaattctccgcgacgcgggcttccgcaacgcgcgtttcaaaaacctgttcggcggcgtagcgcagatttacagcgccgaaaagcccgtttcatcgacgtaaaaacaatcaagcccatgaaaaaactgattatcctgctgctgatactgccgatcgtttcgtgcgtacgggtcgaagatctctcctacgacggaatcgaatccgtacaagtccagtccgtaggcacttcccagacggccatcgacctgttcgtacgcgcgtcgaacggatcgggaacgaacctcacggtcgcgcgcgccgaactgacgctgaaaaagggcgaccgaacgctggttcaggcccgggtggacgaaaaggtaaaactgcctcgcaaattcgacggcacggtgcgcgttccggtcaacgtgcgtttcgaaggcggtatgctcggcgcgatcggcgtaatgagcacgctgtcgcggggcgtccaaggaacgaccgtctccggcgtcgtcgtagcccgggccggcctgatgcgcaaaaaatacgtaatcgaggatatggagaccgaacgctttctcaggcagttcgggatcaagctttccgacatcctgcaaaatatcgatctatgaaaaagttcatgacgatcctgctgccgctcgccgctgccgcagccacggtcgcagcccagggactgggcgggtttaaaaaccaactggccgcaccggacggttcctacggcagccgcatacagattaccgagcacggcacggccgcttcggccgtcagttcgatgcagacgaaccagtccggcgtcaaaatacgcggatatcgggtacgcatcttttcggacaacagccagaacgcgcgttcggcggggcagaatgcgctcagccgctttcgggagttatatccgggcataccggccgacatgacttacgacactccttatttcaaggtcaccgtcggcaactgcctgactgcggaagaagcgaccatcctgtggggaaagatcaaagacgctttcgaccgcgcattcgtcgcccgcgaagagattccgttgtcgtctttcaaggagagccagtcgcttctccccgacagttccgccgggaatgccgccgcaaaagagtaatattcggggctttcgatcccggcgccgcttcggttatacgaaaaatatccgacaaaaccaaattttttaccgggaaaattcatttttcggcaaaaatttcactggataactgttccaataaccaatcatttttatacctttgcgcctgaataattcaaccaattaattcttgtcactatgaaaacttttactaaatctgtaatgatgctcgcagttgttgctgcctgcgtttctttcgcttcttgcggtaacgccggcgctgaaaaagccaaagccgactcgatcgccgctgccaaggctgccgattcgatcgctgccgccgaagctgctgctgccgccgctgccgctgctgctgccgatacgaccgc

SEQ ID NO: 4 - DNA, 37109 bp, unidentified
  source 1..37109: mol_type = unassigned DNA
ggatttaatcccagttcttcgccgatggcctgcaaggacatctgagaatcataaagcgccacagcagcatccatctgctctttcagattcttcccgccatcgtactccggctttagcttcttccgaccaccaccgggcttccggggtttataagctcttttctctcccataatcattcgtgcagctccagtggcagtccatccgggtcgtggaagaaagtcatcttcttgccggtgtaatcatccgcgcggattggctcacattcaatgcctacctccgccagttcattcactgtctgctccacgctctcaacgcagaacgcaaggtgacgtagcccacaggcctccggtcggttcacacgcatcggcgggtttttctcagcgaaaatctccagctccgtgtgttcgttaacacgcagatccagcttccagtctttacgctccgggcgatagttttctctgatgacagagaatcccagcttgttcacatagaaatccttagctgcttcatagtcagatacgatgattgcaatatgatgtatttttgataaattcattctatgtcacactccatttcttttatttccgttataaactatataacgaccttcaaaaaaaccgtgtgaacttctggagttcagtttgtccacacggccgatcttatttcagtttttcgaggatttcatccgcactcatgccgctggccggcagcttcttcagcacagcctctgcttcggtcttcttcgcttcttcagcgaccttagcatctgcctttgccttcttcgattccagggatgccacttctttttcggccttcttcagagcagtcttcttctctttcagatcagccttctaagtgtcaatgttggcagtgatggatgcgatctcagcagtcagggaagtgatagcttcctgcttctctgcaatctgggttgaatagttggtattgggtttgagacggtttttgctgccttttgttctgggcataggtgacaacctctttccttttatagtgatttaagtatagcactgtgtttgggtgagggcaatatgtcttaagcctgtgcaattaaaatcaatttctatgagtagccgcttgaacttttctctctgcaaattctccctcggctttctttattccttccattgcattttcaagaaacgcacgtgcctccttcatctctgatttactttttagttctccatcaacaaaagattccatatggtttcttgcttccacaaactgatttttaatattactataactctctccacttggcaaagaaatatagcacttgttaagttcgctgcaaacattaacacagcgttctcttatcgatttttggttaactccttgtttatctactgtaatcaataaactactaacttctttaagctgattttcagtggcttctaaaatatgttttagtttttcatactctttatcatcaagtacttcccgtatggcttgttcagatttttttactgaattttttaatgcaaataattgccaaatcgtaattgcaaatccgacaatcgtgacaatacttgctacgtttccaatagtactccacataattttactcatcttttaacttcaaatatgaatacttaggcatttctccatataaattatcaaaaacttcttcccatctattctcgtctctgaatccttttgcaagttcctcgcacatgtgataatcgcctctgtggtctggaacaatttcgtacattgccagttcaaacccaccatgaccacacttttcacctcgctcaatgcgttctctgtaatcttgcataagatccatgattcttttgtactgttctctggttaaaccatactcaaaaatactacggctcacatcatcgttatcaaaaagcaattgctgacggaactcaataaagtccagacgttccataatcttattatactctttagtatccatggctcctgctccttcattatcttaatatagttcatcatatcttcgccaatcgtaaaatcgttgcctgctgctcaccacggagaggtgtgtaacttatcagagcagcgtaggtagctaccgctcctagtatatcacaatttcatccagttttacagacactttcttaccttcatcaccgcacaatacatcaatccgccgattattccaccgactgtgttgtagaagatgtctgatagctggaatgttcccaagcgaagcaataattgtagcatctcaatacttacagaaaagataaatgctatcttaccgctttgccacagtatcttcttccagccgcttccaatcttctctccgaacgtccacatcactactgctgaaaacggtaccatcatgatcaggttctcgatgcactcagtagtcagcttctgttcgccattcacagtctcccagatgccccaaccacccatgacatcggataaaggattcatccaaagattgcggtttaacagggttcggaacagaataagtgaagtcacaaatgccagtaagaacaacttccgaaagaatacactctccttgaacttctgataccatgtcactatggcattcttccatcctttgcctgcatgtattggctcataagcatatagatagaagaacatgaccaagaaggaaagcaggagcgaaaaaccaaacggctcatagagagcagtcaatatatttgtgaggatctttccgaataaatcaatcgtttctttcatcatcatttacagatcactgaacaagtcagccttgtaccccccgttctccagcatcttcttgaagctgtcctttacggctgcgacatcctcacggtaggtcattccgtaccaggtatcgttcgttttcagaaccttcactgacatctttccctgctccagcagttcgccgatgaagatagggatcagatactctgctttcagcggattgcccggaacttctttctcaaagaactctttgaagccctcttccagtacatccaggaactccggagtcaatccccacatgttcatggaaaccagagaattcacatcaacagccaccccatctgcctctgccccatttgcagtcttgacgatgttcttggtctccacaacctcagtcaagttgttatcctcatccatcttgcagataccacgagtcacaccaccgttatccggcagagtattctttaagacaaagcctgccatgcaggactttccgccatttaccagatactcatgtacggctttaaaaccttcctttccatagtaatcatctgcatttatgacaatgaatggggtcttgatgacatcctttgctgcaaggactgcctgacccgtcccccaaggctttgtacgtccttccggcagagttcccggaatatcgttgatatcctggaaagcgtagtctacagttacgttgtgagaagcgcaaatagaggcaatgcggtctccgatgacttctttgaactccttctcgatatccttgcggatgataaacaccacatgattgaagccagcctcgattgcatcatgaatcgagtaatccatgatgatatggttagaagcgtccaccggctccaactgcttaattcctgttccgaaacggctaccgataccggctgccataataagtaatgttgttttcatacttctcctctctgtactcgcagtttaatttaccaataaatattattctaggcttttctcaacacaaatacttgtctacaaattccaatactgaagccaatgtgtcggcctgtccaaagtctttactcttagcatctgttccatctccattaaccagaacagctttgcatccagccgccaatccagctttaacatcgttctcaccatcgccaatcatatagctctggctcagatcgatattataatcatccgctgcctttagcaacattcccggcttcggtttacgacaatcgcattcaatcttcaattcttgtacttcaccttcatatcccttgtgtggatgatgagggcaataatagattgcatcaaggtaagctccctgcaagccgagttctgtttccatcttattatggatctcttccagttcttggaacgtcacctctcctctagcaataacaggctgatttgtgactacaattgcaagatgaccggacgcattgattttcttgattgcctctgccacgccatcaatcaactcaaagtcattaatgtttctaaggaacccaacatatttgttgattgtaccatcccgatcgaggaacacagctttctgcttgtttgatagatttttagccgatactcttcctgctttgaaatcctcttctacctgatggaagcgctctggtgttcccatatcctttacatactctggagaatcgtagcagaacatcttaccagttccagccaaaggttttagaagctgacgatccaaatctacttttacagtttttcctgtcatcttgtccacagtaccgattttttctgcatcaatcgacaccatatcaaggactttaggatcaattacatgcaggcctgcattgactctatttttataatatgtcgggcgaacatcctccttcgccagccaagatttaactgacatatctttttccgcaatgatgagcccgctatcatacggatggttattgggatgggtgaacaatgtcaccaatccaccatgttcctgatggaatctaaccatccggttgaaatcaacatcaaaaatggcatcagcattcaaaagtagaaacggtctatcccctaattgctctcgcaacttaaaaagtgcaccagcatttccaagcggtgtgacttcattgtagtactgaatcgaaaccccaagtttagagccatctccaaaatggttcatgattttgtctcccatatgggaaactgtcataatgatatctttaaatccctgatttcttaacgagataatctctcgctcaagaactggaacaccttctatcggaatcaaaggcttcggaatatcagggaataattcagatattcgagttcctcgccctccggccataatcactgttttcataatttttcaatcaactttcttactatcttttctgcttgctacaattttagctggaaccccagccaaagaaactccattctgctcaaagcttttagttaccactgccccagctccaatataaacattatttcctattttaacatttccaatgacaactgaattcatccctaattcgcaatgatttcctattgtgggaccatttccaccatctttactgcccaaacaagttgatccaattatattacaatattctccgacagatgaagtttcattgatgataatgtttcctgtatgaaatatatgtagtccttttccaaaaacatttaacggaatttcaaaccctaatcgcaaacctaacctatttctataaaagttatggagtttaaataagagtcgtgttgtgcccccccgaacaatttttatagtattcacaaattcttaattctcgtaagtatcggcgtattaagctacttctgccatattccttttcttcaagttctattacatttttcaaatcttcttttgttgatatcattctactatttctcccttatgtaaaattgttcttatcttttacattattttcctttactcttaataatgcctaaaatcctcgatttttcatcacgtgaaaatacaaaagccaaatgtattatacaccccataatgccacacaagatcgcggttagagcaaatgacatccatgtgctcggattcaacgcatttgcaattaaagtaaaacttattgtcatgcaagtgcaagaaattatcgttcttaaaagcgtcggataaaaagtaaaccattctatttttaagcaatgtgtcatataaagcgggttcgtcacaagattgataaatagcataatgaccgttgtagttaatacaatagaatatatacccaacgaactatattttactagtattgccattcctgctacattaagtattccacctacaactgtaaccagacaaggaattttatttttaacagtcaatgtgtatatataatatagaggatataccggtccctcgataacggaagaaagcatcgtgataactgtcagcacatatatcaaatcaatatcctgtcctggtatccaaagggcataaaaaacttttcctaaagaaaaaaaaccggcgaaaacgatacttgaaaacaggctcgttaatttcattgaaagctttaattccgaaacaagtttattcttatttctatccgaataactcttcagaagtagcggttgaaaaggttgtgctaacaactgattaaaacttataaaaatacttgaaattgtttttgttattgcaatttgtcccattgctaaatcagacaaccacaggtttgtcactatcaaatccaaccctgaattcagtgtgttcccaagactattaatggaattccaaataccattcaccactaacttttttattgccttaaacgaaacgtttttccgttttatctttaattccggtgtatattttttatagatgtagtaatcacctccgaatatcaccaactgagctatgcagatgaccactcccacttgccaaacttttggggtgaaaaaagtaaatacaataacgtaaaacaagacctcaaaaatataagaaaggcttcgaaaaattcctacaatatctaatctgttttttatataagccgctgccgtgtaagatgtaccaacagttgtcaaaacgaaaccaagaaaaacataaagaaaaagcaattttacagaagtaactagttctaacgagatgttaagtattctatctaaaaataaaataaatccgccggcaacgatcataatgactgctgaaattgccacgtttccataatatacagaagaaatatattcttgagcctttttcatatcattattatgatatgaaaccgtaatatacctagctgcatacgagttcaaagcaattgtaataatagtagcatactgagtgaagttctttgctaatgtaacaaatccgtatgcctcaacgccaagtttatttgtaatatacggagttaagataaagctaatcaaaaaactcaatattgttgctatccctgatgtcaaaattgtcattaacagtctctttactttattcatcttatctccttacactctatgaaacctctcgttcatatacaaattcatacaaatgattaattaataacaaccaaatccatgttgcacccgtaccaagcaacacttcaaaaatcatatctattagcaatcctatccaaacaaattgaattcctgttcttttagatctattcggaattttagtgatattaaaagctatcgtaatcattattaaacttaaaataaatacaagtataataccaccttgccaaagacaatccagtaactgattatgcggatttacaaaagcaatactttgcaaaagtcccgttgccgtttcaccatcaactactccccaaccaaatatgggtttaatagcaattaacaacaatactctctcccaggccgtactacgacctgtaaatgtcatatccttatgtaatacgccttcaacaaatggtttcagtaacgaagtggaccccaataaaatcaaaaccgttatacatacataaatcactagaataccgtatgaattcatatttatatttgttttctttttatatgttaaataaaaaatccccacgctaacaagaatagcaacaattgtcgcagtacttgatttgaccaacatcatagcaacaatagaaattccagatgttatcaaaaccatcactttacttttattattaaagaagtatcttagccatgtgattatagataataacgcataccaatagacccgattatttttatttccgtatatccattgtgcttcttgtgaagatgaccactcattccaaatctgttctgtttgatataacccattcggaaataaaactattgaagcaaagtcaattataacaaatgttatcaatataaaaaacattatattgattgtgctatgcggtgttcttttaagtaaatactcaatagcacaaagcataaatacaatttttaaattcgaaataattaaatggatatctgctgccttattatgatatataaatgttattacgattaaatatgcaaaatagcatattgttagtatcataaagcgcgacggcttgtattttactgaaaaaagataaattgccactccaaccatcattatatttgatacaatttgcataacttggtttgaaaaaaatccaggtaaaaacattgaaaacaagtacacagccaagagaatcgatgattttttaacctttaaatctagcaacaatctcacctcgcattttcaaaattttaaatgtcaaaaaaatctgtcctcaagcatcaggcataagcaatgatatactggcaaatgcaattcttgaatcatgtaggtctctgtctgcggcactttaatgcaaacatcgctcatctgttcaagcttactattttttgctcctgtcaaaccaattaccttcattccttttgcatgtgcagtaacagccgcatacagaatattcttgctgtttccgcttgtggatatgcctaaaaacacatccccatctaccccatagccattaacttgttgtgcaaaacaaagtaacggttcgcagtcattcatgtatgctgttgatagcgccggatgaccatctaatgcaattgccggcaatgctccttgtaaattttctacaagaatctttccaagatcttcactctcatcaattaatttttgagaaatttctacatccaattttcttggaagtttaaatcccttcatcaattctccaacgatatgttcagaatctgctgcagaaccgccattccccgccacaaggagcttatgtcctgtagcgtagctttcctcaagcataaaatatgcacgaataatactgtcttcgcagcactctaaaacaggatatctagaaattaacagttccacatgctttttcaatttaccactaagttctctcatcgttattactctctttccgtcatgcattcggctcatatgtttccggtgtataatgaatcaccctcgtaccgccatcttcaaacgcaaatgggatgtgcatcagatcacgcatcgcccatcgcactgcatcctgtcgctcaggctgaacataaaatacaaggaatccaccgccaccggcacccagcaattttccgcccaatgcaccagccgccacgccttttgcataaagttcatcaatactatttgtagaaacagccgatccagtttggcgtttaagtttccaagtgtgatccagcattcttccaaaatcatccagatctgcattcttatctgtcagaacacgttcagcatcatcaactagagcaagcatctcattcagctgtgcaatcttatcctgttttcctgctgcattcgctttttgcacatccgaagaaaagcgggtaaatccggtaaagaacatcattaaattctgattgagttgtttctttcgctccggagaaataatgactggcaaaacctcatatccatccgcattaaagttaatgcggttaaatccaccaaaagaagcagcaatttgatcctgccaaccaccagcttcctgacagagattccgttccaaataaattgcttcatctgccagtttcttcttgtctgcgtacttacccttcaaagcataaaaagcatttaacattccaactgcaaaggaacttgatgttcctaagccagaacgtgccggaaggtctgcttcatatgtaagacgaatctcatgcatatctaacattttcattgcgttgcggattgcagggtgctgaatatcgtcaatgtttgtcacgcgctccgtctttgaataagacaactccgtagaatagtcaaagaaccttggtaaatggcgtacatttacataacaatatttgtcaaatgtggtagataaaacagctccaccgttttctctaaaaaaattttccatatctgttccgccaccaaaaaaagacatacggaatggtgtttttgtgataatcatagttttactcctgttgttttttcgacaatttccctcatgatattataagctgcattttcagaataaagttgatcataaagtgtgatcagttcctcatttttcttacagattggcttcccatctatcttgttgaaagctttcagatattcttccgctgtatcacatttaaacacagttttatccttcatactatctggaatctcttcccagtatccatatagactttctgaagaccctaaaaatatctttccatacgagattgcctctgcagtttttattttcatacctccaccatctgttaagggtgctattaccatatctgcgtaactatagtattctgataaactgtcaacaaacccaatcacatggatatcatcgtcatcaaactcatctcgtactttttctaatccttttccgattacccatatatcataattctctttgacattatcaaatactgtatcacaaaaccaatgcagaccctgaatgtttggcaaataatatgtgccaacaaatagaatatgttttttatttccacaatatggattcaagcccatttgttgcgtgtgatttttcgatacgcatacaggaaaataaaagtccgcatccacattataatatctttttagtaacttattttcatttttgtttaagacgatattggcgtctgtatgtatcgtgctgattttttcctgggtcaatccaattctgaaatcaattttgtcgtaccatggtgcgttttttatccaaattctaaacaactctgccttgacgtcatgaaaaaaggtgacaactgccactgcatcgcatttttcttttatcgtttttactaaatttccatagtaagaatcatcaacaaaaacaaaagaaatactctcattttttatcaattgacatatatcacctataatcttattactgaataaatatgtatttccctctaaacacctattcagtcgatctaaaataccgtgatattttccatatgcaatatacttttcttctctgcaggcagtctcagatatcccaacatccactacatatacattttcttctccaactaattttttcaatacattcaaatgcattcttgagcctactcctgcccctgatacatcatgaatgctttttgatataaacaaaaccctcatacgattgttcctctcttttatattttcatatccacacaagttaccttgtttttctagcaattcataatattgtagaatctctttttcattaccatactcatgtttatccaagtaacactgaatggagttatacaattgaggattctctctaagttcaattattccttctgctattgcattaggacttatatcagtaatcagtccctctttcttatccttcaactgatccttaattgtagaataattagttgccagtattggttttgctagtatttttgcttcatccaaaacaactgattttccttcccatcttgaaggctgtactaacaaatcgcaactcctaatatacgggtatggatttgctctcaatcccagaaatgtaatatactcctctagatcattgtcttttacttgtttttttagttgctcttcaagctcacctgctcctataatccaccaatgaatatctgaatacttttctttcaagattttcactgcatcgattgcaaaatcatagcccttttgtcttgttaaacggcctattgacaacacattaaactgatttttctcaaactctgatacttcgaactcttccgacatttttttcaataaagagcctgatgttaaattgggcaaacaataaaatttatttaccatggcaggataattctgttttaatatctgcacacatttatcagagatacttacaacgctgtctgctttttgaaaatacttctcgtaaatctttgcatcttcatatttctttatttcgttgaaatcgttatgaatccaaagtatttttttctttgcattaaccttgtcaatcacataatatgatgcatcgccctctaagaatccaatagcaatatcatattcttcttccaaattggacaagtaccgtttatagaattttatccatctctgttgtcttgcattttccttgtaaagacatttacatataaatgtacttgtccctcttagaattacagctttaatacctgaaactgagctaaacatccctctatcaattttataagcatattgcagagaatctgtaggctgtaataatcgtacttccttaggaatttgagacaaaaacagtccttctcgtttgaacagcagcaaatccactgcatacttttcataatctataagatttaataaatttacaagacttttttctgctccgccactacccaacgatggcatcacaaacaatatgtttttcataatatttctcttctactcttcgaatcactattccaaatatctgttttgaatatatctacccggattattaaaattcagcacttttgcatagtttcccgccgccgttgcatttgatggaatatccttggtaacaacgcttcctgcaccaatcgtagcattatctcctattactgctgcttttccttcatttgagccaatcgttacaaattgagaaagattgcaattatttccaataactgttgaagggttaacaacaacaggtcctccatggctaatatatagtccatatccaattttcgtttttctaagtatctggatctgctggtgatttctcaatttccataggattgctcccagcaattttaatcccccccgcatttaccaaccgaaatgccacggagaagcgaaagccgtcctctttaccatatgttttgacaaattctttagatgatgttgttccggcatagcgaaacaaatcactttttattaactcaattgctcccatacttcttttccaacccactttgcaatatttattctatactgttttcaatcagcgccttataaaatgtgccttctgcttcgatgtccggtgataatttatatgtcagcttatgaatacctgtaagctttttaatccaattccatttctcttctgaataatcatcagctaaaaccttaacaagatactcgctataatcactgttcatatagggaattgctttctcaacttccagattactcttcaccaccaatgttataatcaaatttggtagcagatactcaattacatgttcgtttttgagccaatatgagaaagcaacatttcttatttctcgaatagtcttatttcccttttttgcatgtaggaaccaagccggatacagcacaggattgtcaatcagcaacagcgaattacgcacagcgaaaaaatcactgtttaggattgtatctggaagtggttctgtaaggtacacagttgaatcgatccacgttccaccataatgctccagtaatgcaaatctcatcaaatccgcatatccagccatcggaatctgtccggcatcctttttcttttcgatgtaatctggcaatcgaatgtaatctgcaagatttcgatcattcagcaaaatgattttttgattggaatattcacatacagattcatagcacttctgaacaatgattggtgcctgttcaattcccttgttccaataaatccagatcggattctctacatcattttcgggaaagctaagcccctcaacatctgtgtctttatactttaaatatggttttatcttggtagaagctcgttcctgccacaataccttccgcacctcataatccttgacaagatgcaatttgataaacataaatgcccctcgtttgacggcattcacaattccatatctttgaataaagcctttcatgccaatattttgatagtagtcattcagcataataatttaattgtctccctttatcttgcagaaactactattcaaaaggctcatagattccgcaccagataatggtaaactgtttcctccttatcaatcgatggttctaatttataggttagtttatgtatcccagtaagtcgcttaatccaattaaatttttctttgtaaacttatctcctaatactctaaccagatattcgctgtagtcactattcaaataatgcatctttttctcaacctctggtgatgacctcattatttgtgtaattacaatatttgaaaacaaatattctgatacatgattatttcgtttccagtaggcaaataggacattacgaatctcacaaatcattctattatgttgcttggcgtggatgaaccagaccggatacaatactggattatcaatttcaccgagtgaattgtgaaacacaaaaaaatcactatttaatgtatctctgaacatcaaatattttttgcaaaccgctgtgccccccacgattgccaaagcagttttctcagctcataatccttgacaatatgaagtgggttacaaagaaatttgttccacattcttttctcctcgataaattttcatcagttttatatagtagctatctgtcgtttcataattcacttgactacaattctttgtatatctttccaatacgtcttgtgtttgaagaactttctttatcgccttcatcaaatcttccacattacctgcttcaaacaattctccggttttaccaggctcaattaattctgggatacctcccattttagatccaacaacaggcgtacccaaaagtaccgactccataacagagtacgggcagttttcataccattcagacgggcagacactgattgctgcctcagcaataatgcgatagagttcttctccagtcttaaatcccagatacttcacattgggaatatccttcattttatcaaccgacgggccatagccaataaacacaaattctgtatttggcatcttcttggcaacttcaagcaaagtatctgttcctttgtctcgcgacagatgtccaaactctaatacataaccctttttttgaatgttatccaagtgcggcatctcttttttgaaattatgcaacccgatggttttatcacggaatcttttctgcgtgtccaactttgatttaagaaaataactacagcaaatataggcatccacatatgagtatgctttactatatttccacatatatccatccagtgttccaagaagactttttgctctggaatttttcaagcatttagtttgaagacaatgaatataatgaccatccaaacaccgttcacaaggcttcatatccacatcgaacattccatggctggggcaaataagctgatagtcatgtgtcgtgtaaacaatcttacattctttctttgtttctttacgccatttgttagtttccagaataatagaaggggtcagatgatactgtatattgttgagatgcactacatctggctgaaaatcatctaaaactgcacgaatttttttgcgtgcttctcttgaatagataatgcgaaaaggtgcatttaaatttgcctttattccttgagaaaaatccatattcgttacatatgaaccgattcgatttcctactgtatttttttcattttcaagaccaaagtactggacttcatgcccatgtccttctaacatttttcccacatcaaatgtatacgtttccgctccgcccttgggaaatataaatttatttacaagtaaaatccgcatatcctaacttcctcatctcctgtatagattcattgtttcttttgttacaaaatcccagttgtattttctgaaaataaaatcagtagcttgttcttttattttcgtaatcatttcaggataatcacatgccttttgaattttggtgagtaaatcattaacatctgacttcttaaataccaatgccttgtcttctacaacttctgtacactctgggatattcgaaactagacaacaattcccatagctcatagcttctaaaagactcagtggcattccttccaaatctgaaggtaacgtatatacataagcattactatatagttccttcaatatctgcccctgaacaaatcctgtaaaaataatcctgtcatcatcttttgctgaatcctttaattcattcataaatgaatctgtatcacttgaaccacctgctattactagcttcttatcagtcttaacattcttaaatgcctcaaccaaatatctaatccccttttccgggactaatcgtcctaaaaacaatatgtaagaatctttttccaaaccatatttttctgtaattaattcagctgcttggatttttggtctattcactccatttggaatgaacactgtttttcttccatactctttctcaaaataatcttgaacgcctttactaagcacaataatttcatccgcatacttcacagtattcttttcaccctgatgaataaactttgaacctaatccacttttccatttttcacgttgccaatccaatccatgaattgttacaatcacttttttaccaaatagttttggtaaccacgcgaaaaatgccggtccctcagcatgaatatgaacaatgtcataccggccaaaagcacaacataatgctgcaaaaaatgatgatgatacagctgcaagaccttttttctctattgttgggactgttttaagcctaattcctttatattctttaagtcgttttgaatcatattcagaaccactcacatgatgaccacctctgttgtagcatgtaacattatgcccttgtgcaaccatccttgagcaaagttcttcaactactatctcaactccgccttctcttgatggaattcttttttgtccaaacatagcaatattaagtttttccttacattgctccatcatttcttaatactcctgttaaagtttgaaaaattatctttacatcccccttaacactccactccctaatatactggatatccagcttcaccacttcctcaaagtccgtgatattgcttctgccactcacctgccatagtccggtcagtccaggtctgaatgacattctggctctatggtgtggttcatacttctcccactcatcgagtgttggtggtctggtgcctaccaggctcatatcacctcttaaaatgttcaagaactgagggaattcatccaggcttgttttcctgataaactgcccgattccggttttcttctttccgtttggcagcaccttattgcctatgattctcgggtcaaagtccatcttaaacatcattccgtcgcccactttattctgtgccgcaagctccttctttcgctcctctgcatccatatacatgctgcggaatttatacatcttgaactttctgccgtttctgccgactctctcctgtgagaagaatatcggtcccggcgatgctatgtatatcgccggtcccacaaatatcatgatgataagtgtgaacaggcagcccaccagtcctccgactatatccatgcccctctttaccagaagtgcgctgggatttgcatagttctcgcttgatgtaactactgtgtagtcgcctatcttttctatctgcttgtagccaccatgggctgtaccgttttttgctattcctgtatgtactgcaattcccatctctaggaatatatcttccattttttcaggatattcatcctcgctgcaaggcggaatgagcacctcatccacccattcatcgcacgcatagtctactatgccatcgtgatttgcaactatcggtatgccgcatatagtctcacccttcatgtctgtatccagtgaagctgctactatctttgtatagcctatacagcttttctccactgtgcgcagtgtatcacgaagtattgcatcaggtgctatgacaaacagtgatttctgagatgctgcaaagtcctttttcttaaggaaactcttgagcgccagtcttgctacatatgttattgtcacatagattggaaacatgatataaaatgataatcgcgagtatatatcagccatctgtgtggtgaacagaaatagcgctgtcaccataaatacaagcactacgtgcttgcaagtcgatatgaattcatccagatatccgcgttttagggcattcttgaatgagtcttccattatctccacacagaaatctatcagaatgaatgctacacccagtatacggtagtccttgtccacatatgggtttttaaagccgaagcgtatcacatatgaaataaaaaatgctataacaatgcatgcgatatctataaacataaagtctatatgctttgtccattctctgcctttctttctgtacattctttccaaattctccttatgtatctttatttcccctatacccactccgaggggggtacctttgtaccccccccccgaatatttttagtctgttttgttttttgtatatttattcggattagcgtatcttttgttgtatctaattgggttttccaatgacttattttcaccttttttttattcattgtcaatgaatattaggttttctttacaatttttgacatattcgccaatctgtatagtattatcagctcaatattatacattatttatatgtcattctgcttatttttcctccaaaactacaccatatcgtgtgctaccatatattacgcaatattatcgctttaaattaatcattgctaacccatatacataagtatatacagtgcattttatacgatttgatgtaaaattgatgtatttttgaaatactgatgtatggaaggtccaaacggactcttcatttcttttattataataaatttatactatcttgcagaaaagctgagatcgaacgtcgtgcaaacgaatcaaatcaatcatatgtgaattgtcaaggtgctccggctactgaaaagtagtcggggatttttctatcatacctaaaaattaagcgcttacgtttatggcactctttctttaataaacgtcgttattatcttttcatatccctctggatcttttttataattctctgcatgtcctgcaccatgaactatataaatttctttactgcttttacaactattataaatttcttttgccatatataatggtgccaagttatccatatcaccatgaataattaaaatcggaatttttgtctgtgataccgccttacaagcatcagcctcttttaaattaaatcctccccaaagctttattcccacatctgcaaaaattttgaatacctctactggcattcctttaggcaaagagctcttacaatttaactctaacatttttgttgatgttgtaaatccactatcttcaataattccacaaacagaatctggcaaatccaaatcactactcattgtgaccactgctccacccattgaaattcccataagaaatatcggtgtttctcttccaaaatgttttgcagcccaattagcccaatctacacaatcataacgttccttcactcccaatgtgaaaatatttccttcactttcatcatgcgcacgcatactaacaagtaaaacattccatttttctttctgcgcaattttataaatcggcacaccatccacgtaactatgacttctaaacccatgaaagaagattactaatggagcattcttctttctctcataataatgaccttccaactttgttccatcagaagccaagataacaattttttcattatttttttgctttattttatatgcttcggtaagccactcatattgctcatcatctgctgttcccaaatctggccatgctgtttctcttcgttcacaaattttttggaacactaatttacttcctacccccaaaattattatcgaaaaaataaacattataataactactgcaacaatctttttctttttcactgatttctcagttattgcaagttgttttactctttgcttcataaacatcactttccttcaatatttatcacatctcagccgaacataaagtcgacacgttgaactacagtatttcttcaaatctggactgcatcagaattctgtctatgccctccttaaagaggctccgacaccaactgccattgccttcttcgcttccagggatgcatttggtcatttacttttacattatatctaatcatgtttcacatcttttcaccattgcatcttcacatcttcgccgaccataagatcgttgcctgctgctcaccacgaagaggtgtgtgattattacgagcagcgcagggagctaccgctcccagtatatcacaagtctgcaaataaatcagccttgtacacgccattcaccagatactcatggacagccttgaagccttccttgccataataatcatctgcattgatcacaatgaacggagttttaattatgtctttcgctacaagcacagcttgtacggttccccacggctttgtacggccttccggaagttctcccggaatatcgttgatatcctcgcggatgataaataccacatgattgaagccagcctcgattgcatcatggattgagtagtctatgatgatgtgattagaagcatccaccggctgtattttcgtgtgtaaaaaaaacaaaattattttttgatatgaagtatctctaaaactaattttaccgcctgattcttcattattaacagaacaatcatataaataacaaccgaagcagtcactgaaaaaactgtagaaatcagtactgaactaatatatttttctgatatagaacatatagtccatattgccaggcatcctatagcaactgagagaatgtccttttttagaaaactgaccctaaaatattttcttccataccaccatgttataaccattgacagtaactccgcaataacagtagtaaatgccgcagcattctgctggaatgttggaataaggataaaatttaatcctatattaacaagagccgcaacaatcgttgccatcaacaccttattttcgcacctataaggtattagaatgcacgatgtatagaaccaactaaaaatgctaaaaagcaacgcaacagaaagaatcttaagcgatatatttgcatcaacatattcttgtcctgcaataataaaaactatgtttttgcttaatgcaatcaatccaaccattgccggaacgacaataacaacaagtgcattcaaaatctggttggctgttctattaaaatagtctatttttttctctcccagataagcagataatctcggaattgaaacaataataattgcagccagcatttgttttacaatagtgtagattttggtggaaacagaatacaatccaactgatttatttcctgaaaagaaaccaagcattgtagtatctgcattcgtatatattgttgtcgctactgatgttgcaaacagaactaatattggagccaaatgcgttagaatttttgcattaatggtaagtcttatcttacaatattttcttctagaaacagcattaagtatatttgcgccgctgcatgatataactgcgatccatacataagcaaacaaatcactgctattcctaacgagtacaaacataagtattaatgaaataaactgaaacaaaatgcctcgaattgtgatatatttatagtcctcataaatttgaaatatccattcacttccaatcagcgtaaacattatgcttatgcttaacgctaccattattgaactatattggttaaatcttggaactaaaaggatacacactcctaaaattagatacgaaaaaactgtcgaaataaagttaattgaaaagacctccgaagcaaataatgacatcttttcttcattatctcgatatcttgctccctctctgatagcataggtgctaattcctaaagccgccagcaatgaaaaatacgaaataaccgactgacaaaaattgtaaattcctatattttcaacatgaaggactcgtgatacatacggaaaagtaatcaatggaaaaatcacctgacatgccgttctaatcatgttgagtcctgcattgacaccaatagatctttgatttctcattttttctcaactccttccacaatttttacataaaccgacattaataaactacgctatgtaattttctttttaaacagctagccagtatactttacatattatcctttttatcagttgctttattgacgaaaaagaatgatactgatttattaacggcttttccttcgtatgaagcccgatgccttatacagaaacggaatgtactgcgccgttttataaagaatagtcatttttattccaaccaatttccaaagaagcccacaagaacatactttcatagaatcaatgtaaaatttgcaatcacttttaaattcttttattttctcataaggaaccgtattcaataaattcgcatatgaaaaaaaagatgccaacccaacatgaattttagcttcatagtgcatcatacttcgcttactacatatttcatatattgttcctgctgcacgaactgaatctttctttttttctgtgtacacatttccaatagcagaattttctcttatcagatagttatacagtgggcagtctagcactataacactttcgcacttgagtaaatactcaaacacaaaaagattatcttcgccaatctttaattttgagtcaaaccttatatctccaattttttctttattatacagtttatcccagcaaaatgatgttagatatccatcccacagtaataaacttctgatagcctcttgactggaaatttttttctcctgatgaattacttcctcctttacatttgtgaagtccttaaaatatgaacactctactaaatccgctccattttttatttgtttatagagcgtccaaagcgcatccggctcaagggaatcatccggatcaaaaaaataaatgtattttccctttgcgtagttcagcccctgattacgcgcattggaaacccccgcattttgtatatggtaaacctcaatccgcccatcgtttgctccataataatcacatatttccccactgttgtctgttgagccatcatcaattataataacttgaagctttctgtatgtttgaattaacaatgaagacaaacttttttccaaataatcttccacattatatactggaacaataacgcttattaaatcatccacaatttatcccctcattatccttgcaatcacactttataatcgcattttttcttgatattgcaactattattaatataaccacagccgaaaacgctccagattcattgctaaatgtagcttcactcaagcttgcagaaaccatataaaatagaatcaataatattgaaaatttacacctgttattcagcattgcgttattcaacaaatctttgcaaatttgtataatcagtatcacataaacaatcattccaatataaccaaattgaacataaattgatggccagtacacgtccgacattgtagcatatccataattcattagatgagaataattcaacgaattataaatattatatagttgtgactgatttttataagagatattcgttccaaatgtcccaaaacctgttccaaaagggaaatgatcatttgcgatttttaatccaacgctatgtacaccaactcttatgctttgactcgctccccatgataaatattgctgaattttgctttttgaaataaaaaagcatacaattccgattggagcaatataaaccggtttgaaaatatctttaaatgatattcttttctttttagcaaaattcaagaggtaatacgctaagataaatgcaatcgtaataaatccctttgttcggaaagttgccgcaattgaaagcagcgacattatcttaaacactgcatttcttttatcctctgttgctagaatactgtataagagcacttcattataaacaaggtacgtataatgagaataaataaacttataacttctaaggccatatcttacttcatctgctattccagtatttacaagcaaattaactattccaaaaacaaaaataacagttattataatttttgctgtacttattatttttttcgagttcaatcgaatattattttttacaataattcttcttccgaccaaatatataataaagaacttaaacgttcctattatatctctcccaattacggaaactgatggcatatatccatacataacatttcccacaattccaataaaaagcactaacagaatgcataatatgctatttttttgttccttattaacagccactttccctttatctttacaaatatatacgatagctatagccataaaaagcaagcatatcagctcatctgtatagttagcatatggaataaatttgtcaaaaaaaatattaaaaaaaataatcaatatatatataaatagtgtcaaccattccatttcatcgtttcctttgcttgttttccccaaatgctactgtactcgtcgaaacaacttctttaacttaaaatatctatcttccccaaaaaaacgaatcagctttctcttccatctctgcttgttacccgcccatgttgctgcgtaatgatgaatcgacactgtttcatcacaaagtaaattctttgtattacccgtcgaaagcggatcaaaaaaacgtggcggatataccgttacttcttttaggtaggtaatatcttcattgctaaccttaccaaatgaacgaatcaccttatcattaagccacggacacgcaaatgtgctttttttctgatctgtaaaagaaatcgaatcatagcattccatcatcttttgtaccactggacttgatttttgggcaccaaaaccaagtccagtggtacatagggattcaggttgctgaatccctatgtaacactgattttctaacagaaaatcaggttttttcagaagttcaacatcagtatctaaatagattccgccgttatcatatacaactttcaatcttgcataatccgaaacaaacgcccatgcttttgcttcatacgctgctttcataaacggatggctattcacatcaaaatttgactcatcccatcgtttgatttcgtaatccgggcaatatttttcccatgttttaatacaatctaaaacatctttcggtagtggttttccgccaaaccagcaataatgaatcattttgggtatcattttatttcctctactattttatgttatttaattcttttagctgggacacctgcaacaattgcatgggcttcaatgtcatttactactacagcattcgcaccaataacagcaccagatccaatatgaacaccttttgttatcgttacattggctccacaccaaacgtgatcttcaataattaccggccttgcagtaagttcacctgtcacgccattaccacctatcacatggtcatggttgatgataacaatattattggcgaacatacaattatttccaatcgttaccttctctgcacaggttatagagcaattatgattaaaaaacacatcgtcgccaatcgtcagttttccatcatttacagactttagatacaatgggcctcttgacattaaaaaccgtccaattgtaatagatccgttacctataacttcagtcttgaaagctcctctaatcgaattgacccattttacttgaagcttcccatgagcacaaactttggcacagaacatcttccatgcactcactaaaccaatgtaaaacttgtgaagtattttcataatactttcagccttaatccttcatatgttggcatattaatcccctttcataaactatatgtagcttaattgttaattttttttcttaatttttcttttatttcttttttagtaatttacactcataaatattctcaaccaattttgcggattctttaatatcataacgtgcaatttgctttacatgttgcaagcgatattgctttctctgtacttctgtcctttgccccattgataaaattgtatctgcccatatttgtggatcatcctctattgatttccaaataatatccccaaaatccacctctcgtgttactttatccgacacgatacaaggcaatcctgaaatttgtgcttcgagaagcacaacaggtaacccttcaaacctagagggtaaagcaaaaacatccatagcagaatataaatattccggattctcagttgctccccaaaagataatacggtctgcgcatgctgtatgctgtgcctgatttcttatctcctccaaatctggtccatttccaaccaaaagcagtattgctttatcatcttcatatgacagcttctcaaaggcgcgaattaaataattttgatttttctggttgttaaatttgcctatatgcccaattactaaattatcgcccacctctagtttttttctaattaataatctagtctctgaatttaaagcaaatgcttcggtctcaaaggcattcggtataaccttaaatgctccgttgccatacatccactttcctgcaagttcgccacatgctaaataacaatttgacaccactttcaaaaacggttttagcgtctcatgtaacaacggatgtgagcaagttgtattatggctatgagaaattcgtacaggtacacctgctaacatagcggtaaaaagttctacggcgattaatgtactgctaccatgtacatgaacaatatctggtttctttttttttagaaaagaataaatagtcttataatacatgtatgcatttttctgtttttgtggcagcttacacaattctatgttattctcttgacatgctttttcatagccgatgtcataaggctctccagcggcaatcgctacctgaaatttatttttgtccaagtttgtagcataatttattacttgggatgttactccatttctatcaaagtatgaagttatcattactactttaaattttctcataaacaatctcttttcaaataatttctagctttagtaactccgtagagaaatcaatcggatgttctttcaaatactcaacagtctttttcctttgagaaggattgttatataaatactcaattttatctgccagatcttccgcactcagttcagcaacgtatccattgataccatcttgtatctgctctcttgctgaaggaatgtccgaagacagaattggcaaacataatgcacgtgcctctaccaaagtaattacatacccctcatggcgagatggttgaacatataaatcgcagtgcttcatatatgggtatggatttttttacgaccaagaaacacaaattgattttccagacagtacttctctactaatttctttagctttttttcatctctgccaccaccaatagcataccatgcaaaattgattttcctcttcttcaaaatgcttgctgcttttatagcaatgtcatagcctttctgttctgtcaatcgaccaacagttacaatattaaagctttccttgaacggtattatctcatcttgttcagactttcgcttgatttcttcaatatcaattacattataaaatacggcagccttatctttataatgcggatactctctacaaaatgcatcaacaactgcctgggacacgccataaatcttgtcatattcgcataagtatttttgaacgcttttcatccagtatggtttttcatcatgaagccatgttgcctttttctttgcttgtattttcgtcgccaagaaagctgtcacaaatgaaccatatccatagaagtcaatagcaatgtcataagtcttttcaaaaacgttcgtcacacaattcgaaataaaatcataatatgcaataaatgagttaaccgataattttttcaatacctttgccggaaaagcatacattgaaaccagtgattttgcaaaagaactattaaaagtcaactgaacaatattaacattcttttttagacggtaagcatattcattgtccgaatcaagcaatacaagtgttatattgtaaagttcttcgggaagtgcattaattaattctatcaaagccacttcagatccgccgccacctagtgactttgccattattagtaattctttcatcagttttccccaccaaacaaatcgtctaccagtttttcaagtttctcattaaacttggcattattactactcataccatgtcccatatcggcaacaatctgatcatagttcgttatgatatctcccagtgtattaatgtcctccactggaataatcgttcccattctctgagccacattccttgcaaactcaacctgatgattatttacatgctcgttgaactggtgctgacgcggcacaacaataggagtcttacctatttgtagtggcatgataaaacttgccggaccaccgtgagtgattacaatacgggcgtcggccacatttttcaccatctgctgatatggaatcaacttactccactgacagtatttcggctcgtatgtactaaatccagtctggataattacatcttcgtttataatgccgtctttctttaattcatctattttctgaatcagccgattaaatggctgctcatgtgttcctaccgtcacaaaaatcattttctcgtcatctacttagaatatacttccaaggttaaccgcctttggataaacctttttctgctcttcccactgcacaacaaacttgtccacaatggggtaaaccatctttcctgtcattgtcggtttatcaattcgatcaaaaacctcgatgtaaaccaactttgcgcccatcattttaccaatataaaaaaacgggaccgcaactgctgcaccgcaggaaataatcaagtctggcttttccttatgtaacacattccatgcaatcttggtattcttaataagagcctttagactccggtttgtcggataataacaaggatacattttttcaccttcgagccggcttcttgcatcctccttatcaaaagtgacccagaaatgatctttgtccttccaaaatggctttaacatatataaatatgtcaggtgtcctcctgacgaaccaactaaacatactttcatgtcctctgatctccttcatcccaagattttttatgtacacatccgtatggataggatttcccaatgtgatggttttctatattgccccatcactttgcataatacttacaacagtcttaaaaataatcctcaaagtccgtgatattgcttctgccactcacctgccacaccccggtcagtcccggtctgaatgacattctggctctgtgatgtggttcatacttctcccactcatcgagtgttggtggtcttgtgcccacaaggctcatcctctgcctttctttctgtacattctttccaaattctccttgtggtatcttttatttccctctatacctactacggtggaggtacctttgtcctcccccgaattattttagcctgttttgttttattcggttatttgtatctttttctgtatctaatcaggatttttcaataatttattttcactcatttttaattctttgtcaatgaatattaggttttctttacaatttttgacacattcgctaatcactatggtattacagcaccaatattatacattattatatatcattatatatcatactgcttatttttcctcaaacagcctctgcttcctctctatcatctcatcaatccttgcgatatactgccctacatccttgacattctcgcatctgtcaatgcggtgtgtgccatccggattcggtacgggccagacacgcttggtgcttgctcctgctccgcacgccacaatcgtttgcttttcctccatgattagtatgttatatacgccggccttgccctttgccgcatagcctacgttttccatgttgcctgccatgcccttctgtctgtagaggtagtatggctcaagccccatctgcttacagtaggctgcgcagagatccatatgctcctgggtgttgaccatctgcatatcactgtagcggtccttgaagatggtgagtcttgcagctcgctttactgcgagtgaatggatggtgacgttgtcaggtgccatctccttcaccagctccattgtgtgccttacatcatcgagtgtctcctcgggaagtcccatgatgaggtccatgtttatgttgtcaaagcccagctcacgcgcgagcttgaagctatttatcgtatcgtctaccgtgtggtgtcttcctattatatcgagagtctgctgcttcatggtctgcggatttactgatatacggctgatgccgtttttcttcagtgccaggagcttttctctcgtgatggagtccggtctgcctgcctccacggtaaattccaggcagtcctttaaatcaaagctgcatttgatttttctgataagcctgtcaagctgcgcagggcttagtgtggtcggtgtgccgcctcctatgtagatggagtttagcttcttgtggtagaatttctgtgccgtgtagtctatctccttctcgagtgcatcgaggtaatcgtctacgcggtttttccacacacccagcgggtatgacgtaaacgagcagtatgcacaggtgctcgggcagaatggtatgcctatgtacaggctgtagccgttgtcatagtccaccttatcgagcagtgccttctcacgctttgctatgcctattgagaggtcgattttctcatcgcttgcgaggtaggtttccttcagatagtcgtaggtttccttatcgctcatgccgtcctctatgcatttcatggctatcttggtcggtctgatgcctgagagtgtgccccacggaagactctttcctgtgcccttttctatcatggaatacagggcgagcttaaggcggtttttagtttccttgcggtctgcactgtctacggatatttttgtgcagattctttttccggctctattcaccgtccactccactgcaatttcatcgcccacatagtctatcttaaatacctgtgaggcatccgcaaattcctttacgccatcagctgtcatctcgtggtgtgtgcaggctaagtttttcccctccacctcatcaggtgagcagctatagtacatctgcacatcctcctgagggaagaactccttaagcagtgagtgcacatcatattcaaaatccggtttattaaatactactactatcataagtaagggttatacatcctctcgttttctatggttgttgtgtcgttgtggcccgggtacacctctgtatgctcaggcagtgtcatgattttttccttcactgtgcgcacgaggtctgacatgctgccgcccttgaaatccgtacgtccgatcgagccgcaaaacagcgaatcaccagtaaagatcacgtcctcatacgggaaataatagcagcagccgcccggtgtatgccccggtgtgtgaagcactactatatgaaagcccgcaatatcaatttcctgcttatccttcaaaaatacatctgcataaaaagtctttgactggcccatcatgtagctgacattaagctgcgggtcatcgagtgtggctttgtctgcctcatggatatatatcttgatgccgtagcggtctgcgagcggctttgcatcagtggcatggtcaaagtgtccgtgtgtaagcagtattgctactggctttgcgcctgactcatccacctttttggcgagctgatccgcacacgcgcccgggtctattattatcatttcctttgtctttatattggtgacaaagtagcagttggtctgcaccggtcccactacgaagtggtctatcttcatatttaccatatgagtgtactccttgtctgttatatgttttacttcacgcaagaaccaccaggatttagccggtggtcctctctacgtctattacactttctatctgtctgagcttctccactagaacctttatctggtccctgcctctgatattgaaaaatacctcgattgtagcgatgccctgcttgctggtcttggactggataccactgatattgatttccttctcggtaaatatctttgtgatatctacgagcagtcccgacctgtcatgacagaatatctttaggtctgcctgatactcggcaccgttgtccatgagggctgtatcctgccactctgcttctatgagcctgtccttttccatcttggacagattgatgatattcacgcagtctgtcctgtggattgagatgcctcggcctcttgtgacaaagcccactatttcatctcccggaacaggattgcagcacttcgagaagtgcacagccacgtcatagagtccgtgtaccacaataccgctctttgacttgtgctcgggctgtgtgcctgctgccgtctgctgcttttctgcaatgctgccaagcacctctgcatctgtcatcggcaccacatgatccttcttgtactcgtcgtacatcctgttgactatctggctctccttgagtccgccgtggccgacggttgcaaggcatgagttccagtcgtggaagccgtatttgcgacgtattttctcctgatactcaggcttgtttatctcagcaaagttgataccctttgccttggcataggctgctatcagatccttgccgtgctgtatattctcctccttgagctcacttctgaaccactggttgatcttgttcttggcctgtgtgctctttacgaccttgagccagtcacggcttggtcccttggagttctgtgaggtgattatctctatctggtcaccgtttttgatgacatagtctatcggcaccagcttgccgtttaccttggcaccgaccatcttgttgccgaccgcagagtgtatgctgtaggcaaagtctataggtgtggagccctttggcaggttctttacatcgccggacggtgtgaatgcaaatacattgtcggagaataaatttaaatcactctttaataaagtcataaactccttattatccgacatgtcctgctgccactcgagtatctggcgcagccagctgagcttctcctcctctgtgacagtggtggtagtggcattgccgttgtttgcttccttgtacttccagtgcgctgcgataccgtactcagctgtacgatgcatctcataggtacgtatctgtatctcaaacggctgtccgcttgggcctatgagcgtcgtgtgaagcgactggtacatgttctgcttcggcatggcgatatagtccttgaaacggcccggtataggcttatacttctcatgtatgataccaagcactgcgtagcagtccggtatggtatccaccagaattctgatggcaaagaggtcatatatctggtctatagtcttgtcctgattgaccatcttcttatatatactgaagaaatgctttgccctgccgtatatctcagccttgataccggcatctgtaacatacttcttgacatcgtttaccaggccctggatgtaggtgtcgcgctctgcctttctgagggctaccttctctaccagatcgtagtaggcatccggatagaggtacttcatacaaaggtcctcgagctctatctttatcttgctgataccaagtcgctgcgcgataggacagtagatatcctgtgtctctctggcgatacgctgctgtgcctccttggactggtacttgagtgtacgcatattgtgcagtctgtctgccagctttatgaggatgactctgatatcctttgccatggcgagaaacatcttgcgcagattctcagcctgcatctcaagcctgtccgcattcttatccttcggatccttggtgctgtctgtcaaatgcaggtgctttaacttcgtgacaccatccaccagatgtgcgacatcgtctccaaactccgcacacatctcatccatggtcatgatggtgtcctccagcacatcatggagcagtcctgctgcaatggtttccttatccagctcgagctcggcgagtattatggcaacacaaagcggatgtatgatataaggctctcctgacttacgcgcctgacccttatgagcatcataagctaccctgtaggctttgtccacaaggctcgtatcatccgacggatggtactttttgatttcctttttcagctcatcgtaaagctcctccgggctcgtaaaatcctttgttccccttataccgctggtatctgagcgaaatttgtccgctattttttctaattcttctgttgagtaatctgccaatagtctcacctcgattgtagtgtatctttagtagccattatattttatttctttaaaaattgcaatcttatgttgttagccgataaccatctttactccgccatacatgccggctgagttgccgagtgtggcaagctttatctctgtctcacggcttgcatggaaagcatactctttatagtactttgctgctgtatcgatgatgatgctgcctgcctttgaaaggcctccgcctacaacaaatacctcagggtccataacgcatgctactgctgccattgccttgccgagaagcttcatagactgctctactgccgcaatgcccgctgcatctcctgcctttgccgcatcgcatacatccttggctgtgaagcctgcatttaaatcaagctttgttgccacatccctgtgtgctgcaatgtatctctctgccactcttacgagaccgtttgctgatgcatactgctctaagcagcccttcttgccgcagccacagcactctgactcatcatctaccataggcatatgtcctatctctccgcctgctccgtttactccggctacgattctgccctcgcggatgattcctccgcctacgcctgtgccgagtgtgatcatgactacatcctgatgaccctttccgccaccctgccacatctcaccgagtgcagctacgttggcatcgtttccggcctttaccttgatgccgccgcacagcactgagagtgactgtgccacgttgaacacgccccagccgaggttgacacacttcaatactgttccgtcatcctttataggtcccggcactcccatgcctacgccctcgatgtcacccatctcgatgccgtgcttctcgttattttccttgatggatgctgcgatatcaggcaggatgagctcgcctgaattctctgtgcgtgtaggaatctcccatgtatcgacaagctttcctgtggtctcaaaaaagcctatctttacagttgttccacctatatctactccatatgcgtattgtttcattttttcgtcctccaaatcgttaaactatgtttatattttattgcctaattgcatatttttcaatgtttttcattgttttttatgttttttatattttttctatatatagaggcatgtatatcatcatccatatgcccgctatttgtaaatccaagctttttggcaaggcgaaccgatgcttcatttctctcatctatccggcagtaaagctcttcaaagtctgtgttttcgcgcgcgtagtctattatgaagcggcacacctccgtggcatagccttggttctgaaattccggtgctatcatataacccatttcatcgtgctcaagccctgcccgtcctatcagcttacctgtttccctggaaaatacaagccacatgccatactcgtaaaagccatacatgttctctatgtatgctttctggtattcaagctctgtctcgtagtcgtaaagcggttccacaaagtctgtcataccgggcttgtcatagagctcatagagcgcaggaaggtctgacagggacagctcacgtatcagacacctgtctgtctcgccgatgtcccacgggatgtgattataccgcctgcgcactcgctccagatactcaatatcaagctctgcaaggctctcgactgcatagcgcgtgccgcactgcggttctcctactgatgctatgccgagtgagtcagctatttgcttctgcttccggtttgagactatccagatgcagtctgcgggagctttcggtattattagatttcccgtattagctttcgcggtgttatctgcatattcttgtatcgttgtttttgtgaagtcattaattgattcagctgctaagagcgcaacatacagtttttcccgcagctcatcaggtagtttttcttgcagtttttcctgaaattcatcttgcagctcatctagcagtttcttctgcaactcatccagcaactttcccggtagtgcaccatacagtttttcttgcagctcttctgacatagatgccttgcctgccacacttctccactgcagcttgaatatctcgccatgatagtaaaaagaggcaagttttgcgcttgcctcatcaataattattatcattaaactgtctccggctccggatagtccactccgaaggtctcaactgtaactgtcttcatgacctgagcctcaagtggtttgtccatgtagtctgtgcgcacctcagcgatcttgtttaccacatccatgccctcgattactttgccgaatgccgcatactcgccgtcgagatgtggtgcatcctgatgcatgatgaagaactggctgcctgctgagtcaggtatcatggtacgtgccattgaaagtacaccggctgtgtgctttaagtcatttttgaagccgttgtgtgtgaactcgcccttgatttcatagcccgggccgcctgtgccgtttccgtcaggatctccgccctgaagcatgaagcccttgattacacggtggaagcatactccgtcatagaagttgtgattaattaagctgataaagttgtttactgtgtttggtgcgatttccggataaagctccgccttgattacatcgccgttttccattgtgattgttacgattggattctgtgccattatttttctctctttcttttataatattatgaggcttggagaatacccattcctcgcaataattaattatcgaattaatttttacccgattagttttcactttatttttatttactcagtgcctccaccaccttaggaaactccatgaagtgtgatgccttcaccagtatggtgtcgccctcattcacatatgaaagaagctcctgtgtcatagtctccctatcctcgaaatagtggatgtctacatcggatgatttctccgttgctccggctgcatattcctttgcaagctctcctgcggcaaaaagtgtatggatatgattctctccaactgcttcgcctacctcatggtgcagctttttctcatcgcttcccagctctcccatgtcgccaagcactgctattgtcctgc

SEQ ID NO: 5 - DNA, 16775 bp, unidentified
  source 1..16775: mol_type = unassigned DNA
tcagatcggcacatcctgccactgcccgccgatcagttcgcgggtggatttgaacccgttttttttcagcagctcgaatgcttctgcacgtccgtcgttcaccaggtccgggtagtggcagtcggagtttaccatcaccggaatattcaactcgcggaggcggtgcagatagtcggtatgcggatagacctcctgttttttcacgaggttttttgtgttgacttcgaccatcaggcccttttctgcgatcaggtgcaggcagtcgttgagcggtttttgataccagtctgcttgcaggtcgaagccttcgcatttgtggccgttcatgtatatcttgtccatgtggccgacaatgtcgattccgcctgcctcgatcatttgctgtgtggagctgaaataatgggcgaccaacttgcggatatctccgtcgtagtaggtgtcgacagacttctggtattcccggaaagagccatcgatgcacaccatattctcttctgcaagcggctgtgcgattggtagaaagtggatggagccgatgcggtaatcgagcggcaagttacggaagtaggggatggatgcgttgtagctcttgtctaagaaatcgatttccagtcccacgtatatttccaaccggtcgttgtatttctttttcagccgttctatctctgtcagatattcgggcatatcatctttcgacatgttccagaatgtttcgaacggcaatggtgaatgggatgaaaaaccgtaggcgcggaacccgtgcgcaacagcgaatttaacgaagtcttccggcgtactccgcccgtcacaaaatgtacaatggctatggtagttactgagttgcataaaattttacttgtaagaagacaaagataatttttttatcccgaaagacaacctgtttgataaaaaaaggcttgattgctgccgagggattagcggcggaatcaagccttgaaaacacttaaaggatgaaaaaattgtatgttttattttattacattcagttctttacccaccttgataaatgcttcgatagctttatccagatgttctgtttcgtggccagcggacaactgtacgcggatacgggcctggtctttcggcactaccggataatagaaaccggttacataaatgccttcttcttgcatcttagctgcgaaatcctgagataatttggcatcatacagcataacggcgcagatagcggactgagtcggcttgatatcgaaaccggcagctaacatcttttcgcggaaatagctgacattgttcatcagtttcgtatgcaatgcgtcgctttctttcagcatcttgaacatttccaggctggcacctacgatagcgggagcgacagagttggagaacagataaggacgggagcgctgacgcagcatgtcgatgatctctttctttccggttgtgaatccgcccatagcgccaccgaatgctttacctaatgtacctgtgaagatatcgactcttccgtatacattatattgttcagccacaccgtgtcctgtcgggcctacgacaccggcagagtgggattcgtcgaccattaccaatgcgtcgtatttttctgccagttcgcagatcttgtccatcggagccacgtttccgtccatagagaacacaccgtctgttgcgatgatgcggtgacgttgtgcctgggcttcttgcaggcaacgttccaggtcggccatgtctgcattggcataacggtagcgttttgccttgcaaagacgtacgccgtcgatgatggaggcatggttcaaagcgtcggagatgatcgcatcctcttcagtgaacaacggttcgaacagaccaccgttggcatcgaaacaagcagcgtacaagattgtatcttcggttttgaaataatcggagatagcagcttccagttgtttgtgaagatcctgtgtcccgcagatgaaacggacggatgacatgccgtatccgtgtgtgtccatagcttctttggctgccttgatcagacgttggttgtcggacaggcccaggtagttgtttgcgcagaagttcaaaacgtcgcttcctgcgtttactttgatgtcggctctttgaggagtggtgatgatacgctcgttcttatacaatccggcagctttgatgtttgccaattcctgagtaaggaaatctttcagtttaccgtacataactttgttttttgttagtatttctaattaagttgacaattatatctcttttatcgcagacaagtggcaaaatatcttttcgaaacctttttctttgtctctgatttgtctgccgatgcggcaaaggtcatattttttttgaatatataggctaaaaaaatacaagaaattcataccggaatgtttttattctctatacctttgccgcagaaaaacttaaaagaacatcaaacgcaatgaagaatgtattagtaattggttctaccggtcagattggatcagagttaaccatgaagttgagaggtatctacggtggaaacattgtagcaggttacatccccggacaggaacctaaaggtgaactgttggaatcaggaccttctgcaattgtcgacattacaaacgaacagcagattgctgaaactgtatctaaatataaagtagatacgatttataacctggcagccttgctgtcggctgttgcagaagcaaaaccgcagctggcttggaaaatcggtatgggcggtttgtttaatgtattggaagtggcacgtgaaatgaattgtgcagtattcactccgagttccattggtgtattcggcaataacacaccgaaagacaagactccgcaggatacaatccgtaacccgcgtaccatgtacggtgttacgaaggtttcaggcgagttgttgagtgactactataatatccgtttcggtgtcgacactcgttccgtacgttttccgggtcttatctcttatgtaacacctccgggtggtggtacgaccgactacgcagttgatatctattattcggctgccaaaggcgagaagttcgtatgtccgatcaagcagggtacattcatggatatgatgtatatgccggacggtctgcgtgcagctattgaaattatggaagccgattcgacgaaattcgttcatcgtaactctttcaacattgcctctatgagctttgatcctgaaattatctacaacaatatcaaaaagtatgttcctgacttccagatggaatatgatgtagatccgttgcgtcaggctatcgcagaatcttggccgaactctctggacgacacgtgtgcccgtcaggaatggggctggaaaccggaattcgacctggatgccatgactcaggatatgttggcaaaattgaaagaacgtttcaacaaataagaattaattccccggtcattaactgatcaataggagaaaaaggcgactgtccatccggatcgtcgcctttttgtttgtatcgtttttattcagtattgtaggcagtttcaataacaatgtgactgtttcttgtgtaggaaacgattaagttaaaagtgcatgaaaaattatgttgtaaaacatgaaatagttaaatcaggttaaggaaaagtactttttcggtgaaatattatgctgtataacataaactccctatatttgcatcgtgtttttcatggtattagatttaaggttaacaatgaagattggctgtccgtgatggatggccttttttattttatgccagtcccgattctttccagttaattctaaaacacgtcttgtcttttttcaatcccttattgtaatatctttcaaaaatgcattggttcaaatcgaaactattaccgcatctattttagttttctaccccgtttaaatcaaattacatgcaagggtaatcttttttaacaaacatctattttagcatattattgtatatcagatttttatgtaatatttgacttttaagggggatactgttgttttttggaggtgagaataggtgtggatggtggcaaaatgggttccgatttactgtaaatgatgccgattaattatgttatatagcatgttttcgttaaatagatttaaataaatgagatttccaagtgaaaatgtatgcttcataacataaaatgcctatatttgcactgtgtttttcatggtattagatttaaggttaacaatgaagattggctgtccgtgacggatagcctttttttgtttttatccggatcatccattcttttggtattcttgattatatttgtatctctgaaaaggattcattgtaactaaaatatcatagtatggaaatgtacaaagcaaatgataaccggtatgccgatatggcgtacaggcgttgcggacggagcgggttgttgttgccggccatctctttaggattgtggcataattttggtagtgtggatgtgttcagtaactttattcagattgcgcatgctgctttcgacaatgggattacacattttgatcttgccaataactacggtcctgtatatggatcggcagaggaaaacttcggtcgtatcttgaagaaaggtttggggctgtacagggatgagcttgttatttctacaaaagccggatatgatatgtggcccggtccgtatggtaactggggaagtcgcaagtatctgatggcaagcttggatcagagcttgaaacggatgggtctggaatatgttgatatcttctattcgcatcgtccggacccgcagacaccgattgaagaaacgatgggggcgttggcagatatcgttcgacagggaaaagctttgtatatcggaatttcgaactataatgccgaacagacagaaaaggcgcttgctgtcttgggggaacatcgtgtgccttgtctgattcatcaagcgcgctattcgatgttggatcgctggaccgaaccggacctcttgcctctactgaagcaggaaggggtgggaatgatcgctttttcgcccttggcacagggtatgctgacggacaaatatctgaacggtatccctgaaaattcacgcgcagccaaatctacaggccatctgcaacgcgagcaggtaacggaagaaaagataagtagaattcgccaattgaataaacttgcaaaacaacgtggacaaacgcttgcagaaatggcactcgcctggttgttgaaggacgaacgggtaacgagtgtcttagtgggggccagttcggttgcacagttgacggataatttaaaggcgttacaaaacaaggttttttcaacggaagagttacaggcaatagagagtatattacaataaaataataatttgtctgttacttttggcttgatccaaaagtaaccaaaagatcaaggcttaagctgcttcgctactccgttcccttcgttcgctgtcgcgtctgaaactcgcttcgctcagacagcagacgctccggacgcttactgcggtcactgcgcttaacgctcaccagcttaggccggaaatagagcctgacggctctttggggatggccgataccgcctgcctctttgcgatcccgcatcaagtgcgggaacgggtttgttcttgcccttgtcgcttgtccccgtaccccgcacggggccgcagaagaacggtcggtatcggccaccccaagagaaagcgtagctttcttggaaaggcctaagcggatgggcgtcaagcggagggcaaagacggagcggcaggagcctgcgctgtctgagcgaagcgagtttcgcaggcgacagcgtagtctttgcccggagtagcccagacggttaagccttgaacttttgattacttttctttcaagagaaaagtaacagattactaattcgaacaattaatgaaaccattcttatatcaggttgcatctcttttttattcgaaatatggggcggaagtcagccgtctggcttttgttttcccgaaccgtcgtacgggattgttctttcagaaatatttgtcggaagtgtcggagaagccgcttttctctccgacgatcctgaccatcaacgacctgtttgtacagttgagtggaaagcagactgcagaccggatcagcatgttgtttaagctgtatgatatctatttgaaccatagcggttcttctgaaacattcgatgagttcctctattggggggaaatgttgttgaatgactttgatgatatcgataaatatatggttgacgctcgcatgctcttcacaaacgtgacagaccttcgtgaaattgagaatgatttcagttttctgagtcccgaacagatcgcggctatccggactttctggtcttctttctacccgaaaggagatacacccaatcaggaacagtttctggctgtctggcaaatcttatacgccctatataccgatttgagggaaacgcttgctgccgaaggcaagggatatgaaggtatgattttccgggaagtggtcgagcagatggagaaaaacgaatgttgtgaccttccctatacgaaagtcgtgtttgtcggcttgaacgccttgtctgtggctgaagaacgtttcctgtctgaattacagaaacgggaaatagcagatttctactgggattatgcttcgccgaaagtgacagatccggataataaagcctcttacttcgtggaacgcaatttacggcgattcccttcacagttgaaagttgaaagtggagagttgaaagtggaaagtgaagatagcaacgcgaagccactttcaactttcatctctccactttcaactcccaaggtcgaggtgatcggtatcccttccggtattgggcaggccaagcaggtgcacagtattttaagcgagctttgcagggaagatgaaatgagtgcagaagaagcgttgcggacggctgtgattctgccggatgagcatttgttgattccggtcctgaatgccatccccgaacagatcaaacggatcaatgtgacgatgggatatccgttggccggtacaccagtcgcatctttgatggaatatattttagctttgcaaaagaatattcgttatgtggaccggaggccggtgttctatttccgggatgttttgccgatcctgaaccatcgatatatttcgactacttctccggaggtggtctccgatctggtaaaagatatttcagaaaacaacaagatttacatctcgtatgacgatctggataagacgtctctgctctccatcctctttactccggtgactgcggtggaaactttctccgattacctgatcaacgtgttgcaggaactcaataaagcagttgaaagtggaaagttgaaagtggaaagtgaagatagcaacgcggagccactttccactttcaactctcaactttcaactattaacgacatcgaacaggagtttatcttccattattttgccaccgtcaatcggatgaaggaagtcatgcgggaggcgaatgtagagatgaaaatcgacacctatttccgtttgctgaaacgtgtgacggatacgattacgatccctttccatggtgaacctctttccggtttgcagatcatgggggttttggagactcgtgcgcttgactttgaccggttgattattctttcgatgaatgaagggattttcccgttgaggaaagcggctaattcatttattccttataatctccgccgggggttcggtttgccgacatacgagcaccaggacagtgtttgggcgtatcatttctatcgtttgatttatcgtgccagccatgtcagcctgctttatgatacccggagtaacggattgcagacaggcgaggtaagtcgtttcgtgcatcagttgcattatcattatgaggaaccgatacaaaacaagctggtcgtttacaatgtctcttcttccaagactcctgccttgcaggtggctaagacggaggaagtcatgaaccgtctggtggctttccggagtggcgggacgcgagcgatatcggcgagtgcagtcaatacctatctggattgtccgcttaaattctatttctccgttgtcgaaggaatacgggaagaagaggaggtaagcgagacgatcgaaagtaatgttttcggaagtatcctgcataaggtgatggagaaattgtatcagccattctgcggaaagatggtgacggccgatctgctgaaagcgatccgcaaagatacgcctatgttgacaggagcgattgcccgtgcctttgccgaaattttctttaaaacggatatcgtccgtccgctcaccggacagaatttcctgatcggcgaaatgattcgcaaatatgtagagaaagtgttggagagggacgataaactgactcctttccgttatatcgaatcggaaaagcagataaaatgccttttcccgttgacggataagagcaatatccagctgaaaggatttattgaccgtatagacgaagtgcgagataccgtccgcatcatcgactacaagagtgggagcggaacgacacagtttacctctgtcgaagctctttttgacaaagaagatacagatcgttctaaagcggttatgcaggtctttatgtatgcatggatgtacggcacggttcaactttcaactgctattcaaccgggtatctattacatgcggactctcttttctccctctttcgaccccggaatctaccggcgtacagaccggtttaaaacagaacaggtcctggacttcgccaattatcatgcggattttgaaaacagtctgcgaaattgcctggatgaaatcttcgacacagaaaccccattcgtacaaactccgaacggtaaagcttgcgtatattgcccgtttaaggatatttgtgggaaataggattttttactgatttcccatatattcatccacaatctcattcaggaagcggttgaatgggagaagctttcgaaaacaatcgatggtttcttccatccagtcaggctggctgaaaaagctgtcgggtttaataccgataacgctgaaatctttgtgctttaatatatggccataaggggaatcggaggggaaacctgccgggatacgttttagcatgtccccttcgagtgacgggtatagagctttgaaggaaggctcttcgatgatggaaacaaattcatctatgttattgtatatttcacgtcgaaggactttcaatatttccggtttgggataccagataccaccggacagtacgcagtattccggttcaagatgaaagtagtaagctccccggatactatgacgccctccttgagcaatacaggctgacatataagtcttgtaaggcgacttgtcgaggctgaaacggatgtcgcgattaatacggaatagacatttccgggcatccaatccccgtatgtcaggatcgaatacactgattcgttcgattaattcttgtacttcgttgataaaggtacggcgaagtttgtcatatcgttctctattttcatggaaccagacggtattattgttccgccgtaaatcgtctaagaatcggatgatttctgcattcatattaggatattctttttattgtattttatatctccattgtcccggagtcatctgtttcatctttttgaaagagcgattgaagtagggaatgtcggtgaagccgcattgccaggctatttcattaatgtccttatccggaaagttgaggagtaaagtgcaaacggcttctatccggtattcgttgatgaagtttgtaaacgttttgcctgtttcacgtttgaaaaacgagcagaatgccgttgtactcatactgattacatttgcggcgtccgaaagagttattttctccttgtaatgctcgatgacgtatttgaagatcagttgcatgcgtctcatatttttggtgataccattaaattccgtttcctgcaaaccgatagggattaaatcggttgtggttccgatttgttgcaggatgcggatcaacatcagcatcctttcgcttgcattcaagcagttcatttcttctaagcaggatttgatttttccggcagttccgcctgtcagcaggataccttgctggattgctgataatcgatgagcggcatattcccattcggtaaaaaaagacaggccggcttgtagcaggtcggggttgaattgcacgactatacattgtcgtttcccatccggctcgcaactttccgggttatacatccaacaatgtggttggttggtcgggaccagtacgacttctccctcctcgaacggctccagaaagtcgcccatcatccggtagcctgaacctttcacaacataacatatttctatttcgggatgaaaatgaagaggcatttcatcttttgggtacaagctggaataatcgtagcgtaacgaggcacaactatcttttttgatttgttcgaattttagtttctcgtgcatgtcggatgaattttcagataaaacacagtaaaattagacaataatcgcataatctgcgacaattacacttaataattttgttgtttctttgcggccggaaaaacagaaagattgaataggttatgaagaaaggtttgtatgcattgtcctttggtacatttgggctggggattgcagagttcattatgatgagtatcttgccggatgtggcggcaggatttgatatttccttatccgaagccggacatcttatttcggcttatgcgttgggtgtatgtgtgggagcaccgttggtagtggtggtggccaggagttggccgttacgtacgatcttgcttgctttggtcgggctttttgttgccgggaatctgcttatggcgctgtcgaccgattattggatgggactgtgtgcccggtttgtatcggggttgccgcatggggcttacttcggagtcggctcgattgtcgccagccgtttggcggagaaggggaaaagtacttctgctgtagctattatgattatggggatgacggttgccaatttgttcggtgtcccggctgggaatttcctgggacattttctgtcttggcgtttggtttttgtgattgcagcgttgtgggggggtgtaacgatttggtttatccggaggtgggttcctgttttgcccgccctgccggcaacgaatctgaaagggcaatttcgttttttgagaaggccggaaccgtggatgctgattgctgctaccatgttaggaaacgggggagctttttgctggtatagttatgtcaatccgttaatgacggatgtatcaggtttcagtatcggggcaatgcctgtattgatgttgctggcgggtgcgagtatgtgtatcggtaactatttgggaggacatttgtctgatcgttttacgcccggtatcgtggcgatgtccatgcagtttctgatgtttgcatcacttctgctgatttatttttttgcttcgtacggctttttgtctgctttgctgatgtgcgtttgtactggttgcctgtttgctgtttcttctccgcagcaattgttgttgcttcagtattctcctggcggagagatgatgggcggggcgatggttcagcttgcctttaatttggggaatgctgtgggtgcttatttcggaggattgtcgatcgaacatggggcagggctggaaagtacggcattgatcggttcgttttttgctctgttggggacgacggtgttcttggttttcaactatatggtgcttaaacctcagtggaagctactttaaaaaggggaaatagccgtcctaagtccggatggctattttcaatgtccaaaagggggtgtctcaaaatccccttgtccccgcgcttgacgcggggccgcaaaagagcaagccttatcaatcagatgtttatatgactagctttaatgtgatcccgcgtcaagcgtttgacacacctcctttcattttataatgtctcttgtttcagttgttcgacgaaacggtcgatccgctgtagttctttcggaatatcgatcccctgcggacagtgtggattgcattgattgcaactggtacaatgatccgcctggcggagcttcggaacactgcggtcatatccgatcagataagctcggcgagcttcgcggtagttttcatcctgtccactctggggaacattcccttcgttcacacatttattataatgaagcagaattcccggaatatcgatcccgtagggacaaggcatacaatatttgcagtcgttacacggaatggtcggatactgcatcatcaagtcggcggtgtcgaacaagaaatggttttcttcttctgttaatggctgcaatgggcagtaggagcgtaggttgtcttgcaggtgctccatgtaagtcataccactcagaacggtgagcacaccgggaaacgaaccggcaaaccggaaagcccatgaggccacacttcgtcccggctctcgttgtttcaagcgtgcgacgatatggtcgtgtacgtttgaaagccgccctccgagaagtggttccatgatgatggcggaaatctcccgtttttgtaattccccgtacagatattccgcatcggtgtttcgcgggttgatctctttggcgtgtttccagtctaagtaattcaattggatctggacgaaatcccattggtattcgtcgtgcttcgaaagcaaataatcgaacacctctatatctccgtgataggagaaacccaagtttcggatacgtcctgccttgcgttcttcgagcaggaagtcgagtataccgttcttgacatacctgttttcataggcttccatgcctcccataccgatcccgtggagcagcatatagtcgagataatcgacttgtaactctttgagcgaattgttatacatcgcgatagaagcctcacggctccatgtgtcgggagagaaatttgaaagcttggtggcgatataatatttgtcacgcggataacggctgagggcgatccccatggcatgttccgaacgtcctttgcaataggctggcgatgtgtcgaaatagtttacaccgtgttcgatggcatagtcggtcagccggttgaccatttcctggtcgatttcgtcgtcgctgtctcttgcgctgcttttggcaatagtcggcagacgcatgcatccgtagccgaggatggaaactttgtcttttgtggacggcgttgtgcggtatgtcatctgatctgtaggaataggagtggagttgcctgaatctgcggtcaccccgcttttcgagttgcacccggagagcaatggggtggtagttgccgtactgattcctacaatcttcaggaagtctcgacggtttatcgcttgatgattgtcttttttcatatatgatgattcttttatttcttgattaaatattccggtgttgttcgtgcccttccacataaatggcgctgaacggacgggacggacacaggttttcacaggctccgcagccgatgcatttttcctcgtttacgactggtagttgaagcgaatccgggtcgttcgggtcttttgccaccatcaggatcgcctgggtaggacaatggcgggcacagttgccgcaagtgacgccatcccgattgacgatgcaattttcttggatcagtacggcatgtcctatctggatagctgttttatctgctttcgtgatcgggcggatcgctccggtcgggcagacttccgaacatttgacgcattcgggacgacaatatcctcgctcatacgatacctctggttgcataaatgtttgcaggtttcccgaaggacgaagtacatggttcgtacaaaccgatacgcaaagctggcacgcggtgcaatgttgggagaagttggcagcgctcagcgagcccggaggggtgatcggtgtcgtccggttcggtttctttttatcttcaatgatggccaatccgccgtcgactttcttgtccgggagttgtactttttcctgggctttcagggctgctgaagtggcaagtaatgccgatacggtaaagaacttgcggcggtcgggcttgtttacaaccggttggttagcctgtgtttctgctttgtttgtttttctgcgtgtatatcggatggccccttgccggcatttgtctatgcagtccatgcaatcgacgcaacggctgtaatcgatctcgtgtgcttttgtattgatacaggctgctttgcaattacgggcgcataagccacaaccattgcatttggacgtatcgataaccggcttgaaaacagaaaaacgggagatcaatcccaaaaccgtacctaccgggcaaatcgtattgcaataggtccttccgttccgccaggcaagtatgattagtgtaataaaggtaactgtggcaatgatgaaagtagggaggctccgtagccaaacttccgtctcgtagaaagcgtaactgtctgcccgttctgctaagtaggccaagaggttatttgcccacccccagaagggggcgaataagttggaggcgatgcgcccgtaagcgctgtaaggtgcgattaatgccgcccatgctcctaatccgctgatcatggcaaggataaatattcccataactccgtatcttaaccaagacaacgcgggggaataacggaaacgatttttcttccgtttccccgccagccatgaaacaatatcctggaatataccgagaggacaaattacagaacagtaaacccgaccgaaaatccaggtcaatgcaatgagaaacagtaccacaccgaggtttagtgccaatactgccggcaggaactgtacttttgccaaccatccgaaccatacatgcaatgttcccgtaaaatcgagaaatagcagggtgacaagcgtaaaacagatgagtgcagttgtaagtctgattgttcgcaacataataagctctttttagatagtctgttattttatgttgcaaaaatagtgaaaggaaatggtttacaacttacacgaattacggattgatgtaccaatattacggttttgtcaacttctgcaaaaagtctgactgacaaacctcagaacttcaggcagagccgtccgccaataggtccagctatggccgccgtcacgtacccggaattcgtgcttgatccctttctgcctcatgatctggtgcacctgcatgtttccgtccagtaagccgtcgtcatcaccacagtcaatgtaataacggattttgggtaagtcgttttgattccagtcggacaggatcttcaaaacattgttttgttgccagtgttcgtctcccggtccgaacaggcggttgaataaatctttgtgcgatttgttttttctcgcttccatgaccgtatcgtcgaaaacggcggcactcaatggggcgcatgcgcagaacatatccggatgatgcaagctgtacaggaatgaaccgtagccacccattgacaacccggcaatcgcccggctttctttattactgcgaatccggtatgttttttccatataggggataagctcttcaaaaaacatgtcttcataaggtgcttttccgtcatactggttgatataccaagtgtcccatgcgtccggcatgacgatgatcatcggcacggcttcctcgtttgcgatggcacggtcggcaatcgttttcatttgtcccatctgtatccagttggtttcattatccgtataaccgtgtagaaggtagaggaccgggtaattccttttcgaggtgctgtagtcggaaggcaggtagatggagtaggaaactttcctgcctaatttgttactttcgaaagagagcgattcgaaaaccgtactttgcgaatatcctgccatattgaatagaaaacacaggatgaaatagaggtgaaatttgtttttcatatattattaataattagatttgtctgtttggacaaagtaaaaataagagaagagagcttgccgaaaaacgattaagttccgacatactctctttatcttgttaggggattaatctgccaccggatagggaaattcggtcaaccctttgtacataaactgataagtcggaacttcgattcctaattcctgggcagctcgtacgacataacctgtcaatgtttccacctcggtgcggttgcccttttggaaatcactgtgcatggaggtagtggaattgttcggcatgatcttctgagcgtcgatagcggcgaatacctggtcgtccggcagaggaatccctttggctacagccacgcttttgagttcataacctaacgtgatgaataggtcgatgtggttatttatcacttcgccaatcgtctcattgaaataggaggtgatggtggcagcggtcgagatcatgaagaatttcttccagatttccaagtcgatattatccggtattgtggtaaggatacgggcgttagccaatatatcctgcaattctttctgccgttttgttggggcttccttactaccgaagaacatccggtcctttatggtaaacttttctactcttcccggtctgaccaggcgggaaccgatgtaaacgcatcctttccaaatctcgttgttcggtaatagctgttgtatgcgttccgttatgtttgccccgttcagtaagggaatgataaccgtgttcggaccgatcaccggggttagctgggctatattctcttccaaatcgtagcttttggtacaacaaaacaggtaatcgacaggtcctatttcggcaggattgtcggtcgcgagggttggttttgctttgatcgtcaggaatgtatttttaacttcgatgccgttctcacgtatctctttcaggttttcaccccgagaaatgaaatagatgtcaatatcttcggaatctttataacgggcagctaataatcccccgtagtaaccgcctacagctcctataccggaaattgctattttagttttactcat

SEQ ID NO: 6 - DNA, 19110 bp, unidentified
  source 1..19110: mol_type = unassigned DNA
ctgctcagccgcctttctgatgctgaagatagtttttgactgcatagatcaatttgccggtcgtgggcttttcgtctgcaaagccgctctcattcttgaatgccagccattttgcagtgggtctggcttccagctgatcgaccatgcgccggatcccgctgtccacggcagagaccgacacctcatactgttcgcccaccgcctgcaggatctccttgcggatcgccagcttctggatggtgccatacaccacgcccactgcgctggacagatagcggctattcatgtccggctgccggattccccagccctcgtacaattcctgacacctgcgttccatctgccggttctgccgtcccggcatccgatacagctcccacagcaggcttctgagctccgtacggccaacataacacaggccttcgccggactccgggcagaggatgctgctgttctgccgccgggcttcatcgatcatcaataccgggggccttgcttccgtggtgcggagctccgtcagaagttccagcccgctcatatcttccagctggctgcaaaggatcactgcgtcgaatctccggccctgctgcagctgctccagcaggcggctgccgttctgaaagcaggtgcactctgacccggcgcattgctcctgtatgtaattcttttgtacccgcagttccttgcggtcgtagcttccaagggcgatctgcagcgttctgtctgtgttctcattctccacacaacgcgccgcctttctgcctgagctgttctgtgtcggccagttcctctaccacatcctgccagatctccggctggacgccattctcacacagataccgcaggatccggtagccgaattccggtgccgccgcgatgtaccggctttccatgcactgtcggctcccggtgcggcaaagggtcagacgacagccgctttcgtcgtccgcatccatcgaatacaccagcgtatatgccttctgcagcccgtcaattgccgaaaactgacggatcataggtgaaaatgtacgttccataattcttcctccttgctacagggttccgcagtattttactgtattccctgtttttcctgttttgctgtaaaagcttttccgagtatattttaaggagcaaaaagggagtggtacaaccctgaagaagcgtctattttcatcaggctgcatttttacgccatactttattttttacaacgcatgttcattttgaccagcatttaccacggtttttagcatctggtcgcttttgtccggcccggccatgccgctttttgctttttcagcggcatcctctgctcataaaatagcacgaacgcgacgcaaattcaacttttcgactcattttcccggtcttttcccgttttggacagccagtctctgccaacagcacataattttatccattccgcagaagttttcacccgattatacacagttttttcatattattacggtaaaataaaagagtatgacattctgcgcagagcgcagcttttgatagttcattggaaagagcggcaccgttcctgtggggagcggccggaaaggcttgcacatgctccaactcaaacacatcaaaaaagaatacaagaccggcgatctggtccagaaagcactggatgacgtcagcctgaacctgcgggacaatgaatttgttgccattctcggccccagcggttccggcaagaccaccctgctgaacatcatcggcggcctggaccgctacgacagcggtgatctgatcatcaacggtgtttccaccaaaaaatacaccgaccgcgactgggactcctaccgcaaccacaccatcggttttgtgttccagagctacaatctgattccccaccagacggtgctctccaacgtggagctggcactgaccatttccggcatttcgggtgcggagcgccgcagccgggccgccaaggcactggaacaggtgggtctgggagaccagctgcacaagcatcccagcgagatgtccggcggtcagatgcagcgtgtggccattgcccgcgctctggtgaacaatcccgacatcctgctggcggacgagcccaccggtgcactggacagcgagaccagcattcaggtcatggagctgctaaaggaggtggccaaagaccgccttgtggtcatggtcacccacaacccggagctggccgaacggtatgccacccgcatcgtccgtctgcgcgacggcatcatccagtccgacacggcccctttcctgccggacgatgccgtgctggccccgccggtgcacaggaatctgggccattcctccatgtctttgctgacggccctttccctgagcttcaacaatctgctcaccaaaaaggcccgcaccctgctcaccgcatttgccggttccatcggcatcatcggcatcgcgctgatcctctcactctcggccggtgtgagcaattatatccaggacatggagcgctccaccctttcggaatatccgctgcagatcacctataacggcattgaccttgccgccctgctgaacccggagagttataccactgccgttgccgataccaccggcgtcggcagtgtatcgtcctcttccgccccggagggaatggtcacagtgcgggagctgctttcccagctgaccgaggacacctccaattccaacgaccttgcctccctgaaagcctatctggacagcccggactgccctatcccggaggacgctgcttccatcgagtacacctacggctcctacccgctcatctaccgccagaataaggacggcaccgtgcgtcaggtgtatccggacagcaccatctcttccctgagcaacaccgcctctgctgccggtatcgtctcctccatgaccaaccagaatgtgttcaccgaaatggccgaggcaccttctctgtacgagaaccagtacgacgtcaaggcaggccgctggccgaatggtgccaacgaagccattctggtgctgaacgcagacggcagtgtcagcgactatgcgctttacctgatgggcattgaggatgaaaacgtgatgctgcgttttctggaagcatattccagagacaaaaacactcctgcgcccaccggttacagcacctatccctacgagacctttgtggggctgaagttcaagatactgaccctttccgacctttatgcctatgacgaggaccgccagatctggcgcaaccagtccggcgatgaagccttcatggaacaggccgttgccgacagtccggatctgaccatcgtgggcgtcgtccagcccaagccggatgccagctccaccatcctgcccaccggcgttgcctattcccatgcgctgacctattacgccatcgaccatgccgccgagagcgaggtcgtaaagcagcagcttgcccacccggataccaacgtgctcaccggtgaaccctttgacacggagcagcaggacaagagtagccttgatctttcctccctgttctctgtggacaccgatgcgctgaaggatgccttccagttcgacgccagcaagctgcagtttgacctgagcggcgcgttcaatttgacgaacggctccttcgaccttgcgtccatcatcgatccgtcctccttccagctggatatgaacgatcttgacctgagcgacatcgacctgagcgatgtgcagctgccggagatggattcgctggatctgagccagctgttcgcggatatggacatgtccgtttcgcaggatgcgctgcaggagctgatgaagaacgtcatgaacggctacaagcgctacatcattggcaacggcatcctgaatctggacaagatcggtttctcttcctatatggagagcgacatgttcaagcagatccttgccgagtccatgggcagtctgctggatacctccggcctgcaggatcagttcactgcttcgctgcagcagaacctgcagggcatcatggcccgctatctggaaagctattcccagcaactcacccagaaactgggcgaagccttgcaggaaaagcttactgccgccattcaggctcagatcggcactgtgatgcagcagctgatgcgccagctgactgcgcagttcagccagcagctgcagaccgcgatccagaagaacatttccaaactcagcagtcaggtggaggacgcattgcagatcgacgccgcagtgttccagaacgctgtgcagctgaatatgagcaccgacgatctggtggatctggtcaagctgaatctgcagtccggctccaccacctacaacagcgtactgggctcgctgggctactccgattacgcatcgcccggctccatctggatctatcccaacagctttgaggccaagaaccgcatcgtggaaaacctgaacgcctacaacgcctccatgcgcgagcagggacaggacgacaaggtgatcgttttctccgacacggtcggcaccctgatgagcgccgtgaccaagatcgtgggcatggtcagcaacgtactggtggcctttgtggccatctcgctggtggtctcctccatcatgatcggcgtcatcacctatatcagcgtgctggagcgccgcaaggagatcggcattctgcgcgccatcggtgcttccaagcacaatgtctcgcaggtgttcaacgccgagaccttcatcatcggtctgtgctccggcgtgatcggcgtgggcctgtgcctgctgctgctgatccccggcaacatgctcatccattccattgccggtaccaacagcgtcactgccgtgctgccgcccaaggccgcattgatcctgatcgtactggccaccctgcttaccatcctcggcggcctgctccccgcccgcagcgcagccaagtgcaatcccgttaccgcactgcgctccgaataaatctttccttacaggccggtgtccccgcgtgggatgccggcctgttttgggtatggagttttgcattcccgcccgggttgtgctagaataagaaaaaagcttttccaaaggagatttccttatgccgaatatcattgagatcaccgacctttccgcgccggagctggacatctacgcccgcctgacgcaagcgcagctgcgcagccgtctggagccggaaaaaggtatcttcattgccgaaagccccaaggtgatcgcccgcgcactggatgccgggtacacgccactctccctgctcatggagcgccgacagatcaccggccctgcggcagagatcctgacccgctgcggcgatgcgccggtgtacaccgccgaccgtgacacgctggccagcctgaccggctttgagctgacccggggtgtgctgtgcgcgttccgccgtccgctgccccgcagtgtggaagaggtctgccgcaatgcacgccgggtggccgtgctggaaggcattgtggactccaccaatgtgggggccatcttccgcagtgctgccgcgctgaatatggacgcagtgctcatcaccccctcctgctgcgaccccctgtgccgccgggcagtgcgcgtgagcatgggaaccgtgtttcaggtgccatgggcacagatcggtgcgtcccctgccgactggccggagaacggcatcgcacagctgcacgcgctgggcttccggactgccgccatggccctgagcgaccgttccgtgagcgtcgatgatgccgtccttgctgctgagcccaagctcgccatcgttctgggcaccgagggcgatggccttgcccccagcaccattgccgcctgcgaccacaccgtgaagatccccatgtcccacggcgtggactcgctgaacgttgccgccgccagtgctgtggccttctggcagctgggccgccgctgaaacagcacataattctcttgacaaatcatccgaacagagttacactaacagcgtcatcatatgggcctgtagctcagttgggatgagcgttcggttcgcatccgaaaggtcaagggttcgactccctccaggtccatgatctataaaaagaaaaagcctccatgttcaaccgcatggaggcttttttttgtcctgcagaaaaataccggcagagcccgtatcagaaggccctgccggtattgtattatccaatcacagatatgctaccgtatctgcaagcggcttgcgggagccatggttcggcagcggcacagcgcccggtgcggcatggcccagatccatgatcatcaggatctcttcattttcgggcaggcccagctcttttgccagctgctccggatcaaaaaagttgacccagcagctgtccacgcctgcattggcagcggccaggatcatgtgggtggccacaatggtggcatcctccacaccggagtcccgcctgccgccggggtaggtgaacacattggtacggtcaaacgccaccaccagacaggtgggtgcattgtagcggcagggcgttgccttgtcgatctttgcaagcccctctgccgactggatcacatagatcttctgctcctgaaaattcttggcagtcggtgccacgcggcctgcctccaggatctcggtcagctttgcggcgtccaccgccttgcctgcatcaaaatttttgcaggaataccggttccggactacttctgtaaattccatgctcgtgttccctcctgtttgttcggttttctgcgctcattatagcacatcactgcactgaagaaaagccgctgcgcatatttttccgccgcttttgctcagaacagatccagcatactgtccagatagatcgcctcccgcacctgcagctgatattccggctttgtcatgtagtacagcagaaattccaagatcagcgcgctgccaaggcctctgccttcgatcttgaaatgggaaaagcccatgggcaggtaggtcctgcagatctcctccgtcccgataaacgccgggctctgcattgctttggaaaagcggtagccctcctgtgcatcgggtgcggtacatacgtgctccgggcaggcttcgccaaggtttttgcggctgacggtctcatagcacagcttccggtctttgcagccgggccagcagcactcattgcagagaaattccaccttatccttccgggcctgcggcagtcctttgagctggtcaaacgctttgttcagccggaaatccggcaccacaaagcggaactcctcccgttccagctccctgcgcagctgggcaaactccgtcaggaccttggtggtggaggacacaaagtaaaagcccgggtaccgcgctttcaggtattccagcagaagctccgagtggacaatgactccattctgcacgccgctgtccgcttcaaacagcgcacacagggcattgcatttcgggtcgcgcaggtgctccttttgcagcagtgaattgctgaaggtgagccgggcagagatgccgtactcccgcagcagcgcccgcacctcttttgcgctctgggcgccaaagcctgcacggcccccgccccagatgcagtctgccggggctccgtagatggaaccgatctcgcaccagtcgtagaaatacgcgcggtgctcccggaacaatggcagaaacacacggtacagctcataaaattcaaacaggccgggcagatgatagtatgccttgccgccaagatcattcatcgttttgcgttctcctccaataggccgaccaagggccatgatctgcttttattgtaccacgctttgccaaaacagaaaagagggggctgtcccctcacagaattcagcttttgcagcttgccccggaacgaaagcctttgtgcggaaaattgatctccgtgttccgccgccctctttataaaaaggaagagaactgtgtcagaattgtaaaagataaattattttaactattattcttgacttatccgacagttcggctataatagtcgtgttcgcaagaaacatcaaaatatttagttaaaaatacaaactcaacagaacaaaggagactactaccatgacgtttgaagaaatgaagaagatcgttgtcgataccctgaactgcgacgaggacaaggtcacgatggaggccagcctgaccgaggatctggaggctgacagtctggacgctgtggagctgaacatggctctggaagatgcctgcggcgtgtccatcccggacgaggagctggcaaagctcaagaccgtgggcgacatcttcaactacatcaccgcacacgtctgaggcaaaaagcgatgaacgatatccgaaatctgttccccggccggatgcgggagcgcaccttccagctgaaagccaagcgggacgccggggccgtctggcacgagccccagttcgtggagtgcaagcagtgcggccgccgcgcagcacgcaccctgtggaccaaaagccttttcgtctgccccaactgcggctatcacatgcccatcggcggatactaccggctgagtctggtattggatcacggcagcttccgggaactggatgcagacctgcctccgcaggatgtgctcagctttccggactacagtgagaagcttgctgccgcccagaacaagaccggcctgcgcgaagccgctgtcacagccaccggccgcatcggcggggtggcctgcgtggcagccgtgctggacagccgctttttcatgggcagcatgagcactgctgtgggcgaaaaaatcacccgcgcagtggaatacgccgccgccaagcggctcccgctggtcatcttctcggccagcggcggtgcgcggatgcaagagggcattttcagtctgatgcagatggccaagaccagcgccgccatccagcggttctccgcaaagggcgggttgtacatcagtgtgctcacccatcccaccaccggcggcgtgaccgccagctttgccagccttggcgacatcatgctggcagagcccggtgcgctgatcggttttgccgggccccgggtcattgaacagaccatcggcgaaaagctgcctgccggattccagcgcagcgagttccagatggagcacggctttgtggatcaggtgatcccccgcagccagctgcgggataccctgatccagatcttacagctccacacaggaggaaagcacgaatgatcaaagaaattctggaacagctggctccgctggacgcccagatcgccgcgctgaagggccgcggcaatgacatggaagccatcacggctcatgcgtccgaactggctgagctggccgtggaggaggacgagatcctgcgcacctgcggcccgctgaccgccgaggaccgggtgtttctggcccggcatccggaacgcccccacatcgatgagatcgtgaacgcattgttcaccgatttctttgagcagcgcggcgaccgtcagtgcaaggaagaccctgccattctgggcggcatcgcccgttttcacggattgccggtgacggtcatcggccaccggaagggtgctacgctggaagaaaatctggcctgcaactttggtatgccggggccggagggctaccgcaaggcactgcgcctgatgaaacaggctgaaaagttcggccgccccatcatcacctttatcgacaccccgggcgcttaccccggaaaggacgccgaggagcgtggtcagggcgaagcgatcgcacggaacctgatggaaatgagcggcctgactgtaccggtcatcgccgttgttaccggcgaaggctcttccggcggcgcgctggctctgggtgtggcaaaccgcatcctcatgctggaaaacgccgtctactctgtcctcagccccgagggttttgccagcatcctgtggaaagattcttcccgcagcggcgaagcctgtgagatgatgaagctgacggcgcaggacctgtaccgcggcggcattgtggagcaggtgatcccggagccggtgggcggcgcacagcgcggccatgccgctctgtttgagacgctggacgaagcactgcgtgcaaacctgagagagctgtgccgcatgagtggccgggcgctggccgatcagcgctataaaaaataccgtcagatcggagaaacgaggaacccatgaacgctgctttgcgcttgatagccaccggcggggcactgcccggccggactgtcacgaacgaagatctgagccgcatggtggacaccagcgacgagtggatcaccacccgcaccggcatccgtgcccggcactggtgcggcgagaacgaatccgctgccaccctcgccattgctgctgcaaagcaggcgctcagccgcagcggccttgccccggcagacatcggctgctgcatctgtgccaccctttcggcaccggatgcgacccccagcgttgcctgccagatccaggcagcactgagcctgccggaaaactgcccggcgctggacgtgaacgcggcctgctccggctttttatatggcaccgccgtggcacgcgggctgctggcaacgatgggcgggcggtatgcccttgtggtgggctgtgaagctctctcccgcctaatagaccccaccgaccgttccacctgcgtattgttcggcgatggggccggtgcagccgtctttgagctgactgcagcctccgtgccctttgccgtaacactgggtgcccggggcgatgccgccattcacgccggcgggcccagccgcgaaggctctgcccccatcacgatggatggcaaagcggtgttccgctttgcagtggatgctctgcccagatgtctgcacgctgtgctggaagaaaccggcaaaacactggatgagctggactgggtagtctgtcatcaggccaacagccgcatcatcgaccactgcgtgcgggcgctgaaggccgacccggcaaagttctacaagaacatggagcgccacggcaacaccagcgccgccagcatcccggtcgccctcaacgagctggccgagagcgggcagctgaagccaggccagctgctggcctgcatcggctttggcggcggcctgacatggggcggcgcaatttttcaatacaaagagtaaaaatcatgttcggcaaacgggctcgccctctcagtcaccttcggtgacagctcccccaaagtgggagcctttggcaaaaccgaagagtttaccgtactgccaagggctctccctttgaggaaagacttcccccgcgccgggggaagatgtcgcgaagcgacaaaagggggaatctgtcgagcagagcgagactgagagggcgaggacgcttaccgataggataaaactatgaaacttttaaatgaaattctaggcacaaaataccccatcattcagggcggcatggccaacatcgccaccggcgagtttgccgctgcctgttccaatgcgggagcactgggcatcatcggtgcgggcggcatggatgccgacaccctgcgccagaacatccgccgctgcaaacagttgaccaacaagcctttcggcgtgaacatcatgctcatgcatccgcaggcagatgtttttgcgcagatcgtggtggacgagggcgtgtccgttgtgaccaccggtgcaggcaacccgggcaaatacgtgcccatgtggaaagctgccggcatcaaggtgatcccggtggtggccgctgcggtgctggcaaagcatctggaaccgctgggcatcgacgccgtcatcgctgaaggcaccgagagcggcggccatgtgggcgaaatgaccaccatggcgctggtgccgcaggtggtggatgcggtcagcattccggtcattgcggcaggcggcatcgccgacggccgtcagctggcagcagctctggctctgggcgcctgcggtgtgcaggtgggcacctgcctgctggcaagcgaggaatgccccatccaccccaactacaaagccgccctgctcaaggccaaggacagcgataccatcgtgaccggccgcagcgtgggtgcgccggtgcgggtgctgaaaaaccgcatgagccgcgaatatgtccggcaggaaaacgccggtgccgacaagatggagctggaaaagtacacccttggcagcctgcgccgcgccgtgtttgagggcgacaccaccaccggaagcctgatggccggtcaggtggcaggcatgctgcacgaggtgcgcccggtagcggatattcttgcagacctgtgggacggcgggaggcagcgcattgccgcgctgaacaccgaatgctgaccctcggcagaaagaccctgtctgtgcccatcttacagggcggcatgggtgtgggcgtttcccttggcgggctggccggtgctgttgcagcctgcggcggcatggggtgcatctccaccgccgatgcaggctaccgggagccggactttgcccgcgacccggcaagcgccaatcaccgtgccctgaccgccgagatccggaaggcgaaggagatcgcaaagggtgccggtatggtagccatcaacgccatggtggcaacgcaggattatgcggccgcgatccacactgctgtggaagcgggcgtagacgcggtggtgtccggcgcaggcctgccgctggagctgcccggcatcgtgggcacaacggatgttgccatcgcgcccatcgtttccagcggacgggccgcaaagctcatcctgcgccgctgggccaaagagtttggccgcaccgctgattttgtggtgatcgaaggctgcaaggcaggcggacacctcggctttgccgaagatgacctgcttgcaggcaaatgccagaccctcgacgacatcctgcctgaggtgctggccgaggtaaagccctttgaagcacagtttggccacagcatccccgtgtttgtggcaggcggcgtgtacaccggtgccgatatggcccactttaccgcaatgggcgctgcaggcgtacagcttgccacccgctttatcaccacctacgagtgcgacgcatcccagggctacaaggacgttctgctgaacgcccggcccgaagatgtgcggatcatccacagcccggtgggaatgccgggccgtgcactgaacaccccgctggtgcaggctctggcagagggaacccgctttcctccccggcactgtgcccgctgcctgaagacctgcgaccccgtcaaggtgccctactgcatcacccacgcgctcatcgaagctgtaaagggcaatgtggaggagggcctgttcttctgcggagccaacgtgggcagactggaccggatgcgcacggtacaggagctgatggacgaacttgtgaccgaatggaggcaaaatcaatgaagcttgccgttttatatgccggtcagggggcacagcaccccggcatgggcaaagaattttacgaaggctctcccgcgttccgggcagcatttgacagcgccgagctggacttcgacctgcaccgcgtctgctttgaggacccggacggccttctgaatcagaccgaatacacccagccctgcatggtggcctttgcctgcggcgtgaccgcagtgctggcacagcagggcgtaaagcccgcttatgtagccgggctttcgctgggcgaatactccgcgctggaagctgccggggtgttcaccgcaaagcaggccatcgagctggccgcttaccgcggcaaagccatggccgaagccgcaaaaggcatcgactgcggcatgaccgccgtgctgaaccttgaccggcaggcacttgcagcctgctgtgagcaggctgcacagctgggctgcgtgcagatctgcaactacaactgcccgggccagctggtcatcggcggcgagaaagccgctgtggacaaagccgccgcactggccaaagaagccggtgcccgccgctgcatcccgctcaaggtgagcggcccgttccacacccgcctcatggcccccgccggggatgcactggcaaagcgttttgcctctgagtcctttggcgagatgcaggtgccggtgctgttcaactgccttggccgtgaaaaagctgacaccgacagcatccctgcgctgctggtgaagcaggtgcagagcagcgtttacatggaagatacgctccgccgcctcggtgagctgggcgtagaccatattctggaagtcggcccgggcagtgctctggctggctttgtgaaaaagaccctgcccggtgtggtctgcgcttcggtggagaccccggagcagctgaacgccgcactgacagcatggaaggaagagctatgagcgaagaaacgatcatccgcaccgccgttgtcaccggcggaagccggggcattggccgggctgtgtgcatccagcttgcaaagcagggctgcaatgtggtggtgaactactgccacggtgaagctgcagctgccgagacggtggctctgtgcaaggccgaaaacgcaaatgccgtggctgtgcaggccgatgtttccactgccgagggctgcaaaacgctctttgaacaggcggtgaatgcctttggccgggtggatatccttgtgaacaacgcgggcattacccgcgataatctgatcctgcgcatgagcgaagaggactttgacgcagtgctgaatgcaaacctcaagggtgcgttcctctgctgcaaggaggccgcccgccgcatggtgcgccagcgctggggccgcatcgtgaacctttccagtgtggtggccctgcggggcaacgccggccagaccaattacgccgccagcaaggcgggcctgatcggactgaccaaaagccttgcccgcgagctggcaagccgcaatgtgaccgtgaacgcagttgcgccgggctttatcgagaccgacatgaccgccgccctgccggaagccgtccgtgccgaaatggcaaagggcatccccgcaggccgcgcaggaaagccggaggatgtggcaaatgcagtggcattttttgccgcagaacaaagcagctatctcaccgggcaggtgctctgtgcagacggcggcatggcaatgtaaaaggagaaaactctcatggaaaaacgcagagtcgtgatcaccggccttggcaccgtgaacccgctgggcaacaacaccgccgacagctgggttgctgccaaagcgggcaaatgcggcatcggccccattacccagttcgataccaccgatttcaaatgcaagctggcaggcgaggtgaagggctttgacccggaaaccatcgtggacaaaaaggaagcccgcaagatggcccgctttaccgttctggcccttgctgccgccgctgaagcggttgcagacagcggtctggacaccgaagcggaagccaagcagatcggcgtcatcctttccagcggcattggtggtctgcccaccattgaggagcagcacacccgcggtgaagaaaagggcatggaaaaggtaagtccctattttgtgcccatgtccattgccaacatggcggcggcacaggtggccatccgctttggcctgaagggcatgtgcacctgcccggtgacggcctgcgccggcggcaccaatgccgtaggcgatgccttccaccgcatccgtgacggctacgagactgccatggtctgcggcggtgcagagagctgcatcagccctctgggcatcggcggttttaccagcatgaaagcgctttccaccgcgaccgatccggatgcagccagcctgccctttgacgcacggcgcggcggcttcgtgatgggcgaaggcagcggcgtgctggtgctggaagagctggagcatgcccgtgcccgcggtgcacacatctacgctgaggtggtgggctacggtgccaactgcgacgcctaccacttcaccgcccccgcccccggcggcgcaggtgccatcgactgcatggcgctgacgctggcggatgcaggcatcgcaccggagcaggtggaccacatcaacgcccacggcaccggcacccacatgaacgatgcctgcgagaccgccgccatccatgcggtgttcggcgaacacgcaaagcagctgaccgtggtgagcaccaagagcatgaccggccatctgctgggcggtgcgggcggcatcgaagccgtatttacggcgctggccctgcatgaccagtttgcgccgcccaccatccactatgagcagcccgatcccgaatgtgatctggactatgtgccgaacactggccgtgcgcagaccatgacctacgcactgagcaacagtctgggctttggcgggcacaacgcctgcatcgccctgcgcagatgggagggctgacccatggcagaaccccgcaccgtgcgtgcagacgcaaatgccctgaacagcgaggagatcgcggcgcttctgccgcaccgctatccctttgcccttgtggaccgcattctggactacgagccgggccagtgggccatcggccgcaagtgcgtgagccgcaatgaggaatttttctgcggacattttcccggtcagccggtgatgccgggagtgctcattctggaagcactggcccagaccggcgcggtggcagcgctgagcctgccggagaacaagggcaaactggctctcttcggcggcatcaagaatgcccgcttccgcaaacaggtcacccccggcgatgtgctcaccctgcactgtgaactggtagagcaacacggcccggtgggcgtgggcaaggcctcggcgtgggtggacggcaagtgcgccgccaccgccgagctgacctttgttctgaccgaagcagccgacaaccgctgaacccggacgttccctgtccgcatgtctcagcagaccggccggtaaaaacagacgatcaacaaaaaacctccccgtgcaggataaagccgcacggggaggttttgttatattctgaaagcgctgtgaagatcagcaaatacgcgttgtgccttggtgcacacgcgcagcgttttactcaattgcgatcaggttggggttttccggcagagccttctgctgctgaggagcgggcagctggatgtgcaggatgccatcctcaaactttgcatggatgtcttccttcttcactgcatcgcccacgtagaagctgcgggcgcaggtgccggagaaggtctcacggcgcaggtagcggcctttctcgtccttctcatcgttgctgtggctgcggatagcctgaatggtcaggtagccgtcgttcagctccatctgaacgtcttccttcttgcagccgggcagatccactgcaacatcataattgccatcagcggtctgcttcacatcggtcttcatcatgttcgcaccacgcttgccaaaggtgtcatgagcctcacggctcattgcacgctccagtgcagcatcgttccagaacggatcaaagagatcatcgaacaggttctcatgaaaaacagcaggcataaacataaaacaaccctccaatcccggcgttcgggtcgggtataaaatcaagatcgtgcatcaggagcggagtcttcccgggagccttgcggttccctcatgcccctttctcctgagcacgcctttgttatagcacacagttttagcactgtcaatagtagagtgctaaaattcatggaaagataacacttttgcaacaatatcttgtgtttgtctctccctgtcaccacaatagcctcatacaaaatatgatctgcaataaagcaacgcccccggagagtacagttcaaaagctctccgggggcgctttatcggttcacatgctatgggccacggcaatggttccgcgtgctgccacgtttttgggagccatcgcctcacggtcccgtccgcaggcatcgtgcagagcgctggtgccttgccttgacggcagctgtcagcattccactgccaccttgatcacgccgtcccgcttgtgttcaaagaggtcgtagccctcttcgatccggcgcagggggtaggtatgggtgatgagcggttcggtatcgatcctgccttctgcaatgagacgcagcgtttcttcacagtcgcagccgtccacgccgcccgtcttgaaggtgagatttttgccatacatctccggcagcggcagggtctgcgccttatcgtacagtgccaccacggtcacaatggcgttgggtcttgcgcactcccacgccagccggaaggtggagtccgcccctgccacttccagcaccacatctgccccgccgtggtcgctgttggcccgcacaaaggcggcgcagtcctccggctgcacggtgagcacctgcgggtagtgttggcggaggaactgcaggcggctttcgtccttttcgcacacgacgatgcgcttggggctgtgcagcataacgcacagcagcgtgcagatgccagtaggccctgcgccgaggatcagcacagtatcctcgggggtgatctcagagatgcgcgctgcccaatagccggtggccagcacatcgcccaccagcagcgcctgccggtcggtaacgccgtccgggatcttgttcagtccctgatccgcaaaaggcacccggacatactctgcctgcccgccgtcgatgcggcagcccagcgcccagccgccattttgatcggtgcagttgttcacaaagccctttttgcagaagaagcactccccgcagaaggtctccacgttcacggtcacccggtcgccgggcttcacgttggctactgcactgcccacttcttccacgatgcccaccatctcatggcctactgtgatgccgggcacggcccggggcacgctgccgtgcttgatgtgcaggtcgctggagcagatgctggcaagtgtcaccttcacaatggcatctcgctcgtgctgcagcaccggctttggtttttccatcagggcaaacttgccctttgaaacataggtgtaggtcagcatgcttttttcctccgtgtactttattttttccggactgcgcatcccacgcagtcatggcaaggggcaagccgcagaaggccgtggctttttccgcagcttcggcgcggttgccgcatagctcatttccagcagcatccggatcgtgtcatccggtgcactgccgtccaacgctgccgtgatccagttgtccttgttcatgtggtaggccgggtaaaagcccggctccatccgcagggaaccgatgaggaggggatcacatttcaggtttacgatgtccaccggctgctgcccgggcagccccagcttgctgcgagacaccgtggtgaccagcgcgaaccatttgcggttgcccgggtggcggaacaccgccgattccggggtgtccatccagggatagtccggctccacactgcag

SEQ ID NO: 7 - DNA, 30604 bp, unidentified
  source 1..30604: mol_type = unassigned DNA
ttgcgttgttttccgctgccgaaggataaacgcgacaccggggctttgtggggcggatgtggggtggggtaaaaaccagaaacaaaaaaagccccgcacccgaaagtgcgaggaaatgtacatattataataaggtaggaactcgtgcaaaagagacaaaaaagaagcccacctacgaaccgtgtaggattctacacagtgcgtaagtgggcatgaaaatcaatttttctcgtatttttcaatcagacattgatgttctttggtatccttgtcatagttaattcccacaagcaaaatgtcacccgtgtaattcagtattgactccggatatcttttgttttttatttgctgtaatgcggtttcagtacctttgttccacttcagttccaccaccagtgccggataagtgctcttatattccggttttgggataaacacaaaatcagcaaagccaaggcctgtgggcagttctctcactggcttgaaataatactgcattgctcccaaataggcaatggtaatcgtgctgctcaaagaattttcatcgttatactggatagtcgaagtgtattctgaatggatcttatcaatttcagatgccacctgcttttcattcatcgccagcgttgccataagcaactttcttgacttctgttgaaatgcaatcaactcatcccagttactgcttctgaccgccgtgatcaattcttgtctgatttcctcattcggaacaaacgctgtttcattatcctcgtcgtatcccaaatagccgaggtgaatcaggtaggtaatcacatcatcccgattttgtatcttcgccgggtcatttttgaaagtagctgtatcaactttaacttccgagccagaaagcatctctataattgcattcttcagtccgtcgtagttcatacagataagcggcactacaacttcgtatgaaccagtttccgaccaatagcttctgaatcttcccttggtcataacacttacaactgctttcggattatacacctgatatccattcagcagataaccatcataccacttttttactttgtcaaaatctctattgtacttttcacagaggtcttttacttcatcctcggtaaaaccgatgtatggagccaactcgtcggcctgcagcatcgtaaactcatcgaggttatttactgcagactgcgctttttctttcttaatcggtagaatgcctgtaagatacgccagctggatgtactttgtaggctcaacacctttgaacatacctcttaaaaaattgagatattcatcctgaacggtctctgttattgtcccatctcggataataacatcccattcatctatgataacaacaaatttctgcccggtgcgttcctttactcgtgaaagagcatccgggagggtcaccacctcctgcggcagcacatctggatagataccgcgaagttcatccagaacactcttggttataaaagaaactactttatccgcatcatcgcagtttgctaaaaaccactggatatcgatgtggattacatcatacttgttaaggtgctttttgaagtcagcatctttgcttatcttcagtccagagaacatctgctcggaatctgtacccttactgtaatatgccgccagcatattagccgcataggactttccgaatcggcgcggtcggctattgcaaatgtaagcatttgtcgtatcaagaacactgtttgtgtactcaatcaaaccagtcttatccacatatattctggagttaagcgcaacttggaacgcactgctgtctgggttcacaaatcttcccatgcttttcagactcctttctggagctatccctcaaccatgaggctataactcacctttcgtattttgattttaccatctaatagcccaaatagcaagttgataccccggcgcagcgcaactatttttctcctattgcagacacaggtacgcatcttcgataaaactcataaactccacactggcactctcgaccatgtgctttccgtcaatcttcttcaatccctctgcaactcgcccatcccccatctcctgcacagcaaacctcaccgtctcatcaatgaaagccgcgtactttgcaccgtcaataatgctttgtactggcacgccttcgccgctatcaagccgaatcaccttcggctcgtatacagctaccaccttcttcagtgcctctgccgattccatgcttaggagataaaatttcatagcacccgctgccatgatctcctctgctgtgataccgtattctcctacctacatctctgttatacttttcattctgaacgctcctgtgtcttttctgttatgtgtatttctcatccacccataacatataacagaactctgcacatagcaatccccacagttaaaaaaggccagacaaagaagtaaaattcccacaaacaaaaaaggccctgccagacgtagttttcactacatccagcagggtcaatacctcactctcacattttttcgttttctcacacagcgattccacgctctctctttgcagccgtcgttaaatatcgtctgtactggatgctgaaaccgtacactttgtaaggggcatccacatagaccaccgtgccattcaggtcacatcgcttgtaccccatgaagctgttcaacgtcctgcgattgcctttggtcgtcagcgtcactccaaaatttgtcttgtaaatcgctacatctccttgcagaacaccgcttttgatgaaggcacagtagattcctttttcaaagtgaagcatatccggtgcttttgcgattcgctccggggtgactttgagcttaccgctggtgatggctctcgtccggccttcgattggatttccttctgcatctcgcatcagcgttccctgcacatccagaccattgaccttcagtggcctcccagcggaattcgtatcaggcagttccttcaggcaggcaaggaagaattcaaaatttttcttcacagtcgcaaggtcaccctgctcttcttcaatggtctgccgttcctgccgaagtgttttcagccgttcctgcaaatcccttaccagttcggtgtatcgccggtgcgcttgggttctcggcagaggataccgcagaagccattggtctgatggcaaacagtggtatcaaggcttcgcaggctggtacttcccttcgtaccatcatgaacaacctttccggtgaagtgacctttgttggtaaaaacatcggtgaggttacgattgcgactagcaacgcagatggcagcatgaggagcctgaacgacatccttgcggactgccgtgtggcattctccgggctgtcggaatctgagaaagcagccaacgcagaggcactggtcggcaagaatgccatgtccggcttccttgccctgatgaattccagcgaaacggacatcaacaaactgcgtggagccattgaaaactgcgatggcgcatccgagagcatggcagagaccatgcaggacaatttaaatggtcagctcaccatcctgaaatctcagctggaggagctggctatttcttttggcgatatcctgatgcccaccatccgcaagatcgtatctgccgtgcagcagttcgtggataaactgaacagcatggatgaaagtaccggggcatggcttattgtaagtcttcttcctttactagttattgaacacagctgttagatttgttcggctttgcgtggaccaaagggctttccgctcgccctttggaatccttcagctcacttcccagtctttctgctcgctgatctttctccgaaacaatatattcgccttccggccatggctcggtctgccaagcgaaatccgcatcgtacctcacagctctcgcggcttctgcgcagaaatcgttgtctacgcaccactgcatcagggtgttatcttccaatgtcagatagccatgggcgaagccacgcggaatcagcatctgtttctgattttcaaaagagagaatctcgccgtaagcgtatccgaaggtatcgctcggtcgcagatccacagccacattaaagattgaaccatgcaaacaggatacaagttttgcctgtgcgtgctctccttcctgaaaatgtaaaccacgcagcgttccagctttcttgctgaacccttggttgatctgaaccacatggaattcctctgctgacacagacagccacccacgaaaatcttcaaaacgctgtgtttcaattattatcggctttaccattgctttctgtactcccttgggctaattccttccaccttgcggaacatccggctgaagtaatttgcgtctcccatgccgaccgcagcgcctacttcgtctacagtcatatctgtgaagcgaagcagctgcttggctctggtgatccgctttgagatcagatagttgttgaccgtcgttccgtaagtctctttgaagattttggacagatagaacttgttgatgaagaacttttctgccaaatcatccaatgtaagcttctccgtataatgctcgtccagatactcctttacagctgccagttccattctcttccggctcaccgttacgctctctggatgccaggactgctccatcagcaatgtgagcaaagtccccagcttctcattgattcgcatatctcgtatgtaatcggatgaggaagctaagttataaaggtctgtcaagagtgatgtaaagggcgttagatcacctgaatggaacacaggccgaccaccacgctccttgtatttctcatacacagccggaagagatggtgcatagaagtggcaccattgaagcgaccagagattatcaaatgtagaatggctgtacgctttccggcagtcgatgaacacacagtccccctctcttagctgatatgtctgctcttcataggaaagttctccctcgccagatagaacaataaagcaaaggaacgacaccagatccgatctcttggatacatgtgggtgaacagcctgcaaagagccaacctcctgcagatggagcaaggatgttcgggcaaacgtggacggtgtgtacaggattcgggaggaggtcacggacgaggattgtgggttgaataattcctggtccatattactgcctcccctttctatagattgtctttatatcaattttgcaagttgctcttggctttcgctcattgccatataaatacaagtcttccaataattcgacccattcaccttttgaaaagcattcgctctaatttttagaatttctgcacattcttcaacggttcctccagatttcaactgttccttgattatttcacattctgtggatactacatcattgctttgctttttatagcgttctaaaagatgcaaagtgtcaaaatggtttgctataatagttgttatttcagatttatgctcaaacttcaaagaaaacgaaacctgtggtattttattgtcaaccttgaatacagcttttaaatattgaatttggggcaagctatcataataaaagtgtatgatttttcttgctctttggttttctgaaaataaccggttaccttttatgctattacattgactacaacatggaaccaaatttggggcaaaaattatatattcgggatattcgctctccgagaaataatgatcgaatgttgttggctctgatatcatgcaaaacgggcacattcctgttcttcttgccggaatgttttcaagcaactgttgttttacttttttgaatatgctactattttgataggaattttctaacagctttttttcatcttctcctattacgtttactggcctgattgcatttaaattattcttgttttgagtgtaaaaattatatctttcaaagactcgttcttttagagccaacatctttcctctgtttccataagtacacgtttcgcaattaggtgttgactcattacatttttcgcaatgtgtattttgaaatttcttactttttgcaacagcaatgaaaacatcttcattatttatattcggttcactcaactgattcataatcttttaacaagtgccgcaatgtaatcttccattgctttccgatatatctcgttataatctatcgccaatcttttcaattcgatttccggcagtctgttatgtgtttgataaattatagaatggtaccttttatacacgctcccaagatagaaagctatatcctgcaatagtattttcttccggataaacttgattttttcttttccattatcaaaatgtcctataggttctgggaattctgcatcacttgcgtcaaaagcatatatatcatgaaagtctttcagaacagtacgctttgcattatgaagctcatccaaattgcgagcattggttaaacgatttaaaagttcttcatcgtatgagataagtggatccatattttcaagatacactgacatatcagcacggctcttaaaaattttatgatataacttcatagtagaatccctaccttttccttcacatctccgccagtcataaaaccgttgcctgctgctcaccacggagaggtgtgtgaagatttgagcaactaccgtgtgagtttgttcacacggcctaaattgttattcccagctaaagcacattccctggaagccatctgcttgttctttgctattgattatttccttttctactgtgcaatcatcgctgactaccatgatatgacgctgggagaagttactatattcttatacgcttgaaatttgtattgtctaaatgggattgttgaacatatgatttacgtattatgcccgataacaacagcacacacatataatgactctgcattatctttttccccattaagtccatttatcatgactgctcgaagtctaagttttacttctaccgtttgattcaaatgtgttactgtggactcaagccaatctgcgttaattccttctgcatataatgaaaatttacttaaactttcatttaacatatccattgattctgtgtccgcagtatcagctttgacatttatgtcgcacgatatagtgtcgccaactgttaacccaattgctgatacaattttttccttcaatctccagcccgaaaagccgctaataattttaaccggaagaacaatttcttttctatcatatctaattggtcttaaaacaaactttcggaaaatttgttttgcctcctgaccccgaggaacattattatttttgtcatccgttatggtccttccagtacgccccttgtttaactcacgctgtacatcagccaaaacttttgagccaagatcatccggcgttgtaaatatgcttacgacatgtctacgctttaatgtttccttaccgtgtggacttccacacgattttattttttcactgtatcaattttttactccaaacaaagcagttgacaaatgaggaacctttccaataatttttacacctatcttcaaaatcacagcataaacaattgcaattatcggagctactacccattccatcaagaatatgtagctttgcccccccccgcttagtggaaggtgattaataagctgacttaatacgccttcgagaaaaaagctttgcaaaacataaagttgcagtgtaacacgtcccattgcttcaaaaaatttatttacagcggatgggagatactttccaatttgcataactaacattataaatgtggaactacccaaaattccaataatcagacgatataagtcaaaatagacttgttttgcaaatccatattccgatacaaccggattaattccgccaacatatacaaagtattcttctctcattccaatcaagagaactataaaagctatatatgctatatatctgcacttatatattttctctactatgcttttatgttccgcaacgtaatatcccaaaacaaagaatggaaataagtctgcagtatgatctccaaacacattgttaaaaagaatcaaggaaatccaaactgcaaaactgcacaagtatttatattttttgctacatttaacaatcagagtggcgagtactgtaataatgaataacgatttcaagaaccacaatcccgaaacaagcgcatgtaaagcctccataatactgatttcaaagttgtgtgctgtcaaaatatcaaaaatacattttctaatgtagagcagtaaattccacacaaaaaagggaacaccaagtgatatcagtcgacttttcaaaatatctattgcccttttttgactggttctaaaaaacaaataaccactaattaaagcaaaaagcggcatgtgaaacgaataaattaatttaattgcttcaagattaaaaaagtcaacatcacccgacatacactgaatgcaatgcccccatagaacacaatatatagcaattccctttattatatcaatattgtgatttctttttttcaaattatatcttcctctttctacacatctgcctttattacaatttgcaatcctgtaaggaattaatttttattcaagtggaatcggctaattttacttgaaaaaatctcataaataggcgattttgttattttccagtaaatcatacaacaaagcaaaaagaatgaacctcctataacaatctcaagacaaagattcacaaatattctaaatttcaaaatgggagacataattttaacagctagatacatgcctaatccaaaaacgacatacatcacattttttctcacatataacgcaaatggtataatcttacgaattaatactacttcaataatacataccactgcttctgctataatcgttgcaatagcagcaccaatacctccatataattgaattaaaataatgtttgcgaaaaaattaattcctgcgccaataaacacagcaattatatattctttttctttgttattaggaattaatacttgattaacaattatcgttgtaattcctttaaaaaatatcacaaatgataatactgatatcaaatttacacaagaatcaaatcctggaccaaagaaaactggcacaaattccttagatattgatagcattccaaacgctatagccgaacatcccatcattactaattcaacagatttttcaactatgtttctatactcattaattttcccttttgaaataagtgaaactattgccggtaaagaaaccgttcctaacccggatattatgccaagaagaatatttataattttatctgaattaccataatacccgacttcttcataagttgaaaatattcctaacattgttttatccatctgatgatagaatgtcattgccagtataggaacaaatagcaacatcattggtttaaagtgtgaaaaagaatcttttattgatacatctacctttgtaaaacgattattcttaacttgtgtcattaaatacacattactcaaaactgtgctaataacaagaataaacgcatacataagcaagtcattttttgttcttacaaatataaaaagacccactaatgttataagttttataattaaatttctttttacggtcagttcaaattgctctaatccaaagaaaaaccaattgacatctatatagcagttcaatatccatagactctcaattatataaagtattctgttttcatcaataattacaaccacaaaacaaacatataatgcaaaaattatagacgttattacacattgcatttttcgaatgccacaatatgcttttcctaaactatttgaatctattttatttccagctatagtttttgttccataatttgttatccctaacatggaaaaaacgacaaaatagtttgctatcgttgcaacatatgtatatgtcccaatattatgtgatcctaagactctagaaacgtaaggtgttgtaattagtggaaaagcagtggctagaatttgatataatgtttgataaaatagatttttttttaaatttgccatcaaatactccttctgttgtcgctcctgtcaagctacaatctacttctttgaaaattcatagcgcttaaacatagcgtctttcatttatcgtatctcagttgcacaactgtttttgattatctcaagcagcccttccacatttttatcacaaccaaattcttttgatttattgcaaccttgttctgcaatttcaaccaaccattctcggtctttatatgctttatccatataataacacagctgctttacattttcaggagtaaccattatacaattcttttcattttctaaaaagtcgctaattccttctccttcagtcattattacaggcacgtggcacgccatcgcctccaaataagcgataccaaagctttctccctgtgacggaaggacaaatagatctgattgaagcagttgaacttcaacttcttcgtgggatattcttccagtaaatgtacatatttcctcaatatcaagttctttaacccgtttgagatattcagtcttcttacttccatcgccaacaattgtataatggattttataaccttttttctttaaatatgcgatacattcaaatatgtttggatatcccttacgatcatctaggaatccaaccgtaataatacgaaaacaatctgaattcttacgtttcacacttgggtatttaagttgaaaaccattgggaagtatatataccttttctgtttttattccttcattctcaagaatctctttttgctttttgctaacgcaaatatatgcatctgactcttctacaatttccgtatatattttcttaagcggagcatgctttagtgcatcatttaaccgtggaatactattctctataaaaagaatcggaattccaaatgttctcttaatttttaatcctaaggtcccttcaaagaagattcctgtaatataaatcacatccggtttaaaatttacaatctccttttcaactaccgaaacaaccttttttcgatatatttctccaaacaaatgtggaaatcggatccaaatattatacatctgattgtatagcgtaattttgggataaaaaatatgtatattcccctcaaatatttcatctggtaccattgcatatcgttccattttagccgaaattcgactacatattgaaggaacataaattgtcggtgagataacttccacttccaccccctttaaagaaaggctttccaattgtttgtatatatagtttccactgtaatcttctttaaatttagggaatgcatttgcaattgcaagaattttcacatctattcctcactgttgtcctaaacttctcagtgctatttctctatatgagaatcgctgtttagcttttccggttgccgcaacaagcatctgattatatttatatttattgttatccaaaataccggatattttattttttatttcctcagctgaatcttttattagaaattccgcattaccgtttacttgaacgtgtgttgttccatcccaatattttacaacaagcggttttccaatgccaacaacctgttcccaaaacacagaatgtcttccagggaacacaactaagtctgctgctgaaaagaaatcataagaatcgtcaggttgaatccacccaatataattaacaattgtaccatccgaaagcttatttacttcatctttaagttcgtttgatacagatccaaatacaataagtttgactgggaatttatgactcaactcctttaccgcttccataagcaaaagagtctgttgtttcgcgtgatcaatttttccacctgacacaatcaagaaatccgaatctttaatggcgtatttttttctcaaatcacttattttattcttgtcagctgcgttttgaaccttttcatcatcagctcccatttcaagcagttcgattttttctctaggtaaatcatacatttctgctaaaaaatccactcttgccggaataacaccataaaatttttttacatatggattcagcttttgggccttgcttttccaaacaatcttatgcagtatattttttgaaatccaatttgttgcactgtttgacaaatcacaatgattgtcaacatatatgattacatccacatgcttttttgcataccttatcacttcatcaatgtcaagaaactgaaagcaatgcacaaaaataatatctggtttttctttttctaactgagaataaagcccatggaatctcttaaacttagatgtcagagccttatctcctttgatatccaatcttatcgtgtgaataccatattcattgtaatagtcctgctcatctgtttttactaatttgccatcgctattccaaatccacttacttgttataacagtaacatcgtttccattttccttctggtattttggaagaagattatcctgatatgaccatccatctgtaaccggtccatataaacatatatttacaactttagccatgttctatcctccatacgctaaatttatctttttacataatctctttttattttataaactccctttttcaacacatctgatccaaactttaccataccatatttatacacatgatttggttttccctgttggcgtttttcttttaacgccaactccaaataatgcattggatatttaatcacaaactgatccaccagcattctttctttttccaataattttcgatattcatctggatggctatcaagatatttgattttttcaatagcttcgtccacagtgaaaacccacgcttcaggaggcagtacctgtgggcaaatcaaatcgtccggcgaaagcaggcaaaccgttcccaatgatattgcctcaagtactccattacctctagtatgacgtcccccaacttttaaataatatttcgagtcaaagattgcctccaagtttcttcttattaattgttgatggacaatgataggatgacatgttgcttctccaattggttcaaaatgcggcactctttttactggtctttctttagttgtattgatttccgcatatatacccgtatttttgctttttctcttaagtacgtcctccatcaatgtttctagacaatttggtcctacaaacgtatatggaaagtcaatgtaaccttttactttgtcacgtgtacctgtaatcagctgattcaaattaacatcatatccaaaatatactttatcttgcataaagttagcttcaccaatcatgtatgcccacaatgtatttggatacttttgaactattctcgttgggattgaaatattaattgaaatcactacgtcatatatactccaatcaatttcatcacatttaactgcataaaaaccattcggcttgtcagaaccaggttcatgaaatgacattccttttaatttatctagcgtctctgtttttaggcgctcatactctttcgccatatgaggtataacttttttccacatatggcactctgcagtattttcttcttccacaatataaaagtctgcatcaaaaagagaaaataacgagaacattccaactcgtccctctgatgaaaacagtaattcgtccaatttcgacctattcgcacatacatataaatcctggtatacatcttgtttgactaacgcaattttcattttttattcctcacttttactctgtatttcaccgtttccgtaaagcgttccaaatatcataatcatcataaagaaggaaatcgggtctgctggcgtaataaacgccttttctgccatcgcatgaaatagatttgcaacgaaaagtgccattgctttttgatttataccctctccgcttacgcaaatcgttgcaagacgatataaaataaaaccaatcaaaaacagacatcctgtaagtccaaccaaacctatgtttgttatcatatagacaaaccaattatcaacaatcattccttttgcaaatgactgtgtaaaaaagctggtcggattatacagaccatatccaaataacaatgtaccatcccgcttcatctgagttaaatcatatatccacccatcaattctgccagatgttatattagatacaaattcaaaatcgttttgcaccgtattgtaaacccatgacaatgccataaccatcgcaatcgtcagtagagctttcatgcaaaatttaaagatatctttcgacttaaagtacaacttttctccagccaatacaagaaaaaaagccaaggtaccgtaaatactcgctctacttcccgtgtttaacattaccaaaaagataaatgctactgcgaaattccgtatcgtctgaaccgtacgattttgatattccgacattaccaatgctataattattgaaacacagataccgccaagtgaattaacatgcatgaatccaaatcctgagcgttccctccttttaatgtcagttacaatattcaattcatttccgaagttagataaaattgcatttgcattaaacagatttgtgtaatttaagataacacatactagcacaactactgttccaataactgcaaataacttaacaaatccttgttttttttcttttgtatccagctgctttccaagactatatgtacagattataaaaatccacattactgctgtataagcagcaatcgtcaagcttccctcaatgattgcctgactaacgggtataattccaaatgttatgacaaaaaacaaaatcacaggatcacgaggcaatataaaaataatattcttatctctgcatataaacataaaaacgcacaatgcctgtattatatatttaagtccactgattggctgaccgtatagtgtatactcaaatatataaagaaaacatagtacagaaacaattaatttttcttttgagacttgaactttcactatattttcctttcatttaaaagtcttctatatatatcaatatacttcaattgatttttttccttatcaaataaacttcttgccctttccacacatgcaatttccattttatcttttctgattctttttatagcttcatacatcgtatgtatatcaccaacagggacaacagcacctgtatcttgatcaatcagttccggagatgcagtcgcatcatacacaactgctggcgtaccgcatgctaatgcttctgctgtaaccattccaaaggtttcttctcttgatggattcacaaacacttctgcggctgaatatatttctgccaattcttctgcatttgaagttttttcaattcccaatatagtatccggcaaagactctttttgcttcttggttaaacctactacaactattttatattcttccgatatgatatcacttagttttatcaaatcatctaatcccttgcttggaacccaattaactgcaactccaagcaacaccttttttttgcataagccattcttttctttaaaatcattttttctaggatggaatgttttaaggtttactccattgtaaactacttcaatatcgcaatttctaaaaaacgaatttttcacttcatttcccagccactttgatactggcgttataactagtctttccggtgcggtaaataaagatttttttagattataattataccttgaattatcaaatccataactagctggatgttgttttttcttttggcacttataacattcagttttccatttttcgcatccgatatttgtatagtatggacagtgccctgtaaatggccaacaatcatgaaatgtccaaacaatcggaatgtcttttttgcacaaatattcaaacaaaatctttatgttaatataatatccatgaagattatgcaaatgtataacatccggcttgtactcatctacaaattttaagaatttttttgtcacgtatctagatcccaatccatttaaatcagtgatacgtgtccatattgcatgtgatgtatagtcaattttattactaatttgatatgcatctaggcaatctttcgtatcctgtcttccatacgcaattatacattgatttcctgcttcaacattagtcttatagatatcatatacaagatttcctgtgcttgttgatccaataaatgtattaataaggagtactttcattttaaatcccccttccccttatactctatcccaagtacatcagattcataaattttggcgtctaccaaatatctataccaatatgcctgaagaaaggcatatatttttccttcttttccatctaaaaaacccatttttatataataacggtacaaataataaaaatgagctctagccccaaggggcaacttatagtacaggttcatctttatccatgttttgagatttttttcttcagagccattatcagtctttcttttttctaaatagtccgcagcctctctagacgaataccagttatgctttgctgtccatgcttctaggctcttaaaatcgaaatgcaatgaatcatatttcaactcaactgtttttccttcaaaagtcacaatatgttcatccattgctctatcttctatatcgccttttccagttttatagcagatcaattttttccacggatatactccgccatggtataaatccttccccaaaaaattctttttaaatctaactacaatacctgtaacatccgactccatattactattgcatacctgctctaattcatttgctgagtctggtgtaagcctctcgtctgcatcaattctcaagatccattttgtctttatatcggcaatctttactgcatatttatattgtcttgcatgtgtctcaaatggatgctgatatacctcaactccacacttttttgcatattcaactgtattatctgtgctaaagctatcaacaactacaattcgtttcactgttgttgcaatggatctaatacaatccaaaatatttacttcttcattttttgtaagaataattgcagtaatatctgccgccatttactttcctccgtttttcactttttctattattcgatacactatgcacgccagagtaactgtaacaaccacaaaagcaataaccgatatcaccgatggtattatcattcctaatgtaaaagcatgaaccagataaatctcatacgaaatcattccggtcgtagccagcatcttattttcaaataatccaccaaatgattttccaaatgccataattcctatcgctatcggcagacaggtcaacagtgccattgcattcgacacaatgtacggcaagctcttaaccacattcagctgcgttattgccatgaagagaaggcacattgtacccccccccttaaaatcaggatgtttttagtctttgtcagagtctgttcaatcttatctttatttactgccagcaatacaccagctgggaaagacagcatctgtcttgcacgaagaaatggcatattgggattcgcaaagtacaccaactccaacacaaaccagatggcgaatgctccgaacaaggccattgtctgcattctgctgtttttaatcagtctctttactgcatagaaaatcagatagcagatgacgatatatcccatgaaccaaccataccctgttgcaggttttaggaaacaaaaatcaagcatataggttttaatggaaaacacacctatagcaagtaatccaaccaattccacaatccagaacggcaggcagacgcctactagacgtttctgccagaagccatttaagccgttcttctcatacgaaatctctaatccatatccagagcaaattagaaacaatgccaccccaattcctgcgacgaattgaattccttccaccgaaagacatcctccactatgtgcccagacaacagttaaaatagaaaaacctttgattgctgttgtataattcttgtccatccactggtatttttctgttttcttgttaaagcccagcagataacatccaagaatacaaaatgtaaataatataaaatttctcacttatttgccctctcacaacttcagtatattttctatgtacactctcatcaatacacctatagctagattctcacgttttctagcttccatcgcctttagctccccatttacagtattttcgataagccaacgagtattttgctcagtcttggcatcttcgcacatctcaaagaaaagatcatctgattattttcaacatattttttcttttatataactagaaatcttattaacaccccatgcaccgactaagcttgctcctaagaaaacacacatgccccaaacaccttttggtggtaattctagtaatctaaaatgaactaaatataattcataagaaactccgcccacaagagtaataaagccgttattaaaaagtcctccaacccaataagctcctccaataaatgccattgcaaatgatgttttcattataagttgaatacattgccataagatttcaccttcatgcatacgaatggacgggatttgtttagttgccagcaataaagttcccccaatcatcaatgtcagtaatatcattggattcatcagccactttcttgctttcgcatagttatcagatagccatactcccaccagaaacgatatagcttgctctgctctcagtccatttgctgtgtacgagcaacctataaatgtcacaatgcttacgacgcacaacaccaaatatctctttgtgtacaactttggaattgtaataattaaataaaacaccaagtactgaaggaatataaaatccaaataccagtaatatggaatttcaattttagttcttgttaagaattgcgtagttatcacaacaagagagacaattgcatatggtatcagaacccgaattattttagacttccagtacctcctcccccccccccgacttctttttcttataggattcattcaagccatatcccgaaagaatcagaaaaatcgctacgccaattccaccaagaggtgtgagatatctgattccgaatccgccagagacatgctgaagaatgataatagtagcagcaacagctctacaaatatttgtatgttgaacagacataaatttaaaatctgccgttcgcttattctcaaaaaggaaaccaaatagccatagtgcgcacaagagcgctaagaatatccctaagttcttcatttttcccccttgtttcacagcttcagaatctcttctgcgtactttctcaccgacacatttctggtcaggttcttctccagattctcacgtcctctggtccccattgctttgacttttccagacccagcattttcgatgaaccagcggatgttctcttcaaccttgtcatagtcacccggctcgcagcaaagaccaccgtgggtatcttcaatcaaacagcgaacctctgaacccgattcgagaacccctattaccggcttagccgctgcagccagaccatagtatttcgacgggcagctcactcctttgatgccttttgcattcacacaccagtgaacatcacctgcgttcagactatagatcaaatcagctttatcctgatacgaaatgaaggtcacattatccatgtgatgctctttcacatacagcaccagcttgtccagaacagaacctgcaccaacaaaagcgaacacgacctcccgaccatctccagtcctggtacccggcttgattctctccacaaccttaatcaaattctcaaggtcgtagtacagaccgatattacctgaatacataatgacgaacttattaccatccagaccgtacttcttcttgaaagcctgaaccttctcgttgttctcatccaacggatagatttcgttttcatcaatccagttgttgatcataacagtcttgggaactttcttacccttgaaacggttctctacggtttccaccaaatcacggccgactgtgatcacaaggtcactgcgcttgcagctgaacttatcgaaccacatcatggcatcggtgatgagcttattcttggtgtagccaacagccagcacctgctccgggttaaagtcctgaatattgtagatgtacttggcgtgttttatccacttgccccaaacacccaacaaaccgccaagaatcggtggctgagagatggagaacacatagtccatcttgccaaccttaaaggtcgcacccattgctccaaaaaaataggaaacaatgttcttgacacggctcttcttgttggtcttgctgaactccggtactcttatccttaaaacttttacgccgttaatttcttcttcgtaatatttctgtgtcttatatttatcttcaatggttcctaaatagctgggaaccacacaaattaccgtaatatcaaacttatccaacatgccttctgcgagttcacggagaatctggcctgtggatgcagtatcaggtatgtagtaatgtgcataaatcagcagtttcttttttgccatcctgcatctcccctctgtgtactttttaatcacgctggaaaatatctctcgtgtacactttttctttcacatcatcaaggcacttgtcatagcgatttgcgatgatggcgtggctcatttccttgaacttcgccagatcattcacaacaacagagccaaaaaaggtctctccgtctttcaaggtcggctcgtagataataacagttgcgcccttggccttgatacgtttcataacgccctggatagaactctgacggaagttatcgctgttactcttcatggtcaaacggtacacgccgatggtcacagatttttcctgttccttgtcgtattcgttatcttcgtcatagccgtagtaaccagccagcttcaggacgcggtcggcgatgaagtcttttcttgttctattactctcgacaatagcctcgatcaggttctctggcacatcagcatagtttgccagcagctgcttggtatctttcggcaggcagtatccgccgtaaccgaaggacggattgttgtagtggctgccgatacgaggatcaaggcaaacaccatcgatgatctgctgggtattcaaacccttgctctctgcataagtgtccagctcgttgaagtaagccacgcgcagggcaagatatgtattggcaaacagcttgactgcctctgcctcggtgaagcccatgaacagagtgtcgatgttctccttgatagcaccttcctgaagcagaccagcgaactcgtgagcagcctcgaccagacgctcatcgttcagatcagtgccaacgatgatacgagaaggatacaggttgtcatacaaagccttagactcacgcaggaactccgggctgaagatgatgttcttgctgttgaacttctcacgaacagatgatgtgtagcccacaggaatggtggacttgatgaccatgatggcatccgggttgtactccatgaccagcttgatcacagcctcgactgcgctcgtgtcgaagtgttgcgtgtggctgtcgtagttcgtaggagccgctataacaacaaagtccgcatcagagtatgcagcctttgcatccagagttgcggtcaggttcagttctttttctgcgagatacttttcgatatagtcatcctgaattggggacttacggttgttgatcatgtccaccttctccgggataatatccacagcagtcacctgatggtgctgggagagcaatgtggcaatcgacaaaccaacataaccggtaccggcaaccgcaattttatagtcctttttcataattctatatcctcctgaaattcatcttacttatatggaaggctcatattgagccaagcaatctatttaaaacagtgtgttcatcatgtttctcacacaactgtatttatcgttttcatctgctggaacatccagcgtgtatttgttcatgtttttccgtcgactcatggttctataagaccaccactgaaactttatggtagacaccttcataccaactcaccaacaaagtgttatgtcttattgtcataactcgctgtcgcacttctctatttttcaaagtgctgacccttattgtcataaccttcgcaccagcttactttgttaaaactgtacaagttcatactgtttctttgttgcaacatgaacaatcatttacccctcactacctctaattccccggaaaaatgcagttatcatatccgtctttcctctgcaataaacttttccagaaaaatagattttgggcttttcaacacttacaacctccacctctaattccccggaaaaatgaaggtatcatgtcactgtcttgctctgcaataaaacaggctcgtaatagggttattttgcatgagttttatacgccaccgtagaccatcatgccgccactgaaagtttgaggtagacattactccccatgccccagtaaacacaccttaaacgtcttaaaaatgatcttccaatccacccagaagctgcgctccttgacgtatttcacgtccagatccatccactcctcaaaagagaggtcattgcggtgcggagcaatctgccaatagcagctcaagccgggggtcacatataggcgctgcttttcgtagtcgccatactgttccacctcgcggggaagtgccgggcgggggccaacgatgctcatatcgcccttcaggatgttccaaagctgcggcagctcgtcgaggctggtcttgcggataaacttgcccacgcgggtaatgcgggggtcgtctttgatcttgaacacagggccgtccatctcgttctgttccagcagatcgtccaattttgcctctgcgttggggcacatagagcggaacttgtagaacttaaacggcttaccgtttcgtccaatacgctcctgcgagaaaatcgggccagcagaagggtcatccaccacgattgcgatggccgtagccagcatgaccggcgacagcgccaccaatgccagcgacgacaagatcacatcctgcgtccgacgcccgatccaatagagctgatgctccctcagattttcctttcggtcaatttcagccggcttattgattccagttacctctacgctcattttttctcctcactcacactatgtaatctcacacacgattccaactgtacgtcctcttatccagcttcaacggcagaggcacttgcagtcactttttggcatcgagccgcagcgcccccatacatcagggcacgcaaaacgcccctgacgactgcttcgccaagggtcattttgtttgcaattcttccatcaagaaccttttccccgcgctgtcccatcccagttagcgcacctttgcctgttctcggatgatgtccaaattgtcgaaacgccacacctatcaccccttccgcaattaaggggtatctctcattcgctcgtgggagataccgtgcgttcgacatcctaaaactatttataagtttattttaccattgtgttaccttgtacgcaaggggttttgacactattctacccccccccctagaaaattttggtcgatattgtcaatctttttgtaatttattgtccaatttgcctcaaaaaaacaaccacagattcaattttagtagaattagtagacgatcaagcgtccaccggggctttgctgacggagaaatcctatcataattttgctgttttgccagatgcagcaaacccaacgggcggctccggtaacctgcccattgggtttggtcagaaatagaataacatcaccccggcttctgcctttcaaaaagggaaaccggggtgctgttatctactttgtggcaggtgtccagaatgccggacccatctcatttactgtacactcagcagttcttccacgctcttgcgggcaggtgcggcgggatcctgtgcaggatgaccgatggcaatgagcgcagccactgtctgtccttcgggcacggagagcacctttgccaccttgtccgggtcatagatgcccatgatgaccgtcccgaggcccagtgcgtgcgcggcaaggcagaaggtctgtgcggcaataccggcgtcaaaggactgccagtggccttcgagcgggctggaatagctgccgtcccgctcaaaaccagagcgtcccgtcaccatcgtcagcgcaaccagtgcgggggcatgggaaagcgtgttggcgttataggtgaaatccagcacacaatcgctggcaattttctcacgcttctgcgcatcttccacgagaatatagcgggcgatctgggtatttttccagctgggggcataagcggcagcggccaccacttcggccacctgcttcggggcaacaggctcttcggtaaagcggcggacgctgcgccgggtcttgatgcattccaatgcttccataattgttttctcctttcggcagtttgttggatataactgtctctctattattacaactccgctcagctttgtcaagatgctttcgaaacggaggccgggccgctcagaataggtcgagcatactgtccagatagatggcttcccggacgtgcagctggtactccggccttaccatataatagagcagaaattccagcaccaaggcgctgccgaggccccgtccctcgatcttgaagttggaaaatcccatcggaaggaaggtcctccggatgtcctccacgccgataaagctggggttctccatcgccttcgagaaacggtagccctcccccgcgcccggggcagtgcagatatggtcggggcagttctcgccgagatttttgcggctgacattctcgtagcagcgcttccggtcccggcatccgacccagcagcactcgttgcagagaaactccaccttgtccttctggggctgcgtcaggctgtccagctgttcaaaggccttgttcagtcggaaatccggcaccacatagcgaaattcctcccgggccgtctcgtcccggagctgtcggaaatccgtcagcaccttggtcgtggaggagacgaggtaaagctgcgggtagtgcgtcctcaggtagtccagcagcagctccgaatggaggatgacgccattctccaccccgccgctctgtgcaaagagggcgcagagcgcattgcatttccggtccgaaagatgctcctcccggaggagggagttgctgaaggtcagccgggccgagacgccatactcctgcatcagtgcaaggacctctctggggtcattcccgccgaagccggtgcgtcccccgccccagatgcagtcggccggtgccccgtagatggagccaatgctgcaccagtcatagaaatattcccgatgtccccggtacaggggcagaaactcccggtacagctcgtaaaactcaaacaaaccgggcaggtgataataggctttttcttgtttcatcgcaccctcttctctctcgttctctcctattgtaccatgtttccgccccgcaaaaaagcccccggagggcttgttacagctctccgggggctttctgtgtgcgttgcgcacacgaccggcgttttactcgatcgcaatcagattcgggttctcaggcaaagccttcgtctgctgaggagcaggcagctcgacgtgcaggacgccatcctcgaactttgcgtggatgtcctccttcttcacggcgtcgcccacatagaagctgcgggcacaggtgccggagaatgtctcgcggcggatgtagcggccattgttgtccttctcgtcattcgagtggctgcgcactgcctgaatagtcagatagccgtcgttcagttccatttgaacgtcttccttcttgcagcccggcaggtcaacagccacatcgtagccgttctcggtctgcttgacatcggtcttcatcatgtttgcaccgcgcttgccgaaggtttcacgctcttcacggttcatcgcacgctccagcgcgccatcgttccagaacggatcaaagagatcatcgaacagattctcatggaaaacagcaggcataaacataaatcattcctccaatcccggcgttcgggtcgggtaaaaaatctttatgttgttcattcggaaaagctttccggggagctgctcgatcacctcgcggctctctcttttgcccttcctcctgagcacgccatagttatagcaccatttattagcagtgtcaagcgtagagtgctaaaattcacgaaaagataatacttttatcatctttcatacaatctccatcgtttttcttcctagggacgcattttatcaaactgccgtctcttgcaggccgtttcccacagggcagagccacatccaaaaacatcatgctgagcggatacagcagcggcattgagctgtctttgttttatcgtacccgtccggtctctttttgcagcatttcgtgcatatagcccatcagaatcagaatcaccagcagataataggggaagagtgcgatcgtggtatggtttgcaatcacgccaaacagcggtggcatcagacaatttccgacgtatgcgcttgccatctggactccaatgatcgcctgcgaccgatctgccccaaagtggctcggcgttgcatggatgatgccgggatagatgggcgcacagccaaggccgacaggcagggccatcgctgcgggccgccactccccttcccggcgtcttgacaagcctgttccttcccattacaatacgataaaggagtccgctgaggggcttttgcaatttgcagctacaggctccgggaaaggaatgtcgtcatggaaccaaaaacaaaacaatatctgctcgtgaccgttgtgggggtaacgctttttgtcgcactgctgcggctttctgccgttctggcctttgccgccgaacttgtcgatctgatcctgcccattctggccggcggcattctggcgctttttctcagcgtgcctatggccggactggaaaagcggctgagaagcctgttccgcagggccaaaaagcagccctcgggcagcgccatccatcttctcagctttttcatcaccctgctcggcgttgttcttgtgctggtgctggcgctcaccctgctgatcccggagcttgtgcagtcgtttcacagcctctatctgcagatcgagtccaatatcccccgctggaccgcctatctcagcgcacaggacaccaacatggactggttgatgcactggctggagggcatcgactgggagcagctgctgcacaggatcaccaacagcatcgacaccgtgctggtcaatgcggtcggggcggtatctgccaccgtgaacatcgtggtgactgcatcttttgccctgatcatctccatctatatgtccctcggggccgagagtctctgccaccacgcccgcacactggtatgcgcctatctgaagcccagccacgccgccgggctgctgaaattctgtcggctgttccgtcagtccttcgcaaactttctgacgggacaatgcagtgaggccgtgatcctcggtgtcctcatgacccttgcattttcggttttccggatcccctacggcagtctggtggggatgctcaccgccatctgtgccatcatcccctatgtgggggcactgatctcctgtgtggtcagcgtgttccttgtgcttctggtggatcctgtgctggcggtgcgctgcctcatcgtctaccttgccgtgcagtttatcgagaaccagttcatctatccccgcgtggtgggaaagtccgtggggctttctccgttttacacccttgtggccgccatgattggcggaaagctttttggcatcatcggcatcatcttctttatccctctgactgcggtggtcattgagcttgtaaaagaggacgccttccgacgtctgcatacaaaagagaccctgtcctgacaacagcgaccccggagagtgattcccaccgctctccggggtcgctgttttttactctttgttcactgtgttgacgtggcagaaaaggctccgcagggcaatgagtcctattttccggtcaagaacatcgtcggcagaaatttcctcttgacaaagcggcggggatagcatataatgcaatcgttctaaatagaacaatatatcacaggaggtatctatgaacttttgggatcatcacaaagccattacctgctactatgagctgctgatgtcatccgtatgtcagaaatatcagctccggcagatggagtatgatatcctgatgtttttataccataatcctcagtaccataccgccgcagatattgtacgggtgcgcaattccaccaaatctcatgtctccacctcactgaaagtgctggaggagcggggactgatcgaaaaaaaggtcgccgacgggaacaaaaagcatatcgatgtctatctgtccgcgtcggctcagccgatcatcgccgaagggcttgaggctcagcggcagtttgccagagatatgtttcagggactctcagagcctcagatcgcagcttgtaaacaggcattccagaagatatgcgacaacgcagaagaatgcctcaaaataaaaggaatgacacatcatgaatcataaagcctaccaacccaaaatgcccgatcggatggaggcggtgttcgatgccgcctatctgatctttgatctcatcgcaggcatcctctttttcacgatggctcagggccgcagcctttttatcctatatggcgtcctgaccctgaccctctgcggcggtgacgccttccatctggtgccccggatcatccgggccgtgcgaggcagcagcgaccgaatcaaaaagcagctcggcatcgggctgcaggtctcttccatcaccatgacggtattctatatcatcctgctgtatgtctggaaggccaccttccctcagcttcaggctcccgtagctgtggaagtcctgatctggctgtctgccatcctgcgcatcctgatctgcctgctgccccagaacaactggtgtaccgatgagggcaaccccaccctgtccgtcctgcgcaacgcagtgtttgcctttaccggcctcggcgtcatcatcctgtacgccatctccggcaatactggcgactaccatatgacccggatggtggcagccatccttatttcctttggctgctacctgcctgtgacccttttcagtaagaccaagcctaaagtgggcctgctgatgatccccaagacctgctcctatatgtggatcatcgccatgggtctgcagcttctgtgactgtgttacagaagagccaaatgcagatcgttattatatgatcagcaagatcctctttaacttcaaacgccattcaaccggcagaatggagaaaacactattctaagtgtactgtatttcagacagcgatccttcagggtgtagatcgtagactatccgataatattatcataaaacctctgcagcaccattgccaattcctctggagactctatgtttgcttcatgacctgttttcaaaagctcatggaagtgggcatcgctcaaataactggcaagttcctttgaggcttttttgtttgcgttgtccttttctccacaaacgatcaatgccggacaggacaccttatataatgaatccctgagatccaattccgccatcgtgccgcacaagcgaatcacgtctgcttttttgaagccaaattgctcgaacattgcattcggcataacgtgaaacagcagattctggaacttcaatagcttttcaggcatttcatattgtgctgcaattagcaccagtgcctttactttgtccgggtggtctatcgcataattaagtgccagaaccgcacccaaggaaagcccgcacaaaacgatctcattattttccttgtcgcaccttcctgagaatgcagcatacagctccccataggtggccgcttttccttccagcatctctgccagactcaagctgacgctgctacccgagaccgtcgtttcttttattactctgtcccaactgtctggtttttgtcctagcccatgcaagtataaaaacttcatctgttttccgctttccttcacacgtcctgctgcattgtcgatctcgctgctgcagtccatcacaaatcagatgcgctctgccccggtcagctcggtcttgcccagcccttcggcaatgcaccgcgccagataccggctgtttccggttcccgaaaaataaagcaccatggctgctccctcgtttttgtgtggtttttcagatgcctgtctgcccggcaaactggaatttatgtcaatgcgaactcaatctcatcaagcttatttgttattgcgttctttctccctgtctccttaaagcctattcgacgatagagtctctcagcatttatattattctcaagaatccacagcgtaggggtatccgtacattggcctactgcgtatagcaataatttcgttccataacccatgttttgcatatctggaagaatataaagatcctctattaaaccctttgttacagaaacaacccctattggtttttcttctacaagcatatagagctttgttccgttgttcatcttgttcctcaaatactcccgttgccgatctggcgtgtgtgtttctatgaaatcaggagtacaaaatgcacgatgcgattccttccaggatattgaatggatggttgcggcttgaagaagatttgtttcatttacaggtactatcatacttatctccacaaattccgagttgtcggtttcagtataccacactttttcccggcggaacagataccgaaaaccaaaaatgcccccggagggcttgttgcggctctccgggggcatcctatgtgcgttgtgccttggcgcacacgacctctgaagcgtccactcgggagagctttccggcttgtcccgttttggcac

SEQ ID NO: 8 - DNA, 11554 bp, unidentified
  source 1..11554: mol_type = unassigned DNA
tcaggcctctgtgttgttttcctctgctgcttctgaacactcctcagatatcttctgttcttcaaaagctgcttctgctttctctaaaggctcctttgaaaggcttactccggcagaactgctggtttctgtctgtgtttcctctttcctgtcaaaatccggaagttcctccagattgtccggaatctcaattcctctctcaacagcacgaaagatcttcataaattctttgcctgtgatcgtctctctgcgaatcaggtaagcggcgatcttatccagtgcttctctgtgttcactcagaagtctcttggcttcttcataggaataatgaaggagctgcatcacttcatgatcgatctcggttgctgtatcatctccacagttaagcaccgctcttcctgaaagatactgattttcctgtgttgcaagtcccatcaggccaaatttctgcgacatgccatactgagtgatcatcgcacgagcaaccttcgtggcctgctcaatatcgttggccgctcctgtcgttacggtgtcaaaaacaagttcctctgccgcacgtcctccaagataacctaccagcattgcctccagttccttctgcgtattaagatatttctcctcttccggaacctgcatgacatatccgagtgctcccatggtacgcggaacaatggtaatcttctgaaccggctccgcatccttctgaagtgcattcacaagtgcatgacctacttcgtgataagaaacaatccttctctcctgtgcacttaagatacggtccttcttttccttaccgaccagaacaacctccacagattcctgaagatccttctgcgaaacagccctgcgtccgttcttgactgcaaggattgccgcctcattgatcatatttgcaagatcggatccgactgcacctgatgttgccagtgcaatggcatccagatccacggtttcatccagcatgacgttcttggcatggactttgaggatttccacacgacccttcagatccggacgatccacaatgatacggcggtcaaaacgtcccggacgcaagagtgccggatccagtacctccggacggtttgttgccgccaggatcagaagtcccttggaagtatcaaatccatccatctctgcaagaagctggttcagtgtctgttcacgttcatcatttccaccgccatatctggaatcacgactcttacctatggcatcaatctcatcaataaatacgatacatggtgcgtttttcttggcttcctcaaacagatctcgaactctggaagctccgacaccaacaaacatctctacaaactcagaaccggacagagagaagaatggcacatttgcttctcctgcaacggccttggcaagaagagtcttacctgttcccggaggtcccacaagcagtgcgcccttcggaagcttcgcaccaatctgcgtatatttgcccggattgtgcagaaaatctacgacctcctgcagagattccttcgcttcttcctgtcctgcaacatctttaaaaaggactcctgtctccttctggatataagccttcgcacggctcttgccgacacccatgattcctccgccgcttcctttgttcatgcgacgcataaaatacagaagcataaagaacagtactactgttggaagcaggacgcttatcatggtagaaacaaactcgcccatcacatcaggcggttcatatttaaaaataattcccttaccttccagtctctcagtcaacgcactggtatcctccatctgattgaccttgtagctttctttctggtaagatttctgaagttttggaacgacagtcagcactcccgactggagtgtcacttctctgatctgatctttatctaccatctcgataaatttatcgtatgtgatctcactggatttatcgctcatcatatctgtcacaaaactcagacacactaaactgatcagaaggcagatcaaaaatcccagaatagtctgacgattcttgttcggtccctgattctttgggttatttcggttcggacgattatcatccggacgcttatccatatgatcgttcattcttttcctcctcttattatcttctatattataaagagattttcgttataaatcaactggaaaactgtgaatgtttgtagtatactaaacgcgaatgcatttgactaagttactgcaaactgcagctaagtgtgatggaaaggaaatcgacaaatgaaaattggatttgataatgaaaagtatcttacaatgcagtccgaacatatccgtgaccgtatcagcaaatttgacaacaagctttaccttgaattcggcggaaaactctttgatgattaccacgcttcccgtgttcttccaggattcgaaccagacagcaagctccgtatgctcatgcagctcagtgaccaggctgaaatcgtcatcgtcatcagtgctgccgatattgacaaaaataaaatgcgtggtgaccttggaatcacctatgacgaggatgtgcttcgcctgatcgatgcttttacagagcgtggtctctatgtaggaagcgtatgcattacacgctatgccggtcaggaaagtgcaattcttttcaaaaaccgtcttgcaaagctcggaattaaagtttacttccattatagtatcccaggatatccaagcaatatccctctgatcgtaagtgacgaaggctatggaagaaatgaatatattgaaacatcaagaccacttgtggtcattaccgcacccggaccaggaagcggaaagatggcaacctgtctctctcagttataccatgaatacaagcgtggagttgctgccggttatgccaaatttgagacattcccaatctggaatattcctctgaagcatccggtcaatcttgcatatgaggctgctactgctgacctgaatgatgtcaatatgatcgacccattccatctggaagcctacggtgaaacaactgtcaactataaccgtgatgtagaaatcttccctgttcttcaggctatgttcgaaaagatcatgggcgactgcccttataagtcacctaccgatatgggtgtcaacatggctggaaactgtattgttgatgatgatgtatgctgcgaagcttcccgtcaggagatcattcgtcgttactataagagctgcggtgcccttcttaccggcaccggtacagaggaagaggtacgcaaaatcgagcttcttctgaaacaggcgcatgcttctcttgaagaccgcaaagttgtttctgcaagtcttcagaaagagcaggaaacaggcggacctgctgctgctctggagcttcctgacggacgtattatttatggtaaaacctccgatcttctcggagcctcttccgcacttattctgaatacactgaaagaacttgccggaattgaccacaaacatcatgtaatctcaccggaggcaatccatccgatccaggaactcaaaaccaaatatctcggaagcagaaacccaagacttcatacagacgaaactctaatcgcactctctgtcagcgcggcaagcaatccggaggcacgtctggcactggagcagcttcacaccctcaaaggctgtcaggcccatacttctgtcatgttgtcttctgttgatatctgggaattccgcaaactcggtatcgaactgacctgcgaaccaaagtttgaaaaagaaaaaaaatatcactgactcacagttttctgacgtaaaaataccccgatggatcattcaaacgatccatcggggtatttcataattacgttaaaaatcagtcctcataaccattcgggttcttctgctggaaattccaggaatctgcacacatatctttgatatcgtactctgcttcccatccaagttctttcttagctttggttgcatcagaatagcaggttgcaacatctcctgcacgacgtggtttaatagagtacggaatctttacacctgttgcggcctcaaaattcttaacaatatcaagaacactgtagccctttcctgtaccaagattgtaaatactgagtccggaattgtcctccagcttcttaacagcctttacatgtccctttgcaagatcaactacatgaatgtaatctctgacaccagttccgtccggtgtatcataatcatttccaaatactcccagttctttgagcttgcccacagcaacctgtgtgatataaggcatcagattgttcgggatgccatttgggttctcaccaatcagaccgctcttatgagcaccgatcggattaaagtaacgaagaagtactacattccactctggatctgctttctggatatctgtaagaatctgctccagcatggattttgtccatccgtaaggattggtgcactgtcctttcgggcattcctctgtgatcggaataattgccggatcgccatatacagttgcagaggaagagaaaataatatttttgactccatgctttctcattacatctaccagtgtaagggtacctgcgatattgttttcataatattcccacggttttacaacagactcacccactgctttaagtcctgcaaaatgaatacaggaatcaatgtcttctttttcgaaaacttcattcaatccctctctgtcgagaatatctactttataaaatttaactggtttacctgtaatcttttctacacgttcaagactcttctcactagagttgctcaggttgtccagtactactacatcatatcctgcattctgaagttctactacggtgtggcttccaataaaaccagctccacctgttactaaaattgccatggttttctcctcctgacgtttgttctggttctgtttcgatgtcattgtagcaccattcctttgttttaacaatatcttcttaaatcctccatcatattttactaaaactccgtcatattttactataattgttctctgccaaaatcattggatcattctcaaattacctgctcattttactgcttcctagtgaatattcctgtttttaatcgctctctgatcccctctttttccatgtcaatagtgttttttgtgcaatatatattattttttttgtttttttcgttatttttagccatttttattgacacgcttgttttcaatatatataatcaagctaatatatacgatttctcatgaacttgagctgactttttagtcagtttcacaatcaaaagggaggatttatttatgaaacgaaaaatcgctttagtaatggtactggcaatgacagcagcaatggctcagcctgttcttgcagcagatgacaagacaactcttgatgtcatcatcagccagtatggtacccagacacaggcctggtggacccagttcgaaaaagatttcgaagcagaaaatccggatatcgatctgaacctggaggttatttcctggaatgaccttgctaccaaggttaatacactgattgccaataacagtgctcctgacattctgaatatcgacgttcttgcagattatgtagctgacgatctgctgatgcctgcaacagaatatacatctgatgaacttcaggctaaattcttcccggcattctgggatgcaagcaacatcgatgatacagtatatgcattaccaatcctcgcttcctgccgtgcactcttctacaataaagatatccttgatgaagcaggtgcagctgttcctactacatgggcagaacttcaggatgcagcaaagaagatcaaagataaattcggcgatgacgtttatccatggggtattgatatgacaactgacgaaggtcaggctgcattctcttattatacatggaacaatggcggcggatttgttgatgaaaacggcgactgggctctgaacagtgacaaaaacgtagaagctctgaactttgcggtcggtcttgtaaacgatggatataccaactccgatcctgcaaatgagacacgttatgatcttcaggatatgtttggtgcaggcaaagttgccatgatgatcggaccgaacaacattcctacctatctctccgatggtggatatgatatcaactacgatgtaacaaccatccctgcaaacgaaggctgcgaatctatcgctatgggtgtttgcgaccgtcttgaagtattcaaggatgactccgcagaggatcaggaagctcgtactgctgccatcagcaagttcttcgacttcttctacgatgatacacgttacgcagattacatggtatatgaaggattcctgccaacaacccagacagcagcagaccttcttgcaaaagatgacgaaaccttcgcatcctggattgatattctccagagctgcaacttctacccggcaaccaagactgaatgggcagatgtaaaacagggtgttatcgaagttgaacagaacgcacttcttggtgatgatgtgcagacacttctcgatgaccttcaggctgatatcgcaggctgatctccagatttaggcacgatttaaccgggagccggacattagtgaccggctcccgcttctttttgacaaacgatttggtggtggaaatatgaaaaaaaagaaaacgctggctgcgatagagccatatctctggctgcttccaagcatccttatcatgacaatctttattctctttccgattttcgaagttttccgtacttccttaagtgaagtaagtaaagccggacttatcaaaggcttctgtgggtttgacaacttcgccaaagtccttaagggatctacttttaagatggttctcaaaaatacacttgtatggaccgttgccgttgttgtgatctccacagtgtttggttttatcctcgcactggtccttaacaataccttccgtttccgtaaagcagtccgtgcgatcgttgtttttccatgggcaacttccctgatcattcaggcaggtgtatggaaattcatcatcgacaaggactatggttctctgaacactcttttaatgaaactcggactgatctccagcccggtcaactggacccctacccctggcgcgtattttgcctgggaaatctttgtaggtatttttgtaactgtaccattcgttaccttctgtgttctttccggtctgcagagtatcgacaactcctattatgaagcggctactgttgacggtgcaaactactggcagaaactgttcaagatcactattcctctggtaaaatcctcactgacggtaagtacggtattaaatatcatttatgtatttaactccttccctatcatctggacgatcaccaaaggtgatcctgcaagccgcacagatacccttgttacctatctttataaacttgctttctacaaaggtaaatccggcgaagcagccgcggtatccgtgatcggatttctgatcctgtgtatatgcgcttctgtttatatggtagtttcactcagaaaggaggaggaagactaatgaaaaatcattcacgtgactccaaaagcatactccttcgggttcttctttatctttttgttattctggtcgtactggttaccttgtatccatactttgtcatgtttacgacagcagcaaagagccgtgcagaaatctattctccggagggaacacttctcccgatccagtggctgtggcagaactttaaggatatctggacactggctcctctttccagatattttctgaactccctgatcgttgcaggcggctccactctgatcgcgatcgtatgtggtattccggcagcctatgcacttgcccgaatgaaattcaaaggcaaaaaggttttcctgggaatcgttatcatctcccagatgtttgctcctgtagtccttctggttggtatctataagatcatgtctgtttttggcatgacagacagccttattggtctcgtattcatcaatgccgctttcaaccaggcatttgcgatctggctcctgcgcggtacatttatctctatttctccggaaatggaacaggctgccactgtagacggctgcggcaaggtttctgccctgatccgtatcctgcttccggttgctgcacctggtatcgtaactgctctgatctttatcttcatcaatgcatggaacgagtataccgttgccctgaccctgatctcaacagacgtgttcaagcctctgactgttggtatcacaatatttaatggttacaacatgatcgaatggcagtatctgtttgcatcctctctgtttgctacagtgcctgttatcattctgtttgtacttatcgaaaagcatctggtaggcggccttacctccggtggggtcaaaggataaacagtcaaaaagcttcggatcttaaatgatccgaagcttttttgaatactgctctgtatatttatttgtatctacttatatttctcaatgatctcattcatctgcggaagcttttcctgcatatccttaacaagagtaagctgtgtcctgcatctgtcaagattatgtccttctctgtgtatcttaaagtaatgatctccttccagataatctgtaagaaaacggataccgttctcaaaagtcataagaatcgcacccagcggcagggtttcaatctcaagttctgtcagtgcaccaccgcagccttcaataaatcccttcgcataaacatcaaacagatgaagattacaggatacctttgagagatctctttcatcttccagtgctgtgcttgccccaaaccggatagaatcaccgaaatcattggctgccagccccggcatcacggtgtccagatcgatcacgcagacagcctttccggttttatcatcgatcatgatattattcagttttgtatcgttatgagttacacgaagcggaagccttccatctttctgcatatcatacaatgcccgtgtcagttcttctctttccagaataaagttgatttcatcctgaacagctgcagctcttccacatacatcttcagctactgcttttttaaatttcttcagacggtccggtgtattatgaaaatctttgatcgtctcatgaagagtttctgccggataatctgccagaagtctctgaaaatgtccaaaagccactgcactctgataaaaatcattatcatccttgacctgttcatagcaggttgctccctctataaacagataaattctccagtaatctcccgttgaatcaacaaaatatggaagattttcccggctgtttaacagcgtcagagtttcacgctccggatcgccgccattttcaatgatctttttgcggagccatgaagtaacaccgctgacattttccatcagttcctgcggattcttaaagatacgcctgctcattctctgcagaatataacgcctgatcccctccggggtttcacaggtaagcctgtaggtatcattgatatgtccgtttccatacggaatacattcttttagttcacccggcaaattaaaagcttctgtcacttcggatattttattgctgttttccaccttatgcttcctcccataaattctgcggatacagtccctgatctttcagattctggatcgcgttcataaccatcggcttatcttctttgtatgtgactccataccatttgtcctctgacttcaggactctgactgttgctttcttttcctgaagaagttcatccactacaaacggaaggaaatattcccccttcataggattgttctgaagtgcctcatcgaggaatggtttaaaacgagctttcagttcctgcaaaatactttctgaaaagccccacatgttcatagaaacgatgctgcccttcggaagcattgtccaggtcttaccgtcatcttctgtgtacgctgtcccaccgtcatgcttctcaatatgtgtacgctcgttgatcttgatcagatgaccatcctcatctgttacacagacccctcttgcaacatgtccattctccgtcagggtattttcaaggcgataaccgaccatcatataatgataaacgtctccatcttcctgattggaagtcaggaaatcatatgccatcttaaatgcatgcattccataataatcgtctgcattaataaccgcaaacggtccgtcaatctcatctatgcagctcagcacagcatgtcctgttccccacggttttactcttccctccggaacagaatatccctctggaagatttgctaattcctggaacacataggaaacctctatctgtctgctcagccggttgccgatcacctcacggaacatctcctcattttctctctttataataaatacaactttttcaaatcctgctctcactgcatcataaatagaaaaatccataatgatatgtccttctttatcaataggatcgatctgtttcaggccaccgtaacgacttcccattcctgctgccataactactaaaaccggtttcttcatcatcttttcctcctgtttctcagtgaaatactatctcctggatagtgttaaaataactgtacaccacaaacttctataagacaataaataattcttatcctctatataatatgtacacttttttcaaaatagtatttgcacgatcaatcgatatttttgtacaatattatttataatttgactatttcgtacaaatttattattataaagaaagataataatattataaatcaacaactcttatcttacagaggaggaatttccgtggcttatcagagtgtttcgctggagcgggaactttttataaaaagcatttataccattcattactacgaatatcagaatgatttttattttgacggagagcgtcatgacttctgggaatttcagtgtgttgatacaggagccgccgaggttgttactgacaatggctgttatacactgtcccgtggacaggttatctttcatcgtcccaatgaatttcatacattaaaggctaccggaagaactgcaccacgcgttgtagtgatctcttttgcctgcgattctccatgtatgaagttttttgaaaacaaggttcttaatttttctgataccgaacgcagcattctcggccgtatcattgccgaagcccggaactgcttttcttctcccatggatgatccttatctggaacaaatgaaaaagaaagaaaacatccccttcggagcacagcagcttctgatcctgtatctggaagaacttctgatccatatgatacgccgctgtacaaattcacactattctgcgtctgccggaatttacgatccatgtcagacgacttctgatgtctgccgggagatcatacattatctggaacagcatatccgggaatctctgactatccaggaaatttccagaaacaatatgatcggccattctcagctgcagaagatttttcgagaggaataccagtgcggtgtgattgaatttttcacccgtatgaaaatagattttgccaaacagcttatccgggaaaacgatatgaactttactcagatttcagattttcttggctattcttctatccactatttttcccggcagttcaagaagctgtccggaatgacgcctacagaatatgccacttccataaaggcaatatccgagcgtccccagaacaggaactga

SEQ ID NO: 9 - DNA, 22033 bp, unidentified
  source 1..22033: mol_type = unassigned DNA
tactttaaattcttatcttattgacagattgatttgaaagacaaacgcttatagaagttttaaaaagtttcgggtaacgatttggagattgtgctaatttcaatattttacagcctcatactcatgagtataactcttctttgaacaaaggtaagaatattttttggattaaagaaaaatcccgaagggaaaaataaaaaatatttgggagaaaggattggaaaaattcaagagagggaggttgagggattaagtgagggaaatcgcataatcgatttgtagttaccgaaaaaggcatattcgaaatccctgtatattgcttctaccggcgattacacgaccggaaattatattaaaaaatgaccccaatcaagaagtattttatgtttctcggttggggtataaaggttatttgaattgtagccatacctcatatattcaagccgcctttctttaaaggaatatgtagtaaagatttcatttccatatctgcgaaacttggtaacagcatcttttaaaggtgtctgaaattgctggcagttatgtacatatccgaattctgctattatgcgtgtttactcataaaattagactctatatctgcttgcactgattatcactatactatttcctgtaaataacatttgggaatataattggtggcgaccaatatcagcaagccttcaaaaggaacaaccagccgtttgttctttttgatacgtttgtaatatcccactaccccagcatattccccacctgtcacccggtatttttcggcgttcttcacgagattgtcatcatacggtatctgttcgaaaccgtcctccatggaagaagtgagcatgatgaacatgtccatctcttcatccggaatggaagctggaatctgggtaccgggacgatgatacaccatggctttctcatcgagaatcgaattcaaggaagagatatagtcatcatcgcaacgcaggaacatcaacatggcgacaagcggaacccgcctgatcacgacttccccatccggttgcggatagcttctggttttcatcgggatataactctcaatcccgtcacgtgacaatgtggccttgatttccgaaaaacggttatagaaaaccttcagggcataccattttttcatcatgacctattgattcctttttttatgatttccagttccaatcgaacctttcgacatcttcctccacgagcagatctcctgactgtacctcaataaagagcagatcggtcatggccttgacggcatgtctcatgcccttcctaatacagacggtgtctccacggccgattctagtcattttcccatcaagagccagcataccctcgccatcaatgaatgtccagacttcatcgcgatagcggtgagcctgatagcttacgctcttaccggcttttatctttaactgcctggtaaggatctcatatccgtcaggaaaactcaccgtatcgataaccttatattctccccagcgacgctcctcgtacatcgggtggcattgcaagcggtccgcatatgtcttgatgtgctcgctcctccctttctctgaaaccaggatgccatcgccatgaagcggctattaccatgtctttggcaccgatgcacatgacaggtatttccaattcgttgatcacatgggtgttttcagatttctcgtccatcaccacgttaccgatgcaacgctctttcagttcatcagtaagcacgttccatgtgccgagatctttccattccccgtcgtatggaacgacagccacagacttcgctttctccaccacctcatagtcaaagctgatctttggcagttcctcatatcggaggcgtacctcctcaaaaatatcgtatgcgagataactctttacgatgtcaatcatatatccgagacagaaagcgaacacgccgccattccaaaatgcgccatctgcgataaatctttcagcagtggcgacatccggcttttccataaaacgctccacttcatatattccgtctgttttgcgatgcttttgaagtatcacataaccgtatttggcggacggataggtgggctttatgcccatcagtacaagatcagccacattattctgcactgcttccgccatttccgctatagtttgaaaataacgctcttccgtatacgggtcgcatggcataacaatgactgtttcattcttgtcgcatttcgctgttttctccaaataggcggaagcgagacagattgcagggaaggtatccctacggctaggttcggtgacgacagtcacatcctcaccgagctgattggtgatggcatccttttgaaatacacttgtagcgattgtaaccgggcaggaaagtcccgattccttgatctgtcgtagacacgctgtaccatagattccctgcctccgtccggggaaggaagcagtctgaggaattgtttggagcgggattcgtttgaaagcggccacagccttttacctgaaccgccggataagagtatgatttgcatgattatgttgtgaaagttatctttccgccctcatcgggttgtttaagaaatcctcgtaggaaagacggatgccttcctccagttccgtcttgtatgtccatccgagcgaagtcgctttcgaaacgtcaagcagcttgcggggggtaccgttcggccgtgaggtgtcccagcatatctcgccggtgtagccgattatctttgccactaattctgtcagtgcctttatggtcagttcctttcctgttccggcgtttactgtctcgtaccccgaatagttgttcatcaagaatacgcagagattggccaaatcatccacatagagaaactctcgcaacgggctaccgtcaccccagcaggtcacctctttcaagcccgcttccttcgcctcatgaaagcgacggataagcgccggtaacacgtggctgtgctcggggtggtagttgtcattcggcccatagagattggtgggcatcacgctgatatagtccgtgccgtactggcggttgagaaactcgcagtatttcaatccagagatttttgccaatgcgtatgcctcgttggtcttttccagttcggaggttagcaggcagctttcaggcatcggctggggtgccatacgcgggtatatgcacgatgaaccgagaaactccagcttcctgcaaccattgcgccatgccgagtggatgacattcatctccagtatcatgttctcgtacatgaagtccgccaatgccgattggttggcgatgataccgcccacctttgctgcggcgaggaatacatattcgggcttttcttcggcgaagaagcgttccacggcttcctggcgagtcaagtccaattctttgtgcgtgcgtgtgatgatattcgtatatccctggcgttgcagttcccgtacaatggcagagcctaccattccacggtgtcctgccacatagatttttgcgttcttctccattgttttctcgattattttacgattcctttttcgagatattcggcaaggttggttcttacctgttgcgatgcacgttcaacggccacttttgccatatcggcatccaccatgatttttacaagttgctcaaacgatgtcttctgcggattccaatccagttcacgtttcgctttcgacgggtctcccaaaagatttaccacatcggttgggcggtagaagtcgggagaaacctcgacaagtactttaccgctcttgcagtcgatgcctttttcgttttcaccttcaccctcgaaacgcagttcgattccggcatatcggaaagccaattggcagaactcacgtaccgaatgctgctcgccggtggcaatgacaaaatcttccggcttgtcgttttggaggatcagccacatgcactccacgtaatccttggcatagccccagtcacggagcgatgacaagttacctaaatacaatttatcctgcttgccttgggctatacgtgcagcggcaagggttatcttgcgggtaacgaacgtttctccgcggcgttccgactcgtggttgaacagaatacctgaacagcagaacatgttgtacgcttcgcggtattctttagtaatccagaacccatactgtttcgctacggcatagggagaatagggatggaaaggagtattctcattctggggtacttcttctaccttgccgtatagctctgacgtggaagcctgatagatacggcaggtatcagtcagatcacattggcgcacagcttccaaaatgcgtagtacgccggtggcatcgacatcagcggtaaactctggggagtcaaacgacacctgtacatgactttgtgcggcgaggttgtatatttcgtttggctttacttttttcaccacctgtaagatgctcatcgagtcgcccaagtcagcatagtggaggtggaagttaggatgcccttccaaatgtgcaatacgctcacgatagtctaccgatgaacgacgtatagtaccatgcacgtcatatcctttttctaaaagcaattcagcaagatatgatccatcctgtccggtgataccggtaattaaagctgtcttcatataaatatcaaatttgtgatgtattatttcgtgaaactttagtttcgatgatctcatatattttgtaaatgtatctcaacgattcaagcaaaacattactgtaaattccattatccttgaatgcccgttggtgatctcgcaaaatttgtttatggctggacaatccactggtcgatgctcctcctgtacgcattgttacaaaatccattgggatgtatcggagtcgtattttatggacgaatattaatcgtaacagacattcaaaatcagcagcaattttgtatgacaaattgaagccgccgtatctctcatatatttctttgtggcaataaaaactcggatgggcgggcataaagccgagacgcatccaacggcgatgaaaaagtttcgaagagtaataacgggtacatttttgcaagtcattgtcttgtacataatgtatatcgccataaacagcatctatgttaccgtcttcaaatgcagatgccactgttgaaagcacaatatcgctggtataaaaatcatcgctattaagtattcctatgatatcgcctgtcgccattgcgatacctttattcatggcatcatatattcctttgtcttttccgctgatataacgtaatttaccttgatattcaggctctaattcatgtacgatttccattgtgctatctgttgaaccaccatccacgataatatgctctatatttggataggattgtgacaacacactccgcatcgtgtaacgcaaagttgcactgctattccatgtagcagtgattattgatattttcatcagattaaattaaattgattttgggtaaagagtttgattacgattcaaacattacccgttctgcgactttaaccgcaggattcccacgatatatcgaatatggcattaagtctttagaggctatggaaccgacagtaagaacactatgtgaatgcattgttactccgggacaaacagtggattgagcaccaacccatgcaccattttcaataacaataggttttaccatgaggtcaaatgtcgggcgtttataatcatggttaccacataataacatagctccctggctgatacagacattcgaaccaatcgcaacatgggtaagattgtctatccatacattttcaccaatccaagaatagtctcctattgacagattccacggatatttaatattgactgaaggttttattacaactccctttcccattcgggctccaaaaagacgaagcagccgtatcctaaggcttgaagaaggattccaactgcaatttataaaaaaaacatttacgaaataccagataatcgctttcatctttccagcacctatgtagaaccatgaattatcatatttcgacagatttacgctagtcataaacaaaatcgggtttagaacgttcacctaatagccattcatacagttgttgcatttgcattgctatcataggcgcagtatatttcttctgcacaagctgttgccccctttcccccatggcgagtagttccgggatagacatctccatcacttgtcgcattacttgggcaatgttttcgggagtacggtcaatccaccatccacagccgatggtgttcaattcttcccacggagtaccaagactagccatcacaggagtacctaccgacaaggcctcggttacaatcataccgaaattctcgaagtcgctcggcacgaaaagacatgataattgtgccaattgttcatacttatccctaccgttaataaagccgcagaatttaacacaatcttctaatccaagccgtttcgtttcgctacgcagaaattgttcgtaaatttcatctcctttgcccataatcactaattcataatcttgtaaacgaggtagcaaggctaccccataaagaaggttttcaactttctttctggggtgtagtcgtccgaggaagccaaacttcctcaatcgactacaccccagaaaggacggctttttagtcgcaatctcgtttagataaccaggcaaattggccgggttagggataacagctatggcaccacggtatccaaattggcgtacatactccatttcaggcttgcaagtaacatgcaaacaatcagcatgattgatgtccttacgaaaacaaaactgtatcaacggccatttcttccagtaagagcgttttaacgcttccggataaagcattccatgcggcgtgataatataaggtttacgtttatgccttgcaacggaacaagtgatgtggttgcaatacatccataacccattggtgtgataaaggtcatactcattgttttgtagataggaagagatgttctttgaatactcgtacggagttatagcatcatttggtaatgctttaatccaattttcacccttacccatcaatacatccgatttgtttttcacttccaaagtcaacaaatcaataggaaaaccgatattatacatcgccaaaattaagtcatacgtgcaagtggctattccgccatacaatgcaccaaacccagcgatggtttgtaatactttcatataaattgtatgctttaagtttttgaacaaggcccttctacaaaaggagtatctttccctttttccagacagtttattaggatcagcagcctttcggctgcgatatggggattccatagttcctgcatcaaggcggtagaacggctttggatatcttgccatttacgtggattggcaagcaggtactccactttgtcgcataaggaatccaacgctgcaatatcggggcggttgaaactacttgattgcttgggactggtaaataacaatcccgtctgcccatcattgatcaaatatggagaacttcctattccatcgcttgccaccaacacacaaccattggacatgctttcattggccacagcaccccaaccctcgttgcggtcgctggtgaagaggaatatgctgtggcagcgcatcttgaccatcagttcgttgttgggcatgttaccgtaaaaacgaactacatcagtcacacctagattcttcgctagctgtttcgtacgactttcatactccccgctgccgtacatatcgagccggaatcgataccctttccgtttcaaccgttcagccataaggatgggtagttccggatgtttccacattaaatatcttgaacaccacataagtggtgtgatatttaatgtggaaacatccgagaatgcttcaacatcaactttttccacccgggtgaaatagccccatttgtagcaacgtccctgataagtacccactttgtactggtctgccgccgcaaatgcactacaacaaagtttatacaacggctttctactccaacctccgaaatgataggcgaggaacattttcaagatagcaggtgaaaataagttcaaaactccccgtttcagccatcgctcgctcatatcgaatgacagcagccctcgcttcattcgtatcttttggaaaggcaaagcctgtactcctgagaacacacaacattctgccgtctgtgccaactccattgctttactgtaattctttttcgattgccaagcccgcaacaaataaggccgatcgctataatcatacgagtctcctttccgatgctcggcttgcagattggcaagttccacaaagtaatagttatgtccagtcaaattccacaattcatcagccacatttgcctgatggttgtttagtataagcgagtaaaaaacaagtttcatttgattcgtaaatgctttattcctctatttttgccattgcttgattccatacttcgacaccaaacaatcgttccacaacattcccttgattagcataacgtaacaattcttcatcagataagtctgctatagctcttattccgttatggaactcctctttggtaggtttaaccgtaaaatatttcattccttcaatttgtggataatgaatggtagatatgattatacgattgtgaaacaaggcttctattatcttagaaggaaagttacattgattttccggaaaattaatatctcgtgtacttaattgaaaggtgatatggtgtaaaagttccatgtaaacgttgaaaggcaattgaccgtgccaatggatattgctatgattgttagcgtattgctgcaacattaactcatttcctttgataccggtgatatgtaattcgtattcagatagtttggaaaaaacatcaagcaccatagaaagcattgatatttcctcagaaaggacaccggagagtaaaaaggttttctttatagatttaatttccggtctcgtcttgctgctatatggaacaacacctgggagaactaacgaattttcctttttgaataattcagaattggctaaacaaatacggccatgtgcccaatttataagtttcaagtaaatctgattcaatccgaaacctcgatttacgggtgtaaagtctaatactatcacatttaattgtacggatggtttcaatagcttcaacatcacaaacaataaggcattaagtgtatttaggttgtagaaccatactgatgcatccttgggtatttgctggaacatagtgaactgttctttgaatgttgccagtttttgcttgaattttcccgccttgcgccacctatcataaatcaattcaaagcgtttatcgctaaacgcttcttttgacatctcaccgcctacataaagtggcatactgctataaactttgtcaaaagcacaaccactcatcaagttataggagaagttacaggcagcaaatgacaatctgtattgagcaattaagtgttcaggcagtatgcaagtccaaaatatccgatatttcttcataaaatcttaatccttaccagtcggttaatgccatctttaagatatttcagtaaaataagtacaatgacaagaatggcatatttcaacaatggatttaatgtaaataaataattgatacacataaccgtgacttgggagaatgcgaccacacgtatgtttccctccccactttggtaaatatattagaaaacatagttgacgcatttcttatccaaaccgacaagcgaaataccatcagcgtaccggtaacagctcctaatgtcaatggaattatcggggttattaaattccacgctaaatcaagtttccacaaatagctaattaccgcagtgacggatagcaagcaataaaaatcccaataaaacgaaaggggtgtttcaattcgttttttgtaatctgctaattctttacctaacattacaaggaaagaagcataaggaagaaccgacaaactccatggtaaggatatttcataatgccgcaaactatatccaatataaaggaagcataacataataaagcgtcggacatattttctctttatcaagaaagttattcgtaccaaaacagatgacataaataaaatagggataaaccataatgcataccccccccaaccacattttatatagtgtatgacatccaattccccgataaaatacattaaaaatgcaacaatagtagagtaacacacaaatggaagtaaaagcgtatatgacttatgctttatatagtccacgaggctatacttttcatagttactcaccaatcccgaagagataaagaacaagggcatgtggaaagcatatatgaaatgtgacattacactgggaatcggtgtatgccccgctaccatcaagataatagctatacctttagctatgtcaagccagcgatttctattctgactcattaccaatcgaaagttttttcacttgcagatatgcctgcattactattgtaaacgacatcaacggatatagcagttgcgtaccatcatacggcctctgcaaaaaaccaaatatcaatatccaaaatgtccacccgtatttcttgtcataccgtcttaaacccaacaggaaaaagaatggactccaatagaccagttgtcctaaaaccccatcgcaggccaagattaaatttggatttgcccccacaaacactctatgtttttgcgatatacttatcaagttccgtgcaccatgccccacaactggtgcttccttaaataattcccagcacacctttgtcatctgttgtcggttgtcaccggctatcgttcctttcttctcgtcatactcgaagcgaccaaatatggcccgattcatccgttcattgaaggaagaaatcataatcaaggcaaccacaaaagccacaatgtatagtactaacttactgaatctgtttcgatagaaaaagaatgcatatattgctatctggatgaagtaggccaaagaaagcgtagaaataagtccggatataagtagcatctctactcttttattattaacaaaaagcttattgattatcaaagcatacattccccaaaacgccaatgcacctggttcatcatagaaaccggcattacgaacaagaccgtcaaaataagtattagttgtgaataggccaaagaagtatcccggtctcatatccaattcacggaacacaaaaataggctgaagaatgccaataagaactaaaatgaatcctatgctacctgctattacttgaaaaacaagccataaattatatgtcttcacaaaacctaaacgttcatcggataattgcatctcaaggaacatatatgtgatacacaacatcagtattcgagtgaaataggacgtatcaagcccatgaatgatagaatagataccccaagctgttatttgtaatactaataacgatactataggagacggtagcctaaattcattctttgttacaataaaaaatgctactaatacaaataatagcagatagtttatcgtatagtgaggcaaccatcccattaaaaaaaatacgcaaggccagccagctattaaagcgaagaaatacaggaaatacctaagatttagatatgcttttattttttcaaacatattttcaacgttgcattatatcgtaataaatttctgcaagtctattggcatttttcttacagtcatgccgttcttgagctatttccatttctgcagccgaaagtctggtataatctcccttttcaaacattcgcatcacaatttgcgccaacatttcatactcctcataccgataaaaatatccggtctctccttctgtcaacaatgtcggtgtacctccgcagtagcttgcaactacaggtgttcccagcatttgtgcttcgcacagcgagttgggcgaattttctatagcactcggcatcacataaacatttgcatcaaggaattgctgtttcatctgtttttctgataaagaaccaaggaaatgaacattatcctgcaagcacaatttttttactagtcggcgtagatataaatgataaccttggaaacgaagaatatctttcactgcactactcattacactactaccacagaaattaactacagtgtcaggatattgtctcaagataataggcaatgctttcaatacttgatgtgcacctttcaacggagaaccactattgctcacaaaaatcgtgtgttttttacattgtcccaagttccatacaggagcttcataaaaagaatcacgcaaagtttcattcataaaatgatagcgcagccgtgggtttacggtcattacatgatcatgatcccacccagtacgtcctacaatatcagtaatatgtgtgagtacataatgctcgcattcagcacgatgcttgaaacttcgtttcgcattcaacagaaatgttccccggtaaaaatcaagtggggtgatattcatccatttatcccacaatgaaagtctaccatcggcataacgcatatatggccctgccaacccttggatgtttgctacagtttttactctgtcctcattggccatacacacagctttagcaagcgaatgttccgtaccatggatatgtatcagatcgggagcaaaatcccatatagcctcattacaagcctctatctgttttttagttgtcttgtctatctgggcagtaggcacaagatagtaggtcacgccatctatctcataccgttcatatttctttccgtatgaatagacgatgactcccaactgtacctctggcatctccatcagcattgcctttgccgatgaatacatccacccgcaatgtgccggtgcttcttcccccaagtaggagcataatggaggaaatttaaccaaagatacccacaagattttcattctttccatttttaaaaagacttggtcatttatacaaactctctgcatctttgtttcaattcatctgccaatttccgccatgcgctcttgttggacgggtggttggtgaccgtgatgggcaatacggtatcgaaccggggtgacaaaacaccattttcgacactcacaacgttgaacaattcacgcaggccggccaatctgcacttactttcctcaatgtcgcttcctttttccaaataaatgacaggagtttccagtccaaggcatggcaatgcacaatgtatacgagaggttattactagacgagcctttgcatacatcttgacaagtcgctcggcttcagaaagacgttccgcatcggtcttgaaaagcgtcttataacacatactttcttgggttacatatgtggactccatgacgagtttccgaccaaacacttttgaatactctttatagtaaagagccgtttttaatattttgctcacgatgttccttccataatgcaaacgtagctgtgttatcccacaaagtttcagcagatcgagaggatgcttaatggctgtacagacagcttgcagaattgcattaaaattaagtgtaccattgaagatagggtccacgatatatgtcttatcctctttctcctcggaatgatatttctcgccaagggtcaaggtcatgcacccggagaaataggcatctactccgtttttcgacaacaggtacaaagtgttcaggtctctgcaacctataggctgatgacttttcaaataagctatgctttgtgacgaaagcaatacttcttttacaccactgttcaagtgaaaggcaacaaatagcggatctatcaagtcggacggaggccaattttgaggtaggtgcatataccatccattcatgatgaccttacagggttctcccgcgtaatctttcaaatcttcgtctcggtcaatgaagccatctatgtgagggaggaattgcgaagaagccaatgcttgcacataatccccgatattcactcccgatatgttgggaaacttagaaaccgctaataacttatatttcatattccaactagttttttaattactctgtcaagtaccttttcatatacatttaatatcttttctccgtaattctcaatggagaagttctctcgggcaaattgccgggcataccggataatttcttgatgatcagtttcggctgctttttgcatcgcagacacacaaccatccatgtcgttaaacagcagtcctgtcttgccgtcaaacacaaaatccttggtaccgccggaattgcggccaatcaccaaacagccataaaacatggcctcaatggaaacacgtcccaagccttcgttttcggaacacatcaagaatgcaattgcccggctcatatattcctttaccttgtcgcttcgtccaagaaattctacagcgtctgatatgccggcgttcgctacgattttggttaattgggacatatattttgagtgggcttctccgataatcttcagtttatatcctttggtagccaaccccgacttcgcaaaggcagagatggcataggcacatcctttctgttctgtcaagaaccctgcacaaaacaggaaatacttctcttttggtctaacaaggcatgtatcatctttactccgaacggcatccgatattacatacgcattcttgctttccaaagaaacataatgttcaagcacggtcttggtgataccaattacagcatcggtttgctttagcgtgtttatatatttgtcccatccccttaatggcatccacccgaagtccaggtccataaagccacgtaaatgccacacaacctttgagttaaggatcttggctatttcatagccaactgacatgacagtattattgatatgtacaatgtctatttttctacctttcaagatttgcgcaacagtttctgcacacttgcggtttttccgatagaatgttaaatggtttggaatatattttagccaatattttatgtgttggtacaatttcacaggtttccctactaagtcttctttaaagtcgcacacaatgcactctacaccattagcggtgaagtaatcatatacacatccttctgtcccaaccatgacaatgggatggacatatcctcggactgattttatcaagtccattagcgaatatgtcgctccatcaaaatttttcgaggcaaatgttacatacaaaacatttatcatctttatcctaatttggtttaaagttctacttttcggatatcagtttccaccacatttccgctatccgttcctgtgagaaccgctgcgtggagatgacggcttgccttgccatccgttgccgcaacatattatcactcatcaattctttcattcggcatacgtaaccgtccacatcactctcattgataatcacaccgttttcaccatcggtaataatttcacgtaatgaggcataggtatcaaaggctatgggcactacgcccatctgttgcgcctcggtcagcgttaatccccacgactcgcttttcgaagtcatcaggaagatagatgcctctttgtagtagggaacaggattttgcctgccttcgagagttacatcggggatatgttcgttacgaatgatatgttcatagagtttgcggtcattaccatggcccacaatgcggagcgtccaatctttggctaccggatcttgtttcacacatgcccaaatccgaagagccagtgacaaccttttggatggttcatctaagcgtgaaacaatcaatgccactttgcatttagtaagttcgtcaaagcaaggcgtaacgccgaatgacagtccgttggggataactacatatttcgatgtgtcatgcacacctgcaaattctccataaggtttgatgaaaccccgacagagcagcaccacatggtcagcgcactcataagctgcacggtagactgaggaaagttgccgtttcttccgcattgccgtcaaaggatacattattatactttttgtccatcgggcaaagtccatcacagattttggatgatacctgataactttaccaaagcgtccgaacacaagttcccattgtggctcgaaatgatgtgcaaagatgactttacatgttattccttctacggcagcccgaaatctgggtacatgaatgaatgccccctgcacaatgacgcaatcaatacagttcgccacaatgatacttctaagcacttgggcattcttttccaaatccttctgcggaatccattgaaactctttgataaagcattcctctttgggtgtatcggcaggtgcctcatagatggagaagcatctggcaccatacagctttgtcaaagctgtggctacggtgatagtggtgcgttctgtcccacccttagtggaatgcacttttccgtaagtgtgatataaaatgttcatgtgtaaaacttagacgaagtatctgtttttacagagtatattcaacaattccccttggatacaatatctttgctaagtcttttggcagacgacgcagtactccaatatggatagctccaactttttttttgtcagaattgtagcattctatgcgtgtataaaaaacacgatcgattatttgtatcactgctgcattttcttttttgcaaagtttaataatttcgtaaaatgttgattcttcatcaatttttatattgcgctcgtcatataatgtggacaaatcatctaagttaaacttgatttctaaggcctcttcttcaagagttttgagaatgtaatttggaatcataccttctttaccaggcatttctacattatagaagtttttagtctgaaatacctgcccatctcctgttgaataaaggtttctccatatttgataagaatcgatattttagaagaaacagttttcatctattgatttttacgtttgtcttctaacgcatttttctgctcctctgccagttcgttatcgagtacaatgcgtattcccttactgtcttccaatgactgcttataagtatctatttcatttttgacatcaaccgtatctaaggccgtaatccttcctgcacaaatcttgatacagagtttcaaagtgatattctttatatcaccaccagtcagtccggcggaatattctgctatttcagcatacgagaaattatgtatatctttgggaatttctttggttgaagccaatttcattctttctagaatattggggtttccgaggtgaaatttccaaagttctactaattctttattggttggtaaaggatatttaatgtggtatagtattctcctaaaaaatgctttgtcgaagttcttgaacaagttagttgcgtaaattattgtaacattcgaacgatcaactagtgtcaataaatgcgacttgatttcatttgcagcatttgagttcgaactgttggttgtgcattttcccaagagccatggctattgcttcagctgtgatacttttgcccgttcctggttcaccataaagatttattcctatagaagaattgcccttcaagaaattatttaatccccattcctcaataagcctatccttgtttttgcagaaagtaataacatcaagcaccgtctcacgtaccttttcgttaaggattatttgctcaagtctccatttagggtcatcttctatgaactttttcaattccaatttttgttcttcctcgttgctactaaacaaagaagactttggcttatcgttttcaggattctctctcccgtatttctttttatacttgtaaatgtcggcatagcgctatattttttatcttctttctttacactatgtaaagtattgatgttttttactttatgcaaaaatattgcactttagatattcttttccaattccttcaataaacagtattttgcttctctaagtctgaaagggcaggcattaattaaaggatataaatcaatcgtggcaggcttccagtttgatgctttgagatttataagttctataggtaactcgtcattcgcaataaccaatggcgtttctccgtagcgttgaacagacaagaaaaaatcgtgaaacttgaaatgtccccctatcagtggtttcccgaattcaatccaaacattgggtacatgataagcttcagctacgataagaccatgtagcgaggaagacaagatgattccacattcacagatttggtcaatgatatcatgccaatgcttatattgcccaagataaataatttgtacatcctcacattcacttaatggtttcccattaaaaagtaaggtttccacaaccgtctgattaaccacatgggatataataccatacttataaagtttctgtttagatggctgataatagagaggtacaagcatggctgggtctccatatatttcagggcaatctactccttcggcaagcagttttgctcgggaaagtggtccacggactgcatagactttcttgggctttatttttaaaggtttacttccatcaataataccagctccccatacttcggtgttttgtgtacataacatatcaatggttgagccgattaccaaatagttccgtagtttcagtctgaacgctaaggaggtacggttaaagagtacaaccggagactttattatctcacggaggaaataataattaatatcatcaccccagttttcatgcttgatgcgtttgttattttggtaaaatacaaatgcattaattataacgggatgtaagaatagtttaatatgctctattatgattattgcgagtttaatcatgagacctatatcttaaagtatttattttagtatatattaggtttctttcggaggtgtttaatcctacaaataaaatagaaattgcagtcataactattgataaaataattacaattactgtttttaataaactctgattagtcattgtataataaatacttattgacatacaagaagcgagtgtaaaaacagaaatagttggtaatagtactttatgcgcatattgtacgagtgaaaaagaaaccatccgaccgacaatcattattctacaaataagggctaccatagaaataattaagtggacaatgaagaccatttctggattgccgcccaatttaagagctatataagctatcggaagtataagcaacaaaagccctcccacgacactttggtaaacttttacttgaccaactgcctgcgaggagatcatcaaaggattggataaagcatctataagcaagatgcataatattatacgaacaaaccagaccgtatgagccggaacattcttcaaccacacagccagaatcgtctgtgtttcaatcataattggtagcactataagcaacaacaggaaaaaggaatacttactgcttgcaaatatgagagaatgcatacgactcaaatccccggtagcgtaacttttggtgatttgtgggtttaatgccatttgaaaattgctaacaaaacccgttacaaccccttgtatagtgaccgctattgctcgtgctgcattcacaatagggccaaagaacatattcaaaagaacattcaatccttgtgtgtagaataccccggcaatattaccgaacaagctccagccagcgatattagccatttctttgaaaattctcttattgaacattagtttcactcgtgcctctttgaaatgccgcttacagtatatgccatatattaaccggtcaagaatggagatactcaaaagcagagctgcataaaatattaatcgatcaaatgtaactattgtcaacagatacactatcactaatttcaagactacatcgagaattgatatgtaggcaaaagccgacatcttttcatgtgcaataattaccgcattataagggatagaaacaattgatacaaacattgtaagtattgaaaattggtatacccaaatggcagcaacaaacctctcttcaggaataaccaacttatgatatacaaaccataaaccgagagtttcagcaacaatcacaattaacaatgcgataacaaaatggataatcgctgcggtagaaaatgtcattatttgttttttgatatcacctcgtgcaagttcgaaagtgataaacctttgtgtggcattagacattgccccgtttaagaatgaaaaaaaggtaacgaatcctcctactacattatatatgccataatcctctactccaagtgtattcaatacaatcctgctggtgtatagtcccacgcagaggataaatatcattctcaaatatagaatgaaagtattcttggctattcgtttgttcgaggaaacagaatctggcatgaatcttcgattagattatttagatttttcccctatgataattccccagccaatgtttctgactgctattgttaaggagataggataatgttaggctgatagcaaatacacctaatgagagtagtattgggggaatctcatagggaattgctataaattccagccaataaataatcattgagtggaacaaatatattccaaaggaatttggaactatcaattgatataatttagtgttctctatccacatggtattgacagaaagaatataaaatactgttattccaataaaagcattaaataattttaataaataggaagggggggggtaattcctggcattactatattaaaaccaatcccacatacaactgcgatggctacatatttaaataccggtctgtaaatggtaaacagatagcctaatgtgaaccaaatgagatattgctccacatttttgatctggaaataaatcatatttatgggaaaacagtagagaagcaaagcgactatgactatcgcccatattgggatatctagtttaatacaaattttgcgtaaacagaaaaacacaaggaatatcagaaatagtgcatacacaaaccatagatgccttggatctaaaacaataatgaaaccatcaattaaataatgtatcgggtctcggacacctagaagtaccattgtagggtaaaccatcaatagtccaaacacataaaacggtatcaataaccttttaaacttgttcttaaacaattgtacaaaagtcatagatttcttttttacctccaattgccaagcgaagatacatccgctggcaaagataaacagaggcatgtgaaaagcgtaaatcacctcttttacggaattcaaaattggcgatggcgtactgggtgtaataatcgacattggggaatacgtaaacacaacatgccccaatacaaccaatagaataccgtaaaatttaagaatatttagttctgttagcataatgacaatcgttcaacaatcctcttatacttcatctaactttctatattacacttccaattgtaaaacaactcttatgtcaaacgtttgacaaagatttcgtgtaagaagaaaatctttgaaaagccgtataaccatcatagaagtggcagaaataacaaaggggttattgatgcatacaatgtaatttgcaattacatactaccctttatgtactaaaaaaacaattctgattctaaaataaccttctttctgctagatatgagttcttttgtgttacctcccagagaaaagacattgggtaatatattcaaactcatggcgcattccaaaaggttattcaactcttttcattaaccgtattcaataagatgagtggcaataatcagattaaaaatcgagtagtttttgtacatttcttgtgatgcttgtacaaatgaacttttgaaatatattgtaactgtgaatgtctgtcccggtataagcaacagccttttcacttaacagcagcacggcctttttcttaatccggttaccgtacatacctgctattgacggaaggttgagctggaactttacccccatgtcttttagccgtcgataatctgattcacccatataaacataccgttcggggtgagcgagaaccggatagtagcctttggccttgatgcgaagcaagatattgctcaatcccatcggaggactaaaataagaggtttccaccaacaggtggtctccattctcgcccaaaggcaacaagtcattcttttccaaacgctcctcaaagagattgtcgagcatattttcagccgcaagatgtagcgttatcgggccggtataggtggcttgtagttccgcgaaacgctcccggaggtgtgccgtggtattgggtatgtcctccatgatgtgcggcgtcaaccacacggctttcacgcccagctcttcatacagacgcagtatct

SEQ ID NO: 10 - DNA, 13770 bp, unidentified
  source 1..13770: mol_type = unassigned DNA
atgctatttttatgccagttattattgaattttcaaggtgcataggcacattttaatgtgcgaagtttgagtttttaatattttttaccattcatcctcaaatacccacaatagctcacttaattctactttctgtaattcattatataactattttccgcacctgcgtttatattatgttcaaacaaataattactacttttttctgctttttagagtaatgcttcccgcactatacaatcctgcaccgagaactcaacttactcatcatgtatcaacggctgctttttcaacatcgccttctgcgacttccacacctgttccataatcgtcttcacttctgccatatcgcagactacgatttcttccatgcgagccgtcctgaaggctatatatcaatacgctaaattgaatgaatacatagacagggatttaacagaaggtctggtttatgaatggacaaactctacggagcagatacatgacagatattccgatgaagaaatcaaaacactctggtcgaagctatatgaaatcaacaatgtagatattatcctgattatgatttacaccggattgcgaccaaccgagctgttggtaatcattacacctacggaacctacatgaacggcaattttaatacgtgcatgggaaaactcaaaatgaaacacctgccccacgatggcagacacacctttgcttcactcatggacagcgccggagcaaatgacgtatgtatcaaattgattatgggacacagtatgaaaaacgacaccaccaagggaacgtacacccataagactttagaagaacttcttacagaagtgaacaagatataaaacaataaatcgagactgattgctagatacacttatgatgtttcttattattaacattacactcatattcagcttgaatcatcttgaaaaacaccggatgaaatgcttcaaaaaatcatccaaaatcagtaaaaacgagtgtataccacctgtatatcacttgtgtaccacgtgtatataacgacctcaaaataacgtaaattatcttctatttatgaatattctgacaattcttttgtcatttcaatacataaagaaaagccccggaaattcaatatttccaggacttctcaatataatctttatcttagaaattcacgattagcaaacaccctgtgcaagcatagcctcagcacaggtattcagtattcatggggatttcaaacatttttgtatattacgcgtatactactatctcactctgaaataaactaaatccaacttccacaaatttatgtcttgaaaatttacccacctcatactataataaacataaagagaagcaaccgcccacaaagtggttagcctcgtaaatggttatttaataagccactcgtccgccaagacaggagtggcttatttattttcgcttgttgttcctatctatgtaggcaagcagtgcgattagaaatgaaccgcctaaaaataacaggcttaaaacttcatacatatccatcagcaccacctcccctcgatctctagtctgggaggctaccactctgtacacgattacttctcatgccggtagtgtatcacaatttacataaaccgacaatctccatttcaaaattcttgttcaaaataaatcgtaatttcattgattaccctgtgctatgttttttccctattttataaaaatacattttagtcgaatcatccttgtatattatgcaaaaccgtttgtatactacgcgtatattatatgtatattacttgtaacttatctccttctctcatgtataaaccgcttactttactgcattttcatgcatctagcaaaacacaaaaaccctacacttttgcgttttcctgcaatgtgtagggttctcaatttttgaataattatttatttgttgctaatttattagcaaacaccctgagctaacatagcatcaacaaccttctcaaatccggctatatttgcaccggcaacatagtctgtctgtccgccaacggttgcattgtatctctttgctgcatcagaaatattagcgtagatcgtctccatgattcctttgagttttccatcaacttcttcgaatgtccagtgaagtctctcagagttctggctcatctctaatgcagatgtagcaacaccaccggcattggcagctttaccacctacgaataatacgccgttctcctgtaagtattttgttgcctctaatgtagtaggcatgttagcgccctctgttacagatgtaacaccatttgcaactaacatcttagcatcctcaatgtctaactcattctgagttgcacatggaagggctaaatctactttgtactgccatacaccgtgctcaccattctgttttgcatgatattctgcagatggttttgcagcagcgtactctgttaaacgtgcacgttttacttcttttacttcttttaataatgcaacatcgattccttccggatcataaatccatcctgtagaatcagaacatgttacaacttttacacctaactgctgtgctttctcaattgcgtagatcgcaacgttaccggaaccggaaactgcagcagtcttgccttcaaggctcatgccgtgatctttccacaatgcatttgtcaggtataataaaccatatcctgtagcctgtgtacgggcaagagatccaccgtatgtaagtcctttaccggtaagaacaccttcgaaagaaccacggattctcttgaactggccaaacataaatccgatctctcttgcaccagttccgatatcacctgctggtacgtccacatctgctccgatgtatttggaaagttctgtcataaagctctggcagaatgccatgatctctctgtcagatttaccctttggatcaaagtcagaaccacctttaccaccaccgattggaagtgttgtaagggaattcttgaaaatctgttcaaatcctaagaatttgataattccaaggtttacagaaggatgaagtcttaatcctcccttgtatggtccaatggcattgttgaactgtacacgataacctctgtttacctgaacctgtccgttatcgtctacccaaggtacacggaacatgatctgacggtctggttctgtgattctctcaagaattgcattttttctgtacaattcctcatttgcatcaataacaggtcttaaagactctaatacctcttcaacagcctgtaaaaattcaggttctgaagcatttttttcttttacttttgcgagtacttcatcaacgtatcccattttttttctcctttaaaaatatatttacaaccatgtgaaatcagatatccggcattttttaaatgctctggcattgattccggctgcagatttctcatcaacacgtacattttattataaaatgacggcggacgcaatatttttttctttattcctttaatttagtgaagttttctaatgattagtctatttttttgcaggattcgacttcaaattattcattttgcataaaaaaaatcaatgaattttactttttatattttcaggttataattattatcatttcaacttatatcaaaacaggtcatcgcataaaaaaatagtttttcgatgcaatgacctctgttctttattctttttcacccttgtatacaaggtgaaaataatcggcaagtttcgccagcgcataaatcaggattggcgtctcctgctcggtaagctggcttttgatctgtgcgatcatctcgtgatgaaactcttcatgatgtttgtaagcagctttcccggtatctgtcagataaacccataccacacgtttatcctgcgtactgcgctcacggataacatacccttttctggtcagtccatccattgcctttgtcaatgttccggttgtgacacccatcagctttgccaccgttgtcatcgtttttggttcatcgactccgattgcctcgatcacatggaaatcattgtaactgagatctttgaattcttctgtcacaagacattttccctcaatctccatgatgtctttaaacaatctgaccaataattcgtttaatgtttcatctgttgtcatccgatctactcctatttctgcggtcagcgcctgattttaccagtttatcaccgttgctccccaggtgaggcctgctccaaatcctgccaacacgattttcattcctttcctcatcataccatgattattgacattatcaagcaaaatcggcacactcgccgcagaaatattcccacattcctccagattggtcggaaatttttccataggctgaccaagtcttttcgaaactgcttcaatgatcctgtaatttgcctgatgcagcaggaataaatcaatctcttccagatgtaagcctgcctgttccactgcgtctgtgaccgcctttggcacagtcttcactgcaaacctgtacacctcctgcccattcatggaaacataggaaagtgccgtgtcactttttttataagggttgttcacttttctcgccatgcagtttaagacatcgcctctgaaaccatccgagccctgcaccatggataaaatgccatcttctttacttgctgaaagaactgctgcccctgcgccgtccccaaaaagcacgcaggtgctccggtccgtccagtccatcatttttgacagcgtttccgctccaatcacaagcgcatgctgatatccgccatgttccaaatacagtgccgcagtatctagtgcaaaaagaaaaccggaacacgctgcattgatgtcgaacgcaactgcattttctgcaccgatatttttctgcacctcgcaggcaagtcccggaagatgtttatctgcagaaacagttgccgcaatgatgatatccacatcttccgctgaaatatctgcatttttcaacgccttgccggctgcctctgtggacataccggtggttgtctcctctaccgcaatatgtctggcaataatcccggttctcgaccggatccattcgtccgatgtttccatgatctgaccaagatcatcatttgtcacgcgaagcttcggaaggcagcttcccgttcctgttatttttaccttcataatattcctctcttctctgtccggtcacaaaacgattcgtactctctgtgcacatagcctctgtgattttgctaaaatttccggaatctcgcatagcgctcggacgcaaactgttctcctgtcttgccattttgtttctcaagaaacttttttatatttcctttcagatagcgcgagattgattcacaggcttttgcgtctgccacaccatattccgggatgatctgttcaatgacacccagcgattttaaatccaatgccgtgattttcataatctcacttgcctcttttgcacgttttccgtctttccacaaaatggatgcaaatccttccggcgaaagcacacaataggttgcattttccatcatccatacttcatttccgactgctaaggcaagtgctccgccgcttccgccttccccgatcatgatgcagagaaccggcacttttaatgcagacatctcataaagattccgggcgatcgcttccccctgcccacgctcctctgcctccattccgcagtatgctcccgctgtgtttacaaatgtgatcaccgcgcgtccgaatttttctgcctgtttcatcagacgtatcgctttccggtatccttccggcgacggcattccataattgtgtttcatgcagtccttaaaatcttttcctttctggattccgatcacggtcacaggctggccgtcgagatatgcgactccacctacgattgccggatcatcccgaaagtatctgtcaccatggaactccataaattcatcaaaaatattttccatataatcagtggcagaaggtctgtctactttccttgcggcttttaccttttcccacggcgtcagtccttttgcccttgccgcgcgctcccgcattaactctgtcggctcgtagttatcatccatgcgcaatggatcaaaatcagcaaaaccttccctgatgtgatgcatttttaaaatacggtttaaggttattttcagatttttccgctcaacaatggcatccacaaatccatgctctaactgaaattccgcacgttgaaatccctccggaagtttttgtccgatggtctgctcgatcacgcgggggcctgcaaaaccgatcaatgcgcccggctctgccaggataatatctccaagcattgcaaaacttgcggtcacacctcctgtcgtcggatctgtcaataccggcacatacaaaagccctgcatcagaatgcctttttaaagctgcggacgtctttgccatctgcatcagggaaataataccttcctgcattctcgccccaccggagcagcagaacaaaataaccggaagctttaaatctgtcgcccgttccacaccgagcgcaattttttctccgaccacatgtcccatgctgctcatcaggaatctggcatcacagattcccagaaccgtctcttccccatatattttgcatcgtccaatggtcactgcctcatgcagtccggtcttttccctggccgtctccaccttctgggtatattccggaaaatccagtggattttctgattccagatattcaaaccatggttcaaaggttcctgcatctgccaccatgcggatcctgtttttagtccgcacgcggaaatagcttccgcactcatagcagacatacttattcttttccacttccgccttgttcacttctctcttacatgcggggcagaccactgtacttcccggtattttctgctgatccgctgcaggtggtggtgtcataacttccgcctgcacttcctctttgtggtaagttactgcattttttcgttcaggttttatggatatcagctttcttcttctcaaaattgctggcataatatttcctttctgttacagcttctatgtaatgcctttctattctgttactcaactgcaaaggtgagttctgcaatgcatgcaatttcatctccgacttttgccgtcgcttttcccaccccgatcggtcctttcacttttataatttccgtctccagcgtgagaatatctccgggaactacttttcttttaaattttgcagaattgatggacgcaaaataagctgtttttccacggttttcatcttttccaaggattgcgaccgcaccggtctgcgccagtgcctccacgatcagcacccccggcatcaccggttcttccggaaaatgtcctgcaaaaaaaggttcattgaaactgacgcatttcttcgccactgcacggacaccatactcaatttcttctaccgaatcaatgagcagcattggctgtctgtgtggcaggatttccatgatctgactaatgtttaatactgacatcgctgcctccttatctgcagccattgatatctttgtccgatacaatggtatatttttttaatagaatacttgcattatggccgccaaatccaagggaattgctcagtgcatactgcacctccatcgaaaccggttctttgcaataatcgagatccagttcctcatccggcactttatagccaactgtggcatgaatgtagtcttcctcaatctctttcacacaagtgataaactcgatcgctccggcagctcccagcatatgtccgaccatggattttgtggaattgaccttcatttcaccggcatgcgcaccaaatgcaagtttgatcgcgcgcgtctcaaagagatcgttatggtgcgtggatgttccatgtgcattgatgtaaccgacctcatccactgtgatccctgcatcccaaacagcatttaacatagctcttgctgcgccgctgccatcttctgccggagatgtgatatgatacgcatccgaagaacagccataacccacaacctctgcatatatctttgcgccacggcgttttgcatgctctaattcctctaacacgaccaccgctgcgccctctcccatgacaaagccgctgcgttctttatcaaacggaatggaacatctctccggatcggtttctgctgtgagtgccgtgagtgacgtaaaaccagcgattgcggtcggacagatacttccctcggttcccccggaaaccataatgtctgcctcaccatactgaatggcacggaatgcctcaccgatcgtattcgttcctgtggcacaggctgtcacaacattgatactttttccttttaatccaaaatgaatggaaacatttcctgctgccatattagagatcatcatgggaacgaataaaggtcccactctccccggtcctttttctatcagccttgtatgttcgcgctcgatcgcctgaaggcttcccacgccgcttccaatggcacagcctgccatatacggatcttcctgatccatttcaagcccggcatcctcaattgcctccttcgctgccgccacggcatactggctgaatagttccatgcgccttgcttcttttgcatccatataattttttgcatcaaactcttttacttctgctgcaagcttacatttataattagtggtgtcgaattttgtaatttcagaaaacccggttttctgtgcttttatactctgccagaattcatccacactcagtccgatcggtgtgactgctcccattcccgttaccactacgcgtctttttgccatattgttctcctcatgatatatattctttacatgtgcatgccgccgtccacggagatcacctgtccggtgatataatctgccagatccgatgctaaaaatgcagccacaccggccacatctgacacctgccctgtccgctgaagcggaatctgtttttttaccgtttccctggcagcctccggcatagcctctgtcatctctgtctcgataaatccgggtgcaactgcattgcatgtgattcctctcgacgcaagctcccttgccacacttttggtaagaccgatcactccggctttgcttgcactgtaatttgcctgtcctgcattccccatgacaccggaaacagaagaaatattaatgatcttaccggatttctgtttcaggaaataacgcgaagcatggcggatcgtatggaatgcacctttcagattcgtatcaagtaccctgtcaaaatcttcctcactcattttcatgatcagtccatctcttgtgatccctgcattattgaccagaatatcgaggtgtccatagttgtttatgatcatttccatcatttttccgcaggcatcaaaatcagaaacatcacattgtacaggcgctgccattccaccctgttttatgatttcttttacagtctgttctgctgcatccggcgaactgttataattgacaatgacaaacgctccacatgatgccagtgtctttgcaatctcttttccgattccgcggccggctcctgtgacaagtgccactttatttttcaaagaatctgttaacatgctcccgcctccacatgacttccgataaactgaataaaatcttccattttatcaatgctgctcacttttacatcccggttcacttttttcacaaatccactcaatgttcttcccggtccgatctctacaaattcatccgcaccatctgcaagcagccgttctatggtctgctgccagcgcacagaagaagatacctgactggcaagcaatggtttcacttcctctttttttgtgacatagtctgccgttacatttgcaatataagtaacaaatgaatcactgatctctactttttttaattcttcttttaacttttctcctgcaccctgcagcattttcgaatgaaacgggccgctgactttcaatggaacaacgcgttttgccccagacgccttacatgtttctcctgccagatgcactgcttcctcctgaccggaaataacgatctgtccggggcagttgtaattggctatggaaacctcgctccctgtctgctctgctgtatctctgcagatctgctcaattgccgctgcatccagtcctagcactgctgccattgctccaccggccgggacagcttcctgcataaaaatgcctcttttccgcaccagttcaaatgcttcctcagcagtcatgactccggatgcgatcaacgcaccatactcaccaagactcaatccggctgtgacatccggctgataaccgttctgttccaatgccatataaattgcagcttccgtagccagcatacagatctgcgtgtactctgtgatatttattttttcgttctcctcaaaacacagtgccgggatatccaatccagtcacctctgaagcaagatcgtacacttctttacaaatagggatctgttcgtaaaattcttttcccatgccaatatattgggatccctgtcccggaaacataaatactgtctttcccatcctgataaccacacctttctcaaatcttcaaatctgcgcatgtcaggtcattttcttcctgcaagcagcgctctggcatctgtgacaacttcctctatgatctcctgacaggtctgctcttttttcacaagcccggcgctctgtcctgccatcagacttccatgaactgcatccccttcgatcaccgctttgcgcagagagccgagtgtcaactgctctaactcctcaaaagaggcaccttccttttctaatttcagataatctcttgtcatctgatttcgcagtacccggatcggatgcccggtactcatacctgtcacttcggaatcgatgtcttttgctttgataatgcgttccttataattctggtgtacgatcgattcttttgcgaccacaaaccttgttcccatctgcacaccttccgctcccagcatcatggctgccgccattcctctgccgtccgcaatgcctccggcggcaatgaccgggatggtcactgcatccacaacctgcggtaccagcgtcatcgtggtctgtgaaccaatgtgtccgccggactccatcccctctgcgaccacggcatctgcccctgcgcgttccatcatttttgccatcgcaacacttgctacaaccggaattacggtgacgcctgcctgtttccacatctccatgaattttcccggatttccggctcctgtcgtcacaatttttacgccctcttccacgaccacttttgcgacttccggagcatttggattcaaaagcatcacattgactccaaatggtttatccgtcaattcttttgtttttctgatctgttctctgactacttccggcggagcactggctgcaccgatcagtccgattcctcctgcctctgaaactgccgctgcaagatgatactctgcaacccatgccattccgccctggatcacaggatactgacagccaagcaaatccgtaattctcgttttcattgtttcctgcctctctttgaatatttgtaaatggtcttaagcttccacacctttttctttgagataacccataatatcgttgactgttacaatattctcaagatcctctgatgggatctcaattccgaactcttcttccagagccatcaccatttcaaataaatctaaggaatctgcgcccagatcgtctttgaattttgtttccggcttgatctctgcctcatttacatttaactgttctgcaataatcggtttcatcttttctaacattttgcttttcctcattctttcctggctttcgcctgttgtttttcatattagtttgtttgactttctaattatttgattgtcaaactatttgataggcaaagtatatgcatttctgttttatttgtcaagaggatttttctgaatcactttcttacgcagcaaaacagcaagtgttttactgctgcgtgaacagtaacatttttcttttctatatacagaacgaccgatctgtgctatattaaaagtgcttcaatgagtcatgaatgattgcattttatatgcaaaaattggaaatgaaagtgaggtaggatttatggatattacaggtttagacgcagcattaagtacggtttctgcatatgacatcggttcttccacaagccctgttacattacaggaagatatcggagttgcaatgctcggaaaatctttagatatgacacagacattaggtgccggcatggttcagatgatggagaattccgtcacaccatatcttggaagtaatatcgatctttatatctgaaaagaaagtcgcagattttgttctgcggcttttgctttgcccacaaattgttggaatctttgtgagtctttgtgatttcaagaacttttatgaaaatttcaggttgactttcccgctgcatcttgctatattgatactcgttaaggcatcatagaccttaacagtatttataacagaatcaaaaacgctaggggcgcaaaaaatgctgcatttgccagacattccaacgctgagagatgatttttcatcaacccttattacttgaaccggataataccggcgtaaggaagcttttatgatatttctcatcagacgatagaatatagagttttttcctcctggcgcaaaagatctgaaacgcaaggaggattttattttatgaaagaattttttactaccacgatcggagcctgggatgatggctctgtacgtcttactgcacctggaatcgcagttgtagtagtcattatcgcacttctcgttgttgtcgcagcagtgatccgccacagaaatgcagagaaaaaaacaattctcaccacaaaacagcttgtctactctgccgttgcgatcgcgcttgcagtagtatgctccatgattaagtttgcgaatctgccaatgggcggttccgttactttattcagcatgttgtttatcgcactgatcggttactggtacggtccttatgttggtcttatgactgccgttgcctacggtcttgttcagtttgttatggagccaattttctataccgttccacagatgattttagactaccctctggcatttggtgctttagggctcgccggattttttgcaaacaaaaaacacgggctgcagattggttatatcgttgccgtgtttggacgttatgtatttgcagtgatctccggtgtcgtattcttcggtgcatatgccccggaaggaacacctgccattgtgtactctttaacttacaatgcaacttatatcgtaccggaagcgatcgctactttgatcgtgatcagtctgccacctgttgcaaaggctttggctcaggtcaagaaaaacgcgctgtctgcataaccggagtttaatttgcgtagtgttgcagattctgcggtgctttcttagggcttgaagggcagatataagcgtcctctcgcaagtcgtggttttataggtttatgaaaagaaaaacggtataaacgaaatattatgtttctgttcgctgggcattccgataagcctctgaagagtcttatctccatagctcacaaagaaaataatatttgtttataccgttttgctttcattcacgttatggatgacttgtgagaggacgcttatatttgcccaatttacactgtgaattgcaccacagaatctgcaatttacgttatggaactcacggttatggagtgtctataaaagaggtaggataagctgctttgacttcatgaatattgtttctacaataatcacaatcacataaatcttcacttcttatttgattgtaatatgatttggttttctcaatatccaaagtgttcacctcctcaaatggaagttatctatttctcctcttcgttaagacctagttcattacatattac

SEQ ID NO: 11 - DNA, 13723 bp, unidentified
  source 1..13723: mol_type = unassigned DNA
ctgcgggtgctttttgttgttacagcttatttgctcttccacctatgccccttcggcatgggcaggcccagaaccagcgcgatgcccacggccagcgcgacggcgaccttgaaggtggagatgccgttggccagcgagagggcgttttcgccttggatgaagtagtaggccgtgtagtagatgcctgcgccgggcacgagggggaagatgccggtgagcagaaagaccgttaccggcgttttgagcaggatggcgaagagccgggacaccagcgtcagcgggatgaccgcgatgagggaagctgccgcggcatcggctccgtataagaccgccagctcatagacgaaccagcccgctgcgcccaccagtgcgcagcaggggagggtgcgccgggggcaggcgaagaggatggcgaagctcagcgtccccgccccggccagaaagaactgggccaccagctggccgatctgggcatttgtcagcatcatcataccaccgtcacccccgtcaggatcgaagtaaggctcagcacgagaccggtgccgatggcgatgctggctgcgatcagcagggcgtcgatcatccggatggtccccgagaggtagtcgccctgcacgaagtcccggatgcccatggtaaaggcgatgccgggggtcaggatcatcagagtgccgatgatggcatggctggactcgatgcccagcagggagcacccgacgatgcagaccagcgtgataagggccgccgccgagatcttgcgaaagccgctggataacccctttttctcgcagagcagcagatagccgctgacgaggaagccggccacagccgccgccagcgccgagcgcaccgtgccgccgaagatgagggcgaagcaggctgcgccgctcatcccggccagaagctgggtccggcccttgggaaaggggatgcgccgggcctcggccagacggcactcagcctcgtccagcgtgacgcccccggcggcgatctgacgggaaagggcgttcaccgccaccacccggcccaagtgggtcgtccgcaccggtacgttccgcacctcggcgatctccgccgtgcctgcgctggcgaagatgccgttggtcagcacatagacgtggaactcccgcagatggaagctgcgggccatgatctccatcgtctgctccacccgaaagacctccgctccgttttccagcagcgtctcgcctgccgccatgatgaaatccatgatgcggcggcgctgctcgtcggtggggtataactctctgctgtccattccggccctccttgtcctgcctgtcagaggcggacctgttctctcctgctatactttatcacaattcccggagcttgcaaaggcgtcttttcacattttcgcacaacttccgtccttgccgtcgggggcgcagtgtgttacactgatactgactatgaaaatgtcgaaaacgacaggaggaaaatgactgtgaagcagagtctgagtttcgcgcgccgtctggcggcgctggtgctggcagcggtgatgctgtgtgtggctgtcccggcggcgtttgccgaggatgccgcgcccggggccaccaccatcggcggcgcaaacaccaccctcgtcccgggggaagaagaaaattgtctgagctggctcttcggctccaaagataagatcaccatgccttatctgaacatcaagggcaagggcctgcgcaggaacgtgaccctcgacctcgtggactgtctcgtgggcatcacctacaccgagcttggctccatcggcagctatgtcagcgccagcgcggcgcaggaggcgtggaaagcgcaggccgtggccatccactcctacctcgagtaccacaagcagtacggctcttcggccaacgccctcatctataccccggtggaggacatccccgcctcggcccgctcggccatccgtaaggcggtggagtcggtgaaggatgaggtgctgacctacaacggcagcgtcatcgacgccgtctggtcggccagcgcgggctataacacccagaccggcgtttacggcacctgctccagcctcgatgcgtggggttcggatgtgccctacctcaagagcgtcgaaagcccctacgagcgccagtaccacgaaaagctccgccgcgtcatcggcaaggactacgactacaccgagtacaaggacagccgcaccggtgagccttaccagagcgccgataccacccacaaagacctcggcggcttcgtccagtacaacacgctggtgtccaacggccgcagctaccgctacatcaaccagttcgtgtcctcccgctactgcttcgatttcagcgcagatgctgcgggcgtgccctgcatgaactactatggctttggccacggcgtgggcatgagccagtgcggcgcggtgggctatgccgccgaggaggggatgggctaccgcgacatcctcaagcactactactccggcgtttccatccggacggtgggcagcggcagctcttccggcggcggactgttcagctggctgcgccgcctgctcgggatgtaaaaaacgaaaggaattgcgcaaaatacttctcaaatgaggcgcgatttggtatactgtacacgtttgtactcaagaaacggctcttttgcgcttcacgtcccgaaatcgctgggacgatacgataaatgatattaggtggagagaacggaatgcagttggagaaggaaaagaaagaaaagcaggagcgggagcgctgccgtgcactggcgcagcgcatcgcagaggaggcggctgccgcctcggcggccctgctgggagagcagagccttctgctgaccaaggcgctgcgccgggcaggcgtagcggcggaggcgtgggcggaaggctcggaggcagagcttctgatcgtggtggatccggcctatgagacgctgccggagaagctgcccgcccgggtgctgctggtgagcagtgagagcaccgtcatggcgggctgggccgagcagctggcgcagagaggatatttccgcgacttcggctggcgcagcaagggccgcgcccagcagtccgccctcttctgcgcctcccagcccaccgggtataagatggtgcggggctatgagctggaaatggacatcctgcgcgaccggatggtgcgcgccgagcgcacctgcggcgaggaggccgagctgatcgcccggctgcgcagcgacctttccctcagccgcagccacgagcagcagctggaaaagacgctggccgaagtgaccggctcgaccttctggaagatgacatggcccatgcgctacgccgtcagcaagagccgccagctctggcacaccctgcccctcttcgtcctgctgcgggagctgcgccggggcgggatcgagggcttgcgggagcaggcccgtgcccgccgcgagtatgccgccctcttcccgggcagggtcatgcgcgcggaccgcttcgcctcggcggagctgctggtgcatcaggcggaagatcagcccgcaggccccaagatcagcatcgtggtgcccctgtacaacaccccgctggacttccttgaggagctgctggactcggtcgtgaaccagacctaccggaactgggagctgtgctgtgtggacgccggcaccgccccgggcgtgggagagatggtccggcagcgtgccgccgcagacccccgcatccgctaccagaagctggaaaagaacgagctgatccccggcaacaccaataagggcatcgagatggccaccggcgacttcatcgccctgctggaccacgacgacatcctccacccctgcgccctctggtatgccgccaaggccatcgccgagcagggggccgacttcgtctacaccgacgaggcgaccttcgagggcaaggtggagaatgtggtgctctaccacttcaagcccgatttcatgctggacaacctccgctccaacaactatatctgccacctgaccctcttcagccgtcggctgatggacgccgcaggcggccccgagcggatggagtacaacggcagtcaggactacgagctgttcctccgcctgaccgagaaggcgaggaagatcgtccacatcccccatgccctctattactggcgctccagccccggcagcacggccagcgacatctccgccaagacctactgcatcgatgcgggcatcgcggccctcaaggcccattatgcccgctgcggcgtggccgtggacgatgtctccctcatcccgggtacgccgggctattacaagaccgactacaccatcgcccatccgggccgggtgagcatcctcatccccacctgcgaccatatccacgatctggagacctgtgtggagtccatttatgcccgcacgacctatccggatcttgaaatcatcctcatcgaaaacaacagcaaggcccccgagaccttccgggcctacgagcggatgcagaaagaacaccccgacaccctcaaggtcgtcacgtgggagggcaagggcttcaattacagcgccctgaacaacttcggcgagaagttcgccaccggcgaatatctgctgctcctcaacaacgacacggaggtcatcacggccgcatggctggaagagatggtcatgtacgcccagcagaagcgggtgggctgcgtgggcgcaaagctgctctacccggacgataccatccagcacgccggcgtcggcttcggcatcggcggcgtggcgggccacctgcacaagtattatcccgccagctccgatggctatatgggacggctgaactatgtacaggacgtctacgccgacactgccgcctgtctgctcatccgcaaggagatctacgacgaggtgggcggtctggatgagagctacgccgtggccttcaacgatgtggacttctgcgtccgtgtccgtcaggcaggctacaccaacgtcttcactcccttcgcccagctctaccactacgagagcaagagccgcggcgtggaggacaaccccgaaaagcagaagcgctttcagggtgaggtgctgcgttttcaggcccgctggggcgacctgctggctgcaggcgacccctgcaccaaccccaacttcgacatccagcgcgaggatttcagcctgaagatcctgccgctggaataaacaaaagaggaacaacctctcagtctcgcttcgctcgccaaggccgggttgcggctcccagcatccgcggcgcttcgctcgcgtcctgctggccgctgccccaacaatgactccctgtttccgccactggcggcggtcgtcattgttgccccatcaaggggagcctttggcatggcggaaaggcctgagccataaaacaaggagcataaaacttggaactctctgcttgcatcgttgtttataacggctgcgacgaagccctccgggcggcgcagacggtgctgcaatacacccgccgccacccgctgaccctctatctggtggacaacgccagccccgacggcagcggtgcacggctggaagccgccgtccggagcggcgctctgagcaccctgccgggccagcgggtggaggtgcgctgccggaaggagaacggcggcttcggcaccggccacaacaccatcctgcccgagctgacgagcgattatcacttcatcctgaaccccgacatccagctcaccgccgacaccctcagcgatctggccgactggatggccgcccacccggatgctgtgatggcccggccggggctgtgctttccggacggccgcacccagcatctgcccctgcggcgctgcgccctccggccgatggtctaccgtcagctgccgttcctgaaattctgggaaaaatataaccgcgcctatctcatggaaggggaagacttgtctgcccccgtggagatcgagttctgcaccggcagcttctcggcggtgcggacggcagagttcaagaccgtgggcggctttgatgagcattacttcatgtatgtggaggatgcggacctgacccagaagatgcgcaccaagggaaaggcttatctcgtgccccagtacaccgccatccatgcgtggcaccgtgcggcccaccgcagcctcaggcccttcctgtggcagaccgggagcctgctgcggtatttctgtaaatgggggttcaagttctgagtccctgccgcgacgaaacaagagagcgcccgccacaaaatttttgaggcgggcgctctttccttgcttttttttcgatttgatagtagaataaggtgtaatactatcgcaagcctgcacggtgagcagagtgtattgcgcaacattgtttacagcggacgcagctccgctttgaatccatacagggcagggcggatacgccgccgtgccttgtacaagctgcacaacttttttatttcataatataaggagtgcacaaaatgaaaggtatcattctggccggcggtgccggcacccggctttatccgcttacgatggtcaccagcaagcagctgctgcccgtctacgacaagccgatgatctactatcctctgtccaccctcatgctggcgggcattcaggacatcctcatcatctctacccccaccgacacgccccgcttcgaggcgctgctgggcgatggcagccagtacggcatccatctgcaatataaggtccagccgtctccggacggtctggcgcaggcctttatcctcggcgaggagttcatcggcgacgactgctgcgccatgatcctcggcgacaacatcttctacggcaacggcttctccaagatcctgaagaccgccgtggccaacgcggagaacaagggccgctgcaccgtcttcggctactatgtgccggaccccgagcgtttcggcatcgtggagttcgacggaaacggcaaggtgctcagcgtcgaagaaaagccccagcaccccaagagcaactacgctatcaccggcctgtacttctacaacaaggaagtcgtccggatggcaaagcaggtcaagccctccgcccgcggcgagctggagatcacgaccctgaacgatatgtacctcaagcaggatgagctggacgtccagctgctgggccgtggctttgcatggctggacaccggtacgatggacagcctcgtggaggcagcggactttgtgcggatgatcgagaagcgtcagggcatcaagatcagcgcccccgaggagatcgcattcaagtacggctggatcgaccgcgacaccctgctggaaagcgccgagcgctacggcaagagtccctacggccagcacctcaagaatgtggctgacggcaaactgaagtattaagagaggcggtatccgcatgaaaatcattgttaccggctgcaaaggccagcttggcaccgagatcatcaagcagctccgggagggccgcagtgagcttggccctctccccgagaagctgatgaacgccacggtcattccggtggacctgccggagctggacatcaccaactataagatggtggacgacttcatccgccgccagcgcccggatgtcatcatcaactgcgccgccttcaccaacgtggacggctgcgaggtgaaccatgacaccgccttcaaggccaacgccatcggcccccgcaatctggcgcaggctgccaccaagaccggcgcacggctggtgcacgtctccaccgactatgtcttctccggccgtgagaacggcggcgtcccgcaggatgaggccaccatccccggccccatcagcgcctacggctccaccaagctcatgggtgagaagtacgtcgagcagttctgccaccgccacttcatcgtccgcaccgcatggctctacagctactacggcaagaacttcgtcaagaccatcgtgaacgcgggccgaaagttcggcaagctggaggtcgtcaacgaccagtgcggcaaccccaccaacgccgtcgatctggcccacgagatcttacagctctgcgtcacccacgagtacggcctgtaccactgcaccggcgagggcatctgctcctggtatgatttcgcgtctgagatcatccgcctgtccggcgtggacgccaccgtggccccctgcaccagcgaggagtacaagtcgaagcacccggacagcgccgaccgccccaagtggagcgctctggacaaccggatgctccgctgcaccgtcggcaacgatgtccgcgactggaaggacgcgctggcctgcttcttcgagcactgggacggcgacaacgggatgaaagcttaaattcaagaggaaaatctgattatgaaaaaatatcttatcaccggctgtgccggttttatcggttccaacttcgtgcattatatgctcaagaagtaccctgaaattttgctggtcaacctcgacaagctgacctatgccggcaaccttgagaacctgaaggacgttgagggcgacccccgccacgtctttgtgcagggcgacatctgcgacaaggagctggtcgagagcctgttcgcaaagtacgatttcgactatgtcatcaacttcgccgccgagagccatgttgaccgctccatcaagaaccccgaaattttcgtccagagcaacgtgatgggcaccgtcaacctgctgcagcgcgccaaggaggcttggtacgacgccgacgccaagacttggaaagagggcaaaaagtatctgcaggtgtccaccgatgaggtctacggcgctctgggtgccgagggcttcttcatggagaccaccccgctctgcccccacagcccctactcctcctccaaggccagcgccgatatgttcgttatggcattccacgacacctatggtatgcccatcaacatcacccgctgctccaacaactacggcccctaccagttccccgagaagctcatcccgctgatgatcaacaacgtcaagcaccacaagcagctgcccgtctacggcgacggtatgcagatccgcgactggctgtacgttgaggaccactgcaaggccatcgacatggtctgcaacggcggcaaggtcggcgaggtctacaacgtcggcggccacaacgagcgccccaacatcttcatcgtcaagaccatcatcgagcagctccacgaccgcctcaaggacgacggcatcagcgaagacctcatcaagcacgtcgccgaccgtctgggccacgaccgccgctatggcatcgaccccaccaagatcaagaacgatctgggctggtaccccgagactcccttcgagaagggcatcgtcctgaccatcgactggtacctcgaccacgaggagtggatggagcacatcaccagcggcaactaccagaaatactacgaggaaatgtacaagaataaataatctcttgtaaaactccaaaagcaaatgaacgcccctgtccggaaaatcatccggacaggggcgtttttgtgtatcagataaaagtgtcagagcaggtcggcggcgaggagcagaagcgctgcggcggctacaccgtccgagccatccttgtattcgccgatgggggtagaactccaacccgtcccacggtagatggtgccatccttatattcaccaacctcgcgggaatgcaggccgagaccggtgtagatcgtgccgttcttatactcgccgatagcgtccgagtgcaggccgcagccacgataaatcgtgccgtccttgtactcgccgacttcgctcgaactccagcctgtgccacggtaaaccgtgccatttttcgtctcgccaacacagtcggaactccaaccagttccgcgataaatcgttgtggccataaaaatacctccaactagagctgagacataagaatttcagcataataggtcatttcttcttttcgggaatactcgttcttgaatcttccattggaatcgttgtcggacaaaccagtacggaaactaaaggaacgggtaaaaggaatatgctcatcatcagagggagagtaggtgtctggaataccaaatccataataaatgagatcttccacatcggtatagccaaaatctttataatgttcataaagagcatgcgaagaatcattttggaaaattatttggcggatagtatctaaataggtttctttgatagagttctctgcaagatgggcacgtttttgtaattgctggagttcttcttccgacatactagaatgagttgcataattatagcggaaagcaaagggtctgcttccataaagcatatcgtagtatttatttagatagtggcgaagataggaattttcaattacagctgaaaattcaagctcgatgtaggtctctgagagatgtattttaggcgtgacattgacgatgcaaaattcatcggacattccacggacaatagctttgaaatctttcgaaacagaaactatgttctgaaattccggcaatgctaagatagcttttcgtttgcctccaaacaaatctaacatcatattcctcctcaaaatctcggataaattctgttgccatttgaattatagcagaaataaactgacacaacaagtgaaacagaatataaaaagtgccaaaatttgcagtattgtccgatacaatatgacaaaaggatggtgacagagttgtacgaagagatgttttcccggcggctggcacagctgagaatgcaaaaaggcgtttcggctcgggatatgagcttgtcgctggggcagaaccatggatatatcaacagtattgaaaacggaaaaacatttccgactatgacgaacttcttctatatctgtgaatacctccacatcacgccgcaggaattttttgaggacggcaacgctgacccggagacgatacgggggctggtggagaacctgaaaaagctggatggggagcaggtggatgccctgtcgaaaatcgtggatgggctggtacggtgatggacgcaaaaaggccgctgcgcgaaaaacgcagcggcctttgccgtagaagcttatgcggattttggcttatccagtgcttttatttcctcaatgggaagattcgtataccgggcaatcgtctcatacggaagtccatccgcaagcatcgactttgcgctttcaacagactgtgcgtggcgtgcctcgcgtgcagccttttcggcggcctccgctctcatctcttccattgctctgcacattgttgccactcccttcgtatcttctttaaaatagcgcaccctctgtgccagaatgggataactcatatcatctgggtctgtacaagagaaatcgtgcatcagcctgcccaacgccgtctcatctttgatttgagagttcacatagataatatgtgcttcatcgccaaaagactcgccggtttcctcaatgatgcggttgatgtgataaataggcaggctccgcttcaatacatcccgttccgtaataaaaattacataggtttcattcagtgcgtcgtaggcgtcgcccgcttctgtcaggttcgcgtcgagcaagctgctgttgtaccgtgcacgcttggctcctgcacctcggtcgctgcgctgtacttcgatattgtagacctgattgctcttatcaatggccagaatgtccagccggacagaacggccctgtagattttttaggtcatgctgcccgtgaacctcttgtacgatcaagtcgtcccggttcaggatgatctggagcagaaattcagcgcaggtcttgtcctcgaaaaccttgctcatgaagtcatcgtccatgaggcggaaattgcggatgtattgcagatccttctcgtgtttacgctcgaaatcgagctgtttttctttttcggcttctgccactggttcacctgctttctgtttcgggtctaaggtaagaataccataaaatcgttgtttttacaatagcggataaaaataacgggctgtccgtatagaacagtccgttatcataaaagattcgattcagtgcaagtttagccgaggctcacgcccatccggcgggcgacggtgagcagctcgcagccttcggggacgttgcgggtcttgccggcgatgtcctcgaggcggttggcgatgacgcggttgttgaccatggcgacggtgacgccgtagcgctccatctccaccagcttagcggcgtagctgccgaactgggtggccagcacgcggtcgtaggcgctggggctgccgccgcgctgcatatggcccgggatgcagacgcgggtctccatgccggtcttcttctggacggcggcggcgatgcgattggtggcggtggcaccgtaaccggcctccgtgcgcttggccatccactccttccgcttcataccggcctcttcggtgttgatggcgccctcggccacggcgatgatggagaagttggaacccttgcgggcgcggcgctcgacggcgctgcagacgcggtcgatgtcataaggcatctcgggcagcaggatgatgtccgcgccgccggcgatgccggagtagagggtcagccagccggccttgttgcccatgatctcgatgcacatgacgcggctgtggctgccggcggtggtgtggatgcggtcgatgacctcggtggcgatgtccacggcggtgtggaagccgaaggtgacgtcggtgccgtagatgtcgttgtcgatggtcttgggcaggccgatgatgttcaggccctcctgcgcgaggaggttggccgtcttgtgggtgccgttgccgccgaggcagagcaggcagtcgagcttggcgtccttgtaggtctttttcatggcggcgaccttgtcgatcttgtcctcttccaccacgcgcatgagcttgaagggggtgcgcttggtgccgaggatggtgccgcccagcgtcaggatgccgcggaaatcgtcctcggtcatctccttgtaatcgccggtgatgaggccgtggtagccgttgaggatgcccacgatctcgacgttctcgccgaaccgtgcatacagggcctttgccacgccgcggatggtggcgttcaggccgggacagtcgccgccggaggtcaggatgccaacacgttttttcatattgagtaaccctcgtttcttccgatttcaggagcaggtaaatgatactataagagtattcccaaagggggcaggtgtcaagaggcggggccgaaaaaagctgtgaaaacgccggggcgggcgggggtgaaaaaacatgagcaaaaaaatcaaaaaagtggttgacaaatgggagaagaggctgtataatattcctcgtcagcagcgcttcggtgctgagggctgaaccaaatagtggggatttgcatagtggtagtgcggtagactctgactctacttgtgggagttcgattctctcatccccaaccagaaaaccgcagtctcaactggctgcggtattttcggggcatagcgcagttggtagcgcgcctcgttcgggacgaggaggccgtgggttcaaatcccgctgctccgactgaaaaagaccggtacacatttgtgtgccggtctttttctatcttcgcaaggcagcgggatttgaacagcagcggagccgaccgccgcctgcggcggaaacagggaggcgaggctggggcagcgctccgttttttcaaagccccgccaaggggctgcggaaaaagcggcaagcgcaactcgcaggcggcgcagcaaggcaagcaatcagcccagtgggctgttgcttagcccgcgggtcccaacggctaggaatgtcaacagttggtgactaccgtacacatttgtgtgccggtctttttctatctttgcagggcagtgggatttttaggtttctctatctctttccctgaaaatatggtagaatag

SEQ ID NO: 12 - DNA, 6537 bp, unidentified
  source 1..6537: mol_type = unassigned DNA
ttattttctcccgcgctgcaattcaatccaggccaggtctccgcgctccaggccgtggatcaaaacctcggcagtggcaatgttggtggcaacggggatggcgcgggtatcgcacaggcgcagcagggtaacggcgttcggctcattgggccgggcgttgacggggtcgcggaaaaacagcagcatatcaatttcgccgcaggcaatcatggaggaaatctgctcggcaccaccgcgtgcaccggggtacaggcagcgaaccggcagcccacaggcatcgtgtaccactttgcccgtcacgccggtggcaaccagttcgttctgagacagaatacgcacataggctgtgcagaactgggccaaaagctctttgcgggaatcatgggcaatcaatgcgatcctcaaggtgggtgcctcctataattagttatttatataatatcatagaatagattgctgaaaaatgcaagccacctttggttaaaccacccgctaaccccgaaaaagcgtgcagtgttaccaaaaaactttacacgattttggcaaaaccgctttgtgcgaatgtgctataatatgtacaataaatacataacctgtaaggcaccaaaagcgccgcacaggcaaaggaggaaaaacgctatgaaaaaatccgcacagaccgtcattcgggaaggcgcctgctatactatcgctgccgccaatggccgcgtgctggaagttgccgatttcaacaccgagaacggcgcatccatccgcctgtggagctatgagggtcagccctggcagcaatggatttttgaggaagccgccgaaggccagtaccgcatcaaaaaccgctttaccggcaaggtgatggacctggccatgagtggtgttgtgaacggaacctgggtgcaccagtgggagaaaaccaccggcaagggccagcggtgggagattgttcccgccgatggcggcaaggccaagatccgcaatgtgctggctgataaggttattgacctggtaggcatgcgggttgataacggtacccaggcccagatctggcaggatgtgtttggcgaaaaccagctgtggagcatccagcccgtgccggataagctgctgcaaaaggatatgccaaagccggaacccaagaaaacggcccccaagtccacccgcacccagaccggcaccggccgcgccaaaaagaccggcggcaaaggcggacgccgcgcagccaagtaaagcagagaaaaccgaataaataaaattgaaacagcccgctcatccggcaacaaacggatggacgggctgttgcggttacattttgaaagccaaactttactggcggatcatgcggtagccaacgccgatgtgggtctggatatagcgggggtggctggggtcttcctcaatttttttgcgcagcgttgccataaatacgcgcagggacggcgtatccgatgcggccgggctgccccagacttcgttcagcagatagttgtgggtcagcactttgccggtgttcttggccagcacgcagatcagcttgtactcaatgggggtcagatgaatctccgttccgccgcggtacacacagcctgcggcatagtcaatgcgcagttctccattctcgtatatgctggcctggtcacctgcgcgggaagtatcataccgcacacggcgcagcgccacgcgcagccgggccaaaagctcctctacgctgaacggcttggtcaggtaatcatctgcaccggcatccagggcggatactttgtcggtatcatcactgcgggccgaaaccaccagaatgggcacgttgctccacccgcgaatcttgcggatcacatcaataccgtccatatccggcaggccaaggtccagcaaaattacatccggccgtgccgaagcagcttccaacagggcaccggctccgttctgtacacggtggtactgataattgcgggtttccagtgtggtggagatcagccgtgcaacagccgggtcatcctccaccacaaggatcagcggtttattcatacagggtcacctcagttcgcgggagtgtaaaacggaagcaggcaccgtgcggtgcagcgttctgtacatcgatcacaccgccatgggcggcaacaatggaacggcacaaggccagcccaagacccagcccgcggcggccatcgctgcgggttttgccaagggtataaaacatatcaaacagcttgtcacggctttcttccgggatgccggggccgtcatccgttacgcagatgcggacaaatttaccctccggcgcggcgaaaagctcgatgcgggaatgttcgggggtatatttgatggcgttgttgatgaggttcaccagcacctgctcgatcagctgggcgtccatatcggccatcagcaggtcatccgccacgttggtcacaatggtgtggcgggcggcgtcatggtctaaatgagccagtacatcgtcaaaaatgtcttgaatcagctccggctgaatgcgcaggtttacctggccgttctccatccgggtgatggaaagcagattttccaccagatggttcagccagttggcgtcctcataaattgcggcagaaagctcccggcgcttttcctcggtcagcaggggatttttctcggtcaaaatcagcgcgttgccggaaatgcttgtcagcggggtgcgcaggtcatggctgatgctgcgcagcaggttggcgcgcagctgttcctggcgggcggcttcctcaatttcgcgccgggcgcggttggaggcttctttttccagcgccaaggaacacacatccaggatggataatgccagattgtgctcataggtgctgaactcatgcagcgccgggcaactgcggtaatccgtctgggcgggagggggcagaatcagggttcccggtgcaatgtgctccggtgcgggggcaaagcagaccgggcgctccaacagcttgcccagctgggtggccgttatccgcagaatggtgtcagggtcctcggctcccaacaggctgcggctggcttccagcagcacctgcgaagcataggctttgcgctcgctttgggcggcctgtaccttgatacgccccgtcagcgaggagcagagcaacgaaacgcagagcatgaccactgccgttaccatgtcgtctgaccggatgcggaactgcataaaggggtcaatgaacatatagttgaccagcatcaccgagaacagcgaagccacaacgccgtacaccaaccccgatgtaaagacgttgatatacatgacgcccaggatataggtcaggatatagttggaagaaacaaaatccagccggaaaaatacccagcttgtcagcgtacacagcgcaaggaccaatgcggtcagggcgaagtcccgcagccaaagcagggcaggtttgcgttgcggcatgggtgcaggctcctttccactacagggcagggaatgcggcaaggcggcccagcactgtatttatcctatggcaacaccgcacaattcccgccttgcggcttaagcaccgctccggcagctgcggcacggcatctgcgttgccaaaatgctcgataagacatccagtattatctgcgcttttggcttggcatctgccgcacctcgctcgccgtatcggcacttagaattatgcggtattgccctattataacatattgccgaactctttgatacaaacggaataatctttatataaatttaatgtgggcctaccctatccgcggcagccccggcacttttttgcacgctgggcggggcattggttgaaatcaggccgcaaatcggttatactattttgtaataattggattgttctgccctgcgggcggtattgccatataaaaaggagtgtttttacaatgtcccataccgttatggtgaccggtgccgatggctttatcggcagccatctggccgaagagctggtaaaaagcggcgagaaagtgcgtgctttctgcctgtataactcgtttggttccctgggctggatcgataccctgcccccggagatccgcaatgaaatggatatctttatgggcgatgtacgtgaccccaacggcgtgcgtactgccatgcgcgggcaggagcgcgtgttccatctggctgccctgattgccattccgttcagctaccacagcccggacagctatgtggataccaacatcaagggcaccctgaacgtgctgaacgccgcccgcgagctgggcacccagcgcgtgatggttacttccaccagcgaagtatacggcaccgcccagtatgtgcccattgacgagcaccacccgttccagggccagagcccctactctgccaccaagatcggcgcggaccgcctggctgaaagcttttaccgcagctttgacctgccggtttccattgtgcgtcccttcaacacctatggcccgcgccagagcggccgcgccatcatccccaccatcatcacccagctgctggccggccagcaggaaatcaagctgggcagcctgacccccacccgcgactttaactatgtcaaggacaccgcccacggctttatggccattgcggactgcgatgctgccattggccaggaaatcaacattgccaccggcgtggaacattccatcggcgatttggccaatgagctgattgcccagatcaaccccagcgccaggatcgtctgcgaagccgagcgcctgcgccccgaaaagagcgaggtcaaccgcctgctgggcgatgccaccaagctgcgcaccctgaccgattggaaaccgcagtatacctttgaacagggccttgccgaaaccattgagttcctgcgcggcaacctggaccagtacaaggtcggccagtacattctgtaagggcggttgtaaggaagttttatgccaataaaattacaaaagctgcccgccgctgtgcggtgggggctggctgtgctgtgcgccgccgtgtgcggcgtgctgtgggcctattactggcgggtgttctttgggctggacagccgtgtgtcccccctggtggttacactggggtgtgcggcctttctggaagtatgtctgctggccgggtattgtgtgcggcggtttgcaaaaggatttgcggcaaaaggggccgtgtgcatctttttgtgcgggctgctgtttgcatttgccaacccgccgctgcaaacgccggacgaagctgaccattacctgcgcacctatgccatctccaccgggcactttgattttgatgcttcccgcacctacccggacgatgtggcatacctgctggaagcgttccccggtgcatgggtgaatgcgcatacctctgccggtgtgggcgctgaccccgataccggggcggaaaaagcctataacaccgcgggctatgccctgaagcaatacggcaaggacggcgcagtgcagagcatggcggacagctttgccctgtacctggcgcacgatgtgcgggattctgtgccggacccagtcagcgagccggtcagctttctggtcattccattcctgccgggtgcggtcggtatggtgttggcacgcctgctgggctttggcgcgctgggctgcctgtatggcggacgcatcgtcaacctgctggcctacacgctgttgtgcgcgttggcgctggccaaagcggagcgttaccgcccggcctttgcggccattatgctgctgccgatgtcgctttttatgggggcatcactgagctatgatgcaaccctgctgggctgctattacctgatgcttgccctgctgacccgcagggagtggaacacccaaacggcgggtatttacaccgccgcctgcatctttgtcaatatcgccaaaccgtacctgaaccttttgtgggtcctgcctatctttttggtggcaaagcgggaatggcacgccaagggacgccgcccgctgtgggcactgggcagctttggcggtgctatggccgttaccctgctgacggaatggtacggaacggcgttccgctataactatcccatgattgagcgccagggcggcagcacggtaaacggcggtgaacagctggcctttgtgctgcgcaaccctctgcggaccattgctgcgttctgggggaccctgggagagaatgatttctttattgggcagctcggcctgttcggctggaaggacctgcccatcagctttttgaacctgaccggcccgctggtgctgctgttggccgccctgctggctgctgcgcagccaaaacgcgccgatgcgttccccacccgccgccgcgtgggcggggtggcgctgctggcgctggtgtacgccgccggtgccatggcagccatgtatatcacctataccccggtgggcatggtgcgcattgtggggctgcaggcgcggtatttcctctgcgtctggctggcattgctgcccgccctggccgtactgctgcgcaaaaccatctgccccgccatcacggaagaaaaggccgaagcgaccatcaccccgctgtgcgcctgctatgccgtttttggcgctgtgctgctcttccagcactactttgtggggccggtgtacgtcgtatacgcgtga

SEQ ID NO: 13 - DNA, 22892 bp, unidentified
  source 1..22892: mol_type = unassigned DNA
ccgatcaaaatgcaatacatgcagaaatacatccacatcataatcaacatgatcgttgtcagacttccgtacatactggaaaatcctttgaacacatccacatatacagaaaacacccaggaaatgaccatccaccccagcgtagaaaatactgctcccggaagttgccttttatatgtgtctcttctattaggaaggaatttatatatcaacagtaaaaatacaatcattacaatcggtgtaataatattccttgcccggatcagccagtcggccatatttcttaaaaatggtacatgctcagcaataaaaatattcaggctgttaccaaataccgacaacacaagtaaaaatataataacgagtataaacattactgtataaacagttgctcttatcctaaggaaaaaatagttacgtgtctcacggcaattatacacacagttcagtcctgaactcatggcaagtacaccttttcctgcagaccaaagtgctaccacgatcgtaatcgggataataccagatgactgattatagacctgattgacaatggatgtaatcaatgaatctaccgatgatggaaatacctggatcacagccgtcatgacatcagcctttgtgacgggcgtatattgcaccatagtcagtaacaacaatataatcgggatcatgcagagcataaagaaaaatgctgtctgtgcagcgtatgcccctacatggtctttcgttatctctccagtcagctccatgatgtcatcatataattcttttatctttttcatcacttttacctagctttgtttatgttccggcgttccacttttcccagtgatatcgcctgttctgaacagttacataattttatattttacccgattttatacattttgtctacgaacaattatccaatggtgacgccttgataaaaaaaagtcaatatttcctgatagttttttccacattttgccatttcattcgcaccggtctgactcatgccaatcccatgtccgaacccgccgccctttatgacaaatgtatctccggacttatttattgtgaaaaatgcacttggaagaagcttgctgcttttgacttttgtaccgtcctgctttataattgtgtatccttttcctccaagaacacgccggattttattttccgttgagactcttacactacctttgtcaccgacagcctctattgttaatactacaccgcccggtccattttccaaaatattgatattctgcaacgttccaatatctttgccggtatttagtccaatcaaatttgataaagtctttgcctgaatcttcgcctcccagcgataccatggcagatttctctcataatcaccgttttcatcttttacttctacagactgaagatatcggtttccgtcattctcctcattcccccaggctttcatactggtcgtcttcccgcaagaagtggaataataataagtcgtcacaatctctccgtccagacgcacgacttgtcctgccgtctcctgaacagccagatctgcgctgtctgccggtgcactgttgccgtagacctgataattcgtactgtcatccacatgagcttcatattccggatatccatattctgccatctgcctgtaggcgtaacttctggcacagactgcctgcgctttcagcgcttctatttcataaccggacggcatctcgctgggcacgacccggcacagataattctcaacgggaagttcattgataatcgcaattccttccgctgttgtccgaagctccagtataccttgataagacggaactccgtatccactcttcaggctatttaccgtaatctccccttcttttgcctggatccggatgttcccactctgaaaacggctgtcatctggcataaatgtcacttccgtccctgcttcacattcttctactttctccccatacgtaatagaaagtcctgttgttgaactgactgtcacagacggatgaatggtattcttatatccatccgtcataagaagaacccggatattcggattagacactacctgcgtctcttctccctgatttttctgctccgtttgaacttcttcctgcttctggtcaaatgcttctttttcctggcggtttccacggactccgccttcgagattacttgttagtcctgcaataataaacaccagaaccagcactgtcataccataataaaatctcttttctcctcgaaaatgtttcaaactctattctctccctaatcattatgccctatgattgattcaacacccactcaagtagaaggggaattaaataaatgtcccccctcacattagaaaaagacagccgcgcaaacgactgtcctttatcttttgtatgttccccaaaatgccggttcctgtattttgactcctagctgtctgctaggtgggtgtccgcattcgcttttctgccatcctctgcataatgaaggctcgacatattacgaagatataagagtcccgtttaaagtgatgtaggttcaaaataacaggagttatcgtgcatcccaggttcttacttcttgaattattataactcatttactcgttttttacaacaggcagatttatctagtttccattttataaaatctttttcttttctattccgttcgaagtgcggtcaccggatcgctcttggcagccttcctggaaggaatcaatccgccaagtaatgtaagtacgacacttaaaagaatcagaacaatcgctggtgcagccggaaggattgcgctgacctgattattgcctgcaagcgcatgaatcagcatatttcccggaatcaacatcaaaagtgtcaatccgataccgataagtccggcgcaaagtccgatgataaatgtctctgcattaaatacttgtgatatatttcctttggatgctccaatggctcttaaaataccaatctctttctttcgctccagcacactaatataggtaataactccaatcataatcgatgatacgatcagggaaattgccacaaatgcaattaatacataactgatcgtattgataatagtggtcacggatgacatcattgttcctactatatctgtataagaaatcacctgttcttcttttccctcgtcttccatttgctgattataatgatccagaacctctaccactttttctttgttatcaaagtcttttggataaatggaaatggaactcggatgactgaaatctgcatatccgagctgctgcagattattatcataggaagcgctctgtgtcccagacatggacatcataagttccgtcagatcatcttccgtcatattgaactggaatgcatttgcaaatgcatccgcatcaaaatccatagcacctccaagtgcatgttgcagattttctcctatctgattcatggcagatgtcataaccgtttcaagtccaccggcaagctgcgtggtcacctgactcatagcagatgtcatctgtgtactgattgcctgagaaatggcaccggtatatgcacccatggactgacccatatagctattcacggccgtactgatctgcttttggagactatccatattgattgcctctgaaagtccctgattcaggcgtctctttccatcatccgtctttatataatttacgaaattctctgccatctttgtcggatctgcataattcttttcctttgcatatgcagtataaccttctgccagttcctttgccatagcttgcagtgtgtcactggaaatgttgaaatctatatctccaaatatttcattagcccatttatttacaattgcattggcacgcccggtctgtagatactgctggaagtatgttccaaattcctctgcgcccggatttgcaccctgttctgtaagccagctttgaaaatcactcatcacactggtcaacagttccttaatctgctctggtgtaatcgtaacttccccgttatttttcagaatgtctttcaaatatttctgaataatggcctttgcctgatcggaagtcagatattctgcaatctgatttccaagattggaataatctgcttccggatgactctttacatattcctgatacccttccgaaaggctaattaacattttctgcatgccatccgcattgacctgtacatccagattcgtaagaatatcccccagattcatctgtggcatattgcccatgttgatttctacctgatccagattcaccataccggacaaatccatagaatttccgtccatctgaaatgctttggaaagatcaagtcccgacagatccatggaacttccaagattgttcatggcactgctgtcaaaaccaaatgcatttttcagagcatcctcatctatactgaacagagaattcatgtcaaatccattgttcccatctgtattgccaaattcttccccggtaaatacatttacattcgggttcgcaagctgctgttttacaatctcgctgtcttttgcctgttctgccacatgatttacaagatctgaggtatagttaattcccggtgtcagtgatgaagccttcgcatcttcggctgactgcacgattcccacaatttttacattctcaccgtcttcgaccagttttttcatgtaatccgcattgtcagttttgtctttccacacctgatattggctgtcatattcataataatccgaagcatttaccagtttaaatgtctttcctaaaatatcatcataagtataagttcctatgttttcaggcgtttttatcgtctcttcgttgatgaactgcttaatcatatcatcgagttcaacctggtctctgagtcccaatgtatataataagaagtcgctcatagatccatccggcgtcagcacaagaacgcattcattgtattttttcggccatcttccggcttttacatcatactgatcttcatagagatccgtattttccggcatctcaaagaacacattagtactcatcatggaggacatcagactattcgaacctgcagatgcaccaagtcccaatgaggaaaatgactgatccggattgacctgacgaacattgtcaccgtcctgtcggaacaactgcggcatcacattgtaagaatattctattgcttttgtatagtcatgaatcttagattcaccactgtccagatatttttttaaagcaccaaggtcattggaatccatctttgaaaacatattggtgactacctgcatgacctttaccttatctttatcttttccacttttcttatcatcactgcttccggaatccccattcatacccaccatcatggaagtgagatcaaatccggtactttgtatctgcagtggatattcagacaatgtctcttcctcaatagaccggatataagcattgactccatttgaaagagccagaatcaatgcaatcccgataattccaatagatcctgcaaaagaagtcagaagagttcttgctttctttgtccttaagttattaaaactcagtgacagtgccgtcagaagagacatggaagatttccccatattcttatgctccggcggtgccagattttcctcttctacaatatattcatcggtgtccgaacgaatctttccatctttcagattgacgatcctggtcgcatactgctccgccagttccgggttatgtgtgaccataacgaccagacggtctttcgctacctctctaagaagatccatgacctgcacactggtgtcactgtccagtgccccggtcggctcatctgcaagcagaatctccggatcattgaccagcgctcttgcaattgcgactctctgcatctggcctcccgacatctggttcggcttcttatgaagctgctgcccaagacccaccttctccagtgcatccactgcacgctttcttcgttcttccttcccgactcccgaaattgtcaatgccagctcaacattcgcaagcaccgtctgatgcgggatcagattgtaactttggaatacaaaaccaatcgtatgattacggtacgaatcccaatctctgtccttatatttttttgtggaaatgccattgatgataagatctccgctgtcatagcggtccagtcctccgataatattcagaagcgtggttttaccggaaccactgggacctaagattgctacgaattcattatctctcagattcagactcacatcgtccagagccttctgtaccagacttccagtccggtactcttttttgatgtgttgtatttgaagcattcaaattctcctataattatattttgactgtaatttttagttcatctaattatagcgtaaatttgtatactttttcacactgagaaatgtttttaataaaagttttagatatgaatatattacatctgatgtcttacaatgcggtaatcatccccatttcgataatacgggcactggtaatgctggtcagagatcagacgcatatattcatcctcatccatattcacatcacacatatagctttcatattcttcatcatatgtataataagtacaagtctcacaactacctctctgagtggtctttgccattttctttcttcctttcccatataaattatattctataattttattatctttgtataaatgttcctacatatcataacataaaaagcgtccggaacaagtacgaatttctcctactgactccgaacgctttgttcattactttaatgcctgataccatgcattcatctcatcttcatctttactatttataaacactgtataatctgtcgccttaatttcaatcacattttcctggtccagccacacatacatccggcattttccagtcttctttccttcaaattttcccagcagctgtttctcatctgaaaatccatttgtccggttgtaatgatcctccggcagtccgttctctaataattttacactccgaatctcttttttcttcatagttgtattcgtatatccggaagtaattctgacttccgctccgtctgccacaagacgaatcggtgtaaaatccattcttaaaaagacaatacacatccagaacaaaagtactacaactacaatacaaatgccaccgaacatataccttcctgccggctttccaacgtttgttgtataattcatactgttgaatctgtcctgcacaaataatcttggatcacccggattatcataccagccatttctccaatagtaatcatcatccatatacattggcgtttcatcttcacattgtagtacatttttttgtttcttaatccacatagcagttgctatagcaattattgcaggtacacacagcactgtggcatatataataatatccagattataaatccattcttcttttgtcattctatatgcaagatagagccatgcaatcgcattacaaatatttgccacaagaaagcagatactccagctcttcttttccagataattaattctgaaattcagctccgaactctcactgtaaatccggttcgctcctcttttgaatatccatgcaatccacagaaatacaacgccgacaattacagaggtcaaaaataaaatccagccctgtgaattctcggaaaacgttccaagataaattcgaaagcctttaaaagcaaatggaactgccagtattagaatcaagacaatatgataccataatggcagactcattctctcactatgcatcatagtcttagtatcgacccctgtcattgccgtgctttcttctgtatcttctcccgacgttccccatctatattgaattttcaaatcataaagtttcctgtgattcctgaacatgacaccgactgcgcccacaatataacacagaaaccatacacaccacacacacataaatattgatgtataccagaaacacaatccacaaataacaactccggatataccaagtcccaaataaaccttccgtacatcttttttataatttttcataaattctacaagtactggatcttcctgcttctcacgtcgtatatgtactccaagaaccattccatcactgtaacctgctactgctgttcttccatagactgcataggcaattcccaccataaaaagatctgttattaagaatatgattgctaaaatcatgaaaatgcaacctccattccctgaaatgccttacggcataaatccataaaatcattttgatccatgcctcgaatcgttgcctctgcgctcagaagctccagttcatctgcaagcttctcctgaaattctccatctgaacttcttctagaatcccgtaaattacagacaacagttccctttctccggtcagtctcgataaaaccttctgtctttaataactgatatgctttactgacggtcattgtatttaccccaagttccatagccatctgacggacagttggcaatgattcaccaatctcaaactcaccttttccgattcccttcacaacctcattacgtagctgcaggtaaatcggtgtctctgattttgtattgatcttaataatcatgattgtctccttctgaatctattatcttatcttgcaacaaggattttatatcttcgcttttatttgtattatatcacataatacaaataatacaatctttttatattatttcttgcaatacaaaaatatagtggttcagaaagaaatatcagtctttcataactctttacagccctgcaagctttctccgcactctcttatctccggtctcatctacccagtccttccacttgactctgccccgacattccactccgtcaaaccatgccaaaatttcttccatactgactggtgaatatccatttgcatcgactccgacatcataacgatataatccctgcatacgattcatctcattataaagactcccctcactatgaatatgaccatgtaaatgaattgactcatgtgacatagactgccagtctgccattggaaaatgtgaaaggacatactttcttccatcgattttcaatactgtgattggctgctcaacaataaaagttccttgtacgagtttgttattccagtccttgtcatgatttcctggcacaagatgaacttttttacaatagattttctttctgagtgctgctgcctctaaagctgtaatcttaaaagaataatccccaagtatatataactcgtcattttctttcaccttttcattaatattcgcaataattccttcattcatttcatcaatctgattccatggccgacatgtgaagtccaatgccttctcatgtccgagatgcatatctgatgtaaaccaaatcatttcttttctcactttctaatttcttttatagtttttttatttcttttcatctttatagaactttgaatgtccccgtcattttcataatgctcctcttttgaatctttatcactgtttgtatatctggattataaaaatttttagacaagctttgtctgattttgacccataagactctttttaatccattcccagggaaaaataatttttctttccctcagtcattagtttcggtttgtaaagttgttttttctgtttgccataataaaaggcctcctatgattcattatatcatagaagacctttatattttacataattctctatcccagcagttcctcttttttactgaggattgcttctactgctgcgcatgccgggcagtcacagtactttgctcctgctgccttgatctctcttccgtgctctgctacacctttggctttttccgctccgccaaatacttttgctcctgcatcggactctgcgaatgcgatcagtccatcaattggaataatatcttcttccatctcagcgatgaatttctttgtctcttctgcctgcttgtccgttcctacagctgcaatccaagcctgggctgcttcttttgcctctgcactacagctcggcgcaacaatcagctcttttgcttttgctacaacatactctaaagtttcttttgacataacaaatacttcctttcctggttatatttcctgcttccacacacttctatgtggaagacctctatgagttgattgtagcacattcactccggacagtcgatagacaacttttaatctttcaccagcacttcgaatgcttcttcgttctgcaagttctcttgcatttccctttaattcttcttgcttttccttgaaaatatgcatcaaattatgcttatattcttccagattatgtactttatatgcctgtatttgatcttgaatccatcctttatatacagggatatcccgcaggactaccggcacttcacaggcaagtgcctccagcactactatcccttccgtctcttcatagctgaagaacgcaaatgcgtcggctccgcagtaggcgttccgaagttcttctgcttccacatatccggcaaagattacattttcacttttcttttttactgcttcttttacttcttgtgtcaccaggctgtcatttccgcctccaaaccagataaaggttatttccggcatcatctttgccagctccaggaaatccagaataccttttctccggatcaaatgccctgctgatacaactacttttcgattcattggaattttatatttctcatgaagctcctgcttttctttctctttatttctggattgaaaaaattccgtatctactccattggaaacagcatagattttcttttggattccatagctttctaaaagacctttggaatactccgtcggtgtaatgacaatatctccaagactatagcaaaagcaaatccatttcttaaaaagagatgcaaaacggttggagccgataaaagagtttcggaagtcctccatcgttgaatgaccgtaataaacaactttctttccctgcatttttgccagacaggctgccagcacggaatccggaaatacggtattcatatgtatgatatctgcctctttccagctttttgcttcttcaatatctgcctgcttcaacatattcttttggtgtttgattgcactgcccacaccactttttgcaacgattccaagaccgccttcgtatatatatgtcttcataatttcatctccccattcttaatctttgttcaaggtgcaacattttaccttctaccgataacacattagactgagaatatcgtccgaaatgctgttgtaagtcccagactgtaaagtgcaatggaacatggttttccaagcagaatgacaagcgagaactgcttccatgtcatcttcgtcgttcctgccagatagcataagaagtcatctggtgctaccggaaaaaagattgccagtgtaaataattttaagaaccggctgtctttttctgtccaggaatcatatttctgaatcaatttttccgagaacatcttatgtaaaaccggacgtcccatcattctggatattccaaatgctgccagtgaaccaatacagattcctatataattatatacgaatccaagccatggcccgaagaaaatcactcctcccaggcagctgattcctccaggaagaatcggaatgactacctggacaatctgaatcagtacaaaaattgccattcctccatatccgaacttagcgataaatgcctgtaatgtatccacagaatccagaatgccatttttatatgcccaaaatgcaagtgctacacaaatcaataacccggcaagtgagaccagattccatattttcgccatttgatttctatcattaagctgcatagacatttcgtctttttctttcttccagcgctgccaggtaaaccctctccacccgcttcgcaaagctctctttggaaaactgatctgctgtccgaactgctgtattgcgcattctcctcttttcatcttcactgaactccttccatttctgtatacactcaaggtacatagactcattttcatactgccagccattctttccttccgtaactacctctttcaggcagtcatcttttctacataaaagcggtactccaccagccagcgcctcatcatatgtcataccctgtgtttcacttgttgatgcactgacgaaaagatctccaatctgataatatctggcgacttcatctggcgacaccattcctgtaaagattacactatctgttacttgatactcttttgccttttcttccagtgtagttctatatggcccgtctcctactaagacaagttttatatttttttgtacacttttttgataccaaagcaactcttcaatgttcttttcttttgccattcttccaacataaacgaaaacaatctcatcttcctttatgccatattgtttccgaagcgcctctttgcttctgtcgtcaattcgttttctatatttttctgtatcaattccagacggtacaacattgaccggacagcttacccggtagccttccagaatccgttctatctttccacttggtgcgatcatggcatcaacctgatctgataattttcttgccatcatctgtaccaggctcctgccccatgctttctgtggtgagaaataatgtgtgtaatcctcgtatacagtatggtatgtgtgaatgattggaatatctaattctcctgcaattctttttgccagaaaaaatgtcgagaattcacactgggaatgaatcagatccggcttccatgcaagcaactcttccatatattctcccgccacaaccggaatcttcacccttgcctgtggatatatctttcccatacctaccgatcctgcatagatcacattttcctctttatatgaatgacaattcctggaaagtgtcagaacctttacttcatggccacgtttttccaattgctctgtcaaatttaacacggaagtcacaactccatttatcacaggtctgtaccagtctgttgtaatcagtattttcattgttcattacctcctcttccttacagtaacaagcttatcatccggttcttaaaataaacgcagtcaattctaaatatttcttaaagattctcgcaatattttcttactacaagcacgatttctgcatgacgcttttttgtataataggaaatgtaatttcccatcaccaaaaaaatccctgcgaagttatccattcaaacttcacagagacatgtgttcctaaccttttattccgagatactctattctcttgtttttatttcttacgattatttctttccaaaataaaagaatccttttttctcatatggctctgtatggacgtctaccagttcatagccaatctctttgatttcctttttcagaaatgggatatccagattctcttcactgattacaactgtctcaccaccttttacagaagaagtcactttctttacattaaaattcttgcgtaccagatcattcatatgtgcttcacacataccgcacatcatgccatttacctttaataccgtctttatcataattctatctgcctcctgttattggtttctgccagattatattttctatttgtcaacgaagcatctaatctaattaacagttgactctccactcttaatcagattcttctctctgacgttctcatgttatacccctccaaggtataagtcaatggtatggttttatttacctaactgatgaaacttttttatcaataagaagaagtgtacaaagattttcttttattatctgagacttactttttgttatactgttcactttttctctgctttttttctcataataacaggcctccttaaaaccaagactttttactttgtcttcattttaaaaaggccttttaaataccctgatattaaattctaaacaatacttaaactatttcatgtaaattcatgacatttttacattatactccaaggattcctttgaccgtatctttcatcttatccgcatcacattccagatcatgaagtacttttgcatccagaatatctttaattgcctgtggcatcggaacaccggatacttcctgcagttttggaagaagatcaaattcatctgcatttgcattctctgcatcgatagcactcatcacactctttacgaatttgtatgggcttgctgtagatgcaatgacacattttgtctgatcaccactcttagcacgatactgtccgcatacatgagctgcaactgctgtatgtgtatccatgacatatcctgtcttctgataggtatcatgaatactttctgccgtctcttcttctgtagaatatccggcagcaaaatcagctagtttttctttcatttccagtgtaattgtatactttccggttgtcttaagctcttccatcagctcttttgtcttctctgaatcttcaccacagatgagatagatcagacgctccaggttgctggaaatcagaatatccatggaaggtgatgtcgttaatacaaactcacggttcttatcatacgttcctgtctggaagaaatcatacaatactttattatcattagaagcgcagattaattttgcgatcggtacacccaaattctttgcatagtacgctgccagaatatttccaaagttaccagtcggtacaactacattaatcttctcgccgtctttaatctctccatttgcaagcagtttcgtatatgcatatacataataagcgacctgtggtacaagacgtccgatattgatggagtttgctgatgagaactggtatcccttatcagccagttcttttgcaagttcctgattttcgaacatctgctttactccactctgagcattatcaaagtttccatgaattgcaactacgtctacatttgcccctttctgggttctcatctggagttcctgtactttgctgacaccattctttggataaaatacgataatccttgttccttctacatccgcgaatcctgccatagcagcttttcctgtatctccggatgtggcagtcagaattacaatctcattcttcacctgattcttctttgcagatgttgtcatcagatgtggcaagatagaaagtgccatatctttaaatgctatcgttgctccatggaacagttccagataataagtatcttctacttttacaagtggagcaattgcctcatcatcaaacttgctgtcatatgctttttcaatacaattccttaactcttcttctgtaaaatctgtaaggaaacacttcataacttcataagcagtatcctgatagttcagatccttcagttcttccatagactttccaagtaccggaagcttctccggaacaaaaagtcctccgtccggagcaagtccttttaaaattgcctccgatgcagtcactttcaaattagaatttcttgtacttttataatataaatccatctgttccacccttctatgatcctgtaatcctctgcctggcatcacttttattttgcttttttactatttgtatattttacaagtccgcctgctgcaatcagtttctgcatgaattccgggaatggctgtcccttaaattccgttccttttgtacgattatagatcataccattatcaaaatcaacttccacttcgtctccggcttcaattcctttcgcagcctctggacattcgatgatcggaagtccgatattgattgcatttctatagaagattctggcaaatgtctctgctataacacagcttactcctgctgttttcagacacagtggcgcatgctctctggaggatccacatccaaagttcttatttgccacgatcagatctcccggctgtaccttatttacaaattccggatcaatatctgccattgcatggcttgcaagttcctgtgcatcaaaagaattcaggtatcttgccggaatgattacgtctgtatctacgttgtctccatatttaaatacatgtccttttgctttcattattcaacgacctccactttctcaggatttgcgatgcatcctgcaattgcacttgctgctgctacttccggtgatgcaagatagatcagggaatctacatgtcccattcttcctacaaagttacggttcgttgtcgatacacacttttctcctgctgccataacacccatatgtccacccatacatggtccgcagctcggtgtattcactgcacatcctgcatctacgaaaatatccatcagtccttcgtggatacactgtttgtaaatcttctgagtagccggaattaccataacacgtacatcttcgtgtactttatgacctttgagaattgctgctgcctttctcatatcttccatacgtccattcgtacaggatccaataacaacctgatcaatcttgatcggctccatagcctcgatctcatcgatcgtttttgcgtttccaggaagatgtgggaatgcaacagttggacggacttctgcaagatcgatctcaacgacctgctcatattcagcgtcctcatcggcttcatagactgtatattctttctttgtatgctcattcagatactggattgtcttgtcgtctaccgggaagattccgttctttgcacctgcctcgattgccatgttcgccattgtaaaacgatcgtccatagacagattggcaattccgtctccggtaaattccatagatttgtaaagggcaccgtctacaccaatctttccaatgatgtgaatgataatatctttaccacttacatacttgcccggttttccagttaatacgaagttgattgcagccggcactttaaaccacagctctcccatagccattcctgttgcgatatctgttgtacccacacctgttgaaaatgctccaagtgctccatatgtacaggtatgtgagtctgctccgatgatcagttcaccggctgcaacaactcctgcctccggaaggatcgcatgctctactccggattttccctgttcaaaataccagtgcagtccctgtacttttgcaaactcacggattgcttttgaattctctgcggatttgatatctttgttcggtgtaaaatgatctggtacaaatactactttattcttatcgaatacagtgtcggacatctgctttaaaatcggcagtgccatcggtcctgtaatatcatttgccattactacgtctaattttgcttctattaactgtccggcttctacatgatccagtccagcatgcgcagctaatattttctgcgtcattgtcattcccatcacgacaacctcctgttctttccattagtgctttttatgatgtttcttagcttttcgccatgcgttcattgtaccacacagcacaatcacggtgcaagaaagaatcagtattaggataattcctgttatatttgctacatctcccgttttcacagttgatgcttttaatgatttcgccgatgtaacaggtatctgcggttcttctactttcggttcttccactttcggctcctccactttcggctcctccggtgtcggttcttccactttcggctctcccggctcaggttttggttcttcttctactttcacagtctctctgtctttaacttcttctgcattttcagaacacacaactacttcattttcaatctcttttccaattacgctctcgtcagtaattgcaacctgatattctaccgtgtacttctgaccactttccggtccctccaggaattcacctgcatgaattgtgtaagaattcccctgcactgtaatctttgcgtcaggaattttctcaccgttttcatttaacaatatcactgaatttttctgaagttttactccttctgtaagaatcgtatccgtgatcaccacattttttgcaatggctttttcaatctgctgagtcacatccagcgtgtatgtaataatatcccctaatttataagttttaccggacttatctgcatttttttctacctgaagctccggcttatccagccattttacctgcaattcgattggtgatgatatcatctgctgcatagaagctgtcccaatatcctgacttccatttcctgtcttgaccagaagaattttccatgattttgcaatttctcccctgatctcaccactgctccaagtcgttccatttccatatgcaacatctgcccttaagtaaaatgtgtctccttccgatactttgacatttccacttccactcgtgcctctcgtctcattaacaagcatgactccatcaggaagcggaacggtgatactatttgccgtatcccctacaagacgaatactttgggtcctctgacatttctgttcccggtcataataggccgtcagcccattttcagaaaatgccagctctgcatctggtatatccggaagattttttacataatccgcatacatgactaccgcactggcaatgtctgcattcaggcctttaaacgctgcactgttctgatcacagccgtcataaatgtatgataatacacaatgggtcagacaataagcattggcatcttcaccccagcctccggtcagtgaacttttgatatattgctcataccccggtccaccgtacatgtaatacattgctttactaagatgtgacttcggatccaattctgatgcgctatatgcaccattccccggtgatttcatatctggctccagacaaaatgccagattaccatccacgtaataataatgggtcgaatatcccatatacctgattgcatccccttttacaagggatacttcctttgcttctgcattcactgccggcaaaatgagtaacaaaaagaacacccctactgccaaaatgaacttacgggcaaaacaaactccttttttctccatatgcaattctcctcttaatgatcaatgaatctgttgtttatgggttacaaaaaagacctcccttcacctgttttctcgttttggaaatctgggaagaaataaattcccttcgttggggatacaccccatgatgtgttactgaaaattagaatttcttagacgagtgctattatcatagccagaatgctatgatttgtcaatagcacttttaaataaaatattcaatggttttctcagacgtaagctctgtgttcttattaaaaaggatgattgcctcccgcccatgataaggccccagagaatagacatttaacgcaattttattaaaatatttccacggcacaatgcgattatagcgcgtcggacaattttcgacaatctgtatgtcatcaagaccatatccttcctgatcataatacggatcaaacatgtagacatgttccccctcttcgcctgtaaggagaacatagtgccactcatcagaaaacaggcgtaacacaacagcgccccctcttctgagagcgtcattaacatagctttcatttccaagatacacttcttttccggacagataacggctttttacagggagaatcccaagatcccccatgctgttcagccagttcgacagaaacatcatggcagcgcaggacgttccactttttccgggaactccttcactgctatagcagtccagacaatatagcataatgttgcgcaagacttccggtggaatttcctctcgttcgaataaaaaactgatggcattctgcatagatgtcggtccacagtcatattctgaaaactgataatgtaatggatttttcatgcctgtctcctttagaaaaactgacggatacctttcgcatccaccatgaataaaaaactaatctgttgcataagaaacaaatttcaatctttagatataatacatatcctgtccatagtctacatatgtctggtactctttttccagatcataaagtgtaatgcctgtcaatatcttctccagttcgtaattcaccttgtctatgaccagtttttgtattgcctccggtgctgctttatagtcacagtcttccggcacatcttcagcctcgattctataatcaccttccagggcttcgatcacctctgaaattgtaatctgttctgcaggtttatttaaaaaatatccgccctgagatccttttatactcttaacaattcctgcttttctaaggctcgcaaatacctgttccagatactgtggagagatattatttctctccgcgatgccccccaatgctacctgctcatttttagaatttactgaaagatcaattaatgcccgcaggccatatctgctcttcatcgaaagtttcataatcttctctcctctagtttaacgtatcagacagccggcttttgcccgctgtcctacgtcaatatctattcactctcttttttaatcttactcagcgaacagaggggttgaataatatctgtctccgttatccggaagtaatgctacaatagttttacctttattttccggacgttttgcataatcaattgctgcccagagagctgctcctgatgaaatacctaccagaactccttcgtgttttgcaagaagttttcctgtagcaaatgcatcgtcattctcaactgtaattatctcatcatatacttttgtattcagtacatctggaacgaatcctgctccaattccctgaatcttgtgtgctccgctcttaccttctgaaagtaccggtgatgttgcaggctcaagtgctacaattttaacatctggtttcttttctttcagatactctccaactccagtcagtgttccacctgtaccaactcctgcaataaagatatccacatctccgtctgtatcattccagatctccggtcctgttgttgctctgtgtgttgccgggtttgccgggttcacaaactgtcccggaataaaactgttcggaatttcttttgcaagttcatctgcttttgcaatagcgcctttcattccttttgccccttctgtcagcacaatctctgctccgtatgctttcagaatatttcttctttcaacactcatagtctcaggcattgtcaggataattctgtatcccttagctgctgcgattgccgcaagaccgattccggtattaccagatgtaggctcgatgatcacagatccttccttcaaaagtcctttttcctccgcgtcttcaatcatgccttttgcaattctgtccttcacacttccggccggattaaaatactcaagctttacaagtactcttgcttccagtcctaattctttttcaatattcttaacctcaaccagtggtgtatttccaattaagtcaattgttccgttgtaaatctttgccatgatatcttcctacctttcctatcaatgtggtatgcatttgtcgttggtattaatatagcaccacatttcaaacttgtcaactatgttttgtatgttttatatttttccacctttccatcatccatttataaatactttaagtttttataaattctataaaattaattgattgtccgcacatttcgtgataatctataaccactttaagagaagcaatctgcaactctttcaaagttctaagtcgtaagacatctcatttcggtgtttcatgttcgaaactgctatccgatatgaagagaaatgtaactgtaggcatagatattctattgcaaagatgaatcgaaaactttataatgaaaggagaaatggatggagcaaaagagaaagacgatagaatggcatccggcattcacggcttcacttcagattgagttcgaagatgaagcagataaaataatatttgaatcggaacatttgttatcaaagaaacccatgcagattgatgaacttgtaataaaagttcatgacaatgagaaaatccagaaaaatatagggagaatatttcgaaagcataatattgtggaatataaaagtccggaggattatctgacaattaatgatttttataaagtatatggatattgttgcttttatcagtcggatactgaacatgtatgtgagattccaccggaagaactgactataacatttatatgtaaccattatccgagaaatctgatacagcatttggaaaaagttcgaaagttgcaaataaaaaaagaagagccagggatatattattttgttggtgatgcaattccaattcaattattgattacaaaagaattgaatctggaagagaaccgatggcttggcagcttgagaagcaatattaagaatcaaagtgagattgaagcgattctaaaagaatatgaagaaaaaaagaattcaaagttgtatcaggcagcaatggaagtaataacaagagctaactgggaggcaataaaggaggcgaaacctagtatgtgtgaggcactaaaagaattaatggcagaagaatttcaggaactggaagagcaagtgacggaacgagtaacagaacaggtgacagagcaagtaacagaacgggtaacagaacgggtgacggagcaggtaacggagcaagtaacagagcgggtaacggaacagttggtaaaaaatttatacgaaaatgtaggcaatgctgaaaaagttgcagaaatgttaaaattgcccattgaaaccgtacgcagaatactctaaataatatgtgttgcagcgattttatcaagcaaatatatgaggcatgtatttttttaaacggcgatcaaataaatcgccgtttaaaaatatagcatcacattttcttacatattcagaaaatattcatgtattctcgtatccccatccagttccgggtgaaatgctgtcacgagctgtcgtccctgtctggcagccacaattttaccatctacttctgccagaatctcgacaccttcccctgcctgggcaatatatggtgcccggataaatgtcatcggcacctgaccaagtccatcaaactctgcatctgtatgaaagcttccaagctgtcttccatatgcattacgctttgccgtaatattcatagtaccaaaacacggaactcctgcttccacttcatctgccagaaggatcagtcccgcacaggttccaaaaactggcagacctgacatgattttctcttttaaagcatcgtaaatgtcaagttcca

SEQ ID NO: 14 - DNA, 108360 bp, unidentified
  source 1..108360: mol_type = unassigned DNA
gggacgcattgcggtcgtattgtgaccgcttatgtaccgctacgctctgcgacagagcgcgagcgtgccgcgtttcttataccctgccaagggctacggggatttgatagcatttctttactaactttccacttacattaatggaacgtaaaggaatctccatcttcgataatacagatcatggtcttgccggtattgaggatgatctcgtccccgttgtcatcgtaatatctggtggcactgtaatcggaagtcttctcccaattcacatgtattcctctgccattggtgaagaaccagccgtcccgggtggtgtcatgacactgaaaagccagatacccctcgcccagttcctcgtgaaacgtattctgtaccagaatatttttgaaagtcagctgctctccggtggcggcatctatatgagggccgtctgtgctgccggacagatgctgggaacggtaatagaggccgtcatcctcgttaaattcaaaataacaccttgtcagcggataacacccggacatatcgatataggtggcatcctttgctttggcaccgtactgcccaagggtgttcggttccgccttggtggcaaacctgaaatgattctcatcgctgagtccgcggtatcccaggctgtagccctttttctcgatcaccttctgcagaccttcaccggaagcataagcattgtggggcttgttgcggtcggtagtacggaaaaaggcagcctcatcactcccggaggtaccgtccacatcctgagtatccggctgcgccagcagctcattgatgaaaaacggaccgccgaaatgtacgataaaagcatcccactcgaatgcccagtaagcataataatcacgaagactgcggatattgccgattttgtccagattctgccagtcttcgtagattgccatcatccgggtcatacggttttcaacattcgcctcataaataatagaagcatcggacagactgtattgtggaattgcagatgcctcattaggaatcattacggcaatggggcgtgtagcagccacatcggcatccacccattcgttcgtaagacggctgcggaccatgccctcagcgggaggagtggaatcatcctctacaacgatcgttacgggatccggaagcttttccccggaagaaaccgtggaggaatccgggctgttatccgggaggatcggacggaccggggaattggagttacccgtctgtccacatccggtaagcattatggagacagtcagcagaagaggcaccgcagtctgcagaaactgccgtcgaaaattatatttacacatgcaatcacacctcgatcggttatcagagtaagaagctgtaaatgaccacgccgcataaaatgcctaacagcgcacccatcaacacctgcaggggagtatgtcccacgaactcttttaatttatcatgggcggaaatctcactgcggcccatatcttcgaagaccttcagcatttcgttcaatacctgtgcctgaataccggtctctctgcgtactcccatagcatcatacattacaatgatcgccaggatcagggaaatggcaaattcaaagcttcccgcaccatattcgtagcagaccgctgttaccagggcacatacggtagcagagtgagaactgggcataccgccgctgccgaccagacgctccgcaacgaatttcttggagacgatcaaatggatcagcgtcttcagaacctgtgccaccagccagccgaaggctgcagtcaggaaaatggtattgctgaaaaactgttcaaaaaaagtcataaataacctcgtttcctatatgctgtagtttgcagaacagacatatataaatccagtataatccaaaaagcggaaaaagtacagtgttgaccttgaaatgatgcatcgaaggatagtataatatagctgttatctgtcgcacagtggcgcagataagcctgaaaaagcgacaggaaaacataaggagattacaaaatgagcttattgagcgtgatcgttccctgctataatgaagaagaaagcgttgccctgttttatcaggaattgacgaaaaatgatccctttttcaaggaaaaggaaatagaactggagcttctctatattgatgacggttccaaagacggcactgtgagagaagtgaaaaagctgatcgaacaggattcccgtgtgcatattgtctctttctccagaaatttcggaaaggaagcggcgatgtttgccggactggaaaagtcgaagggcgattacgtggttatgatggatgtggatctgcaggatccgccttccttgctgccggagatgtttgaatggatctggcaggggtatgattctgtagcgacccgccgcgtgacccgcaagggcgaaccgccgatccgcagcttttttgccagaagcttttatcgtctgatgaagaagatatcccagacggaaataatggacggagcgagagattaccgcctgatgaccagacagatggtggatgctattctgtccatgagggaatataatcgttttaccaagggaatcttcggctgggtcggttttaagaccaaatggctggaatatgagaatgtagagcgtgccaagggcgagaccaagtggaatttctggaagcttctggtatattcccttgacggtatcaccgcattttccacggcaccgcttctgatcgcttcctttgtgggtgtgctgttctgtatcatcgcttttttgatgatcatatttatcatcgtgcggaagctgatcttcggagatccggtgtccggctggccttctctggtgtgcatcatcctgatgaccagcggcgtacagtttttctgtacgggtattctggggcagtatctggcaaaggcatacatggaagtaaaacgccgtccgatttacctggtaaaagaggaaatttaagaaaaaccgcataaatatccgttttttgtgtacgtaaaaatgttacaaaataggggtaaaatgtaacatttttagtttcttaactatattttaacggaaaaatgtcttttcaaatatcgacagctatgatatgatttctctatcagtcactgcagaggagcaatactcgacaagtaaaaagggggacttgttttggatattgttgcagtaaaagattcagagttagagagatatgtaaccaaaatcatgttggagataggggtgccggcgcatttgaagggttatcactatttgcgtgatgcaatcattttgtcagggaaagacatggaggtagtaagcagcgttaccaagctgttatatcccaccatcgcgaaacatttcaagaccacagatcagaaagtggaacgcgcgatcaggaacgccattgaagtgtcctggtccagaggaaatgtggagacattcgaaaagatttttggctattctgtagcctccggaaggacaagacctacgaacagcgagtacatcgcacgtatcgccgacaacatccgactggattataaggctatgtaacatattaattttaattatttggaacagggagagtttgttaattaagcagatgcagtattctcctctgcagactgagaaagaccgcgtatcggaatggggaagtttccggtacgcggttttttgttgtatggaaatgctgttatatttgtcaagtccatataaatatggtaagatgtacaaaagcccgtgtaagaaaaaggcgggtatgggagatgaaatgacttttcggacatcggatattttgatcggggggagcctgatcattatcgggctgacagagatcgcccatttggcaggctgcctgttagggtggtcttttttgactgtaacggatctgctgctggcagaggtgggaatcgttctgctggcggcaatattattgtctgtaatatccagacagacacggaaacgggccacagccggtaaaaatgatccggttgcggatcaaaacagcgggacagacacggcaaaggaaaaaagcacacagattctcacgggcgtcctgatatttctgatcctgctgcagattctgcggatactgacggggaaccgtatgtggctgaccggagatatgacggtggagaccgtgaacacatttctcagggaaaatgctgtttataccgtgaatcctctcacggggacggcatattcgatggggatgtccttacggctgaaaatattgtgcctgcccactctgtacggggccatcagccgttttacgggtatggcacccgtagacgtggtgtatcgtctgatcccctgcattacgctgctgttgtcttatgtagcttacggaagcctggggaaagtactttttccggaaaattctgtgaaaagacggacgtttttgctgatcatgggaatactgttcagtacaggggcctatatgcccggagtggatggatttgatgtgttttacggaggattccgcggtgtgacgatccgggcggcggtgttgcttccgtatctgctgtcctgtctgatggacagaaaatatacgggcgtgatcctttgtatcctggcggaggcctgcatagtctggaccctgtatggcgcgggagtctgcctgcttgttactgtggcatggctgatacttggagcgttggtttcccagttccggaaacgatgggaaaaacggaaaatgactgatgcacatggcaggtcaggagaggaggctacagaatgatgacacttctgcagtccgccctgacaggctggaccgactatacacaacatggaaaatttgcggcatttttgctgctggcgatcctgtatctgggatttgtcctctatggttccggaaaggaagccaatgcatccggggcggaaaaagcacggaaacggctgtatctttacggagcgctggtgacatttggctgtatctgtcccgtaacggcactgatcctgttaaaataccagaccgccttttactcttatgtatggatctgggcggcggtaccccagacagcattgatcgcatgggcagcaacggactttctgtgtaacttattaaaagagaaaagcctgcgaaacgggatggctgcgctgatcttgctgggcatcctgttcctgggtggaaacccggtgtcggaatggaccgtggcacagacaacgcagataccggcactgacgggaatgcccggacagcaacagggaactcccgccagggaaattctggagcagctttctgtatacaatgcggaaaaaggaaactcacgggaatacagtctgtgggcgccgaaggaggtcatggaggctgccagagcctacagcgctgagatccacccggtatacggcagaagcatctgggatgcatcgctgggcagctactcctatgatacctatgagacctggcaggaagatatgtatctgtggatgagccacctggagactaccggggagacggaatatctgcggacagatgaaaataccacgacagaagccggtggcagaaaaatagattttgctgcgtgccttgacagcgccgggaaggccggtatagactacattttattgccggaggacctgtcggaggatgtacagaaggaattgcaagaggctgcggacggcagactgcggtcctttggcggatatttcctgatcgtgatgtaagtaggcatcttgcggaaagatagggaaaactataacgatttgtaagaattaggaacaggaaagcaaaatggaacaggaactgatcagtattgtggtgccggtgtaccgggcagaacgttatatagaagaaacgatggactgcgtccgggcacagacgtatccacactgggaactgctgctggtggaggattgcggcccggaccgcagcagggagatcatagaacaatatattcagagaaccggagatacgagaatccgcatgctgacttactctgcgaatctgggggcggcgagagcacgtaatctgggagtcaacgaagcaaaaggccggtatctggcctatctggatgcagatgacctgtggacaccggacaagctggaaaaagagctggcttttctgaaagagaaacaggcagcctttgtgtttaccggctatgaattcgccgatgagaatggcaagggcaccggaaagattgtccgtgtgccggccacgattacttataaagaagctttgaaaaataccacaatctttaccagtaccgtgatgttcgatatggaacagctgtcgaaagaacaactgcagatgccccagatcaagagtgaggacactgccctgtggtggagaatactgcgggagggttatgtagcttgtggtttggatcaaaatttggtaaaatatcggagagcagggaaatccctgtcatcgaataagctggaagctttgcggaggatctggaatctgtaccgtaaggcggaaggcatgtcagtgccgaacagtgcctggcatttctgcttctgggcggtacgcgccgtaaaacgcagagtataggaggagtttgttttgaatacaaacggtaattattatgaaaaccgactgcggaaaagggaatcctttaagcgtctgatcaatatagggttgtcaatgatctgtctgttgctggagatcagcctgtttgcctacatgtggcagttccatttccagttccagctggtagatcccctgcagaagatctggtatcgtggctttctgctggaaaacggtatctacagtgcaatcctgatatttttctccgtgacctacggcggcatgcgtctgggatacatgaaaaacacggagattattttctcccaggtgtttgcaaccctgatggcggatgtgctgatctatgcggaactgtgtatgatggcccgtagcatttttccggcggatatgttcctgttgatggtatttttacagatcatagcggtgatcatctatgccaatattgccaacaagatctatcgtacagcattcccgcccagagagcttctgctgatccacggcgatcgtcccatcgaagacattgtcaacaaatttgaaagtcgtaaggacaaatataagatcacaaaatgtgagcacattaaaaagggtacaacagaactgtgtcgggagattctggacaattaccggaacggtgagatcaatgcggtagtgatctgggatattaatgaaaaggatcgtaatattatcctgaaattctgctatgcccattccatccgtgtctatgtcatgcctaaaatatcagatgttattttagttggttccgaggaactgcatgtatttgacacgccgatcctgctgaccagagagtactccctgagcatggagcagcggttcatcaagcgatctatcgatgtgatctgctcgttgatcctgttggtagtgacttcaccgctgatgcttctgacagcgcttgccatcaagctttatgacggcggacctgtgttgtacaagcaggtacgctgtaccatcggacagagggaattctatattatgaagttccgcagtatgcgcactgatgccgagaaggacggcgtggcacgtctggcacagaagggggataagcgtatcactcccgtgggtaaggtgatccgcaaatgccgactggatgaactgccccagctgatcaatattctgcggggagatatgtctttcatcggccccagaccggagcgcccggagattattgcacagtacatggaagtcatgccggagttcgcattccgtatgaaggtgaaagcgggactggccggtttcgcacaggtatacggaaagtacaatacttctccgtatgataaattaaaactggatttaacatatatcgagaattattctgtgtggctggatcttaaattgatgcttctgacactgaaggtattgttctggccggacagtaccgagggtgtggagagcgaacaggtaacggctttcaaggcaacctacgatggtcgtgccgagaaggatgacgactgagaaggcaggaggtagacgcatggaagtaagctacggaaaagagcccttcgacctgagacttatgtgtctgcggctatgccgcaatctgtggaaaatactggctgtgacagtagtgggaacattactgttcggcggcggttattatgtaaaaaatgtggtgctgcagcccgatccagggtatgcggcttcttccacttataaggtagaatataaagagaaccccaatgcggcgggtgcgtactacattaacgaggctacatggaacaccatgatccatacgggagaattcctggatggtgtggagaagcatctgcaggaggctgtggaacggggagacaatggagcttcggaagcactgtctctgggcagagatcagtggatcgcagacctctcggcaacacttccctcggatttcagtgttccggtgacacaggcggcaactcaggatccggagatgagtattgctctggcccatgcagtggaggataccatgtgtgacgaatttgcagagagtatcgtggagatcgaccggatcaaagtgctggatcacggagattttgcagaagtcgtggtaccggatgtgcgcccggtgcgggcagtcattctggcggcggtattgtctctgttttttgcagtagtcctctttttgctggtggagatctcgcaggacagcatctggctgccggcaacacttcgcagacgctacggactgaacagtctgggaacggtgcgcagtgtgggatttgcggaaaatctgatgtatacgcttgagaaagtgtacgataaaaagcaggcaaaggagtccgaaaatgcggaaatctgccgtgtggcagtatgtgtggcactgccggaagcggatccgaaggaagtcgtggaggatttgcagaagctggctaagacaggtaagatccggaagggaataccggtggaatatgtagcggttcccagtccgttgttatgcccagagagtggagagacacttcgtaaggcagatgcatttctgctggcggtgccggccggagaacgggtaggaaagagactggaagcggtattagagtatctgcatacccaggactgctctgtggacggagccttcctgtggaatgcggatgaacagctgatccgcagctattattttctgccgggagccatgcagacacagaatacagaacacggaggagagcaggcatgaaggtagaagttctggcatcggtaatgaatgcttctcttccggagaccgtacaacatatgaacctgcaatcggatgcggtgatcatcaatcagtgcgaccggctggggcaggaggaaatgcagatatctccggggaacggaagaatccgtttctgcagttttcccgatcgtggcatcggcagaagccgcaatgaggccatccttcgggcggaaggagacatctgccttttttcggatgcggatattgtgtatgaagatggttatgaggcggctgttcttgcggagtttgaacggaatccccgggccgatatgatcattttcaatattgaggtggaggaagaacgccgcacctaccatattacggaacggaaaccggtacgttggtataattgcgggcggtatggcgcagtcagttttgctgtacgcagagagagcctgctgcgatcgggaatcacgttttccctgttgtttggcggcggtgcaaaatacagcaatggagaagacagcctgtttttgacagagtttattaaaaaaggctgccgtgtatataccgcaccggtgaccatcggcagagaggaagccggggaatccacctggtttcatggctataatgaaaaatttttccatgacagaggagtactgtatcattatctgtatggatggctggaatggccgctggcactgcggtttttgtatgctcataagggtacgctgtgcacagaggtaagcctgcagcaggccagacagtggatgcgtgacggcatccgggaggcaggaggacgatagcttgctttttggaaaaaaggccataaagaaaggaggttccacatggagaagagcgcactggtgtatatcatattgacagctgttaccgtagcattcggttttctggtaaaaaatcgtgactatacgacagactatctgtccggcagacgctcctttcgtgggaatacctccggggatctgatggcggccgggccggacagacagcaggcatgcaatgctgtggcggaattcgccatcttctgtctcctggccggggtttctgcctgccgcattgctgtgggcggtgattactgggtctactggctgaaatttcagctgatcgatcagggaaggcatgtctcctacgaaaccggttttgtgtatctggtgaaatttttccatctgattttcggagagggatcttatcttccgatctttggcttcttttccctgattacagtcttctttttcctgaaggcactgcatgatcaggcggactggtatgtattttccctgttcctgttattgacacagggattttactttaatagtatgaattcggtacgttactatttcgcactggcactggccatgtatgcgcagaaatatgtgctgcggggagaatatgggaagtttcttctctgggtgctgctgggctgtatgatccacaaatcggtactgctggtcatcccggcatatattgtgatagatctcttgtcccggatccggctgaaaaagtggcactatgcggttggcgtattactgattttatctctgatcttcggacaggatgtgtaccggaatattatcttccggttctatccctattacaaggattccatgttcgacaacggacagttatcctatgtcaacatcgccaaatgcctggcagtgctgatactgtgcctgatctattggaaggacagcgttcaggaaaatcgcagaaaccgttattacttctatctgaatctggcgggactggtgctctattcctgcggctcctttatcccggaagtatcccgagtggcatattacctgatccaaagccagattttcctgattccgggtgtgctgaaggatgccagaaagggatggttccgaaccctgtgtattattggcgttgttgtagcatatctattgtatttcgtaatgctgttgcggggaatgtatgatgtggagatacggctgcttccgtatctaaactggatctttaattaaaagaggaattaatttatgaaagtgctgtgggtctgcaatatcatgcttccggtcatagccgaagcattgcataaagaagcttcgaataaagagggctggctgtccggtctgttggagcaggtagccgcggagaattccagtgacctggagctggctgtggcattcccggtgccggcagatacggaggtgccctggagactgcagatagcaatgccacgggaaaaagaagaccgggagcatttacagacaaatacagatgctgaaacatataatatcacatgttatggattctacgaagacaccgtacaccccgacagatatcagccgttgctggaagaagaactgcatcggatcacggaagacttttcaccggatgtgatccactgtttcggcacggaatatccacacacactggcagtatgccgggtgtttccccacaaggagaagatactggtgggaattcagggaatctgtacgttgtgtgcggaggcatattttgccgatatgccggaatcggagatccacaagaccactttccgggatctggtgaagaaggataccctgcgcatccagcaggaaaaatttgcccgcagaggtgtaatggagagggaagcaataggacttgccggcaatatcaccggaagaaccgcctgggacagggcagtgactaccgcgtggaatcccaaggcacattattatacgatgaatgagaccctgcgggcttccttttatgaaggacaatggcagccggagcactgtgaaccctattccattttcgtcagtcaggcggattatcctctgaaaggactgcactatctgctgcaggccttgccacagatccgggagaaatatccccgggtacaggtgtatgtggcaggaaatgatctgacggcataccggacgccgaaagaaaagctgaaaatatcggcatatggccgttacctgcgcagactgatccgggaaggacagctggaggacagggtacacttcctcggaaaactgaccggagaagaaatgaaggaaagatttctgaaaagtcatctgttcctgtgctgttcctctctggaaaattcaccgaattccctgggagaggccatgcttctgggagttccctgcatcagcacggaggtagggggaatccccagcctgtttgatggcggaagggacggcttgtggtgccggggacatcagctgtcggaagtggctgaaaatgagaaatatgcgtcagatgcttctgaaagtaaaaataacatgcgaaattataaaacgacaaaaacagaagaattggaaaatattgtaaattccatggcaaattctattatcgaaatgtggagttctccggagaaaatgctggaatactcaaaaaatgcaagagaacatgcaagaaaaacccatgataaagagcaaaatttcgcaaaattgcaggaaatctatgcaaacatagcagggaggaaggaatgaagctgatatttgtctcaaactattttaatcatcatcagttgcccttctgtgatgctctgtatgaattgctggagggagatttctgtttcctgcagacacagcccatggaagaagagcgggtgaagatgggctggcaggccgaggaacgtccctacgtgcgctacgctgcgaagaattcgtgtgcacataagtctgggggggagaaaacgcccggctctgagtcgaacagcaacgccgtcacagatgcggaagattttgagaaactattgtttaccgcggatgtggtgatcttcggcggatgcgatgacgaaagctatattcaggagagactgactgctggaaaaccgatcttccgttataatgaacgcttatataaggaagggcaatggaaggctgtttctccgagaggcctgttgcaaaaatacaaggatcacaccagataccgtaaggcaccggtgtatttcctgtgcgcaggagcctatgtgccttgcgattatcacctgatccatgcctaccccggcaaaatgctgcgcttcggctatttcccggagaccaggcattacgaggcagggcagcccttcaatcacaaagaaccgggcagtattctgtgggcggcccggatgatcgactggaagcatccggagctggtggtgaaaacagcatcttatttaaaagaacatctggaagaaaatacgtttcatattaccatgatcggcggaggggaactggaggaagagacgcatcgcctggcagaggaactcggagtgaccgacgtgatcacctttcccggttttcaaggcccggaagaagtccgggcggccatggaaaagtcagaaatctatctggtcaccagtgaccgcaaagaaggctggggggcagtggtgaatgaagccatgaacagcggctgtgctgtggtggcagatcatatgatcggagcggctccctggctgatccgtcagggagaaaacggcaggatgtaccgggacggtgaggaacaggaattatttcggaccgtggaacggcttctcagggatcccggagagtgccgcagactgggagaaaacgcacagcagaccattgtcggggaatggaatgcccggacggctgcggaaagattgatcgaactgtgccggaaaatgaagttcttgccagaaatgtcagaagaacaggaaatgccggatgccggccaggatgtgatgcaggacatcacaacacctgccccggtgattccacaattatggaatgacggcccctgctctccggcccctgtgatcccggagcggtctatgtataggagaataaacagtgaacagtagtgtaaccaagcaaccgctgatcagcgtgatcgtgccggtgtacaatatcataccgtatctgccccgctgcgtggaaagcctgcggacacagacttacgaaaatctggagatcctgctgatcgatgacggttccacggatgagacaccggcattatgtgaccggctggaagcggaggacgagagaatccgcgtcttccataaaaagaacggcgggccttcttccgcccggaatttcggattacagcaggccgggggagaatatgtgggctttgtggacagcgatgactacgtggatgcggatatgtatgagcggctgtacggggcaatcgaaaagaccggaatgcccgtagcgcaggtcggcagagatgaaatcgacaaagacggcaatattttaccgaatatctgcgagccggtggcaacggaacaggtgatcccggcagaaggttttctgaaggaacttctgatgcaccgcggagactgctccttctgtaccaagcttttgcggaaggacctgtttaccatagaacaatttccggtgggggcactgaatgaagattttcatttattagtaaaaatgctgacccgggaggaaagtgcagttccggggattgcatgcattcccggacaggcgtatcatgtattttatcgtccggacagcaataccagagacaagaaccggttctccagagtattcgccgacaatatcgacaatgcggacatggtgcttgcactggtggataaaaaatatccggagctgtcggaaatcgcattccggttcggcattttccagcggctggattatctgctgcacatccctattgcacagatgaccggggacaacgcattctaccgcagggtggtgcgtgacttgcgtcacggctggtggagagccatgaaaaacccctggcttaccaaaaagaacaagtgttatcatacactgtttgccattgcaccgaagggaatccgggtactgcataagaaactgaagcacatagagtgatgcccgacgtagatgcaggatagaacgggcaacacagcaaccataaaataaggaatgagtcacgttatatgaagagaaaattggcatttctgggagcaattctcctggcggcatttatattcacctacgagggcaatacctatcagacgcatgcattggatgaagaagatcaggcatggatcgaagaagcacgaggggctttgcagaatatcgtagaagaccgggaagtcatggcactggtttatctgtgcgatgatctgacgatccgtgcggaagcgtcggaagacagcacaaaagtggtcaccgtgcccagtggacagatggtggagatccgggatgtgacgatggatgaagactatcaggtctgggaaaaagtatccgccgaggtaaagggcaaggtctacgagggatatatcccccgggattatctggcatgctcggatgaacgttttctggaatgggaagaactgtacggcatgaatcccggagcggcggttatgctggcagaggaaaatgccaccggtgtctatgtggacatcgagcagttcccggagagctaccggccggcattgcaggctttgaaacagaaacatcccaactggacctttgtacgacagaataccggactggatttccagaccgcagtcaacaacgaactgcagggtggaaaaagtctggtctataagagttacggggattattgcaaggaaggacagcacagccccaactggtatttcgcttcggaagatgtactgaaattatacatggaccccagaaattccctgcaggagaatgctattttccagtttgaacagctgacctacaacgcaagctatcatacggaagaagcggtaaagaatttcctcgagggaaccttcatgaacagcagtcagaacgcaccggagacctcaatgaaattctaccatattttctggtccatcggtgcggaggagaaccggcaggtcagcccgttccatctggcagccagagtactgcaggagcagggagaggggacatccccgctgatctccggcacctatcccggttatgaacattattacaattatttcaatgtgggagcttccggcagtaccaatgaagaagtgatccgcaatggattgaattatgccaaagatcatgactggcatggagcctactactcgatccttggaggagcggaagtaatctccgcaagctacatacgtaagggccaggataccctgtatttacagaaattcaatgtatcccccactgccagcaatccggtatatacccatcagtatatgcagaacatctcagcacccaccagtgaggcactgagcatgaagaaactgtatgaaagtgcgggagcgctggagaatacctttgtcttcaagattccggtctatgaaaatatgccggccagcccctgcccgatgccgacttcctctaccaatgtggtattgcaggtaccgtcgggttacgatgcttccacaatctacgtggacggtattgcctatacaccacaggtgcggaataaccgccgtatcgtcaaactgccgaacggaaatgcccagtcggcggtcgtgtaccggtataatgagaacggagcgcctatcggcatgtatgtctggaccctggaatatcgtaacaatgcctatgtggccacagaacagccgggacttacggatctgctgacctatcacggattttccatccggattaccggaaaagcgggaatccgcttcaagaccggcatcagtacggacctcagagcgcaactgctgggaaatggtgtgaacggctatcatctgaaggaatacggaacactggtcatgaacaatgccaaccggacaagctatcccatgatcaaaggcggcgaaaaagtcatcagcggactggcttacggtacgaatgccaacggcacccatcaggatagtatttatgagaccgtgagtggcagataccggttcacttccgtactggttggccttccggcaaaccagtataaggtggaatatgcattccgcggatacatcatcctgaacaaggatggcaaggacattaccatttacggtccggtgcaggcccgcagcatctatgctctggcacaacaggtactgaatatgggaacctatgcacagggatcggaggcggatactttcctgcgaaaactgatcagtgatgcacaatagttaagaatgaaaaacagataggacaaaaagatgaaaagaaaagcaacaagatttctggcactggccatgagcgctgttctggtaacatccctgacggcctgcggagatggcagtgatgaaaatgcgaaggatgccgtgactcccgtagaggcacagccgatgctctcagagctggagctggagattctcaatctggagacaaaatataataaaggagagtttacccaggaggattatctgacattggccgatgcctacaacagagcgggatacatccgcaaacagcgggatatgctggaacaggattaccggctctatgcggatgaggaagcatttgctgctctacaggagatcagcgtgaatctggaggaagagacagaggggatccgcagccgtgcacaggaaatgcaaaatgatctggagctgaccgagtatctgagtgagagcgtgaatctcatcgacagcgaggactggttcaccaccatgatgcccaaactgaaagagggacagcgaaactactatctggaaagagacagtcagcctctgctttatgtacagaccggctatacggaagagggacaatgcttctccagggtgtggtataccggaaacgacacgaaacgattcctgagccaggagggtgcaacgatccggctggtaacagtgacagcggccggtgcggacgagaacatcgcggatccggcagaaactgagaattccgatgccacacaggaaacgggaaccacagaagccagagcccgggaaaatacaacgacagagatttcggatacaacagcgcctctgacagatacaccggaaaccatgaaggactggaacggtaccttcgaagcctggagcgtggacagcgctaccgggagcattacccatgaacagggaaccatgcagggcggtgtgctcacgggagactatacctgtgatgtccataccggagaaggtgcgctggatgtctattccctctggagcaaccgggagggtatggaatatatcacttacacgggaagttttgattccgaaggaaagatcctgacagagcagccctccgaagaaatcaagaaaaaactgctggagggaacagattatacggatctgatcctctatgcctatgatgctaccggtgagaactgcctgtggcagggaatcggcggggatattaccgcagaggagtatcgtttttgcggggaaatgataggactggagacccgtccggaatacacgtcctatgaggtgacagaagatatgacagcagaggacaatgcaaatacagcagagggaaccggtgccgccacggacggcggagagaaaggcaacgcagcggacaacaccacgggtgccatagacagtgataccccgcagatccgtatttttgacggagaagtacaatggtttgacggaaaatactgggtcagcgccggtgcggtcagagaaatggcaaaacaggatccttttgcggcttatgaagaaaaccatgataccactgcatccggaagcatcacaggaagcattaccggcaaaatcaccggcagtgcagatggcaacagtacagccggtaacgatgggcagacgatcaccggcagcggaaccgtgtcgggagacaagaccggtggaagtattcagaaacctgcagccacccagaatcccggcaccacgccaaagccaacgaccaaacctgctgcgacaaagcctgcagtcactccgacccctgcgcccacaccggctccgaccccggaacctgcgcaggatgatgacgatgacgacgatgatgacagcggcagcagtgattccggcagtagtgattctggcagcaacgatagcggaagcagtgacagcggcagttccggtggagacagcggcggaagtgatgtagatatggactggacaccggatctattgtaagaaaggatattttataccaatgaaactgacagaacgaaagaaaatgatattgatccacatcgcgtggatcctggcactggcggtgatcctgtggccgctgtttacgatcgcaaaatacgattatccctctgcagatgactggtctttcggaaaatatatgtaccgggcaatgcaggccggagaaggaatcaccggtgtatttcatgcgatataccagacattggcacaaaatgtgtgggaagccagattttccatactgattctgtcggctttgcagcctgcggcatttggagaacatttttaccggatcaccccctatctgatgatcggatccgtgatcctgtcccagttcctgctgctcagagaatgcattgcgggccaggcaaaggagaaccgctggctgatcctgcccatcggtattcccatggcaattctccaggtgctttactgcccctatccggaggaaagcttttattggtataacggttcggtgaattacacttttgtgtatagcttgtcactggtcctgctgacactgtatctggaaattgcgcttcgcgagaccggcaaggcaaagcgggtcgtgcttaccgtgctggccagcctgctggcgattctggtgggtggcaacaatttttccaccagcgtatccaccatgtgcctgttgatctgtctgcagatcttattcctgatctgccgtaaagatgcttttcgccggacctggatcgtgacactgttagagacactcagcgtattgatgtgtgtgacttctccgctgacagccaccagactcaacggcaattttggcggcagcacagccaattcccctttgatggccatctggctgtccctggagagaacttttctgaatattatcagctggacgaatctgaaggtcctgctgctactggttctgctgatccctttcttctggaaagcggtcagaaaaatgaactatgagtttcgcttccccggcctgtttactgcgctgactttcggagtatacgcctcccaggctactgcaacgatctacgtggacggcaccatgggcggcggaaggcagggcgctatcctgtggtatttttatgtgctgtggatggtggccaatgtactgtactggtgcggctggatcgcaaagcgggttctgaaagcggaaaagagcgaaaaggcagacctgttggcacagaaatacctcctgcgttattttgcagtgacgggggcacttctggcagcagtcgttctgttcggcaatgtccagagcaccaccagttaccgtgcctaccgcatgtggagaaacggctgggcacaggcctacggcgccggctgggaagagcggatcacggtgctgaaggatgattccgtgaaaaatccggtattccgaccgctgaattatgtggaactgctcatgtataccgatctgcagcccgagaatggctatgtgtgggtaaatacggcctgcgcggagtattatgggaaggaatctgtgacggtggtagccccgccagcaggacaataaaggcttgtacttatcagtaaaattgattaaaataagattgctggttggaagtgcagggataaatacggaacagaataagagaagacgaagaggttaaaaagcatggagcttacaataaaaggaaaaacatttcatatctggaacaaaaaacggattctgtatacgatctgttttttcctgctatgtctgatcgaccagagaaccaagaccggctccggcttagacggtgccattgaggccttccgcaacctgaccggtgtagtaatggcagtcattatcttttcacattacaaatggaaagaaatcgttgcccgaaaatggtcatatctcgtctggacagtgattggagtggcagtcggagcggcttatgtgatgctcggacagccgttacaatattattggaatggccgttttgtggcagcactggatatcctgctgttcggctatgttatgattcatacttttatcgcagctgttatcgaaaaaaagcttccggaaataaataaaaaatttctgatcttttgggtcgtaatgatgttgctgatgatcttctcaagaagcaattatatctggccattttgctatctggtaatgtttggctgcttatacctgacagactttacaaaagaagaacaggaagatctgtttcaaggatgtttaaacggcattcttttgggattttttgtatttcaggcatattgctgcatgttcagaccatatgacgaaatacgttataagggaatctataataacagcaatattgccgttaccttttatcttgttgtactgggcgcggtatttaccaaaatattatatgtcactaaggagaagaaacataaggcatggcgtatcttttactggctgggagccggtgtgctgtatgcttttgtatttatgagtatcggaagaactgcctgggtagtatctttcctcatgggattggtgtttttggcatggtattgtatttacacagggaaaaaagtattcttaagaagtggaatgctcctgctgttgtgtgcatgccttatgcttccggtcacctatggtctcgtgcgctatatccctccggttttccatcatccggtatggttttggggagaatggaatgaaggtaaagtacattcgtgggatgcatgggactccggaaaatatacggattttacacaactgataggagaagcattgggcagagttgcagagatcacagacaggtatgcagaagccaatcctttgatcatacatgccaaggcggcggaacagaaggatcagcggtgggaaaatgcagtattcaaaatggcagagatagatccgatcctggtgagaaagacaatatattcacactatttaagcaatttgaacctgacagggcatagaacagacgaacagggatttcaactgtcgccgtatttctgggtggggcatgcgcataatattttcctacaatatgcaacggatttcggaatccccatggcgatatgctttattatattgaatgcctggggcattgtcgttttggtgaaaaacatcatatgtaataaatccatatccgcggcaggatttctctttatgatgatggtgtcgttattgtttggaatgttagagtacgcatggggaacaggatcgattaccgtcattctgctttttatggcatggagagaagcaatgattttgagtaaataagaaggtagaaaatgaaacagaccagagattttttgaggattccggtgaatagaataattgcattgattttggtggacatcatgtctatcgttattgcagcttttggagcattatatgttcgatttgacttcagttttgcaggaattccacccgtttatatagaaaaatttgaacatgtgattcttccgaatatcattatcacattacttttctttacactatggaaactgtataagagcgtatggcgatatgcaagtgcaaacgaattgttaaacattatttttgcaacatcatgtgcagcggttgcgcagacattgtactgccatatattcggctggaatatgccgcgaagctattatgtgatatactggtttattcttacggtgttaacttgcggtatccggtttggatacaggatattgcgcctgcttaacagcaagagagacagtttattcggaaaagagaaaaaagtgaatgtcatggtgattggtgccggagctgcgggaaatatgatcctgaaagaaatagaaagcagccggtatctgaatctgcaggcaaaatgtattattgatgaccagcccggatgccatggaaaactgatccgtggtattcccattgtgggcggcagggacaagattctggatgccgcacagcaatacggagtggatgaaatcatatttgccataccgtcagcaaatgtacagaccagaaaggaaatactggatatctgcaaagaaaccggatgcaaattgcgcactttgccgggagtataccagctgatcaacggagatgtatcggtgtcaaagctgaaagaggtagaaatcgaagatctactgggcagggaaccgattgagattaatacaaaagaagtattcgattacgtcagcggtaagactgttctggtaacaggcggtggcggatctatcggcagcgaattatgcagacagatcgcttcccaccatcccaaacgcctgatcattgtagatatatatgagaacaatgcttatgatatccaacaagaactgttgagcaagcatccgacactggatctgcaggtactgattgcttctgtgcgtaatacgaacaggatcaatacgatattcgaggaattccggccggatatcgtatatcatgctgcagcacacaagcatgttccgctgatggaagtaagccccaacgaagcgattaaaaataatgtaatgggaacttataagacggctctggcagcagatcattacggaacagagagatttgtactgatatctacagacaaagcagtgaatcctaccaatgtaatgggagcatcgaagagaatctgcgagatgatcatccagatgatgaaccagagatcgacgaccaattttgtagctgtaagattcggcaatgtgcttgggagtaacggaagtgttatccctttatttaaaaagcagattgcagaaggaggaccggtaactgtcacagatccggaaatcacaagatattttatgacgatcccggaagcggtatccctggtattacaggcgggagcttatgcaagaggcggagaaatctttgtgctgaatatgggaaaaccggttaaaatcctagatctggcgaccaacctgatcaagctgtcaggctataaagtaggcgaggatatagaaatcaagtttacgggactcagacccggagaaaaaatgtacgaagaattactgatggatgaagagggcctgaagaagactgcaaacaggatgatcttcatcggaaagcctctggagtatgatacagagatcttctctgaacagcttgaacaactgatcctggaagcacagcaggagagcaaagatatccggcacagtattaaaaatattgtagatacttatcaatatgatatgtaaagaaagggttccgtatgtatcctgtgatcaagaaaatattagacagactgcttgcacttgtgggattatgtatattatcaccggttttcctgatccttgttgcggcaatcaaactggattccaaaggaccggttctgttccggcaaaaaagagtgggaatcaacaaaacatattttaacattttgaaattccgtacgatgaaaatcgatacgccaaaggatatgcctacacatctgttgaaggatccacagcaatatatcaccaaagtaggtggattcctgcgcaagaccagtctggatgaattgccacagatcatcaatatcctgaaaggagatatggctatcgtcggacctagacccgcactgtggaaccagtatgatctcattgaagaacgtgacaaatacggcgccaacgatattctacccggactgaccggttgggcacagatcaatggccgcgacgaactcccgattgcagtaaaggcaagactggacggggaatatgtcaaacgcatgggatttttaatggatgtacgctgcattctgggaacggtgatctctgtagtaaaacaggaaggaatcgtagaaggcggaacaggagaactggagagacaaaatgaagagagtgctgatcaccggagccaatagttatatcggtacaagctttgcaaattgggtgatggatcattgcccacagatcgtgtgcgataccctggatctgcatggagaaaactggagacattatgatttttccgggtatgatgcagtatttcacgtagcgggaattgcgcatgcagatgtcagcaaagcaacggaggaagtgcggaagagatactatgagatcaacacagatctggcaattgcctgtgcagaacacgcaaaagccggcggtgtaagacaattcctctatatgagcagtatgatcgtatacggtgagagcggagggatcggtacgacaaaatgtatccatgcggatacagtccctgcaccggcgaatttctacggcgacagcaaattgcaggcagagataggactgcaaaaactagaaacaccggatttcggcatcgtaatattacgcccacccatgatctacggaaaaggatctaaggggaattatccactattggcaaaaatggcgaaaaaattcccaatattcccccgggaaaaaaacgaaagaagcatgctgtatataggaaacctctgcaaatttgtcagcctgatgatcttaaatgaagaaagaggcattttttatccacagaatacagaatatgtatgtacttccgatctggtaaaacaaattgcgaaggtgtccggcagaaaaatccataccgtgggtatctttcatccgatattgcggattttgggaaaaatcggagggacaccggggaaaatggtgaataaagcattcggaaatatgacgtatgacagaaaaatgagtgaatataaagaagattattgtctctatgattttcagacatccatccgcctcaccgaggaaaaatgaatgaatgaaatagaaagacaggaattcgggagaggaaacgatcgatgaagaagatcagtattatgataccgtgctataatgaagtggagaatgtagaaccgatcagcgaagcggtagtagccatgttacaaaaggatctgagcaattatgactacgaaattttgtttattgataatgcatcgacagacggaaccagagacaaactggaagaaatatgcagccgcaacaagaaaatcaaagcaatcttcaatgtaacgaattttggacaatttaattccccattttacggaatgtgccagacctcaggagattgtaccgttgtcatgtgctgcgattttcaggatccggtggatatggttcctgtatttgtaagagaatgggaaaagggccacaaggttgtcagcggtatcaagagttccagcagagaaaaccgatttatctatttcctgcgtaccgtatattataagctgatccggaatatgtccgatgtaaaaatgatcgagcattttaccggatttggtctgtatgataagacttttatagccttgatgagacaattggacgatccgattcccttcctcagaggaattgtggcagaatacggcgaaggcttcaatatgacggagatcgaatatgaacagcccaaacggcgcgccggcaagacacataacaatttttataccctctatgatgccgcaatgctgagttttacctcctataccaagatcggattaagactggcaacttttctgggatttatctgttctttcctcagctttgtcgttgccattgtatatacagtgatgaaacttacccactggtataattttaatgccggatcggcgccgatcgtaatcggcgtattcctgctgggaggcttgcagctgttatttatcggactgatcggagaatatatattgaacattaatacacgagtgatacatcgccctatcgtggtagaggaacggcggattaattttgaggagtaatcagaagacatcatgaaaaaagcaattattacaggagtgacagggacgatcggaatggcactccttcaggaactgacagatcagggaatggaagtcctggcgatatgcagggaaggatctgaccgcaatgcacagattcctcacgatccgaagatcaaatgcatcgagtgttccatggacagattagaaaatattacggcagaagaatacggccggtacgatgtctgttaccatctggcatggatgggtacgacggggaagagccgcaatgatatgtatctgcagaaccggaatgtgcgctatgccctggatgcagtggaaatggctgcacggctcgggtgccatacgtttataggtgccggatctcaggcagaatacggacacgtgcagggaaaactgacaccggcgactgctacgaaccctgtgacaggatacggaattgccaagctgtgcgccggacaaatgaccagagaacgggcacatcaactgggaatgcgtcatatctgggtcagagtactcagtatctatggcccgtatgacggaaaacaaagcatggtaatgtcaggaatctatgatttgcttgccggaaaaataccgcagtataccaagggggagcagcagtgggactatctgtattcgggggatgccgcgagagcattccggatgctgggagagaaagagtcagagggagtgtactgcctgggaagcggtcaggtgagaccgttaaaagagtacatcgaactcattcgtaaaaacgtagatccccgggcaaaagtaaccttgggagcaattccttaccaggaaaatcaggtgatgtatttatgcgcagacatcagcaggctgacggcagagacaggatttgtcccggagacttcttttgaagaggggatccggaagaccatcggatggtgcagggagcaatgcagcttatgaatcaaaaaaaatatggaattctattatcctatgcatcgatcattgtaacgatattgacaggtctgttatatacaccggtgatgctgcgcctgctggggcagaatgaatacggaatctatcagctggcgaattctctggttacttatttaagtctgctaaatctgggcttaaacgggtcttacatcaagttctatatgcgagagaaagtaaaaggagacaaagagggtgtcgccggcgtaaacggaatgtttctgttgcttttttcggcaatctcaatattcgctgttatcggaggaacgattctggtatgcaatgtgcgattggtgggaaacagctatacggaagaagaaattgggctgatcagatatctgatgatattcatgatcatcaatatggcgtcctcctttcccaatgcattgtttcttgcttatatgtcggcgtgcgaggattttatattccagagagtcattacgttggcttccaatattctgatccctatcgtcaatatcccactgttgtacttcggttacggatctaaaggcatggtaacttttgctactgcgcttgcaatcgtaaggttcgcgattaatatatggtattgctttgcacgactgggaatccaattccgtttccggggattacaaaaaaatctcctaaaagaactggcgggatttacattctttatctttttaagtgatctggcggatcaattgaaccagaatgtagacagattcctgctcagcaggatcctgggagcggtaagcgttgcaatctatagtgtagcacattccatcaaaaattattttacagagatctcctgggcaattccgacggtatatataccacaggtcaataaaatggcagaaaaaggggatcgtatcggaaccaacagtgtgttcacggaaacagggagaatgtctaatgcagtactggcacctgttatcatagggtttatcttattcggccgcaagttcatctatctgtgggcgggagcagattattccgagtcctattatgtgacggtcattttactggtggcagggtatattccggcggtacagagtatcggagtgaacatacagaatgcaatgaatatgcatcgtacacgttcgatcgtctactttttggcatctgtgggaaatgtattactcagcatacaactgattccaagatatggcgtaacgggtaccgcgttgggaacattgatagcaatccttatgtgcaatggcttatttatgaatatttattatcagagaaaaatcggactggatattatcgaattctggaaacagattggaagtatgctgcttcccatgctgccggcggtcatctgtggtatattgcttaataagttcctgccgatgcaaagatggagtgtcttgtttgtgcaattgctgatttttgcaatcgtctatggtgtctttatgtggttcttcggtctgaacgaaacggaaaaggagataggcagaaaagccctgcgaaagataatgcggaagtccacccttttataaagggtggactttttgcgccatatagagtaaaatataatttgacttataatgcaaaatgaaagcagaacaatcgatgaaaaaggttattacttacggtactttcgatatgttccatgagggacattacaatctgttaaaacgagccaaggagttgggagattatctgatcgtggggattaccactgagcagtacgatgagacccggggaaagctaaatgtcgtagattccctgatcaccagaattgacaatgtacgtgctaccggattcgtggacgaagtggtcgtggaagatcacgtcggtcagaaggtagaggacatccagaagttcggtgtggatatcttcacggtaggatccgattggctggggaagttcgactatctgaaggaatattgtgaagtcgtctacctcgagagaacacggaatgtatcgtctaccatgaagagaatagaaggtcacccgatcattcatatcggtgtggtcggaaccggccgcatagcagggcggttcccggaagaggcaaagtatgtcagcggcgtcaccgtagccggagcatacaatccccatggagaacatgcgaaggaatatgccgatgcacatgaactatccttctgggaggatgattacgacagattcctggagaaggtggatgctgtctatattgcttctccacatgatacacactatgcctacaccaaggctgcattggaaaaaggaaagcatgtactctgcgagaaacccttcgtactacagaaatcccaggcagaggaactgttcgaaatcgcagaagagaatcactgcgtattgatggaagcgatcaagaccgcttattgtcccggattcaatcaggtcatcacggtggcaaaaagcggtgtcatcggtcagatcagagatgtggaagccagcttttcccgactgacaccacctgagatgagggaacgcagtgatgtaagatacggcggatcctttacagaattcggaagctataccttgcttcctatcgtgaaactaatgggaaaagaagtccgcgatgtcagatttgacagcatcaaggatgaaaacggagttgacctgtatacgaaggcagcgttttccttcgataatggactggccttatccaagacaggggtaggagtgaagacagaaggacagctcctgatcgcaggaacggccggctatatcctcgtgaagtcaccctggtggctgacacagggattcgaagtgcgatatgaggatgccaataaaaaggatgtgtactcttccagattcttaggaagaggactgcgttatgagatcagcgattttgtcagggctattctggggaatgggaatacatcctataaattgaccagaggcgaatctatcgttatggcagatatcatggaacgattccttgagacaagaaaatgtgagtaaacgagtatggaacatatagctgcaacagatcctaaggaaatgaaatatatcagaaaaagaaagaggcaggcatttcgtgaaagcttatgcttctatgcctgtagaatattccaggtcaggagaaatctgatcagcgtatgtacctttgagggaaaagggggattcggatgtaatcccaaaccgttggtggaagaacttcacaggcagaatccccaacttcggttcgtatggtttgtgaatgatatgaccaaagaattcccggattatatcaggaaagtgcccaatacgttatggagcagggcatactggctgtccaggtctaaggtatggatcgataactacagaaaaccctatggtacgaagaagagaaaaggacagtattatctgaatgtcaatcattacacgataggcataaaatgtaccgggttatggagaggagaaggattctctccgatggcatatctggtcagtaaaaatgattcggatatgatagatgatctggtaattgattcgaaatggtgcgaagaagtatctcctaagggactggtatacgagggagcctatcaaaatacgggtgcaccaagatgcgacgtcctgtatggagacagaagcgatgccaaaagcaggttccgcaaaaaacatcatattccggaagatgcaaaagtagtattgtttgcacctacgttcagagagggtgcaaaagatgggaaaagattcgtattttcagagatatggaccattgattttcagagattgttagataatctgcagaagaagtttggcggaacatggtatctgtgcgtgcgtgtgcatcctcagcttgcacctacatttcaggaatacaagaacgctgagatacaggatagaatcatagatgagagtcaggcagatgatatgtatgaaatcttagcagggatggatgcctatatctcggattattccagcgcctgtttcgaagcaggatttgcacatattccggtgttcctctatgcggatgatatccagaaatatgcaaaggacagaggagcgttgatgtggaatatagcgacggatccaagagaacgcatcggtaataataaaataatgactccgaattttgatgtgaagttaccgtttacacttgccagcgataacgaagaactggagaaagacattatggaattcaacaaggcaaaatatgataaagtattgaatgaatttcatgagaaggttggactggtgtttaacggacgggcaagtgaaaatttagcaaataaaataaatcaaattgtgggattgtaacggtgaaaaatggatattttatcaaaacgagttataatggagagcgaaacaaataaaaaaaagcattgctttgatattatatttgaatgggaagatattattgcagagggattaggttgtaagatttattcgcgaagcaatttcgaatttaagtatgataatttttgtagaaaaatatataaaagaatccatattccattttacagacttttcaatttgtttgataaaaaacgaagaaacaaattactaatgttcgatgcgagtacgaaacaacaagatggaatatataatagtcctaagtatgtcccttgcttaattgattattttttggatgaaaagatgtatcctaattttctgaaggcttatagtaaaaataaacttgtattggtttctaacaaagaggtatatgaatatttatctgcaaagaattgtccgataaaagtggaatactttcctttatcattaccggattattacaaaacaggtgaaagatataaaaaggaatatgatttaattattgcaggacgaattaatccgttattattggattatgttaataggtatgaatatgagcatccagatctgaaaatattaaaacggaaatatgaggatggacattttaaatactatttatcttcaaatggacaagaaataagtgttggagatacaagagaacaatatacagaattacttagaaaatcaaaaattgcattatatacgacaccaggaatggacggaacgagaccggatgcgaatgggtggaatcaggtgactcccagattcttggaggagattgcagcacaatgccatattattgccaggtatcctacgaatccagatactgattggtattgtatgaatgaaatatgccataatattgagtcttatgaagattttgaaaacacaatggaaaagtatctgataacagatattgatatagatttatacaatagttatttggaaaggcattatacaagcaaaagagtagaaatattaaaagaaattataaaacgtaataatatcaggtaagtgcattgctatgtttgaggtcgcttacaataataggagagaaagtcagagatatggagaagtataaatatctaattttgggagcaggaccagccggattaacgtttgctaatttattattacaaaatggagaagaatcatttctggtaatagaaaaagaaaatgaagccggtggtttatgcagaagtcatgaagttgacggtgctccgttggatataggtggaggtcatttcttagacgttagacgacctgatgttaatgagtttttgtttagatttatgtctgaaaatgagtggaatttatttgttagaaactccaaaataaaactgaaagataaaatgattgatcatccgatagaagcaaatatatggcaattgcctattgatgaacagataaaatatttaacatcaattgcaaaggctggatgcactagggggggaaataaaccagaaaaatttgttgattggattctatggaaattgggcacggaaatcaccaatgaatatatgattccatataatactaaaatgttttcaaaaaatctaaatgaattgggaacgtattggttggataaattacccgatgtttcttttgaaaatacattgagaagttgtcttgaacataaagcgtatgggatacagccgggacatgctcaattctattatccgaaaaaatatggatatggagaaatttggaaacgaatggcagatacattgggagaacatattgcgtataatattcaagttaaaggtatagaatttggaaataatattgtttttgcaaatgatggcagaaggattaagggcgaaaaagtcataacaacgattccttggaaagaattagaaactttagacaatatgcccaatgaactgtgcaatgaaataaagaaattgaaatatagttctttatatataaaatattataaagagaatattgattctgatgcgcattggatatattatcctgatctgacattagactatcatcgtatattaataagacataatttttgccctagaagtagagggtattggacggaaacgaacgcagaacgctttgacattagcaattgggatgatagcacgttctataatgagtatgcatatccgctcaatacaatagataaaccgcgtataatggctgagataataggctattctacaaaaagaaatgtttttccactgggaagatggggagaacatcaacattataattccgatttaactgtctataaagcaatgaaattgtttgatgaaatttgtgggtgaggaatagcataggagaaatgttcttatggataaaatatatttgtttggtgccgggaaaaatggacaaaatgcgattgatttctttggaaaggaaaatattatcgctattattgataatagtgttaaccaaattggaagaaaaataaatgatgtattggttatatcattatctaattgcttgaaaaattatgatgatgaagtaatagctattacatctgtgtattatgccaaagagataagagaacagctatatgatgccggaattacaaatatatttacttgtcctttttttgataaagatacattaactcctattagtataataaacaattattgtctaagtaaatataataaaatagttatagaaataagtaatcctatattaactcggatagcagatgaactgataaaaagaaattataagaaagaaaatatagaagcaacgagttttgataaattatcaattgttgacagcgagttaaaggacaaacaagtaatcttaacagcacaaaaatataacttcaaaaatgaaatatgtgtttttgataaaaatgtaaaatataaggattttttatatttaaaaaaatataagaatgcctacgctggcaaaaaatgttttattattggaaatggaccatctcttaaggcatgtgatttagagattataaacaaagaaggaattatatcttttgcaagcaatggtatatataaaatatataaggaaacatcatggagacccaaatattatttttatggagatgtagaagcttttaagagagcgaataatctacaaccagaccaaatatattttatgtcagatttatttaaagatatcgttgggggagaaagcaatattaatttctttcatcatatttttaaactgaatgaggacggctctgctcttttttcaaatgatattgtaaatggtgtatccggtggaagaactattacatatgtaatgttacaatttgcaatatacatgggatttaaggaagtatatctcttaggtgtagacttctcttggggcgaacacggtgaaaatacacatttttgcaacgattatgttgatccagaatatgagcagagaataaaggaaaatgttatgcataaaaatgaactgataaaaaactatgagtgtgctaatagatttgccaaagagcatggagtaaaaatatataatgctacaagaggtggatatctagaagtgtttgaaagaatcaattttgaatcggtttttgataaaaattgaaaatgtagatttagagataagacacaaaatgcgagcattttaggaaattatgttatcacaataagaaactcataataaagcgcgtatattataccattaggagattataaagaaaaaataggtttaggtaaacgttatattatgctttacacctgagcaaagcgaaaggacgggaagatagaaatgaagattaaagctttagtagcagttcgatcaggctctcagagagtacaaaacaaaaacattagaccttttgcaggcagcaatttgttagaaattaaactattgcaattgaagagaattaaaaaccttgacggagtaattgttaattccaatgatgattatatgcttgaagtagctagaacattaggctgcgagacggtaaaaagagaacaatattatgcatccaatgaggtaagcatgtcggaagtgtataaaaatatggcggagaactttaatggtgatattattgtatataccaatgtcaccaacccacttcttaaggatgagaccatagaaaaagctattgatacgtatttaatgagatcagaagattatgattcacttaattcggcgcacttgataaaggagtttatgtttgaaaatggtaaacctattaactatgatttgagtagacaaccgagaagtcaggatcttccggatatatatgcattgaactttgctattaatatcattgaaagaagtaagatgatagaatgcaagaatgttgtaggtacacacccattaatatgggggatagacgaagttgaggctacagatatagataatcctattgattttgagttcgctgagtatgtttatggtcagatccaaaaaggaaaataaatgaattttaaatttacaatcataacagtatgctataattccataaaacaactaaaaaagactgtaaaaagtgtacaaatgcagcaatttgagaattatgaatatatcatagtagatggtgaatcgaatgatgggactagagaatatcttgctgaggtagaaataaaatgtgagttacagtatatcagagagccagataccggtctttatgatgcaatgaataaagcaataagacacagcaagggtgaatttctctattttttgaatgctggggatacttttattgatgaaatggtcttggaaactcttagcaaggtttgcaatatgccaaatacagtttattatggtacttctaaggcaatatatgctgacggtacggtgagaagcaataggatatataccagattatacaaaaagattaaatatgaagtatttaatggaagaatgcctaaccatcaagctatcgtagcacataagaattgttttcaaaataattattttgatacgacatatgaattgggagcagattttaagtggtttgctatatgcgttaaaagaaaaatgaaaatagaaaaaatcgatgtgtgtattgcaaattttgaaattggaggtaagagctcgcgcccccaaggaagacggaagatgttggaggaatatgaatgtattttgaaaaaattatttcctttggaatatcctattttcgaaattaaaaatttgccaaatataagaaatgaaaaaaacaaatatatgagtttgtttagtgttttggagcaatggatggcagcaaaacaaaatgggaaaagattggatttatatttgacaaataagggatatagaacagtagcgatttatggaatgagtgttttgggaaatctattatacaatgaattaaaagatagttctatcaaggtcttgtgcggtattgataggaatgctcatgatatgtcctttgattttgaggtttataatttggaggaatttaaagaacatgaaatgaaaaacgtagacttagttattgtgtctgcaattatttctaaaaaccaagttaaggaaataactgataaaattgtgtgtgacgtaattactatagatgatattgtatatggtatatttgaggaataatgtaaacaatccataggttgtccccacggttaaacgatatgaatatagctttttagaaaaattgttttgagttttgtaaatcaatattcttgaaggtaaaaataagtgcaagaaaaaatataactgtcgctatgtttcaaaaaatgagatataataatctacagtattatgctgcatccaaaatcaactttttcaggggtgattcaggtggtaatggaaagaaggtaagaatgctgcatacaggaaggagttcttgacgataaattgaatttagaatatttatcagctataaaagtatctgtgaaagataaatcaagattctagaaacgctcgataatatctcgtgtagagtgggcaagggcgtcagaatcaggataatatttacgaagattagtaacaacaaactgtggtagtcagcatgactgccacagttaacaggtgacataaaaaatcgcctcaaatcgaaaaatatctgccgccgtaatcggaggtccttattgatcaataggcgcggaacgcagcatttttcaatgaagttgtcatgtgtttttggcaaaaaaaagtgggggattttaataaaaaaggaatttgaaagtcttgtatttactggcttagagattccgagagattataataataaaaaagaggagcagatatgaaatataaagttggttattgtgcaggagtatatgatttatttcatattggtcatgtgaatttattcaaaagggctaaggaagcatcggagtatcttattgttggagttttgacggatgagttggttgtacattttaaaaaaaatccaccatatattccgtttgaagaaagaatacagatggtagcagcatgccggtatgtggacgaagcagtacctgttacgtttgatacgataggaaaactagatgcatgggataagtatcattatggtgcatttttctcaggagatgattattcaggaaatcctgtatggatggaagagaagagactactcaatgaaagaggatcagatgtaattttctttccgtatactcagacaacaagttcgacaaagataaagcaggctatacaggcacaattaaacaaatagcgggggctaaagaaaaatgaacattggtttgttatatccaacaagagaaagaaacacgacaggtgtaagaaacttgactaaaggaacaataatagagacacttaaacaggatagagaaaataattatttctttacagatgatacatattttgatggtgaatataagccaatatccaacataaagtggggaggttatgaggccgaatgtgaaagatatgattttatgtgctattgcaaggacatagacttaatacattcatattggaatacttttgaacttatgcagtacaagtgtaagaagattattacaattcatgatttaataccgctcattcatcccgaatggcatacattacacgattattttgatactcaggtaagaagaactgtagcaatggcggatttggttataactaattcggaatatactaaaagtgatgtgataaagtattttaatgcagcaccggaaaaggtaaaaccggtttatcccggacttttacatacattggattttaaacatgataacaaggaagtcctccataaatttaatatcaaaggtgagtatgtgatgtctgtaagcaccattgagccaaggaaaaatctgagaggattattaaatggatttatttcatttaagaaggcacatgaaaagtcagaccttaagcttgtgcttgtaggagggataggttgggacaaggagttcgaaagctacataaatgggttggacgattatagagatagtataatattaaccggatttgttactgatgaagaactatcggcattgtataaatatgctttggcagttgcctatgtttcgttttatgagggattcgggctgcctatattggaagcgttgacggcgggcaaggctgtcatatcatcagatactacatcaatgccagaagttggcggaaacgcagtgtgctattgtaatccttataaagtagattcaatagaagcagcttttgaacaggtagtatataatgactcatacagaaaagaattagaaagtatggcaagagctcaggcgagcagattttcgtatgaaaaagccgcaaaagagactattgctatatataatgcaatctcatgaatgtggtattatggtaaggtctcatgatagagtgcgcaccaccaacgattatcattgtagactggatcaaaataagtactctgagtgaaaaaactccggcaacatccagctgataaacaattcagataacggtagcggcaatacactccagttaggtggtcaagctacaggataaaatcaaaagtccatggtatctgaattgtattggatcacgaaattaaaagaaaggaaacgagtgataattaacttcctaattatcacacaaggaatataatggataaccaaagaaaaaaaatatcggagttttcagaattcctcaatgaggaagtaatgggaactgtagagcagaatctttcttttttggatattaagggatttagaaaaattttagtttttcaatcgacagccgtatggatagttgatggtgttattgaacaattattgcaaaatgattcaaaagtaaagattattgttttgggacgcgatgattgcaggtatatgcaggacaaatatgaaaatagtgtggaatggcttgaacacaataaaaattttgatgatgatgatatagagaatgtgaagcaaatagtaaatgaatatgatgttgatgctttattattctttaataattttgtgaattgtgttgatttctcgaacgtagaacatgtagcaatgtttgttgaaaagcagatccctgtttacagctattcgtatgttcagagagaatttaataggcataataatattgccaagcatatttatggagagattctatataaagatttgctggagtggtataaaacaataagatagaagagaggcgggggaagcacatatgaaaaagttattatatgtaggacacaactatcacctaaaaaccaagtcaactaagtttttaatggagatgtttgaagaaaactacgaggtaagctatgtatcctttgatccctataagaaagagtatgtaggaattgaggaagcacgtgggcaggaattcgacgttctgttggtgtttcagatacagttaactgaagattttttaacaaggaatttcaggtttaaacagggtgtatttttcccaatgtatgattcgattgctactaatccggggaatccgtggcgggagtacagacattttaagattattaatttcagccgtacattgcatgaaatgttaataaaaaaaggatataaatcatattacatacaatattttccggaacctttcaatataaaaaatgaaggtaacatcaaatctatattctactggcagagaatggaaaaaatcaacataaatgttgtaaataaactgtttgagaatatggaaatagatcatatacatcttcataaggcaatggacccgatgcagtcgtttataaagccagatgaagagacggagaagaagattacttattctgagtggtttgatactgcagatgaaatgcgtagtattatgcaggagtcagcattctatattgcaccgagacagtatgaaggaattggcatgagcttccttgaggccatggcaatgggaagatgtgtggttgcaccggattatcctacgatgaatgaatatattaaagacggcgagaacggtatcctgtataatttggacgatataaaaccggttaccattgatgatgtacgcagaattcagaaaaacgcatataactatattacaaatggttataatgaatggacgagcagaaagcaagaaatactcaaatggattgaagagaaagacgagaagccgcttgtaacagttgtaacggttgtaagaaatgcgattagggatggaagacaggaaatgctcgagcagtgtattgcatctgtcaggagtcagagatatccaaatattgaacatttagttatggatggagcttctgatgatggtacaacggatatgcttgatagatatcagaaattaggatggcttaagtattacagtgaacccgattcaggtatgtatgaagcaatgaataagggcataagaaaggcaaatggtaagtacattgtatttttaaatactgatgattattttcacaatgctgatgcaattgaggagtcagtttattctcttgagaatagtaaagcggatttttcatttgcatcgaacagaatacttaaggaaaatggtgtatgtgacacaattagaagaccggagattggcagctttgttgcacagatgccgttttgccatcagacaatgttcacgagtaaagaagctcttgttaaagttgggatgttcaatgaagaatataaaagttctgctgactatgatctcgtattaagaatgatcttaggtggatacaagtatgttgaggttgaatcggatatagtcacatacagaaatggtggtgtatcggagagcgtagaacagcgctctaatgaggaaaaattcaatattttccagaagttatatgcaccttattacaatgtgtctgagactttcgcaaaattgcttgcgggaagaatatgtccaatagaattttgcgagaatcttatcaagtcagttcctgagaaacttggaaatgaaatccgtggtgccataatcagaactgatgaagagaatggaaagtattatttcccattagagaggatggaaacattgggttatgaacttaaagacagtacgccaagaagcggtcaggttgataagtatctcagcattattgagaaaaaagatgcaagaattgataagttcgtaaaatattttggattacttgacagatggctgtggcttaagcttcagaataagaatataaagacttatttcgaaaaagagaattatcattcgatagctatatatggcattggggagataggaaacagattattcgaagagttgacaagaacatctgatatagaaattaaatatgcaatagacagcatagacgataaggtgcattctgtacttaaagtatatagtcagaatgatgaattgccacaggttgatgttatcgttgtgacagtggattatatattcgagcagattaaggagaaacttgccaaaaagacggattgccctattatatctatagataatgttgtatttaatatagagtaaaggagagatgatgaaatcaaaagtaacaattgtattagtaaattataatgacagtcggtatatggaagaatttttcgacagcatacatcagcagaactatgaaaatattgatgttgtgcttgtagataacgcatcagaggataattcgttaatttggttaaagaataatgaaccaaaggcaacgattattgcacttgatgaaaatgttggatttggtcaaggttgtaatatcggtgcaaagtgggctatagacaacggggctgaatatatattgttacttaatattgatacagtacttaaacctgatttggtaagtaagcttgtggaagcggcagatagcactactgtaacaacggcattgacttattgtggtgcgcgtgatgcacaggaagtatggtattcgggcggcgagattgattatgagacagctaacacatttcaaaaaatgtataaaacagatattgcagaagtaaaagaggtcgactttatatcaggatgctgtatgatgatacaccgtgatatttttgccaaggtgggttattttaaaaaagagtattatctgtactatgaagatacagatttttgtgttcgattgaggcagcataatgttaaaatgaagtacatttcatctacgagcctgtggcataaggtcgggggaagcagcgttggcgagaatgaaacaagttgtagcacacagtattatgttacaagaaacagactcctttttgcagatgaacaggcggaatttttcaggcgcagtaatctgagtgtgattaaaagtattcttagagagagagctttttttgacggaaaacagaacgaaaaatatcaattgtatgtgcagactgctttcttggattatttcaaaggatattttggagaaggatattatggaaagagactgattaaagaacatttttatcttccgaatgatttttatgaaatagaagaagatggtttaaataagtggttttggtcaaagaatccaaaagcgagaatcatattggctaatgcaagaaagtgcgatgtcgtttacagagtgtcatttgaaattgcaaattgcaatgcagcactggggagtcaggtcgatattgatttgctgggagcacctaggaaaaaatatatggttcccggacatattgaatttaatataattgtcagagctgaaggatacagtgcagtttattttaattatcatggtactccgatgactgatattaagcagggaaatgaaagagaactatattttcaagtagtaaattttaaagcaagagagtgcaaaaaagagtatttcttagattatcagttcttggaggaagaaggaactgatgataaaatcaattggtgtaccaagaaaaattcagcaatgtatgtacttaatggcgataaggaaaataaagttcttgaattaaatatgcaggctgaaagctttgataattgtgttcatcgtttaaatatatataatgaatctggaagggcatattgtcaacatatgccgcataacataacgataccaatcgaattgaaggcgaattctgccagcagatttacgcttaagacggatgcgcctgtcattaatgagggcgaacgtaaattatgctttaagctcaaaaatatcagtgttgctgaaacattacagcccatttattttggaagtcatttttaccctgaagaaacagatggaataagcagatggcgttggtgttctttgaatgcggaaaagttatatattcctaacaatacagaaaaatcggacttatgctatcttacatttacagttggctcgtatacacagcatcagaaagatataattgtcagagttaatggaaaagcagcatggaaaggcagcacaagtgaaaaatgctgtgtgttattaaaattatgtgctaaaactgttactgagataagtatagagacagaagtggaaccttggacggagggtgaaagatgtatttgttttagaatagacaatatagatcttcagagaaattcggataattatgtatttgatggaaatttttacgaaattgagacaaataatgagagctggtggagatggtctaagaataaaacaagctgtgtttatcttatcaatcgaaatgacataaagaacacactaaaagtaagtctgcgactattgccgcttaatgctaaaaatatgggacgtaaatatgatattctgctgaacaaaaaggtatgttatagtggtaaaataggtgatgaggcgggctttctggtgaaactgcctgcagacagtatttctgaactgcagataacaagcaattgtgaaccggaagttgatggagacaggcatttagcttattgcgtgcacaattttaatatcgaagaaccttgtgatggcttcaccttcgaaatagcagaatacgaaataccaaaggaaggaaattagcagattatgaaatatgaggtgaacaacgaagatacactattagaacttgcatatcaatatgacaatataagttttgatatatttgatactcttattatgcgtaaaacgttgtttccggaggatgtatttcagattatcgagaaaaaggtatgtggcaaatcggacagatttgccacatttcgtaaaagagcaattcttgaaaatgatactcctaatccaaacatttatgaaatttatgaaaagtatgctgaacttacaggaatatcagctgatgtaaataaagagatcttaaatttagagttagatatagaaaaagctgtgctaatcaaacgtgaaagtatgtgtcgtctgttgcatgagctaaaagaaaaaggaaaaaaagtgtatctcataacagatatgtatcttcctaaaagctttattgaaaagatactgtatagtctgggtataacagaatatgatgatatttttgtttcctgcgaatacagaaccttgaaatgcgaagaattgtttaaaaagtataaagagaagtatccggatggttcatatcttcacataggagataacatgtattcggacatagagtgtgctgagaataatggcatagattcgctacacattgatagtgccatcaccagatttagaaattcagagtatgcgccgcttgagcagatggcagccggaataacagaacgtacaatactgggaatgtttatctctaaactttataacagtccgcttggtgaattggaaatatataacatgaacattttggcagaactttttgtcgcaccgattgcctatggcatggtaaatcgtttatttcaggtgcagaagaaagagaagtttgataaggtgctttttgcagcaagagacggatttatcttaaaagaaatatatgagctttgcggtggcaacaatggaatttatttttacacatcaagaaaggcagtgacaataacagatattgatacagatcataaaatgttgtggctggcgaatttgggatttgaatacaaagatgctgatattctgtcaaaagtatttttgctggagaaaaataacgagtacaatgataagatgtctttaaatgataatattttaaaacacagagacgaaattatagatagatcaaaagtactgaggcaaaattatataaaatatattgaaaataaaggtataaatggtggaagatatttgtttgttgatttggtgtcttcgggtacttgtcagttgtatttggataaaataataaatggagagttggaaggcttctatttgtgtaagcttaataccattgaaacagcgaaaaatgaattacattgttattcggtatttccgaaatgtgaaataggagataccaaatatgcattttataaggaatattttcttttggaaagtattttgacgtcattagagccatctttggattatattgatgaatcggggcagcctgtgttcatggtggagacaagaagcgatgccgaacggagcaatataaaaaagattcatgagtctatcaagttatatgcccgggatttggacggtttatgtggtcattctgatgaagcagatgtaatgtttatcgacaaaatatttgatatatatataaaaaaaggaagtaaatgtgatattaatgtaagacttaaagatgactggatgaatagggacgtaagtattaacagacttaattaggcaggtaaacaatggctgaagtgtataataattgtgcagatagtgatattaaaaaatatatagatgagggaaaagacgtaaagcatgtgttgcatgaggatggaaagtgggaagtctttcgtaattttgcaccgataagggaaggactgcttaattggtatgactttaatagagattcagagttacttgaattaggatgtgagtatggtgcattaaccgccttgtattgcagaaaatgtaagtatgtagtttcggttgacagtgaagaagcgcatgcggaatatacgaagaaaagatatagtaatgtggataacctgacggtcatacatggaactgttgaacaacttgaacttgaaagactatttgattatattgttgtaatgccgtcttattatgatcatagcctgcggatggttttaggcagcataaaaaagtatctaaaagaaacaggaagtatgtttattgttgcagataattctcttggagtaaatgtaatgtcgggaaagacatacggcgatgaaccatttgcagaatttgaaaacacaggaaaatgttatatatcgaaagaggagcttcgggaattactcgaaaaagaaggttatacaaatacaaaatggttttatcctatgccggattatgttataccgcaggaaatatatacagatgagagcctgccgaatactctgcacacggacaggattgttgactgttatccatataaagatacgatgattgcgcaacctgcggaaattatgagaactgtcataaaaaataaagtgtttccacagatggccaactcatttattgttgaatgtaaacaaagcggggagccatgtgaggtaacatacgcagccttatcaacggacagagaaagaggagcagcgtatgcaacaaaaatatatggtgataagcgagttgtgaaagaaccgttatatgaagatggacagacaggtattaacagattatacaacaatgctgttaagcttgaacaaaggggaattcctgtaataaagcatcaattgtgtgacagcgtggttgagatgccgtttatacatgatgagacacttatgcagtttatgttaaggaataatgaaagacaagatattgtggagaaactcattgagcgggtatataactatataataatatcttccgtaagtgcgccgcctgaaaaaaatataatgctacattatgctcctgatattgattggggaataatacttagtgaggcatacttagatatgattccgtttaactgtttttataatggcactgagatggcatttttcgaccaggaattttgcgttgagaactgcccagctaagtatgtcgtattcagaatgctgcgttatgttgatctatcaatgaaaaatgcgggatttaactttgatttggacaggttaaaagtaagatatgaacttgaagaagtatggaattattgtatgcaggaagaagataaattcatatttaaaaaccgaaatcatgagatgttagagcatttttacggatggacttcacttttaaaagatgaaatacatgaaaacatcttgagactgcagcgaaaagatacggagacaaaggatgtgtcagatacagagagtacacaggtagaaggactgtggctatcctttccgagtatgttttatgctcatgaatcagataattgtggatactggcgctggtgtaataacaagaatgcagaagttattattagaaataaaaaggatacgccaatcaaggtggaaattgagtttgaaatagtctttcccaatgagaatgaacataaggcaatgtatatatgtgtggatgataattattgggcagaggtactgacaccggcgaagattgtcatcccgatagaagttacgggaatgtctgatgttaaaatcaatctgaagggaaatctaaaagagtaccattttgacggagatgcaagaacgcttttatttcaggttagaaactataatgttagaacagaaccgcgatatgttgatgatacaataacagaagttaggcatattcagcttaagcttcttaagctggtcgacacagtgtgcagtaaacacggtttacaatattttgcgatatatggtacattattgggggtggtaagaaatcaaggatatataccttgggatgacgacatagatattgctatgccaagaaaggattatgaagaatttctggacattgttcaaaaggaaaaagatattgattcatctgtatttttacaaaatatgcatacagataaagacatcttttttggtggatattccaagctgagagacagcaatagtaccgggatattgaaagtggactatggacatgggtgcaatcatggagtatggattgatatatttccattggataatcatatatcagatagcaaaaagtggaatagacagtataggcagataagacatattcagaagctgatgtattataaggtatataagcatgataaacagtgtaagggtgttgcgcagctgactttttttgaaaaactggtggcaggtgtatgcaagtgggatacactgtgtgtaaagcttgataaagtacttagaagatataatgaagtttcgtgtactgacgtgtcaattaattcaagaatgattgcggaaaaacgtatggttggtatggagggcagctgttttgaggattatgaactaagaagttttgaggggattaaggtgcgggtgccgatactgtataaggaatgtcttaatagactttatgggtataattatatgttatatcctgatgagacgttacgcagaccacatacggatgtctattacaacactgatgtaccatatcgtgaagagtgtttgcgatatagaaatgaaagttgggagaattgcaaataaaaagttttattaaagaaatgaaggacataaagtagcgttaatgtcaattggtgtaggtgatgccggattcagacaaaagagttcggctaagatgcgggaactgatagatgacgagaattgtactgttcttattgtatcacatgatatgaatacacttcgtaaattgtgcaatcgcatgttgtggatgtaggatggtgtaacacaggcgtatgcgatgtgaatgaggtcatcaaaaagtatgagatttgcatgggtgtaaatagtgaggatgaatagtaaaaaggtgagtactaaactagaagaaaataacataaattatcaatttaaattgttatatgcaattggaattgttatgatagtggcaaatcataccagtggcaatggcggaattagtttattttatgaactatttccagcggcatcatttgaaataggattatttgtttttacatcaggatatttttataaagaaaaatatgaagagaatatattaaaatatttcataaaaaaattaaaaacacttattttaccgctttatgcttggaattttgtttatgctctaattacacaaatattgcatgccgcagattttacgataggtggaaatattaatttcgaaaatctaattataattccaataactaatgggcatcaatttgtatataatttaggtagttggtttgttgccccattatttatggtagaaattttcaatgtatttttaagaagaacgttattaatcattagatgtagacataaagaagttgtatactgcgtgttgacattagtgtttggagttgctggcgtattattggcaagcaaagggtataacactaatgggtggttagtacttgtacgttttctttttttcataccattttatagtataggctttatgtacaaaaaaaggttggagcaatatgacaattgccccaattcgatatacttcagtttggttttagctattcaattaacgataatatttgtatgtggatatgctccacaatatgaaccggtgtggtgtaattttcctcaatttagtattttaccatatttaacagcgtttacaggaattgcattttggttaagaattgcaagaatattgactcctgtgattggttcatcaaagttagttaatattatagcagatagtacatattctataatggtaaatcacatgcttggatttatgttggtcaagttatttttttcattatgcaacagaattaattacaatatatttgctgattttgatagagccttatttaaaacagacatttggtatttctatagaataaaagggttatcacagacactgattatctatgtagtggtatcaattgcgatatgcatagtaatcaaaaaagcaattgacaatataaagagattactaataaagaaattcaatggcaatgaaaatatagtaatattgttggatatttttgtaatgattgcatgtttgattgtggcgcagataatttagaataaatgacaataacaagggagaattatgatatgattagaaaactgaaagataattgggatcttataatttttgtttatgtacacgttatgatatttgtatacttgataacaggtatgcagtatttcatgttagatttgccaacatcaatgataataaaaaaagaatatggtctcctggggattttttatttgccacagggaactggaaggtattggccgttagatccattttttaatgcacttgttacagctgtttttggaaataacattttatggcagtggattgtgcattatttactttttataattttaactattttggtatggagaaatacatttttgtgtatacaaagtagaaaaaaagcatttattgcagttgtcgcatgtatatgtgtaactccaatggctgagaatgtcttcacaataggaaaaccagaacttcttttatgtgtgatgtttcttttgtacataaatttggtgattaatatttttttattacaaaaaaataaaaaggtctattatgtacttttattttttatttcattgctcacatatatgtgtaaggaaacgtcgattattttaattccgataatttttttattggcaatatattttggaaattataaaaaaagacaatcttatgtggtattaggaataacgatatttacgtattttatatatttttgtataaaaaaatacataaatacttactatgatataacaccaacatcttatatttcatattcgcttgcggtatcgagaattgtagagactttaacttattattttaaatattcatgggatgtattcttggtaggagctttggcattgataggaaatgcagttttattctttagagaacgatatgataaaaacaaagcatttgcgctagttttatccattgcgggttggggatatattgcaggtatctgtttatggcagtttaaaaaaatttactatatatatccgacaattgtatttttctcaatagcgcttggaatgatagtgaatgaattaggtaaatggtatatatatatattattaagtgtaatatttttatatggtggttggaatggaattattatagctggtcagacaagagatacaagtattatattttctgagagtatgaattatattctttatgataataggataaaaaataaattgtatgtttacaattatccgccttttgatgaaccgccatatcaaatgaatttattgtttaaagttttggataaagacttaactgtatatggtataaaagatattgataaagtaatggattcacatactttggaattatatggatatacagtggaagattatgaggcattaaaaaagaaaatttctgtagaagagggaagttatatattatcttatgattttaaaagggatagttgggtgccaagccgtcgagtaaatccaatacacagtgtgtcagatatagaagaaacacatgatgaatatatgttagaacgtgtagctggtgatgaaatgtcaaagaaaagatttacatactcaggaataaagagtgagttatgtggatggactatatatagaattataggagataaaagatttatcactttgcaaacagattggacagactggttgggagttgataatactgaattagtggtagaaagtaaagactataaatatatcgttctagaaggagcatatgaatatgattttgataagttcgatattgtatgtaaaagtggcaataaggtaataccaagtgattttttaattgacaagtcattgaacaaatataaaattgtgataaatattgaaggattagatgccgatgaattgcaaattaaactaatgtgtgataattattttgtaccatcggacgcacttatttcagatgatactcgtaagttgacactgcgctatcctgaacagatatttttaacaaatggtttagattatacactgatggtggaggaatagaaatgagcaagctttcgataatagtaccggcatacaatgaggaaaaaagtataaacaaaacagcagaggtgatatcagggttaatggttaatgcgggtattgactatgaactattatttataaatgatggatcaaaagacaatacttggctggagattatgtggcaggcagagtcaaataaaaatattaaaggtgttagcttttcaagaaattttggtaaagaggcagcaatatttgcagggcttgataattgcatcggaaattgtgcagttgtaatagattgtgatttacagcatccaccagagaaaatagtagaaatgtataagttgtgggaagaaggatatgaagttgtagaaggggtaaagaattcaagaggaaatgagagtgccattcacaaatttgtagtaggtattttttataaaattatgagtaatattacgaatattgatatgaaaaatgcatcggattttaaattgatggacagaaaggttattgaaacattaaaaagtatgcctgaacgtaatacttttttcagagcattatcatcgtggtgtggttttaaaagtactaaattattttttgatgtcagggaacgcgaagagggagaatctaaatggtctacgaaatctttagttaaatatgcactaaataatattacatcattttcggtactgcctatgcagattgttactttttttggtgcgttcttttttttatttgcagtaatattgggaatacagtcaattgtatataaaataattggaaaagcattggaaggttttacaactgtaatatgtatagaattattagttggtagtatatgcatgataaatatgggaataatgggtgtctacattgccaaaatgtatgaggaaataaaagggcgaccacgttatattgctgcttcgaaagtaaacatagagcagaacgaaaataactaatttgtattatgcatgtaataaaaatatgattttaatatatacagggtgaaaaaatgttatacgatgaaaaaggttatgaagtaaaaatagaaatcagtccgacatataatccgtgtgcagcaggtgtgagtgatgacaagagagacttaggcgtcaatctacgatatatcggtgccgataagcctgaacatattgcagtattgtatgaaaaagacaagtatgttgtgagcagaatagaatacccgtattcggatgagtggaattaccaggcagctaacggagtatatccaccggagggtgaaggctcatggatgggaccagttaatacaatttatcttaaggattcaggtatatataacagtgggttgagattcacttattgcgttccggggcatttgataccattgaattctgtcatgaagatttacattaataatgaacaggtcaaagaaatacaattgactaaagaaggaatatatacagaatatattgatgtgagacaatgtggaaaaaaagaagaggaatatcttgatagggcacatcgaattttgaaaatccttttaagtgattttgacagggtctgcaaaaaatataagttacattattatcttatatgtggtagtttgttaggggctgtaagacatggagatttaataccatgggatgatgatgtggatattgctatgccacgaaaagattttgatatattgctcaatcatgccgccgaggagtggggagacggaaaggacattctttttcttaactacgatcagatgggcaaagggacatttcttgattttatgaccagaatagtatatatgaaagaggagatacctgttaatgtattcagaaagattgaaggcaagggtagaaaagatattcaaaatcatatgccgctagatatatatgttttggataatgcatcagacaatgaaagctttcataagtttcagaccaatgtcataacaggtctgtatggacttgcaatgggacatagagcatatataaatcctgatgattataaaaatcgtgatgtaaagacccagcgagtggttaaagcaatatcatccataggtaaaattattcctttgtcatggataatcggatggtatgaatgggttcgaaaatggaacaaaaacaaaaaatgcgaaaattattttgaatctaatgggtttatttattgtgtcccatggaagttcaaacaagagtggtttggcaaaggcaggacaataaagcttggagatatggaaatatcggcgccacaggatgttcaggcgtttttgaaaatgcattatagtgattatactcaatatccaccgataccggcacgaatgcctacacatagcattgaagcatcaggaattttttgaaaatatatagtgtttgttgattaaatcatttctaacgggtatttttatcatacaagaaacaaaaacaatatatcggaattaatcaagcagtaggaaagaccgtacttgtgagttggaaattaatgactataagaacatctttttttgacagatcaagattccaaaacttatcgagaatctgctaggtagaagacagagcagaagcagcattcggataatatttacgaagttaaggcaggacattcctgatagacggaatggtcaccaacgttaataggtttcaatgaaacacacatccaaatcaaaaagtctgtccagcgtgcaacttgaacaatataccttgttaatcaagaggcgtaaagcaccgcatttttagaggtaaatggcaagcactttttgaaaaaaggtggaggaataataaaaatggaatctctgaagctggataaatcaaggcttagagattccgagagtctattatagaattaaggagaaatcaaatgaaaaaagcattgattacaggaataaccggacaggatggaagttatttagctgaatttttactcgaaaaagggtatgaagtacatgggattgtgagaagagcatcattggctaatacagctaggatagattcattaattgaaaaaaacagcatcacactacatgatggagatttaacagatggaaatagtttataccatattatggctacggtaagaccagatgaaatatataatttagcggcacagtctcatgtccaaaacagctttagtgtaccaatttatacgggagatgtagatgcattgggtgtaacacgtatacttgacactgtacatacattggggatggataaatcctgtagaatatatcaggcgtctacatctgaactatatgggaaagtggaagaagtacctcaaaatgaaaatacaccgtttcatccttttagtccgtatgccgtggcaaaacaatatggtttttggatgatgaaggaatatagagaagcatatggacaatttgctgcaaatggaattctatttaatcatgaatctgagagaagaggagagacgtttgttacaagaaaaattactttagctgcagggagaattgcagaaggattacaggacaaattatatttaggaaatttggatagtcgtcgtgattggggatatgccaaggattatgttgagtgtatgtggttgattcttcaacaggaacaaccagatgactatgttatagctacaggagtgcaacatacagtacgcgagtttacgacattggcatttgaacatgtagggataaatgtagaatggattggaaaaggaataaatgaaaaaggaattaacaagaaaaatggtaagataattattgaggtaagcgaacaattttatcgcccgacagatgtagtagacttatggggagatccaactaaggcaaaaacaaaattgggttggaatcctcagaagaccagttatgaagagctggtaagaattatggcagaacatgactggaagctagctaaaaaagaaagactattaaaggataattaactatttattttagaaaggatgcgtttacacatcctttcttgtgttgggaggaataggaatggcagaggacttaaaagacaaaaaggcgttgataattggtgttgaggggtttgtgggaagctatttggttgactgtctccatgatgaatttaacatggaaatatatgcgactaagctaagaggtaaaaagtatgaaaattccaaggccaatatttatgatttagatataatggagaaacaggaaattgttaatttattatatgctatccgtccagactatatttttcatcttgcagcgcaaagttctgttagtgttgcatggaagaatccaactctgacaatagacgtaaatattaaggggagcattaaccttatggattcggttcgggaattattttataaacccagaatgattatgattggttctggagaagaatatggacatataagagatggggaagtgccaatttctgaagacactgtattgagacccggaaatgtatatgcggcaacaaaagcatgtcaaaatatgctgggaacaatatatgcacaggcttatgatattgatttgattttggttagagcatttaatcatattgggcccaagcaggcaccactatttgttgtatcagatttttgtaagcaggttgcagaaatagagcttgaattgagaccaccaattattgaagtgggaaatctaaatgccaaaagagattttactgatgtgcgggatgtagtaagagcatatgcttatttggctctttatggaaaaagtggggaaacatataatgtaggcagcggtcatgcggttgagattcaaagtattcttgaaaaaattgtaagctgttctgataaaaagattgaggtacgtgttgatcctaataaaattagacctgttgatgttcccattattgaagcagatattgataagatacagaatacaacaggatggcaaccggagataccaatagaaagaactctggaagaagttttaaattattggagaggagaattgaaaaaatgagtaataattattttaacaatgacaatcctttatcgttatcagatcgatttctttatacgccaagtgaattcgctagaaaaaatttgaattatattcaagagataggtaaattaaaaagtataaaaccacatataagtactcgtaaggaattagattcttttctgttttttatcatacaaaaaggatctggaacagttacggtgaatggtgtagattatcatgtcaatgaaggagatgttgtgtttcttaactgtcaggataattatcaacacattagtgatgaaaactcccaatgggagctgacttggatacattttaatggaattaatgctcaaccattttttgaattatataaagaaaagaatagtaataaaccatttagtagtgtacaagatacttcatattatactaatataatgaatcaaatgatcgaaaatagagattgcaaagatattgttatggaaatgaatatttctttgaaaattgtggaactattgacgaaattgatagaggatataatagagataagtcagcataaggaagagtttaattttataagaataagagaatatgtaaacgagcatttcactgagagcaatttatttgaaaaaatttgtaaacaatatagttacgatgaaattgttatcaatcaacaatataagaataaatttggtatagatttatgcgattatatattaaaccgtagatttacttacgcaaaggaattgttgagatttaccgtaaaaccaataagcgacgtgattagggaatcaggcatagataatgctgatttgtttagacatttatttattgaaaatgaggggatcacagctgaagaatataggaaaaagtggtctcaatggaatagggggtaaaaagagatgaatgctgtatttttattgtctgctgaatctggaaaacggctgtggctttgactaagggatatggggattatatgcaattaccctggccggcagctagaaaaccagaaaggatgaagaactccagagcagttgtgctggagtaatatgtgacaggtggagtttaatgacaaaaaggattattaatattttaaaatggagtatcaatattgcttttctgattggagtaatatgtgttgcagtttatccggtacacaatcaggatgttcatcttgtagtggatacttatgcaggcagtagaagcataacgcttacttatgcggaattaaatagtggcattactgaatttgagatggagtatccggattttgacaaagacagtttgaaagagataaggatatatagaagtattgctacagtgtgtgtagataagattacagcagataagttggactggcagttcagatatgaagatggaaaattgatatttggacaggatatctgcgaacaattattggaagattcaaagtcatatttttctgaacggattatattggcagaagtattattgattattgttgttgcattacaaattttactgaatgccatgaaagagaaaatggatcctgataatcacaataaccatggaccaatttacgaaaccaggagattttgcggagatatccgtaagtactggcaatatatggtgtttgctgcaaacgcagatttaaaagcagaagtggcaaattcgtatcttaacagattatggtggttgttggaacctttatttagtatgcttgtatatgtaattgtatttggacgagttatggggaattctattcagaattatgctacgtttattttttcagcacttttaatgtggaattattttaataagacaattatgtatagtgtgaaatgtgtgagaaacaatcgagatatcattacaaaagtatatgttccaaagcatgttttactgatttctaacatgattctcaacatgtttaaattatttttctcactcattattttggtaccgatgttgtttattttcaaagtacacattgggattggaatattatgggtgatcccggcgtatgtacttatgataaccatttcttttgcaggaggaatgatcctgcttcattatggagtatatgtggatgatttatcttatgcggtaggaattttgctacaaatgatgatgtttttatcagggatattttatgatacgatcacctcgcttccggtaccgttgaataatgttatgttgtgcctgaatccggtagctatgttcatagatgcaatgagaaatgcactattaaataatgttgttgctaatgtgccgcttgtgattttgtggtttattatttcactattatttatgtatgtgggcattcacattgtgtataagaacgaaaatggatatgtaaaggtggtataggacatgaaggaaatagcattagaggttaatcatgtaagtatagattacaaagatttgtcacatatgtcgttagcaaagagcctgagaaaagatggaattaccaaatcaaatgtggtacgagctgtaaatgatatttctttttctgtcaacaagggagaaattttaggtatcgtaggacgtaacggttctggtaaaactacccttctgcgatcggttgcaggtatttttcaaccagatgaaggaacgatagatacacatggaaacagagtatcattgatggcaatagggataggatttaatggaaataatacaggtcgtgagaacattttgaaatcaggaatgcttttgggctgtaaattagactatgtgaaagagcacatggatgaaatcattgatttctcggaattaggggattttattgacagaccggtcagaacatattcttcaggtatgtattccaaactttcgtttgcggtaacagctgtgcttgatacagatatcatgcttgtagatgaagtgttatccgtaggagatgaacgtttcagaaaaaagagctttaagaaaatggaagaattaatgatgtcagaccgtacggttttgattgtatcccatgctacagatactttaaagaaattctgcgataaaattttatggatcaatgatggacaatttgttaaattgggtgatacagaagaagtgttggccgaatatgatcggtctatgcagttgtaagtgaacttgttatgaggtaactgtttaaagaaaaaaatccaaaatcaatgatttagggtttgaaattataggaagggaaaatagccattagtagtaattctgcggaaaagaggtgtttcaacaatgatggatagtaaatgtattacttcgattgtgaattttgtaaagcaaactgattttgtagaatcatgtttactcaatgtagaagtccgaccaatagaatgtggaattgatgaagaaggaaaagcgagtcactgtgttcatatgattttatcggattcatttggtagaaaagctcaattatcggaagcatgggtggcttccaatcttcttttattttcagtatttgatggatacttagagaataaatacgcacttatggaaggggcttctttcaaaaatcattttgacaatattccagaaagaaactgccttgataaaatatgtaagaattgttatagagtatttaaaataattcgaaatggtattcaacataatctgagcaatgtggtacatgataaaaatggttattttattgattataccaacagaaacactcattataaactgaggataagtgctcagggtataagatatctgtatacgcttgttgtctatataattcaaaacagaatcgatgggttaggaaaagagtggtcgacaatcggtcattatgaagggatactatctgagttatataaccttttgctgcgagaaatacaggagctgaacgatgaaattggacaaaacgacttgcataatttatccgatgctatctgtgttagggcaatcgtaagatatccggtgattaatccaacaataattgaagagaatggtgagtttgttgtatttgctcatattgaaaataatggcacggatgacgaaagctcacctaagtattgttattcaacggattataaatacggagggtttcttctccctcaagaaataggcgtaataacaaaaggagagggaaaaacgctttcagaaagaatgaaaagtgcgacaataaaatttagaaaactagattgctgcacagatagatggaaagtgttgtagaagagcttgataatattgccagcgttttggatatagtatatatagaaaatatattagttatctttttcttggtgaaaagtagaagcattagtactcaaacataagtgcgcagtgcggaaaaagtcctgatcgatgcaggataccatgagtattatatatactggtataatagagagtggatgctatatgcaagccagacacagatatggagagaagcgtgtcagtgaaaaaatacaaaattttacaaaatacgagcgagttggtaaacgaaaaagcttgtatagcaagtaaaaatatgtctttagatatattaagaattgttgctgcactaatggttttaatggtgcatgtaggacaaaggacgggactgaataaatggacggatgttggggctaaaggggttccgttattttttattttaagcggttatttagctatggcatcgtgccatagaatttttagcatggatggcaccgtaaaagattactatataggacgtgcaaagcgtattttgccaatgtattattgggcattatttcttgactacatttacagtatatatatgtatcatagtcaaggatttaaccttactgaaatttttaacttttttcatggtccttgtggaatcaggtatattaggtatgtgtttttcctgcaatatgtattaccatcagataattttacatggtggaataatagatttgcgctatggtcaatgagtgcatttgctttcttttatatatgtgcgcctctgatttataaaatatttaataagttttggaagatttttggcgttacaatttttcttatgttagtaaactcatatatggtcaatataactttcaagctgttttcaaagataggaaatgtaagtggagccgatatgttggcaggcggggaaccgataaaccagctatgcattttcttgttaggatgtatggtttattttgttaaagatgagaagaacaggttcgcattgggaatggcatgtttggtagtagccgtgctgacttccatgcaattttttggatatgaattgatttttactgcttgtttaatatttgcattggctgttccgatgacaaatataaatgcaatagcaaaaaagattttgacatatttgagcaaatttacattttgtttatatttagtgcatcctattattatagaaaatgtttcaaattttgtgattggaaaaatgggattgctttcgtggagagcttttttattgatttatattgtttgcattattttttgcgcgattgcatttgaaatatatacatacttagataaaagagtgaaaatatttattacgaaaaaaattgaaacacggttttaaaatacaatatcttatgaatgaaagaggtaaatcatgattacagattcaagaattgcctggggggatcaattaggagcacagttaacgactttagcaaacttattttatgtagcggaagaaaatgaacaacagttagtattatgggaggaattaaaaaattataggagaggatatcaatttttagatgtatttgacattgatgatatcgaaatcataaaaaggtcaggaaaactaaaaagtaatatggtttcaagatattgcagccgctccgggaaaaaagataaaaactggcgaaaaacgatgcaacgattctataataataagatcatatattatatggatagaataatgtatgaattagtcaggctggattacaaagattttatacgaataactgaagatacggaaggtggagttcatttatcacccgcattacagcaacttaacagtaataaaaactatgatataaatggagggtttggaacataccaagactggaagaaatatgaggatattatattaaatagaattagctttaaaaaagaagtaatggaaaaagctgcggaaaagtacaatgcaattaaaacacgccataaatatagaatagctgttcattttagacgaacggattatctcgttttggcatcgttgtgcctggataatgaatactataaacaagcaatgagcttgtttgatagtgaccaatctagctttttaatattttctgatgatatagatgagattaaagacctggaattgtttaaaggcagggatgttgtgcttgtgcgatcagatactgcaggtgtggatatgtgccttatgtccatgtgtaatgcgaatatcatagctaattcatcgtattcattttgggcagcaatgctaaacaaacataaagacaagacagtggtatgcccacatgactttattggggaacaatgttcttccctatgctatataaacggaaattggtatcctgataactggatagctttaaaaagaggaatagaaaatggatttgaaaaagaataattgtagtctatttttgctttaaaaaaatcggtatgaatgaatatgtgacttgtactattgcaactacaatgatgatgttattatttggaaatcttggtaatttctctaaggaatataaatatagtcgttatattgaagaaattgggagaagtacattgccgatttatgcgattcattggtgtatcctttttgctccaaatttgaatcaaaatatgtatacaaggatattgaatgaggattattatattttcaatgtcttttttacgtgcattatatggttaggaatttctattttgggaataaggatactgaggaaaacaaaagtaacaaagattctttttcttggtgagaagtagaagctttagatggtgatgtgagtatgtgcatgtaaatgtgcttgtataatgttatagcagatgttataacagatatgaggggattacatgatttttagggaaaaataaagaatgtcagacttttatttgatgtttttgacgaatgatcgtcaaatctatcaaacacgtcaaaggagtatgtggataaatgacatatttattgttattacaaaagatcagagaggcgtcggcaggggtgctgacgccttttatgttagaaattacatctttgggagaatcgttggtcacgtatttgctgctggcagcggtctattggtgtatggacaagcgtgtgggacagctgatggcatggaatgtgtcagtgggctgctggctgaatcagtggacgaagagactctggaaggtagagcgcccctgggtacgtgatgcacggattataccggtggaggaagcggttgcgggagccggaggatattctatgccgagcggacacacggcgagaacggcagccacctggggggtggccggatacagtgcatggaagaaggctttgcgtgggatcgctgcgttctgcctatcgatcgttgcagtggtaatgttttcgcgtaattatctgggagtacatacaccgcaggacgtgttcgtggcattgggtatgggaatcgtgatactgatcgtaacggaccggttattgtcatgggtagacagcgcagagaattcctgcagggatatcgttatcgcgggaatgggctgcgtgatcatcttcctgccgatgcttaagtatggctgcctgtcgaatgcgggtgcttcttttggatttatcattggctgggtattggaacggagactggttcggtttgaagtccgtggatcatggcagcagaggatgctccgattcctgatcggagcggcggttctgttcctggcactgacttcgggaacggtcgttttatcgcatatcgtaccggctaagtatgcaggattcttcttacagggatttgttgcattttttatcatgtttctgtatccgcttgtgttcaaactgtgggaaaatgcagggaagaggacgaggaaaaagatcattgctgtgctggctgccttgctggtgctcctatgcggtatcggagcatacaagacgggatatcacctgaagaacgcggagacagagaccgcctcacaagaagaacaagagcagggaagtcaggtcacggatgccgcagagaccggggagccggcagagtctgcgagacagctgccgaagatcgtggcacatcacggctacagtggtgtggcaccggagaataccctggatgcgtttgccaaggctgtcgatatcggggcggatatgatcgaactggatgtacagcggacagcagatggggaaatcgtagtatttcatgacacggaattaagcaggatcaccggtgcggaaggtatggtatccgagtggagctatgaccggctgcagacactggatgcagggaacggtgagcacattcctacgctggcagaggtactggatctcatacagcctacggaactgggaatctatctggaactgaaagatatcggagaagcggaaggatttgctgtatcggtagctgcacttgttgaggaagcacagatgcaggatcgagtattgtttgcatcctttaattatcaatatttacagcagatcagggaagcggatgctgccaacaggatactatgcaatacgaagatcggcgacgccgacagattgcttacggaatatcctgcggatgcttatggcctgtggctggagacactgacacaggatacgatccgtaacttacaggcggccggaagtcaggtatatgtctggacagtgaatacagtggatcagatggagaatgtgatcaggctgggtgctgacggtatcgtgacgaatgaacccggcatggcgttagtggcagtacatgaagaatattcctggctgccggagcatgcactgcggacgatcgtgcttcctgggttatatgacaatgcacttcaggatccctacgcgaatgattatattgtgcaggggatgacgaagataggaaatcaactgttggtgtctgcctatgattctaccggggataagaacagcatcttatatcggatggatatcgaagggaatctggcgggaattacggatctcggatttcaggcgcatgttggcggaattgcctatgatgaagcgcacggactgctctgggtcaccggggcagagggaactgtgaaggcgatcagtagtgcatcagtgtgcgatggcacatatcaggggacacaggaagagatcctggtggatttcgatgcaggactgacgaatcataatggcagcaaagtggcttcttttcttacagtagacaatggcatgctgtatgtagggtcttatgttaagggagcaacgggaatattatctcagtatgatatccgggatccgttacacccggctttcgtacagaatgttactattccggaatgtattcagggaatcacttttgtctatgatgcccgtaccggacagcgtacgatgctgttaagccagggacaggatgtacaggatgcggccttgctggtatttgactggacggaaggaaccacggagtatacagatcctttggaaacgtatgtgctgccggaaggtgtggaacagattcagatgagtgcggacggtctgtggatgttgtttgagtcggcggtaagaccgtacagagacacctgcagagtgccgaatgatcacatttggctggtacgatgggatgagaggaaatagagatcaggaaaaaggagacggaagagatcgtgcagaaagcaaaaaaggaacaagcaggaatcatattgttgtggtgtgctgtgatcggattggcattgtgcagcctgggatattttgtgctgaagacagtggcggatggattatggcgcgtggatattgatacatactggcacaatacagcgtatgccatccgtggttatgatctgaacaggacggcacacggagccattgtggtcgacagtgtgggtcccatgcgttcggcgatcatcatgccctgggggcggctggtggcgaacttgatctatcccggattcctgccattgaatgtggctacagtatattattatatattgactgcagtatgcagcattgcagtcgtgaaactgatctatgactggatgcgtgaggaagccttatgggagagcagacggagcggtctgctgatcgcgattgccctcgtgatcatgccgatgtattgggacgacgcactggataccggtaatatgggcggagtgctttgcctgtttacggtcatggcggtgtttctgatgaagcggcatccgtatgctgcatcttttttgctggcgctggcatgcatcaaaccgcagaatatcggattatttctcctggtactgttgctgaaaaagcagtggaagattctgtttaccaccggtggtatggtactgggtggctggggagcaagcctcctttatgtaaaaatcgccggctttttgcgggagagtgtattggtggcgcatgcgcaggaagcaaatgctgcggccggctctgtgacggcacagatcatcaacggctatgccggaaacggctcgggttcggataatgatttcttcatgtacggaatcttcagcaagatgttggattatggctggaattcttatatggtgctggtggcatcaggattgttgggaatctttttcacctggttgatgctattttggcttcgtaagacggcagtggcagactctatgatcgtcggatttgcagtggccgcattaggctcggtattttggtgctataagacgccttgtgatgagattatcatgatattgtgtaatctgctgattctgctgtattggaaggtgtcagagcatggagtcggcaatgcggtctggtgcggtatttatctggcagcaatgaatgcgaagatattccgattctgggggagaaaactgatgccgggactggaactgcggacggcgatcacttgtgatatgatacttcgtattattattttcgcaggaatgatatggattctgaggaagaaatatctgatgacagccaaacagcgggagaggagagccgatgcctgaagatctgagaacggtgagcattatcaccgtgacatataacagtgagaagacgatagtgagaaccatggagtctgtactggcacagacatacctcgcacttacacaagaatccaaaggctcgccgacaccattgatagaatatctggtagtggatggtgcatcaaaagaccgtacggtagagatcgcagagagtttccgggtgcgtatggaggaagcagggatcagactccggatacagtcggaaccggatcagggaatctacgatgccatgaataaaggtatccgtatggcgacgggtgatatcatcgggatcatcaacagcgatgactggtatgaaccggaggcggtcgagacagcagtggagacatttgcggcggctggatgtgatgcgatgtttgccgatatccggctgcacagagcggatggcagcagctttgtaaagaaagcgcggcagcggagatttcagacttccagagactggaatcatccaacgatgtttgtaaaagcagaggtatacaaatcacacccgtttcggcagaaggggattcacgacgactatggctgctatctgcaattgtgcagggaaggatataagattgtcacggtagaccgggtgttggcggatttccggatgggaggagccagcaactgtaaaagcctgaaagagtgtatccacagaatcggggatcgctatagatggtgctatcggataaacggatacagcagatggtatctggcggagtgtattttcatagaggcagtgaaattcatattgggataggtgagaattcatggcggatctgacagcaattattttgacaaaaaacgaagaaaagaatattgaatattgtattcgttccattcagccggtagcgaagaaaattgtagtgatcgacagcttcagcacggatactaccgtagagaaagccaaagctctgggggcaatcgtctatcagcatgaatttatcaattatgcaaaacagtttatgtacggttacaaaattgcggatatacagacgacctgggtgctgcgtattgatgcggacgaacggctgaccgaggcgtccgcagccgagatgaacagactgtgcgaggagaatatggatacggatgtgaatgggctgatcgtccgatttgaagtaaattttatggaaagaaagctcaggcacggaggaatctatccttttcgaaaacttctggtattcaaatacggaaaaggtcagatcgaggatcgcaatatggacgagcatatcgtattgtgggaagggcgtgctatcgagatgaaaaatgactcggagcatcatgattataaggatctgacctattggatctccaagcataactggtattccggcagggaagtgctggattattatgcacataaagatgacccgctggacggcagagatctgaatgcagccgcaagagtaaagagattcatcaaattccgtatttattacaagcttccgatggggatgcgggcacatctgtattattggtaccgctattatgtgaaactgggatttttggacggcaaagaggggaaaatctatgctttcctgcaggcatactggtataggttcctggtagatgccaagatttatgagagggaaaagcaggagaaagctgccatgggagaaaagaatgaaaagtaatataacaagcactgtgaaagcaatcgccaaaggcctgatcatcctgatctgcggtgtcgtagccggtacgatactgctgacgtcggtgtacgcattgccggtagagcggatgcatgatcatgtggaacaggcggcagaacttctggtagaagagggagcttatccgcgtctgtatggcggtcaggatattcgtatgaatccggagaattttctggatctgaaggtgatgctcttaaatacccgagggatggcaagggataatatcacggatgccaccatgctgaatattgcagtctatcccggagaagggaatgtactggaacgggcaatgcttgccgaacgtcctgtttatgaggattgtaacggtgtggctaccgaggaactgaaacggtatatggacggggataccggttatgcgatacaggagtattccaggtattggcatggatatcttgtggtcttgaagccattattattgctgtttcgttatgagcagatccgctggctgaatgttggatggatgctgtttttgctggctgctgttttatggagcttcttacagaggggcagcagggagaatatgctattgtggtgctataccctgctgtttacggtgccggtcatcattccgctgtgtatgcagtattgtacggtaagctatgtgatgctgggagcaatgctatggatgcttcgcagaggatatacactggatgatagacggaccggatattttttcctagtggtgggactgttgacggcttatgtggattttctgacgttcccacttatgagtctgggactgccgctggtatatttactgaatcgcagttatgcatcgaaattaaaagataaaatcctgcgcgtattgcaatgtggaatcgcctggggaatcggatatgccggaatgtgggcatccaaatgggtagtcgcatcgctgctgttaaggcggaatctgatcagagaagcggtagaacaagtagtctatagaagttcttccacaccggatgtcggagaattctccatatcaccgctgcgggcattggcctctaatctgagctgctttaccaatgtgtattttctggtattgattgcagtgggacttgcgatggttctgatattacggaaaaaagcaggaatcaaggattggaattggaacgcatgtattccgtatctgtgtatttgcattgttcctgtggtatggactatgttgtttaaaaatcattcctacggtcatggatcatttacttatcgtatgtttaccatgacgatttacagtgggatgagcatgctgttgttctgcggcagaagggtagaaccggcaggtggggatgagggaaaaaagcgaagaatcctgatattgaacggcagatatcttccgggctataaggacggaggacccgtgcgcagtattaagaatctgacggatcgcctgggagaaaaatatgatttcagaattctgacagtcgacagagatcatggagacaagacagcctatcccggaatctgttacggagaatggcagcgtgtgggaaacgcggatgtcatgtatgtggtgccgggaggattcactgcgaaagtggtgaaggatgcggcagtgtgggctgatgttgtatatatctgcggatgttataatgactatgcgcggatggcactacggctgaagagagatcgttggtatcctgccaaagtgatagtggcttctatgggaagcttttctccgggtgcttttgggcgtaagaatctcaaaaagaagttatatattttatggatgaaatgtagtggaagattccggatggttgaatggtctgcaacggatgaaatggaagctgccaatatcagaaacgtaattgggaaaaaggctgtctgcagaatcgcacatgacttgcccagacaggtagacctgtctctgacgccgacgatgaaagatcaggtacttcgtgtgattttcctgtcacgtatctcggatgaaaagaacctgtcgtatgctttggaagtgctgggacagatcacgggaaaagcggaatttgatatctatggctcgaaacatgatccggaatattttcagaagtgtatggatctggccaagaagctgccggacaatataacagtgaagtattgtggagaagcagagtcggagcgcgtaccggaaatcttttccaggtatcaggtgttcctgttccccactatgggggaaaattatgggcatgtcatctatgaggcactgaccggcggatgcattcctgtgatcagtgacagaacctcctggaaggatctggaggaaaatggagtcgggagcgtaataccgctggaagaaccggaaaagttcgtacaggcaatacagacgatcgcagatatgtcgcccggggactgctatgcacagcagcagaaggcacaggaatatgtgagggaatatagtctgcatgtggatagcagtgggtatgaggaaatgtttgatacccatctttgattacgtatagattacatataagcttttgagattgttgagaaaacataatggttatgatataatgagcctcaaggaaaaacaagtggctgcaaagcagacatttgtttttctgggttcattagcgaaaaagtgagggtggtatatgttagaacttcgaaaaaaattaagccggtatcaggaaatcttttatctgctgttcctgctccctatgacaggaatggtttccatgggactgaattcggaggacagaatctatctctatgtatttgcagcggcgacattattcctggtacttaagatggcagtgacggattataacctcagagaattcgttgtgatagcagtgctgacattggtgttcggagccattttcttacgaaatggggagaaaacattgctcttgacgctgatggcaatcttcggtgctaagaacgtgaatctcgataaagcattgaaatatgcgctttgggataaagcaatatttactgtgggaacactgacgctggcggcgaccggagtgatagagaatgaatatgtatggctgcctaaaaatctggatcatgttatgctgcagtgctatgggtattaccagcccaattcggcatttgccaatatttttgtagtattactgctggttattttagtatatagagagaaattgaaatggtatagttatcttataggctctgtaattatgtttggcgcatataaagtatttatgtgccggacaggattacttgtctgggtgcttctgtgtctgatggtgctttgctatgtattggcaaaacattttcatgtggaaaaagtatatggctatctgctctgtgcaattccggcagtccttattttacttgcattggtacttccactgatcgcacagaaaaatgagacatttaacaaatggatcaatatcgtattgacgggacgaatcaattatgtcaatgaggtgtatgggagactttggaatcttgtgcccgggcaggcggggagagcgtcatttgacagtatttatataaccgcattatataattatgggtggattctttttctgttcgtgctggctgcatatatcgccggaatgtggtattgtaataaaaaggggcagtactacgcggtcattggattgggaataatggcggtgtacggatacatggaattgtttccgctcagtgcgttatggaatttgccactattgtatttgtcacaggttttgtttcgggagaagacagtaaggaatgaacaactacaataaaaaatatcagatcatagagagctatggtttatttttgctggatattatctgcatcacagtatcatatgcactggcatatcagatacgtttccgagggggggattctccactgggaaaccgtgagattgcgcagatctatctgccgtttcttctgatctgtatgttgaacaacttttttaccaatgagtataagcacttcttccagagaggatattattatgaattgctgcgtgtagtgcgctacaatgtgatcctgttcctggcaacgagtgcttacatctatgtattccgtctggaactggaattctccagactgttattgggatattttgtcgttatcaatacgatcgtgacttatctgatacggattgcgttcaagagctatatgcgccgctattatagtaagagtcgtagcagtgataaggtcatgatcgtaacgtgcgaagcggaaacggagcacatcatggagcagatcgcgaaagatgcggcatggagctacgaggtcaattccattgctgtgatggacgctgatcatgtaggagagcagatcagcgagattcctgtcgtggcgaaggaagcggatgtcattgatgtggcaagacagagcgcggttgatgtcgtattgctctactgtccgcagatggatcatcgggaactggaacttctcgtgcagtcattcctcgcaatgggtgtagtctgccataactgtgtggaacagttcggcttcgagatcccttgcagaggtgtggggaaattcgccgggatgccggtgatgacttatgcagtgacagagatggattaccgccgtatgatcatcaagagaatgatggatatcgtaggcggcagtgtgggcgtattcattacgctgctcgttacaccgtttgttgcactggcaattaaattggaatcgaagggaccggtattcttctctcaggtacgtatcgggaagaacggcaggagattcaaaatgtataaattccgctcgatgtatattgatgcggaagaacggaagaaggaactgatggcgcagaatgaggtcaagggactgatgttcaagatggacaacgaccccagaatcacaaaggtcggacgcttcatcaggaaaacaagcattgacgaattgccgcagtttttcaatgtattaaaaggcgatatgagcctcgtaggcaccagaccgccgactgttgacgaattcgagcagtacaatatctactaccgcaggagactgagtatcaccccgggactgaccggtatgtggcaggtcagtgggagaagcgacatcaaggatttcgacgatgttgtgaagctggatctgaagtacatagatgagtggtcactgagacaggatgtgaaaatactgatccagacggtgggtgtggtgctgtttggaaagggatctaagtaaggaatgaaaggtaatataatgtggagaaaatgaggaaaaaaatatgttttgtttcttcatcaggcggacattgggaagaattgatgtgtttgaaaacgatatctgaaagaaatgattcttttttcgttacagaagaaggcggacaagcacaagattctgatataacagatatttatacacttccgcaaattaataggaatgaaaaaaagtttgtaattcattttctgaaattgatattaactgctttaaaaataataaataaagaaagacctaacgtagttataaccacaggggcgttgatagcattcccgttttgtgtatttgtgaaactcagaggtggaaaagttatttatatagaatcttttgcgcgcgtttacaattcgtcattgacaggcaaaattatatataagtttgcagatttatttttagttcaatgggaatcaatgttagaagtatatccgaaggcgaaatatgttgggggaatattttgaatgatttttgttacggtaggtactcaaaaatttcaatttgacaggttgatcggtactgttgataattgtataaaacttggaacaatagaaagagatgtttttgggcaaataggtaatagcgagtatattccacagaactttgaatatgcgcgatacttgtctgctgaacaatataatatgtatttggaaaagtgtgatattataatttcacatagtggtgttgcaactattgtaaaaggcataagatcaggaaaaaaagtcattgtagtacctcgcctgaaaaaatatggcgagcatgtggatgatcaccaaatacaaattgcagatacttttgaaaaaatgaattttattgtgcagtgtgtggatttggatcaattaccacagaaaattgaatgggcaaaacatcataagtttaatgtttatcaatcgcaaagggaagcgatagtgaaaacgatagaagaatacctaaacaatttataatagaagagagaaattgatttgacagcagagaatagtaaagataagaaaactctaaaagtgcttattgtaagtgtaggacagatttccggaggtattgaaagatatacgcttacttttgggaaaaaattagaaaacagtggatatgaggtgcattatgcattaagagccaatagttggttagacagtgaaatagtaacagaaaaaaaagtacgtgttgaaatgggaagacatcttattttggatatgatgactttgaagcaatatgttgaggaaaataatataccgatcatacattgcaatagcaataatagtctctttgtcagcttgctgatccaggaagataatgaccacaaaaaaataggtgtgattcacggagatgtacttgccgatcagcagcataagggaagattcatagcgaatgtttatagtaaattggaaaaatggttagtaaataaacattgtagttactgtattgcagtgtcgaattccattaagaacattttgatagaacgcggtgtaaaagagaataagatagatgtagtatatacaggaattgaatcattaacgtatagtgcattacctgattactataataatgtactaaacatatgctcggttggaaatcttattccgatcaaaaatcataggaagcttttggaggcattatacgatttaaaaaaagaatatcctgagatacaggtaaaatgcgatatatatggtgaaggcatagaacgggagagtctggaaaactatatagaagaacatgacatgaaatatgtatcacttaagggatatgatgtaaatgtaagaagtaaattgaatgaatatgctttatatattcatccatctaagtatgaatcttttggaatttctatattagaggctatgaatgccggatgctgtattattgcgaataacgtaggaggaatgacagaaatactggatgaaagatcaggatatttgatagacgcagaagatagtagaaatatagaaaaggctataatcagactttatgacgatagagaagtgatgaagcaatatgcaataaacggaaagtatcgagttgaagaaatgtttacaacggatgagatgttgaggaaaacgatagaaatttataacagatagatgaaacaaagtatgaataatcgtgttggatttgtagttaagagaaagaaaataacagcatacaatgcacttattggattatatattattatgccaatcattgattctattagtggagcttatcacgatgtatatccggttggacagatatacagacttgtagtaatggcatatatgatcattttactgggcaaaaattcagataaggaatttgtgaaagtaatgattccttttgcaatatttgttttggtacaaatattgataagtgatgcgtatttagtgaaaagcattcagagtactttaaaattatttacacctataataacaattgaattgtttagggttttaattaggaaacagaaaattcataatgaagatgtattgcttattttagatatatggtcggtattatatcctctgatgattctggttcccggtgcatttggaataggaattaatgcatatgatggctctataggctggaaaggattcttttatgccacaaatgagatctcatttattttatccagtttagttatgtacttgttttggaaattcgaaaatgttggaaatataaagtcgatagtaactttagcagccaattgcttatgcgttgttttaatgggaactaagacgggatatcttacaataatcttgttttccataatttttgtctttgaattatttaaagatggaaaacaaaataaaataattcgggtttctatattgcttttattgcttttaggaatgattatattgaattttagcaagattatgaacatggcatctgctatatatgaaagatggttatttcaaagatccattagctattcggtcactgattttttatttagcatgagattaagaagactggaagatgcttttaatatttacatggatggaaattacttgatgtttggatggggattaggaggagaactggcaggatttcccaatatggagatggattttttggatatactatttcgaatgggaattataggttttttatatgtgattcttttttacggaaaagaagtgataaaagttgctcgtaaaaacatgtggggactgttgattgtctgctggtcattagctttgagctttggggcgggacatgtgttgttttatggacagagtggtatgatgctggcaattaattttatctttacattatatattttgaagacaaagaataatgaaaaattgccaataacacgggaagaggcagatgaatgaatattgcaatagttaatatatatggagatgcttacagcgaagataaattgtttgatataaattcctgtaaaatagggcaaaatttgttgcttccgggaatcgtattaaagaaagaacttgaaaaaagaggagataatttacatacggcagatatgtatgatttcaaggacattgatgttattatttttcaggatctgcacaaaaattcgaagctgttattgacatcattgtttgattatattaaatattttttaaaaagaaaatggaaagaagattacctgttaaaagcaacaaggacttcaaaaagaatcaaaaaaatattgataatgcaggaacctgaaacagtctgcccccagtcatataatgtcaaatatcatcgttactttgatgtgatcctcacgtggaacgacgatttggtagataataaaaaatattataaatttcaatatccgcaagtacctgcaaaggaattatataatgttccatttaaggaaaaacggctatatacgattattgccggaaataaaaaaggtatagggaaaaatgaattgtatactaagaggtatgaaatgatagaatacctcgaacaaaatgattatgagtttgacttgtatggctatggttgggaaaaggaaggctttaaatcttataaaggatcagtaaaagataaacttgaaattttatcgcactataaatattgtgtatgttatgagaatatgcgtggagaaaagggttatataacagaaaaaatatttgattgttttttttccggtgtaattccgatttattggggagcagaaaatgtaactgattatattccacaggacacgtttatagaccggagaaaatttaaaacaaaccgggagttgtgcgaatacgttgataaaatcaccgagaaagaatataacgagtatgtaaaaaaagcaaatgaatttattaactctgaaatgttttatagacaattttcaattgatgcatatgttaaaagaatgattgctttaatagaatgagaaaaaatgaaagaaaaaaaattatcgaacaatataatctatagcattgtgatgcagacggcaggagtaatagcaccgttgatcatttcaccctatatagcaagagtgctttcagcagaactgataggtgattacagttatacactagcgaatagttcatactttgtattagcggaatgcttaggcttttctttatatggaactattaaaatagcagcggttcgggatgataaaaaggaactgagcaggatattttgggagatattttggataaagattattttaatgctaatttgtttgagcttatatatgctatggatcagcagatatgaaaccggcaccactaaagcattatattatgtcatggcaattaatattattagcggtggagtagacgtgacatggttcctcaatggaatagaggagtttagaattagtgcattgcgaacaattttcgtacgtttgataaatgttgttatgatcgtaacacttgttaaaagtgagaaagatttgattttatatgcattaataatgcagttatcaacgcttattggttatgtaattgtatatcctacagtaataaaaaatgttcagtggtttaaatttaataagctgcattttagacaacatgtaaaagcatccattgtatactttgtccccggattgattaatacaatatttgcatcaacagacaagactattttaggcgcaattgggaaaaaagcatatgaggtaggagtatatgaacaagcaaacaaaatatgtcagttaagcatgagtatgttgaatgctgttagcaatgcaatacttccaagggtaacctatttatattcaaacaaagaagcagcgaaaaccagagattttttaaaaacttcaatatgcggagcagcattgatcgcatttcctatgacgttcggcatatgtgctatatcaaatgattttgtaccggctttttttggaagtggctatgataaaagtgcatgtctattaaagattttatgttggaatgttctccttgttgtactcagtaattttattgcccagcaatgtttaattgcaaggggaaaacagaaagaatataacattgcaattagtattagcgctattttaaatgtggcacttaatttgttgctggttcaaaagatgcagtcaataggggtatcgattgcatctgtaatggcaagctttgtgattttgcttatcatcataaattatgctaaagatatgattgatttaaaggggattcttagtatttcctggcattattttgctgcatcaataataatgtattttataatttttaaaattaatctgcatgatcattggacaacaatagtagtgcaggtatgtattggtgcaatactgtattttgtaatcttggttggatttaaagatccaattataagaaaggtcataaaacaaaatgaaaaacaataatttgataaaattgaaaagatatgtcaaatacataattaaaaaaacatatcgagaagaaatagaaagaatgcagaaagaaaattcaatcgaagaattgaatgatatacaacaggctacaaaagatattcttatattgagaaggctcaataccaaggtggggactttttcagattacattatttttcttaaatctattgaatacgctatagaggtgggaaaaataccaattgttgaccgccaaacattaaagaatgattttatgccggcgccggataatattaatgcatgggaacttttttttgaacagccgctaggatatggattaagtgatatcgattatgacacgatgagtgtatcagtctgctataatggaggtggaatgtttccggtaagtattatgaaatgtgctgatgaaaacgttgttgcttactggagaaatatcgcaagaaagtatattcgcttaaatgaaaatatgagaacgtatgtggaggataagtatacggagttacttgacgggaaaagagtattgggagtttccgtaagagaaggatatcaaaaactggcggaagtacaaccggatggaatatgggggcatcctatacagacacctattgaacaattagtaaatgatgtaaaaaaatatatgaaagagtggaaggttgatacggttttttttacttgtcaaaccaatgagacagtaaagacgttttgtgaggcatttggagaaaaagcttgttatttaaaaagaacgagatcaaattataaggatttacaggaaggaaaaagagagatccgtaaattgtcatatgaaaaagcttttataaatgaaaaagattatattacagaaatatttttactgtcaaaatgtaattgctttatttgttctgaaaactcgggaagtgatgctgcatttataatgagcagtggctttgaacattttatatgttatgaaaacggaatttataaatagacttcagagtggtgaatgtgggatttaatatgaacgatttgtgtatatatataacaacttataatagggtacagtatttgaaacttgcgattgatagtattttaaatcagtcatatgataattttacgcttattatacttgataattgctccacagatggaacatatgaatatgttttatctttaaaagattccagagtaaaatatataaggcactctcagaatattggtggtggagctaatattaattatgcatttaaaaattgcacatccgaatatttctgcgtttttcatgacgatgatattttaaatgaaaagataatagaaaaagaaattgagtatatggagcagaataaaaactgtatggctgtctcttgtctctcaaatgagatagaccagagaggcgaagtgataaaagaaaataaatgcaaaacggagaaaattaaaatatggaaggatactcaatttttttcatattatattggtaaacagaaaaattttgtttttccgacaacaatgtacagaacgaaatttataagaaaaaatgatctatatcttagactggaagcaggcccctgcgcagatgttgttatatatatggacattgaaaaaaaaggcggagaaatagctcaaattcagtatccattattaaactacagagtttatgcggggcaggatagctcgacaaatttagaaaaaatgcttatttcactgatccggtttttaaaagaggatagctattattcggcattattaaaaaatatgaaaaaggaatgccgggactattatcgatggtattcacgcagattgttggcaagaacaatttcaaataaaattacaacagagatggcaataaattatatgctgataatgaagaaagaattgaatggatcaacattatattacagtatagttagatttgcgtttaggcttcagaaaatgatgccacatatttttagatatttatatgagagagtaaagagaaataaatagattgaaagaggtgaaaatgatatgaagatagtattattagcaggaggctatggcaccagaatatccgaagaatcacaattcaagccgaaaccaatgattgaaatcggtgggaagccgattctctggcatatcatgaaggaatattcctattatgggtttaatgattttgtgatctgcgccggatataagcagtatgtgatcaaagaatggtttgatgattattttctgcacaacagtgatgtgacctttgattatacagacggaacgaaaaagatgatcgtacatagccagcactgcgagccctggagagtgacgatcgtagataccggattgaatacgatgacaggtgggcgaattaagaggatacaaccatatatcggaaatgaaccatttatgatgacttatggtgacggtgtctgcgatgtagatattcaggagttagtgaaatttcatcagaatcatggcaagattgcaacgctgaccgcggtgatccaggaacagcagaaaggcgtactggacatcggcggagacaatgcggttcggtctttccgggagaaaaaagcttcggatggcgcgatgatcaatgccggatatatggtattaaatcctgaaatattcgattatcttgacggagacaattgtgtatttgaaaaggctccgttacagaagcttgcggaacagggtcaattgatgtcctatatacacaaggggttttggcagtgcatggataataaacgtgaaatggatctgctggagaagatgtttacaaccggaaatgcaccctggaaaaagtgggaggactaaaaatgcctaatacatttgatttatctttttataaagggaaaagagtatttgtgacaggacacaccggtttcaaaggttcctggctatgccatatgttagcaaatgcaggcgcagaggtaaccggatattcccttaatccgcctacggatccgtctctgtttcaaattgcagaaatagagaaggaggtacattctgtaataggagatatccggaactaccaacaactttccgaagcatttcaacaggcacaaccggagatcgtgtttcacctggcagcacagccgattgtcagagatagttataaggatcctgtctatacctatgaaacaaatgttatgggaaccgtcaatattctggaatgtgtgagaaaaagtaatactgtccggtcatttttgaatgtaacgacggacaaggtatatttgaacaaagaatgggtatggggatatcgtgagaatgaagagttggacgggtatgatccctattccaattctaagtcatgttcagaactggtgacacattcttataaaaacagcttttttgcagatggtaaagtagccatatctactgccagagccggaaacgtgatcggtggcggagactttgcgaatgaccggatcattccggattgcatcagggcggcacaaaggaaggaagatatcgtggtaagaaatcctttttcaaccagaccttatcaacatgtgctggagccgctgtatgcttatcttatgatcgcggcgaagcaatatgaggatgggaaatatgccgggtattataatgtaggaccggatgacgtcgactgttttcaaaccggagccctggtagatctgtttgtgagcaaatggggagaaggcatgaaatggatcgatcgttatgacggaggtcctcatgaagcaaacttcctaaaactggactgctccaaactgaaagctacattcggctggaaaccgcactggaatctggatacggcaatcgaaaaagtagtagaatggagcaaatgctggatgcagggagacgacatccgtgcctgcatggatacagagatcaacgaatttttaagcgtagaataagagaggaaatgtaatggaaaattggaagaatgaagcagaggccagagaacagatcaaagctctggtagcagaatattataatgatttcaaaaagccggaacaggaaaaggcgttcaaaccgggagacagactttcatatgcaagtcgtgtatatgacgagaaagaaatgtgctctcttgtagatgctgcattggatttctggctgacaacaggacggttttcagatgaattcgagaagaagttcgcagagtggatcggtgtgaaatatgcgaatctcgtcaacagcggatcttcggcaaacctgatcgcatttatggcattgaccgcaccggaactgggagaacgtcagattaaaaaaggtgatgaagtgatcactgttgcggcaggattccctacaaccattacgccttcattgcagtatggagcagtacctgtattcgtggatgtaactgttccccagtacaatattgatgtcacgcagctggaagctgccctgagtccgaaaacgaaagcagttatgattgcgcatacgctgggaaatccttttgatttgaaacaagtgaaggaattttgtgacaagcataatctgtggcttgtagaggataactgtgatgctctgggtacgaaatatacgattgacggagaaacaagattttccggtacctggggagatattggaacatccagtttctatccgcctcatcacatgacgatgggagaaggtggctgtgtatacacgaacaaccctttattgaatcgtctgatcaagagtttccgtgactggggacgtgactgtgtatgtccttccggaagagataatctctgtggccatcgttttgacggacagtttggagagctgcctcagggctatgatcacaaatatgtatacagccacttcggatataatctgaaggtaacggatatgcaggctgcggtgggcgtagaacagctaaagaaattcccgtctttcattgaagcaagacgccataactgggcgagactgcgtgcagcactggagccggtagctgataaactgatcctgccggagcctgcggagaacagtgaaccttcctggtttggcttcattgtcagtgtaaagccggaaagcgggcttaccagaaaccgggttaccagatatgtggaagaccataatattcagacacgcttgttattcagtggaaatattaccaagcatccctgctttgaccagatcaggggaacggatgcatatcgtgtaattggaaatctgagtcagacagactatatcatgaacaattctttctgggtaggcgtatatcccggaatgacagacgaaaagattgattacatggcgcagattatcaaagaggcagtaacacagtaacgattccataaaacttttacacagggggaacaaatgaaacagagattagcggattatgtagcggattttttggtagagcatggtgtgaccgattgttttagcgtagtaggcggaggcgcaatgcatctgaatgatgcattgggacataggaaaggactgcaggtcacttataatcaccatgaacaggcctgtgccattgccgcggaagcttatgcaagactggacaaccggatcgctgccgtctgcgtgaccaccggtccgggaggaacgaatgcactgaccggagttgtcggcggctggctggattctattcccatgtttatcatcagcgggcaggtcagatatgatacgactgccaggtatgcaatgcagtttacggacgggttgccactgcgtgcaatgggtgatcaggaatatgatattgtaaagtcggttgcccctatgacgaagtatgccgtaatgatagaagatcctaaaatgatccgctatgcgctggaaaaagcatggcatctggctacgaccggaagacccggacctgtatggattgatattccggtaaattttcagggcggatatattgaaacagaggaactggaaggctatgatccgacagaggatgatgcaaagcttcctccggtagtggatgagcagacagttcgcaccgtgttagagaagatcaggaatgcaaaacggcctgtatttcatgcaggctacgggatccgtttgtccggtggatatgaggctttccgccgggtggcagagaaactgaatattccggttgtaacttattggaatgcagtagacttaattgagaatgaaagtccactgtattgcggcagagccggcaatatgggagaccgaccgggcaactgggcgatccagaacgcagacctgattctggcaataggaacgagaatctcgatcaggcaggttggatataactggaagacctgggcaagagccgcagaagtgatcatggtggatattgaccgggcagagatgaaaaagccgacacttcacgttgaaatgccaatctgggcagatgcaaaagatttcctgaataaaatggacaagcttattggtgagcattatccggtaaatcaaagccaagaatggctgatgacctgccaaagatggaagaaggattaccctgcagtcttaccgagacaatgggaggaaaacggcaaaacggcaaatgtatatgcttttgtaagatatctgagcagcagactgccggaaaacagtctgacagcggtatctaacggagcctgctgcgttgtcggaaaccaggcgtacgtgatccaaaaaggaagccgtatggccaataatagtgcggttgccagtatgggctatggacttcctgcagcgatcggaacctgtatcggaggaggacgacggactaccatctgcctggaaggcgatggaagcatcatgatgaatctgcaggaactgcagaccgtattgacgaaccgcttgccgatcaaactgtttttgatcaacaataatggataccattctatccggatcacgcagaacaatcttttcaaagaacatagcaaaatcggtatcggaccggaatcaggagacctgtcttttcctgaatttcgtaagatagcggaggcttttgggtatccttactactctgccagcagcaacgaggagatgaagaaggtggtagatgcggtacttgcgctggatggcccggtattctgcgagatttttaccgatacaacccaggtatgggaaccgaagagcagcaccaagagattgccggatggtactttggtgagtccaccgctggaggatctggctccgtttttaccgagagaggaattagagaagaatatgtttattcccttgatgccggagaaatagactgctggctttggagacatagaaaaactttgtcgcaaaggagaatacaattaggagaacatcatggaagaacgcgaaattgatttattggatatgattacagacatcctgtcccattggagagggctgctggcagcacttattgtaggtgcggttttaatgggcggatttagttatgtgaagtcctatcagaatgcgcagaatgtagacagtctggagcgattggaggggatgctgccaatgcaggagctacaggctgtgcaggtattgctggagcaggagaaagtgtatgcgcgacaaaagtcatatttggatcattcggtaagtatgcagcttgatccggaacagatcgcacagagagatctgatctataacatcaaaatggaggatccggaacagggctgcctgttgactcagttgtacgttgatctcatcaacagtacagccatgtatcaatggatagaagaaaagacgggaattgccgccaatgttgccggagagttggtttatacagatgcagagcagactggcgcagtgacggatattgtgaaaagcaatgaaaaggttcgtgtgcagtatttacaggaatcagcggatacagttaagaacaatgtgaagattattgtacgttatacacaggaatcggattgtgatcagttagcagaggctgtcaaagaatatatgacagagcagcagaaagtactggaacagaaagtggagatacatcagctgatactgatctctgatacaggagcaacggtagcagatataaatctcaaaaataatcagcgtaacaatgtgaatgatttggcggacctgtcctacgagattagaaaagcaaaggaagattttacggatgagcagtgggaatattataatttgctggttcggaaggaaaacgaagcagtagaagcggagccggaagacgcaacggtagaacagttgacaaccagtcattcaatcagcaagaaatatgtcttgctgggggcagtgttatttgcatttgtttatgtgggaattctgtttttgcggtatattttcaacagcaagattcgtgtgtccgatgaattgcagagtttatatcatattccgcagattggcaccgtagtcaaagattccgggaaaaagtttattgtggataaatgggtcgatgatctcagacattatggtaaacgtaagttctctgcggagcagtctgtagagctggcatttgcggcagtgaagattgcagcagtgaaaaacggtctgaataatatctgcttgatgggatgcaacctgagtgccggagcggatgctgtatgcgaaagcctgaaagctgcattggaaaaagagggaattaccgttactgttctggataatctactttataatgcggaagttatggaaaaagtcgaaaccatggcaggtgtggtattggttgaaaaggcaggatctactctgtataacgaaatcgcgagcgaactggaactattgaagagacaggagataatggttctgggcggcattatagtagagtgattgtaaacttgctgcgagaaggattgctcaacacgaagataatcctgaaattatttgagaatttgggtattttgtcatgttaacagataggatcgcttacaaaaatcgaaagtgtagaagggaatacttaagagatttatgaagtttttagtgatagggataattacatatatagttctgctttcgtttgtgttatgtaccacaccgcgatctccgttgtccaatgtacggatcgtgaatggaagaaaatttaatgttggcattacagctttggtgatctgtctgttgattgcagtggagtcctattgtatgagtatgaatccgatgtggacgggagaatatccgacggagcacctgcatcagtatgaactgatggcggaatcgttactgcagggaagactggatctgccttgtgaggcaagtccggaactgaaggctatggacaatccatatgattacaatatgcgagaacagttgggcgtggaatatcattgggatcatgcctataaagatgggcactactatatgtattttggcgtggtaccggcgttggttctgtatttaccatatagaatgataacaggagaaccgttaaactgttatcatggcacgcaggtgttctgcgccggcattattatagggttatttgttacactatattttttaataaagatttttaaggcgaatgtttcctatgtcacttatctgctgatgagtactactttttcaatgatctgtgtgtggtcatgcatgaatacaccttcgctgtattgcactgctatctcttcgggggtatgtttcgcaatatggagcatggtatgttatttctgtgctgtgtttttggagatgaagtattccaagcgtatagtgctggctgttcttggggcactgtgtggggcattgacatttggctgtcgtcctaccattggactggctaatctgattgcgattccattgtgctgtttatttataaagaagaatgtaaaatgcaggaagcagcttgtgggattattatgcgtctttgtaccatatatactggtaggcatagggttgatgtactataattatgcacgttatggtaacatacttgaatttggacagcggtaccagcttactgttacggatcaattgtcgctggggtttggcgcggtgtcgcttagaacgatttgtggagcaattggaaattacctgtttgcctggaagtgcggatttacggagtattttccgtatgtgaaactgcagggagctattcttaattacccgattctgattcttgggtttgtaatgctatttgtgcccacagtctggaaacgcttaaaacaggaacagttgatcggagtaaagattggactgtggctgtctgtgattgcgatagctatatgtgactctatgatgtctccgtatattcgggaaagatatcatatggatatttattggctcttatgcatcgactgcatgttgagtgctgtattgctttttgaaaatgatgcaatccgtgtaaaaagaatggagcttatcgtttcagtagcttgtttcatgtcactgtttttaatactgttgtattacatgatcccggatggagacaatacttttggagaagtactatataatacatacgttattaaaatatacaaggttctgggactgaatggaatgctgttttaagtagtgatgttaagatatttgtttacaatgccgatatcattttatagataaaacatagaaagagaaagtacgaatgaaaaacaagaattttttacaggcaacttttccggggattatgctggcagcatttttgctgacttcctgtggaacacagaatacacaggcattaacaatggcggaggaagtgcaggaaaccgatgcagctgcaacgaatacggaaggttctgcacagggagatgtaagtgcacaaccggaaggcggcgacacagaggaagcggcggctttgaccaagcgcaatgaactggaatgggagcagcgactggactataccacagaaagacaggcgcagttagctgagatcacggtagcactggaacaggatacggaagatgtgaagcagaaggcgcagggactgctggaatccatggccgcagggaatgccgacgcagcagtggacaatgttttggcagaggattggtatactgtgatgctgtcggatctcctgattggacagagaaattatacaggagcggcgggcagcgatggcgattggaagatgacgattctgtctgatgaactcgggcagcattgtacggcaatcgaatatccgcttggcgatggcagaatgttctatgtacaggtgacagattccgagatccgttactatgtctgtgcatctgatcatacaggtgcttttacgagcgcggcactgaatctcacggatggaagttgggtaagctacgaaggcactttgtccgcggctaacagtccggaaggaacgcttacgatacagatgggtgcggttgacctgagtaacggtgcagcggaagcttttcataaccgtagtgcacaggtgactgcctacgagggagagttctcatctgatggaaagccgacgataaccactcctgcaaacctgaacaaggaagggaaaacagcatacgcatccgcaaaagcaggtaggacaacgtattatttgacagtagcgtcagatggaatcgaagatgcatttacaccgaagcagcttggtatcagtaatatttgggagtaaggagtcacctatgacatttaaaaatataatacaaagaatgcccataaaggaatttgtggagaaattcactaagaaatgtttcgtaggcattgttctatctgtatgcagtctcctgctgtggaaacccgtgcaggcatttgctgcggatcggactgtggcgaatctggtgttgatggtggattttgaaaacgataccacaaaatttgcaacaaaatatatgggatgcgagcaaatatatacggacacatcttatagtggtgtacatgcatacatccgggcaatctcggatggaaaagtggaaataaacagccttttcccacaggaccggggaaacggtcagtttgtaccgcttacacttcccggcagcagcaaggactatactaaggagaaggaagcggaatttatcaatacggttgtagatctggtgaacgaaaaggtgaaaaatggtgagatagcagagattacaacgggactggacagcggcaacagtgatggatacatagacaatgtaacatttcttgtacagatggctgacagggttacacctgataagacaagcgcattttatccgcataaggcagatgtcggatcaagcggcggacaactgtttggaaaaaatatggtggtctataatattgtgccgtccagcagcctgggagtagatcctacaggcagatattcgggtctgggatattccaccgtatctcatgagttattgcattctctgggagctccggacttgtatcgtacgaccggtgatctcggagaaccggtgggtatctgggaccatatggcaaaaacggctgcggcagccagctatccgttggtatataccagaaaggatcttggctggattccggatgcggatattcctacggtgacgaaaagtggtgactatgagcttgtacctgctacgaacacaagcggtacacgagcgtatattttaaagacaccgttgtcatcttcggaattttttgtggtggaatatcgcgagaaaaaggtgagaggagcagactatagtaccccctatgatttctatcttccggaatccggactggtggtgtatcgtgtgaatactgcggtagaacatacgaatgctgcaggcgacaactacatgtatgtgttccgtccggggacacaggacagcaggggtgcgagagagacatatacggtgacaggggctgatggtactgccactgaggtgaatgcggtacagaaggcagcggtaggaacagcaagccgtccgacattgggcaatgcggatatgagtgctccctgtacggcggatactattttttatgatgacggtacgaacagcggtattgtaatcaacaatgtaagttttagtaacggaaaggcaacattccatgtagaatttccggaattgtcaggggacacctattggctgccgcagggtgaggctgtcaatggcttgcagggaccggtgatcaccggcagcaaggatggaacgaagctgtatctggcgggctcacaagtagatgcctatggcaatagacaaggtgctgcattgtacggatggcaggatgagacatggaaaacgttaggaacagttggcaccggttatactccgatatatgacatattatacgcggatgatgcggtatacatggcatatattgagaatggaagtcttacaataggaaagtatgaaaacggtgtatttcatacagtgtattgttggaacggatattatcccacaaatgcagctttaatgcaggtaaacaatgaagtgtgggtgagttcccatgcaagtggcactttcaatatagcaagaataaatggatcttcccaactgaccccattacaggtgcatacaaaaaattttacaggaactgccgatattggtaatcccaccgcatttttctttcgaggaaaatggtatgcggtatatagcgacttcaatgcttccggagaggatgcgaaggggaaaatagcatgctatgatacggctgacaactcctggaaggtagtcactgtgattaacaacttgaccaaggtgagaatggctgtaagtaatgtggtgggggatacggtttatatcgtggcacaggatgccgacaatacgaatgccttcctgatatgggatggaacaacgctgcaagaacagacactggacagacagttgacaacctttagctttattgtaaaagatcagattccttatattatcaggacagccggaacagaattacgcgcggattattacaaagacggaatatggtcggaactggcgaataagattgcttcggatgcgaatttgtttgatgcattctgcgctgacggaacgatgtatgtggcatcgtcttccacagcagggattacgacggtacgcaagatgaaaacaatcgacggtaccccggatcctgatcccgtgcagcccggcgtgggaagcggcaatgtcgttctgacgcttccttcaggttataacagcagtgccagactctatatcgatggtgtgaaggtgaatagtatagcctggcagaatgatgagtcaaaacggctggtgtatgtcggcagtaacggcagcggtccgttaggaacggcggcacagactgctgtagcttactactacgatgcttccgggataccgagaggtatgtatgtgtggaggcttgcttatgagggtgaccattatacagcaacagcgattccggagtttgagaatctgtttacctaccatggattctccgtacgttataccggcaacacgggactgcggtgtgtttacggtattgattcgtcgaaaaaagcacagctgatcagtacttccggatggaacggttaccggatcacggagatgggaacattgatcatgcgtccggataattatgaagagaatcctatgatctatggaagcaatatggtctcaagaggaagaacctattgggtggcaaacggtaaggttaacaataaagtgatccgcaaaacaggcggaagagatcagttcgcaaatgtattaatagatctgccacccagtcgttatgatatggcatactatttcagaccatacgcagtgatggattataacggcagcaatgtagtgatctacggacctgagatgtccagaagcatgtataccgtctgcaagcagatattgggtcacaaggatttcgaacctggtacttccgggtatcatttcctgaaaaatattgtagacagcgtggaaaataaacagtaattcgtcgatacagacatttattaaaggagttacgacagatggaaagtaagaaaaatacatttcagatcgttctgatctgtattctgacagtgctggtgctgttcctgacagcagcattataccggtcatggagagtggcaggagaattgcaggtgcagctggcagaggcacagaataatatgatgacagtagaaaatgaacaggagacacaaccggtcgctgcagtagacaatacccggacggtacgtgtgatgaacggtatagtacagctacaggatgaaaacggccaatggctggatgtggcacccgtagaggaattgcagcaggcagatcccgtgttggccgggagaaccaagatggagaatctgattacgcagaataaggaagcagtgcagaatgggacgatagatgaggaacagatttcctcaatactctccaaacagagtgctttaatgggagcatcattggcaagatcatctcaggtacagagtgccgcagaaaagacagcagtacagcagacgaaacctacaaatgctgcagctacggttactgaaccgatagcaactccggtacctacagcacagccggctatcggcgacagttcggacagtggcagttccggaggcggcagttcggatagtggcagttcggatagtggtagttccggaggcggcagttcggatagtggcagttccgggggcgacagttcggatagtggcagttccggaggcgacagttcagacagtggcagttcggacagcggcagctccggaggagatagctctgacagcggagacggcgaagatatcggctggacggatgaagtgttgtaagcagggatttgaataatgggagacatcaaaagatacggtaaacggcaccggatcttttgatggtaagcgccaaatattccagcggctagccaagaacctcctctaaatccataattatagttagactatttcactacaacaactacaattatggaggaaaacatcatggcaaacatacgtaaaccccgtgtttcaaaagaggaacagctgaaacttatcaatgaatgccgttctagcggcatgacagatagcgactggtgtcgtgagcacggcattgctgtcagtaccttttatttctgggtaaaacagcttcgcaaggaatcagctcagatcccggaaccagcttatggtcattctgaaaatcctcgtcccagacaggatgtggttcccattgatatcataccggaacacttcccactgcaatacaacgatccgtcccctgacacttaccatactttagagattattcttggctctgctacaatccgggtctctgataagacggatccggaactgctgtcccgaaccctgcagatcctgaaggcagttgtatgttaggcgatatctccggactggaacggatctacattgtctgcggctataccgatatgcgcaaatccattgacggcctctgtgccgtggtggaagatcagctgaaactggatccggcatccagtgcgctgtttctgttctgcggcaggcgcagagaccggatcaaagccctgttccgtgatgctgacggttttgtactgatctataaaaagctgacggtacatggaggataccagtggccaaggaaacagtccgaagtcagaaatctgacctggagagagtttgactggctcatgtccggtatcgatatcgaccagccaaaggctctgaaaccggaataaaaacatgcacagaaaaatgcctgtaaaccgcatattttcagcatttttcaggggtgattatcctttaggaaaactgctttttctggtataataaaggtatcagaaccaaggagaaaaagcatggcttccagtgcaaaggacattcagctgcgagagctgatggataccgtttcacaactgaagacaatgatggccgaacagacagagctgatccgttccctcagaacagtcattgatgaaaagactgcccatgaagcagtgctgcaggaacaggtggactatctgacgaagaagcttttcggcacctccagtgaaaagacacactctgacatcccgggacagctcaatctgttcaacgaggcagaggcagaacaggacccttcccttccggaagaagactgcattgaggaacccagccccagaaagaaaaaggcgacccatgcagaacttttcaaaggtcttacagtacacaaacaggtgatcccgctggcagaggaagataagatctgtccgatatgtggtacaccaatggaacgcatcggggaagaatacgtccgcagggagctggtattcacacctgccagatgtgagatctatgagtactatacggaaagctatggctgtcccaactgcaaggatggaaaaggtgataccgaaaaagctgtgatcatcaaatccaaagcagcaccggcactcattgggaaaggtcctgcttccccttctatagttgcatggacgatctaccagaagtatgcgaacagcctgcccctttaccgccaggaaaaggactggaaggaatacggggcagccatcagccgtacgacccttgcaaactggatcatttatagtgcggaacattatttccggccactgtacgattacttccaccgtcagcttctgctgagggagttcctcatggcggacgaaacccgggtacaggttctgaaggaacccgggcgaagtgctgaaagccagtcattcatgtggctgttccgcactggggaagatggtcagcccaccattcttctgtacggatacactccgacaagaagcggaagcaatgcggcagacttcctgaatggttttcgtggttatctggaaacggatggctaccagggctacaataaagtgtccggcataaaacgctgttcctgttgggcacatatccgcagatacttcgtggatgccattccgaaagggaaacagctggattacaaccagccagcagtacagggtgtccactactgtgaccgcctggcaagactggaaagcaccattaccagcaaatgcgggacggattatgaaaaaaggaaacaaatgcgtctcgagaaggaaacgccggttctcgaggccttttgggcgtgggttgacagccagcatcccacccgaaacacccgtctggacaaagcgctgacctatgtgaagaaccgccgggagacttccatgacttatctggaggacggacgctgcagcttcaccaataacctcagcgagaatgccatccggccgttcacggtcggtcgcaagaactggctgttcagtgactctgtggaaggtgcacaggccagtgccattacatacacgatggtggagatggcgaaggcacacaacttaaatatctacggttacctcagctatgttttggagcaaaggccggatgaaacctggagtgatgagcagcttgcagaactggcaccctggagcgaaaaactccaaactctaaaaatatgagaatgaatttgtagtaaagtgttccaactcaaaatgagttggggcaaatttatagctaccgttggattatttggcgcttacttttgatgtctcccattagtttttatcaggttttagtaattcttatttctctaaatcaatcgtctttaataattcgcaaatctgttctacatttatgctagcgcattatatatctgcgcgttgcggcaactcacaattattttccggaattgtaaatgctcgtataaagtctattagggatgtctgacttttatcggcaattactgcattatcatataggtattcgattaagggcggaaagagcttctgataaggctttctaaaatctttggctaatggcagaaaaaatttttccatagtataatgttttccggcgatatcaacagaatgcgtaaaaccgaacagaaacaacagaaggagacgatcgtttccttctgttgtttttatataatcacgtacgatagtatacgaattcatggtatcaatgtcctgccataccggatccgtcgatgtaggactggctagtttcaggttatcaatgggaccctggtcaagacggacaatatcctgcatcatataatattcgagatatttttttaaagtcttagctttgatagggtttttggtatacttctgattatagaggtcagtcagaaaatgaatatcttcgtttccggtgagatcattttcgactaatacagttttgacatgggcaaccatgagatttatatggcgagaataaccctgtgcatttgccatgtagtctgtaaaatcatggcgtaatggaagaagcagaacagtatttaagctgccaagagccggattgtaagtacgaaggacattcataaaggtaaaaaaacaatcttgtagaatatcttcaaaattgatgtaagaactattggaaaagtacagcctgcattgatttgtgataaaaggcagatgttttttccacaaaaagaaaaggatgctcttagactcttcacaaggaacaataaaggagttatatttttttattaactcatcttccgaaatagtgtcataagtagttgattccatgcgtagcctccatgtgttgcatttaattataagtgaaataaaaaatatagtcaaattgaaataaaagatgacatcgttttctgtcataataaaatgtaggtttaagtatgtgaacagtatgccggagacttaaaacctatgagtgggtctaaatattggggaatatcgaatgggaggaagaaattgattgaaattcggtaagcattgagaaagtttaggtgatgttatgaattattttacagatatgaactctccgtcggtgacttctgaccgcgtcatttacacagcatctgatttcgcacgttcttctctgttgtcactacaggagacgggaacgctctcagcgttaaaaccgcatacttcttcacgttccaatctggattcctacttgtattttacggtgctgtcaggtagtggcagactgacttacggtggggagacctatgagctgcgtgccggagattccgtatttctcgactgtacgctgccgtatgcacatacgacggaagaagagctctggacactgtcctggtgccatttcgatggaccacaaatggcacatatttatgaaaaatacaaagttcgcggtggaaaaactgtcttccggtcacaaaaaactttggaataccgggaaattctcgaaaaactgaaaatggttgcggcttcggattcttatgtccgtgatatggagattaacgcactcttatcacaattgctggtgcttttgatggaggacagctggaacccggaaaatgatgctgtgaagggaaagcgggtgcacgtggtcagtgtacgagagtatattgacagcaactatgcctcggacatcactttggaaggactggcggcacagttttttatcaataaaacgtatttatccgaaatgttcaaggaacaatatggcatagcactgaaggattatctggtgtctgtgagaatcacagaggcaaagcggctgttgcgtttcacggacaagacaacagaagaaattgcaacaatggtcgggataaacggcgcaggatattttagcagaatgttcaaacgtgtggaaggtgtgactcctacggaatatcgcggaatgtggtaataagatacaatagaaaccgaagaaagtacaagagaaaccgaagaaagtgtctttggtttctttttttgttatattataatgaaatcatattacaaagtggcgcaaggcaggaggtaacagcgtgaagagagcattgattacaggagtaacaggacaggacggttcttatctggcagaacttttattggagaagggatatgaagtctacggcatgatccgtcgttcttccgtagactatagagaacgcatcgcacatctggagggaacccctaattttcatctgaagtacggcgatctgggagattcgatcagcctggtaaaattgatcggcgaggtgaaaccggatgaaatctataatctggcagcgcagtctcatgtgcaggtaagctttgatgtgccggagttcacggcagacatcgatgcgaccggtgtattgagagtattggaagctgtcagagtgtgtgggctggagaagacctgccggatctatcaggcatctacttctgaattgtacggaaaggtagaggaagtaccgcagaaggagacgacaccgttccatccctacagtccgtatgctgtggccaaacagtacggctactggatcgtgaaggaatacagagaagcttataacatgttctgctgttccggtattttattcaaccatgagagcgagagacgcggcgaaacctttgtgacgagaaagatcacactggcagcagccagaatcgcacagggcaagcaggacaagctgtatctgggcaatctggattctctgcgtgactggggttatgcgaaggattacgtggagtgcatgtggctgatcctgcagaacaagaaaccggaagatttcgttattgcgacaggcgtacagcattccgtgcgtgagttcgccacactggcattccattatgcaggcattgaagtagaatggcagggagaaggcctggaggaaaagggaatcaacaaggcgaatggtcagatcatcgtggaagtaagtcctgatttttaccgcccgacagacgtggtcaatctctggggagatcccaccaaggcgaagacagagcttggctggaatccgaccaagacaagcttcgaacagctggtagaactgatgacgaaacacgacatggagaaagtcgctgtggagagggcgtaagagcatatccgcactaatccggcagattacgcatccatgctatgattaaacttatggtaactgtagtggttggaagataaataaaataagaaggtaaaagaaaataatggaaaaagacgctaaaatatatgttgcaggacacaggggaatggttggttctgccattgtccgggaactgaacagacagggttatacgaacattatcacacggacgcatcaggaactggatctgacccgtcaggcagaggtagaggaatttttcgcggcagagaagccggagtatgtgttcctcgcagcagccaaggtcggcggtattgtagcaaaccagaatgcattggctgatttcatgtggttcaacatgacgctggagatgaatgtcatcaattccgcatggaaaaacggatgcaagaagctggaattcttaggaagctcctgtatctatccccgtatggcaccgcagccgatgaaggaagactgcctgctgacctctgaactggagaagacgaacgaagcgtatgccctggcaaagatctcaggactgaagtattgtgaattcctgaataagcagtacggcacagattacatctctgtcatgccgacgaatctgtacggcccgaatgacaactatcatccgacccattcccacgtattgccggcactgattcgtcgtttccatgaggcaaaagtagagggtaagacagaggtgacctgttggggagatggttctccgctgcgtgagtttctgtatgtggatgatctcgccaatctatgcgtattcctgatgaacaattacagtggcaatgagaccgtgaatgccggcaccggcaaggaactgacaatcaaggaactgaccgagcttgtggcgaaagtagtcggatacaccggagagattaagtgggatacgacgaaaccgaacggtacccccaggaaacttttggatgtcagcaaggcagagaaacttggctggcattacatgactgagttggaggacggtatccggcttgcgtacgaagatttcctgaataatccgatgagagcggaacgataagagtaatttaaaagaagaacaattataagaatagatgtagagatacctgtgcagaaagaacaaatagagatggcaggtatgggagaaaagatattatgaatatcatattactgtcgggcggctccggcaaacgcttatggcccctatccaacgatgtcagaagcaaacagtttatcaaaatattcaaacaggaagacggctcctacgagtccatggtgcagcgtgtctatcaccaaatcaagaaggtggataccgaagcaacggtgacgattgctacgagcaagacacaggtatccgcgatccataatcagctggggcaggatgtcggaatctccgtggaaccctgtagaagagatacgtttcctgccattgcgctggctaccgcttatctggtagatgtacagaaagtctcccctgaggaatccgtggtagtatgtccggtagatccttatgtggaagcggattatttcgaagctctgaagcggctttccgcccaggcggacaaaggcgaggcgaatctggtgctgatggggatcgaacccacctatcccagtgaaaaatacggttacatcattccgaagtcatcggatgagaccgcgatggtagcgacttttaaagaaaaaccgactgcggatgtggcaaaaaagtatatcgcacagggagcactgtggaacggcggcgtctttgcctataaactgaagtatgtcatggagatcgcccataaattaatagattttgcggattatcatgatttgtttgcgaagtatgagacccttccgaagatttcttttgattatgcggtagttgaaaaagaagacagaatccaggtgcagcgtttctccggtcagtggaaggatcttggtacctggaatactctgacggaagccatgcaggatgctgtcgttggaaaaggggtgctgaacgacaactgctccaatgtgcatatcgtgaatgaaatggatgtgccggtgctcgcgatgggattgcatgatgtcgtgatctcggcatcaccggaaggcattctcgtatctgacaaagagcaaagttcctacatcaagccgttcgtggacaggttcgaacagcagatcatgttcgcggagaagagctggggaagtttccgcgtgctggatgtcgagaacggatcgatgactatcaaagtgacgctgaatgagggacattccatgaactatcataatcacaagcaccgtgatgaggtctgggttgtgatctccggagagggaatgaccgtgatcgacggcacggagaagcaggtgaaagccggggctgtggtaacgatgcctgccggatgcaaccacaccgtgatcgcccaaacggagctgaaactgatcgaaatacagatcgggaaagagatcagtgtgcaggataaggaaaaagtagagagataagtatcagaaatacaaaaagacctggcatacaccatgatctgcaggaaaacctttgatgattccagagtgccgaaaaaatatatcttctgaactgctagacagctttggacggcaactaacagagacagaagatataaaaggagaattgcataaagcaatccacaactgagattattttaacaaagaaggtgatgcctgccaagaggaaaaaaatttataaacattttttgaaaaacgttcccatgcaattatacaatgtggataactttttgaaatttcaaaaaagtgttcaaaaaatatttttccaaaatggaaggcaataaagtaaatttacctttcaatgctgaataaattgcttaataattgcgttttcccatataatatgttattatggttaagaattttgagctttgaaagtgaggacattatgttattagataataaatccattttgatcacaggtggtaccggcagttttggtaaagcatttaccaagtatgtgttggacaattacaatcccaagaagatcatcatttattcccgtgatgagttcaagcagtttatcatgcagaatgaattcaaacagtatgctgataagcttcgtttcttcattggtgatgtcagagacaaggaacgtctgaccagagcatttgaaggtgtcgattatgttatccatgctgcagctctgaagcaggtgcctgcctgcgaatacaatcccgctgaggcgatcaagaccaatatccacggtgcgcagaatgttattgatgccgcattggataccggtgtgaaaaaggtggttgccctgtcaacggataaggctgtcaatccggtaaatctgtatggcggaaccaaactggtatctgacaagttattcattgctgctaacgcttatgccggaagcaaggatatctgcttctccatcgttcgttacggtaatgtggccggaagccgtggatctgttattccgttcttccacaacattatcaagaacggcggtaccgagctccccatcaccgactatcgcatgacccgtttctggatcagtctgcagcagggtgtggaactggtgatcaaggctttggaagagtccaagggtggtgagactttcatctccaagattccttctttcaagatcacagatctggctcaggcaatgctgccgggatgtgagatgccggaagtcggaatccgcgaaggcgaaaagcttcatgagatcatggtaaccgtggaagattccatgaacacttacgaatatgacaagcactttatcgtatatcctcagatggtatggagtgaatccagacgtgctgttcctacgggcaagagagtcgctgagggattctcttatagttccggtaataataccgagtggctgagtgtagagcagattcgtgaattgttaaagacaattgatttagaaaaataattttaaaaagatctgccggtatgagagcagatcttttgcttttattccaggggcttatttcttaaatagcaaatcgtagtaggaaaataagcagaccattagaaagaggactagtatatgtgtggaattgtaggatttacaggaaatagacaggcagcaccgatccttctggacggactgtcaaaactggaatatagagggtatgactctgcaggacttgcagtccgcgatggcgatgccctggcacaggtagtaaaggcgaagggccgtctttcgaatctggtcgagaaaacggacaatggaaatgcgttgaaaggaacctgtggtattggacatacccgttgggcaacccatggcgaacccagtcagatcaacgcccatccccatgtctccggcaactgtagcagatccggttccggcgcggtagaatcggaagtcgttggcgtacataatggtatcattgaaaattacacggaactgaaagaaaaactgctgaagcatggttatacattttacagccagaccgatacagaggtagcgatcaagctggtggattattactacaagaagtataaactcggtcccattgatgccattgcgaaaaccatggtgcgtattcgcggatcctatgcgttggagctgatgttccgtgactatcccggtgagatctgggtagcccgtaaggacagcccgatgatcatcggtattgcggatggggagacctatgtggcatccgatgttccggctatcttgaaatataccagaaatgtgtattatataggtaaccttgagtttgcaaagctgactccgggagaagctcatttctataatctggacggggatgaaatcgagaagcagactacggaaatcaaatgggatgcagaagcggcagaaaaggccggttttgaacatttcatgatgaaagagatccatgagcagccgaaagcagttcaggatacactgaattctgtgatcaaggatggcaggcttgatttcgaagcagtgggaattaccgaagatgagatcaagggctttgaacagatttatattgtagcctgtggttctgcatggcatgtaggcatggcggcacagtatgttctggaagacatggcagatatttcggtgcgtgtggaacttgcatcagaattcagataccggaaaatgtccctgaacccgaaggcactgatgatcgtggtcagccagtccggtgagacagcggatactttggctgcattaagacttgcaaaagaaaagggcattaccactatggccattgtcaatgtggtaggcagcagtattgccagagaagcagacaaagtattttacacactggcaggaccggagatttcggtggcaaccacgaaggcctatagtgcgcagcttgcagcaatgtattgcctggcagtgcagtttgccaaagttcgtggtaagatcacagaagagcagtatggttattatattgccgaactgctgacgattccggagaagatacagaaaattctggaagacaaggagcgcctgcaatggtttgccgcaaagtatgccaatgcgtctgatgtattcttcgtaggacgtggtatagactatgccgtttgtctggaaggaagcctcaaactgaaggaaatcagctacattcattccgaagcatatgcggccggggaactgaagcacggaaccatcagtctgatcgaacagggaacgctggtgatcggtgttctgacccagaacgagttatacgagaagaccataagcaatatgctggagtgcaagagccgtggtgcataccttatgggcatgactacctatggcaattacgaaatcgaagatcaggtgaacttcgctgtttatgtgccgaaggtggacgagcatttcatggccagccttgcggtgataccgctgcagctgctgggatattatgtcagtgtcgcaaagggactggatgtagataagcccaggaatctggcgaagagtgttacggtggaataa

SEQ ID NO: 15 - DNA, 12110 bp, unidentified
  source 1..12110: mol_type = unassigned DNA
tggtactgcgtaacagtgggagagtaggtagccgccgtttttaatggaagcctccagtttacgaactggaggcttttttatttttctcctcctttgatagaggtaggaagaaagtctttgtaatagataaaaacggtcgaaaaaggagttaaattcaaaaatatctgccaattatggtatgataatggaatattatttgtatctttgtcgcccgatttatatagtattgctttgggaaagtttgataaatataagatagaattgaagaatatgaaggcggactctgttaaatatgagtttacgctggataatcaattctttgtagatctggatggaccagaagtgcaaaaaggaaaactaacagtggagctgaatgtgaaaaaaacatccggtgttttcttgttagagttccagacagaaggctttgtcattgtaccatgtgaccgttgtctggatgaaatggagttacccattttgacatcagataagttgaaagtcaaattaggctcttcatttgccgaagaaggtgatattgtcgtggttcctgaggaagacggttacataaatattgcatggttcttatatgagttcatagcattgaatattcctatgaaacatgtgcatgctccgggtaaatgtaataagggtatggtaggtaagctgagtaagcatttgcgcacttcaggtgatgatgatgacgatgatattgcagttgaattacccgaagaggaaattggcaatgaagagccacaagaaatagatccgagatggaatgaattaaagaaaatattagataataattaaagtttagaaaaatggcacatcctaaaagaagacaatcaaaaacgagaactgcaaagagaagaactcatgacaaggcagttgctcctactttagctatctgccctaactgcggcgaatggcatgtttaccacactgtatgtggagcttgcggttattatagaggtaagttagcaatcgaaaaagaagctgctgtttaatcagtagctttaaacacgtttgtacgttttataaaataaagccggcgagcttcggctctgtcggctgtttttttataaagagtacaaactaataatttggaatgatggaaaaaattaatgcagtaataacaggagtcggaggttatgtacctgattatgtcttgacgaatgaagaaatctcaagaatggtagataccaatgatgaatggattatgactcgaattggagttaaagagagacgtatccttaatgaggaaggattgggaacatcgtatatggcgcgtaaagcagccaaacaactgatgcagaaaaccggttcaaatcctgacgacattgacgcggtaatcgtagcaacaactactcctgactatcatttcccttcaaccgcttctattctgtgcgataagttgggattgaagaatgcatttgcattcgatttgcaggctgcatgttgcgggttcttatacttaatggaaacagctgcttcactcatcgcatctggtagacataaaaagattattattgttggtgctgataagatgtcgtctatggtaaactaccaagaccgtgccacttgccctatctttggtgatggtgctgcggcatgtatggtagaagctactacagaagattacgggataatggattctattctgcgtacggatggtaaaggtcttcctttccttcatatgaaagcaggtggttctgtgtgtcctccttcttatttcacagtagatcataaaatgcattatctctatcaggaaggtagaacagtattcaaatatgctgtttcaaatatgtcggatattactgcaactattgctgcaaacaatgggttgaataaagataatatcgactgggtaattcctcatcaggcaaatttgcgtatcattgatgctgttgcatctcgcttggaagtgcctttggataaggtaatgataaatattcagcgttatggaaataccagtggagcgacgcttccgttgtgcctttgggattatgaaaaacagctgaagaaaggagataacctgatatttacagcattcggcgcaggtttcacctatggagccgtttatgtgaaatggggttacgatggtagtaagagataataatcattaaactacaaatacaaatgaacgcatccatattcagatgcgtttttttgtctgtaaccaataaattataaaaattatgcataaggcagggtttgtaaatatagtaggaaatcctaatgtgggtaagtctacattgatgaatttgctggtaggtgaacgtatctcaatcgctacgttcaaggcacagacaacgcgtcatcgtatcatgggtattttgaatacagatgatatgcagattgtattctcggatactccgggagtattgaaaccgaattataagttgcaggaaagtatgcttaatttttcggagtcggcgctggcggatgctgatgtgttattgtatgtaacggatgtgatagagaaacctgacaagaatctggagtttatcgaaaaggttcgtaaactgcaagttcctatcttattgctgattaataaaatagatttgactaatcaggaagaattggtaaagctggtggaagaatggcatgaattgattccacaagcagagattattcctatttcggctacttcgaagtttaatatagatgtagtgatgaaacgcatcaaggaactgttgcccgattcacctccctattttggtaaggaccaatggacggataaaccggcccggttctttgtaacggagataattcgtgaaaagattctgctttattatgacaaggagattccttactcggtcgaagtagttgtagaacaatttaaagaagatgcaaagagcatccatatcaatgcggtgatttatgtggagcgtgattcacagaaaggtattatcattggtaagcaaggcaaggcattgaagaaagtggcaacagaagcacgtaagactttagagcatttctttcagaagtctgtttatcttgaaacttttgtgaaggtggataaagactggagaagctcggacaaagaattgaaaaactttgggtatcaattggattaaaatcgactgtgatagccgtaaacaagaaagaacatgggaaatttagtagcaatcgtaggacgtcccaatgtgggaaagtctacactttttaatcgtctgactaagactcgtcaggctattgtaaatgagcaggcaggaacaacccgcgaccgtcaatatggtaagtcggaatggttgggacgtgagttttctgtcgttgataccggcggatgggtggtaaactcggatgatgtttttgaagaggaaatccgtaaacaagtattgttggctgttgatgaagcagatgtaatcttgtttgtagtagatgtggtgaatggagtaacagaccttgatatggaggttgctgccattttgcgtcgtaccaagaagcctgttattatggtggcaaacaagactgataataatgatttgcaatataatgcagcagaattttactcattgggacttgatgacccgtattgcatttctgctttgagcggattcggtacaggagacttgatggacttgattgtaagtaagtttaataaagaaggagaagaactgttggatgaggatattccccgttttgcagttgtgggccgtccgaatgcaggaaagtcatctatcgtgaatgcctttatcggtgaagaccgtaatattgtgacagagatcgccggtactacgcgtgactctatctatactcgttacgagaagttcggttttgatttctatttggtggatactgccggtattcgcaagaagaataaagtgacggaagacttggagtattattccgttatccgttctatccgctccattgagaactcggatgtatgtattctgatgattgatgctacccgtggtatagaagggcaggacttgaatatattttcgcttatccagcgtaaccaaaaggggctggtggtagtggtcaataagtgggatttggtagagaataaagacgccaaggtaatgaagtcatacgaggaggctatccgctcacgttttgctccatttgtggattttcccatcatatttgcttctgccatgactaaacaacgcatttttaaggtgttggaaatggctaaggaggtttatcatgcccgcacaacccgtattccgacagctcgtctgaatgaagagatgttgccgttgattgaagcgtatccgcctccctcaacaaaaggaaaatacattaagattaaatattgtacccagttgcctaacacgcaagttccttctttcgtgttctttgccaacttacctcaatatgtaaaggagccatataagcgtttccttgagaataagatgcgtgagaagtggaagctgtcaggtactccgataaatatttatatcagacagaaataaagtatttaatattaaaatcaaatgagactgtttcagaataagagtatgagacagtctcattgtttttattactacatggacggaatgtttctatccgaatgcataagcaaatcttttttggaaatcagagtgtcccaacgggaaaaatgcaaacagatttgtcatcaattcaggtgaacatgaacatacaggttcctccctatggcggataatttctttattttttcttttccatttccctaatctcttcctcttttactttgcgcaataagtcggaagcgaaaataaagttgttcaggcgttcgtttgttgctgtgaatacatcattcttagtgccttcccactctttatgtccttggtagatgtagagaatactgtcaccgatgcccattacggagttcatatcatgggtattgataatcgtggtcatattatattcggtagtgatatcatgaatcagttcatctattaccaacgatgttttagggtctaagccggagttcggttcatcacagaacaagtattgcggattcagtgcgatggcacgtgcaatggcaacacgcttttgcataccaccactgatttcgcccggatatttattttgagcttcaatcagattgacacggtcaaggcagaattgagcacgtctcagtcggtcgcgataggtatcattagaaaacatatcgagcggaaacatcacgttttccaatactgtcagtgaatcaaacaaggcagcactttggaaaatcattcccatttcgcgacgtaatgtctttttttctttcttgttcatgcttaggaagttacgcccgtcatagaggatctctcccttttcgggtatcagcagccccacgatacatttcatcaatactgtttttcccgaaccactctgaccgataatcagattggtttttccgttatcgaaaatagcattgatatctaccaatacatctttgccttcgaatgacttatataatgatttaacttctatcatcccattaaaagttgtgttaatactaagtcagagaacaaaatcagtacactgctcatgaccacagaatctgtactagccttgcccacggctatggagccgccttccaccgtatagccgaaataggccgacacgctggaaatgataaaggcaaagaacagtgatttaataaagctacaccagacaaaccattcttggaaactgtattgcaagccgtattccaaatcttccgcattcagcacgccgccgaaccaacaggtgcaaaaggcacctatgatacctgagaaaatgctaaagattaccaaaaagggaatcatagtcatcaaagctgcaattttgggcagaataagatagccggccgaattgactcccattatttcaagagcgtcgatttgctgagtcacccgcattgttcctatctccgaagcaatgttggaacctaccttaccggcaaggatgagacacatgatggaggacgaaaattccaacagcatgatttcacgagtagtgtaaccaactacaaaacgtggcatccaagggctttcgatgtttaatttgatttgaatggtaatcactgcaccgataaagaatgaaatgagcaacacaatgccgatagaatttactcccagttgcaccatttcattgaggtattgcttgaaaaacattctcatacgttccggacgtgcaaaagtacgtcccatcagtatgatgtattttcctacagttgttatgggtcttatcatcatagttttcacaatttcctgcaaaagtagccttttttgtctatataaatgcaaaagatgttctgattttctgttctgttatgcgtttcctaaacttttttagtacttttgttccaaaattcgtagatatgtcagagctggaaatagaacaacaaaatgcaatgcccgaaaatggtaaaatggtattgcgtactgaaaatctggtaaagaagtacggcaaacgtactgtagtgagccatgtttcctttgatgtgaagcagggggagattgtcggtttattggggccgaacggggcaggtaagactacttctttttatatgactaccggtttgatcgtacccaatgaaggacatatttatttgaatgacttggatatcacttcctatcctgtgtataaacgggctcaaaacggtatcggctatttggcacaagaagcgtctgtattccgcaagatgagtgtggaagataatatcgcttctgttttggaactgacaaagaccagtcccgaatatcaaaaagagaaactggaaagtttgatagcagagtttcgcttgcaaaaagtgcgtaagaatttgggagaccagttgtcgggaggagagcgtcgtcgaacggagatagcccgttgtctggcaatcgaccctaagtttattatgcttgatgaaccgtttgccggtgtagaccctatcgcagtagaggatatacagcatattgtgtggaaactgaaagataagaatattggcattctgataactgaccataatgcattggaaactctgcgcttgacagaccgggcctatttattgtttgaaggaaagattctgtttcaaggtacgcccgaagaattggcagagaatccggttgttcgcgaaaagtatttgggaaccaattttgtacttcgccgtaaagacttccaattggaagaagccaaccgaaaacagcagatgcaaggctaaaagatatattagttacgtataggcttaataaataccaaataaaaaaggctgcaaatagttaattcgcagccttttttagtctgtatcaatcagtaattacattcgtttcggtaatgcttctttgataaccaattgacggcccataaattcagaaccgttcagttcgttgatggctttagcagcatcctgatcatcttccatttcaacaaaagcaaatccttttgacttacctgtttcacggtctttgataacctttacagaagttactactccgtaagcagacattgcctgttccaaatctccttccttaacacggtagttaaggtttccaacatacatattcatagtgaaaaaataaaaataaataaaataaaaaatactctctgaatggtgattatgaatgagatagggggattagaacgacagagagtttacgtaagtgctatgcgtacagaagtaaaaccttgtaataaaaatcactagctatattatctatcaccagttcgaccacaaaggaacgcataaaatttgaataagcaagaaaaaaagcgacttttttttcttttttttatttgtgccattttatttatcttttatcaggctactttctgttgtcaattagttttttttagcctgtgtatttggtaattgaaagattaaacactaattttgcaacctctttaatgagaaaatctgaaagaagtaacaattaaataaaataagtcagaatgaatatttcattgcaaaacgttgacaaggtaagtgcattgcttactgttaatatcgaaaaggccgattatcaggaaaaagtagaaaaagtgttgaagacttaccgtcagaaagccaacataccgggtttccgtaaaggcatggtacctatgagtcttatcaaaaagcaatttggtaaagctgtgcttgctgaagaagttgataagctgatgcaggaaaaagtaaacgaatatatccatgaaaacaaagtgaatatgctgggtatgccgttgccgaatgctgaaaagatgcaaccggtggatttcgatactcaggaaaactttgagtttgtgttcgatatcgctttggctcctgaattcaatgctgaaatcacaaatcaggatacagtagattattatacgattgaagtggctgacgaattggtggaacagcaagtgaagatgtacactcagcgtgcaggcaaatatgataaggtagaagcctatgaagacaaagacatgattaagggtctgttggctgaattggatgaaaacggtaatactaaagaagggggaattcaggtagaaggtgctgtaatgatgccgacttacatgaagaacgatgaccaaaaagcaattttcaacggagctaaggttaatgacgttttggtattcaaccctgctactgcatttgataacaacgaagcagaactgtcttcattgttgaaaatcaagaaagaagaagttgcggacgttaaaggtaacttcagcttccaagtggaagaaatcacccgcatggttcctgcagaattgaaccaggaattgtttgatcaggtgtttggcaaagacacagtgaagagtgaagaagaattccgtgcaaaaatcaaagaaggaattgccgttcagtttgaagcagacagcaactacaagttcttgatggatgttcgtgattacctgactaagagagtaggcaaacttgagttcccggatgctttgttgaagcgcatcatgttgctgaataatgaagaaaagggagaagcgttcgttgctgaaaactacgaaaagagcatcgaagaactgacttggcatttgattaaagaacagctgattgctgcaaatgaaatcaaggtagagcaagcagatgtcttgaatatggctaaagaagctacccgtcttcagttcgctcagtatggcatgttgaacattcctgaagaaatgctcgaaaactatgcaaaagaaatgctgaagaaaaaagaatcagtagaatctttagtgaaccgcgccgtagaaagcaaactggctgctgctttgaaagaaaaagcaacattgaaccacaagtcggttacaatggaagaattcaacaagatgtttgaataatattttggtgagataagcattgattgctaaatcttactaaaaaagggggcttttgaccaaaaattttcgttataagcaaaagtttcgatacgtcgaccgtatttttttgtacttttgtttgtttgaaaaaatggggttgaaagcctctttttgtgaataataactaaaccattaaattatggatgattttagaaaatttgctactaagcatttaggaatgagcagcatggtgctggatgatgtcattaagtctcaaggcggatatctgaacccttatattttggaagaacgtcagttgaatgtgacacagctcgatgtattctcgcgtttgatgatggacagaattatctttttgggtacagaaatcaatgactatacggccaatactcttcaggctcagctcctttatctggattctgtagattcaggaaaagatatatctatttatattaattcgccgggtggttctgtttatgccggattgggcatttatgacaccatgcaatttatcaatagtgatgtggctactatttgtaccggtatggctgcttcgatggctgctgttttgctggttgcgggaacagaaggaaaacgttcggcgctgacacactctcgtgttatgattcatcagccgatgggaggcactcaaggtcaggcttcggacattgaaattacagcacgtgaaataatgaagctgaagaaagagctttatacaatcatagcagagcattcgcatactgattttgataaggtgtgggctgattcagatcgcgattactggatgacggctcaggaagcaaaagagtatggtatgattgacgaagtgctgtctcgtaaaccggctctataatatataaggtataattacattaatattaagagaaaattggaagatagtaaaacaccaagaaacaagagaaaatgcagtttttgcggacgctctgaaaatgaggtaggttttcttattaccggcatgaatggctgtatttgtgacagttgttccgagcaggcatacgaaattaccaaagaagcccttcgtcagtcgcaaggaaaggctgaagaactcaacttgaaagagttgcctaaacctcaacagattaaagaattcctggacgagtatgttatcggtcaggatgatgcgaaaagatatctttcggtagctgtttacaatcactataaacgtttgcttcagaatgcagacgaggatgatgtagaaattgaaaaatccaacatcatcatggtgggtagtacaggaaccggaaaaacactgcttgcacgtacgatagcaaaactattgcatgttccttttaccattgttgatgctactgttttgaccgaagccgggtatgtgggggaagatattgaaagccttctgactcgtttgctccaagtggcggactacaatgtggctgaagccgaaaaaggtattgtattcatagatgaaatcgacaagatagcccgtaagggagacaatccttccattacccgtgatgtaagcggtgagggagtacagcaaggtttgttgaaattgttggaaggttcggttgtcaatgttccgcctcagggaggacgcaagcacccggatcagaaaatgattcaggtcaataccaaaaatattctgttcatttgtggcggagcgtttgatggtattgaacgaaagattgcccagcgtctcaacactaatgttgtaggctacagtgcagccaaagaaacggtaaaaatagaccgtggtaatatgatgcagtatattgcaccccaggatttgaagtcattcggactgatacccgaaataatcggtcgtctgcctattcttacttatttgaatccgttggatagaaatgcattgcgcagcattcttacggagccaaaaaattctattatcaagcagtatgtcaaactgtttaaaatggataaaatagaattggtatttcagcccgaagtattcgaatacatagttgacaaagctatcgaatacaaacttggagcccgtggattacgttccattgtagagacaattatgatggatatgatgtttgaattaccatcaaagaaggtgaaaagcttcgaagtgacgttggattacgcccaaaaacagatggataaagcaaatatctcacggttgcaaaatgcttagtatcaatatagtaaagggagagagaaagaaaaatgcaattcttctgaaaaatattactcgaaatattcgtgtaatttgagaacttgtttataactttgttagacaacaaaagatgtaaaaacaagaacggggaaccgcgaaaaactatttgagacaatggaggagaatataaatttgactaacgcactgaaaaagtattttggatttgatactttcaagggaaaccaagaagcaattatccgtaatttgctggcgggaaacgatacatttgtattaatgcctacaggtggcggaaaatcattatgttatcagttgccttcactcatcatggaaggaacggcaattgttatatctcctttaattgcattaatgaaaaatcaggtggatgccatgcgtaacttcagcgaagaagacggagtggctcattttatcaattcttcattaaacaagtcggctatcgaccaggtaaaatcagatattttgagcgggaagaccaaactgctctatgtggctcccgagtcattgacgaaggaagaaaacgtagagtttctgagaggcgtgaagatttctttttatgcagtagacgaggcacactgtatctcggaatggggacacgatttccgtcccgagtaccgtaggatccgtcctattataaatgaaataggaaaggcacctgtcattgcgcttacagctacagctactccgaaagttcgtatggacattcagaagaacttgggaatgctggatgcggcagaatttaaatcttcattcaatcgtccgaatc

SEQ ID NO: 16 - DNA, 16449 bp, unidentified
  source 1..16449: mol_type = unassigned DNA
ctattctgtggcagtattaattaaaccgtttttctgcctctttagcgatttctgtcttgtctccaccttctctgcagcttccttgttttctgcactgacagagatatagtttttcagcttcgactcggtatcggaggagcgcaccacaagagaaccgttatcttccagcagggacttgagcacgtcagacttcggcagaccatccagacccggagcgtaatccagcagcttaacgaccttcttgccgccgaacaccttgatggcgccacggaatgcctgcataatgttctgcatcttggcaaaaccggcgctgccgtcaaactcataattgtgcagattgttcaggcaatatccgtaagccttgtacaactcgtccagcaggctgatgcccttggtcgcatagtagctgaacatctcacagatcatgtacgcaccgtctacgccgtctttgttacggacgtaggagccggtcaggtaaccacagctttcctcatagctgtctttcttgccctgcttttccaacttaccgatctgctcgcccatatccatggtgacgatcgtcttgaccataaccgggtcaacaggcatcttgccgtgcttcacacgctgactgcaattataatccagcagcatgccggtctggttgccggtcagcagttcgtactccactgccttattcttgacggcgatgcccacacggtcacagtcagggtcagtcgccagcagcaggtcagcgttgcacaccttagcatatccaacatttgaaacatcatatgtctttactgcgtcaagaatccgcaatgccagaagcgtctccactcattcgtcagttaaataccatacatgagatagtcaaaaacgctaaccgtcaaaatttcagtcatattcttttcctcaatcagtccatcatgcccgtattataccactgaatcatacgctcataatcgtcctgcgtatccagatctcttatgcgcatcggaactgcctttagaggaagaagtggttgcagcatctcatcaattccttgtgcccctgcaatcaaccggctcgataaaactttggaaaggcacccccattcatacttacttgggctacgtaagaattcgtttacttcattatttgaaacagccaagtaaattggttcacttgagtgtgcttcacatacacttatacattcctgtggctcactcataaatcgattgaaatcgtccctattaataagtaaatcgccatccataattacgacgtattttcgcgctccaattaatgtcttagataagctcacccctgagcctgtcttacgataatcattattaaaagcaaacattacatccttacggatatgctttacctccttgataaccttttctgcttgataaccaacggaaacgcgaatatcatcatactcatcgagcatttccagctgacgctgtataatagacttaccagctatttttaccagtgcctttgttgtcccaataccaagtctagtgcccattcctgcacaacagattacaacgctaatatcatcgtgtcccataatcatgtttccttctaatctttttatagaagcgtcctgagaaaatccgcgcatctattatcgtcgtaaaatgcataatcaatattctgaatcagcgatggcgcaatatccctaataccaccaaaaccaactgaaatattagcaactcgtgccataccagaatcattatctccatcaccaataacaacaagtggctgaacaaactgttttgcagtcaattccttatcaataacactgactacttgcgtgattttatcgtctttatagtttgctctagagcaatacacatgatcattgaggccgagtttgcgcatcaaatcattgatccaaatatctagatttccagttacaacgtagcacctatcacgattttcccttataaactgtgcgatattctcattcaagggtatctcagctaccatcgctcgcgtttctgatacattcataacgcttaatatttccaccctttttaggaaactactcttaaatggaatctctccattcatggttgcttccgtaagttctcgcatttctttttgtctatttaccttttctgcaatagtaggtaaaatttctttacgtgtaattgtcgaatccaaatcaaataaaaatatatactcagacatctctttcaatcctattctcagaactcagcattgcatttaatgtctccgccaattttcgaataaacatatcattatccgcttcatttctgatggcaattcttaaatattgtttctttcctttgattttcttacttagagtcttaataaagacctttttttcaagcaacattctctgttttaattcttctgcatccaaaccgtcaagcaattctaccataagatagtttgcttgagatggtattacacgtatatatcttaggtcttgaagctttgatataaatctagctctttcttttctaaatttatctagcgactttatatatgaatcacgatacttaccgcaaatctgcatataaaattcagcaaacgaatttatattccagattgatacatccaccttcatccttgaaattaatcctttatctccgcttgccaagacaccaagtctcaatcccggcacaccgtacgatttagaaatactcttaatcacgtatagatttggatattgatttaaaatttcttgatcaatcaaagatgaatttatctcatcagaaaaatcaacaaatgattcatcaataattatcttaatgcccttatctcttgcccacgatatcatcctcagcatatcgttcttaggaatataattacctgatggattatctggattaaccaatacaaggttagaaatcgtagttttgccaaagtattctataagatcactcgcactataggaaaaatcttctgattctaccagataattaaccgtttcgatttcagtatatctgttgggatattcatcaaacgtaggtcgaacgaatccagttttcccttttataaatcccatcattgacttaattagctctgcagcaccgtttccaacaataatactttctggagaaaccccaaatgcgctcgctgctagttccgcattaactctcatccctgacggatattgttcaagcaaaactttaaaattattctgcagttcctcaactagttcacgtggcggataatatggtgtcacaagataaaaataatccagatattcaggatatctccaatatccgccccaacttcccagcattttatccgcaatactttttttatcttttgaaaaaagaattgtagcctgatttacgtcctctgtattattgatttcacgccatacagcattgcttacacgcaaggccttaatcctcgtgtcgtttgacattgcaatcacattcaacggtacagaatattccagactatctcctagcacatcaattatgttttccaataccggaacaaaatatttttttgtaaaattcatatcaaatttgcaaattccaaccatccgacacgaattcaactgataagtcgaactcaattgagattcttgtccaactgacaaaacacgagcattttcgtcaacaaatactggtttgcctgtcatccaatttttataagtatctactgatacaacacattccccatccgtttcaagtatagatttgagaagattatcttccagcacaagctgagaatttagaataacagtatcatccattgacagatgttctcttcccaagaataccgagtaaatactctttgactctttgtaaaacttattttctaaaaacacaagttcagtctttaagtttaatcccttgctgaattcaattagactttctttattatttccagtaacgagaattatttttgaaacaatactattgtctagctgaatcaacattctttctattattggaactccatcgatttcaaccatccatggttcattactttttcccaatccagtcagacccattatctctcgatccgctaaaatgagtgcctgcattatgctccccttctctcgcttttaatttcaatctcaaatagacgactatcagaagcacaaatttcttctccgtgaaacctagtaatcagtacttcctccacaccatcttattgactacattcacatacccctgaataatgcgaactactttcatagacacagtttcatccatatagtcggggcagggcttgcccagaacgcccttctgcttcatctcaatggccatatcggtggcgttgagaagttcccgggtggtaatgccagccagaatgaagtcaccggcttccagtgcctccggacgctcggtggaggtacggatgcacacggcggcgatgggatggccaatggacagatagaagctgctttcctcaggcagagtgccagagtcggagacgattgccaaagcgttcatttgcagcttgttgtagtcgttgaagcccagcggctcattgacccggacacgtgggtccagctggaaaccgctcttttccagacggtgcttgctgcgaggatggcaggagtacaggatgggcatatcatacttctctgccagagcgttgatggcggtaaacaggctcaggaagttcttttcggagtcgatgttctcctcacggtgggcggacagcagaatatacttgtccttttccagccccagacgttccaacacattgcttttctggattttctccagattcatgtgcaatacctctgccatgggagagcctgtctgataggtacgctccttgggcagatcagtatctgccagatacttccgggcgaactcggaatagcacatattcacgtcagagatcacatccacgatgcggcgattggtctcctcgggcaggcactcgtccttgcagcggttgccggcctccatgtgaaacagaggaatgtgcagccgcttcgcagagatggcggacaggcaggagttggtatcgcccagcaccagataaccctccggctgcaactcggacagaagctcatagctgcgacccagaatgttaccgcaggtcacgcccagattctcgcccaccacgggcaccagaatatccggaccatactccccgaatgtgttcttcagttcaaaatcctcccagaaaacggtggaaagatttctgtcccagttctgattataatagaccacgcagcagtcaaaatactcccggcagcgcttgataacggcagccagtcggatgatctccggacgggtgccgcagccgatcatgaccttggtgcgtccatcatttttccatgtaaaattgtgttccataaaaatctcctaacgtcaaccagtatcttctcttacaccggctcgaagaaggtgtccggatggttcgggtcaaaaatttcgttgcaggtcatcaccgtcaccagattctccgtctccgacaggttgataatgttgtgggtccagccgggaatcatgtggacagcctcgatcttgtccccagaaacctcaaactccaccgtttctccggtgttgatgtttcgctcttggatcaggccgtgcccagccactacaatgaacagctcccacttggagttgtgccagtgctgccctttggtgattcccggacggctgatgttgatagacacctgaccgcagtcagcggtatgcaccagttccgtgaaagagccacggttgtccacgttcatcttcagggcatacttgaacttgtcggtgggcagataggtcagatacagggagtacagcttctttgcaaaggagccatccggcatcttcggcatcatgagggtcgtgggctgcgccttgaactcctgcaacagatccacgatttcgcccagcgtgaccttgtgggtcgcgggaacgcagcagtagcgaccgtctgccttcagaacagtctctacaccgtcaaactcgcagtgctgctccttgccttccagcaggtcgaacatcccttccacaagatcgtcgatgtacagcagctccaactcggtgctgcggtcgttgacggtgaagggctcatcattggcaactgcccagcagaaggtgctgacagcactgttgtacttagggcggctgtgtcccatcaggttcacgaaacggtagacggcaacctttgcgccggtctccttggcgtagtcgaagaacagctcctcgccagccttcttgctgcggccgtactcgctgttgccaaagcggcctgccaacgtcgcctgaatggaggaggacagcatgatggttgccttgttgttatactttttcaggcagttcagcaagtcagatgcaaaaccgaagttgcccttcatgaaatcttccgggttctccgggcgattcacccctgccagattgaacacgaagtccgccttgcggcagtactcgtccaactcctccggggtggaatccaaatcgtactcgaagatttcttcaatattcaatgccgggcgggtcttattttttccatcccggatgtttttcaggttgttgcacagggcggttcccaccatgcccttggcacctgtgactagaatgttcatcctatcacctctttaatgtactgcggtgcagtccggaatatctgcgccatccagcacggttgcattattgcagatggtgcagttgctaccgatgcgggcaaagttccccaccgttgcgccggtgcgaacaacactgttggtgtaaatcaaagcgtagtcccctaccgctgcatcacagtgggcctctgttccggcattcagcaaaacaccgtcgccaacggacgcaccgttctggacacaggcattttgcaataccacgcagccacagcccaattttgcgtatggactgatgtaggcgctgggcgcaacgatattgggaaaagcaaagccaagggtcttcaccttctcatacacctgtgctcggaaccgattattgccgattcccaccaccagcaagccatactccttccgcagctccggcagatcagcaagaccgccaaccactggaatgccgcaaatctcaacgccaacaggctgtccatcatccacaaaggcacagtcatattggagcatcgcctgctccgcaaccatacgcccaaagccgccagcgcccaccagcagcagcttttccttagacattggggatgcctttcagctcattctggacatattcagtggtcagaatcttcttcacagtgccctccacatccagacgagtggtattatggctggtgtaagattcatctgccatggtatgtacttcgcccttgaccacgaacttatcatagttcaggtcgcgattatccgcagcaacacggaagtaatgacccatatcctggctgcgcagacgctcctcacgggtcatcagagtctcgaacagcttctcgccgtgacgggtgccgatgatgttcgtgccggtatcgccgaacagctgctgaacagccttagccaaatcgccgatggtagaagcatcagccttctggatgaacaggtcaccggggttggcgtgctggaaagcgaacatgaccagatccacagcctcgtccaagttcatcaggaagcgggtcatgttggggtcagtgatggtgatggggctgccagccttgatctggtcaatgaacagagggatgacagagccacggctgcacatgacgttgccgtaacgggtgcagcagatggtggtgccgccacgctccgcagccacacgagcatttgcgtagatgacgtgctccatcatggccttggaaatgcccatggcgttgatggggtaagctgccttatcggtggacaggcagacgacacgcttaacgcctgcgtcaattgcagcgtgcaagacgttatcagtaccgatgatgttggtctggacggcctgcatggggaagaactcgcaggaaggaacctgtttcaaagcggcagcgtggaagatgtagtcaacaccgggcattgcgtcacggatagactgggggttgcggacatcaccgatgtagaacttgaccttcttggcgttctccgggtgcttggcctgaagctcatggcgcatatcgtcctgcttcttttcgtcacgggagaagatacgaatctccttcaggtcagaatccaagaagtgcttcagaacggtagaaccaaaagaaccagtaccaccagtgatcataagggttgcgttatcaaatgcagacattttaattttcctctcttactttgcttcaagcgatttctttatatcagaagaacaaattccctctgttctctttaaacgaacaactcttttgttgtgctcttcacaccactgctctaccgcgtcaaaacgtccaccacggtgatcttcaccaagcgcaagaatatcaaaatcaattgtccctaaaaattcaggatcaacagattcatacaccactactttgtcaacgatccgcaatgattcaagcatttccacccgttctgcggtcgtatataagaccttagcatccggtttatacttcttaatataatctccgtcttgaacggccacaattaaataatctccataatttttgcactgtttgaacagtcgcagatgtcccaaatggaagtagtcatatactccaaatgtaagaattttactcatcatcattttcttctttcatttttcaatataaacaataacggatcgtatactgttgcatcaatatcattcttatacctttcataaaaacaggtattctgtacatccccaaatcaccgggcacttatttgcgcgcgcaagttgttggaacgacctctcgatttcgggcgaatgctcgccctgtttcaccacctcaatacactctctcaaaagtgcataaaaagctcgtccgaaatggaatttcacctcgcatagttgcttctgttaactgccacatttcatcaaattttccgattcattttgaagattccagtaaaacctctttacgcgtaattatggaactcgacatttcctcacgctcactacccttttacttctggtatgctttatacatatgatgggatactcttttctcttcgggaggaagttgcatataatcgccgtaaaatgcgtttagccatttatcatatccaacaggtgcattgtactctcttccctcaaaaggaacctttatgaatgaagaaaaaacatccttttcacaaacaattctgggaacagaagtgaaatttccgactgccgatgtattcgtatcagcatatttctttgaattatcaacaatctttttggaaaagtatcctttcgggaaaatcttcaaaacttcaaagccaaccgtttttacaatgtcttttataattccatgcgttccaacaacaccattttgaacagcatttaattttgtataccaatctcctagtttgtacatttctgcaactttttggttgctttcaggagcattgtcatagacaaaaacgtcaatattcacactgatcttcatgccgttttcatctggttcatacaaaacagtttccgtgtccagcacttttccataggggtaatagaaactattgccaagctcccgacaaataaatttatagcgaccattcgcttgattaaaaatattcataaatcggtcaaaatccggccgcaacattccaatatcaatatcatcatcccaaggaatataccctttgtggcgaattgcgccaagtaatgtcccgcaatccaaccagtattgaatttggtttttctcgcaaaaatcagcaacggtatttaaaatgccaagctgatagatttttacttcttcttcgttaagttgtttcatatgattctccttaataggcaatcaactatttgaccttctaagtcttgcataatggttatctcttttctctagcgaatagttgctaaccgatagtttttctaaatctaagcgaacgcttgatgacgtggccttattttgaatctcaatttttcgaactcggtagatttttccgtttaaatttataagtgtgccctcacggagtttaacaacgctattttgcttcttttcgacatatgcaagattgtcataacaacttccataaaattcttgactggagaaaaacatttcaggtgtagcaaccataccggtagaaatatttggctcttcccacaaatcttttagggtatctagaaattttgacggagttttaagatgatgctcgagagtgatataaaaatgtgagaaatctttttgctcaattatgctaacgtgttcttgtgggacaggtagatattttgtggcgtctgaattttcagattttgtgtcattttgactctctctgtatatttctttactttgttcaatgggtgtgttttgagtgacattctccatcttggtatgttttcttttccatgccaatcttaatagcaaaatcgcaccaattaggacatacccaactacaagtgctattgcccagaggcttacatcagaaaagtttgtgataactttttcaatcaacatacggagcgcacctccttataaatcgaaactgccgcacataaaatccaggataatatcccaaatgcaagaagcaaaaaagcacatgaggtttcctctctatctgacaatggaacaccaataaatgcactacggtacactactatataatttatagcgaaaataaagaatgaaaccaaaagccatcctttcaaaaatccgtgaattttatcgacctgattgttttcaaacaatgtcggccatactattccacatacaagtgctccaacttcgacaagttcattgctggaagcttttccgtaaacaaaatgaaaaacaagaaacacacaaaatgtgcatcctgaatacaagaatgagcgagccgcccatataataagcaattttgttatatgaatcgctctttgtaatgccgattctactttatcggtttcttttgcattcttttcctctacttccgtcacgatatcctcctgttacttcccatattggcttagtaaaactcttttctatatttccaacaataccatccgcggcttgccataaggacaagctccgttacacagcggaataccgcgatccacatcacggtaaaatgccccgttgcaatcagcaatagcaggcttgccacctgaacaacggcagacagaattgttgtttttgtcacctgtgcggccttgtccagtgcgcccaatgtcggccagcccagcacgattcccggaaaactgaaaatcagtactggcaccaatgcgcggaacagagaagtcgctgcaacatactgctcaccaccaacaatctgaagtacatacggtgctaccgcaatcgagaacgcgctgcctgcgaacacaatgggcataaaaatcatcagaagccgcttgataaacttccagctttttgtcttgatcatctctgggtaaatgccatccgtaataggggtatacatcgtctgcaccgcgccaattagctgcatacagacactccaatatgcaacttccgttgctggaaggaatgcgccaatcagcagcgtattcaatgcaccaaatgcagttgttgccatgttggaagcaaaatagacaaacgaattttttagctttttccacgctgtgcttacactggaaaagtgaatcttaatgttttctttcttcagttcaacaaacacaaggataacagccaccagcgaaccaactgcatccagtaagggaacaaacaaaatgtccttatccgagtggacaaaaataaaagtcaatgctgttgcgatgccgcgcatagcgacaaagcgcagcgtgatgacctgcattttttcgatacctcggaagaaataatcaaacaaaaacaccgacaaaaacactgtcacaaatgccaacagcgtatatccgatgttggcgcgcagcaggggaatcaccgcaatcattcccagcagggcaacaaaagccgccgccgccaacaaaacgcgggcaaggagaatgtcaccaacttctttttccaatttttcgtggtcgttcttcgcgtttacaatatcctttgtgccggacagcataaagccaaaatctacaaccaactgcatatactgcattacagcttttacatacgaaaccacgccgtagctttctacagaaagcacacgggtcagatacggcaatgtcaaaaggggaaatacgattttggcgattgacataccatagagcattatagtatttttaattacattgcttttcacgtttcaactacctctacattataattttcttgtgcggaggatatacaaccaccaatcataaataatggtatccaagaacagtttgtatatagaatggtaggaactgaaaaaccgactatcaaaaacaccattaaaacagataatgtatagcagctaagttttctatcaggtgtatcatttatttctttaattgcaataaaaaaaagcaatgcaaacaataccaatccgcaatatcccgtatttataagaacttttacatatgtgttatgctcgttcaatcctgaatatccaaatatttgattgaagttcattgctgctccaaatattttcgtaaaaatattttgtctgttaaatgctgttagtaacaatgtccagatttcatttctgccctgagtattgcttgcattcatcaaatctgataatttatcgaaatgcaagctgagtagtcctctatcctgaaaaaatttggtgtttgaaacaaagcgaagagcatatatgcaaactaaaaacgcacacccaagcatcaaaacatttttgaatgaaatgatttttttattttttctatactgaaagaaaataaataaggcgacgatagtgcatagataaataattcgtgcgttacaaagtacaattagtaccactgcgatagcaagaggaataaaatctgttttttccatctttttgttataaatccatgtgattagaaagtagcagagcatgacagcaaaatccgttttgaaaaaatacattcctctatatgtgacagctgacccccatactattgttccttttccggcgaggcaaacaataagatttataactagagcaaaaagaagcgatgatgttaagctctcccaaaccgtatcaatatcttttacatagaatctgcctaaaaagtataaaagcagcgaagaaatgattttcaaataatcaagatatagttctggtgatttaagccatgatcccgtaaacatcaacgcaatcaaaataacgattgtatcactgatacaaggtttcagagggaatctttttgttattgcaattataagcaatagaatggcaaaagccgttattataacagtcagcatttttagctgataaaacatatcaaatattatttttagcatccagaaaatatatattggatgtgtatggattttcactttaagttgtttcatatttacagaaatttctaatcatcgaatttttgtgtgttcatttagtagcgataaccatataaacttagaattagtcaccaaatatcttctaaataatcttttgggttccttcatgaagcgataaaaccattccaagctaatatcctgcatccattgaggtgcttcatcaattacgccagagacgacattaaatgctccaccaacgccaatcatgaggccgttgatttttccttgcattttatagcaaaactcttcttggcgtggagcacccaaagcgacccagacaatatctggattggtttgatttattcgagctatgagcgcattctcctcttcttcactgagcggacgaaacacggaaggctcatatccaactacttcaacccatggatactcctttttgattttctcaagaagcgcatttatattttcttgcgttgttccataaaagtaatgccgaattttcttttctttcgactcttcaaaaagccttcgcatcaaatccggtccggtgacacgattcatctgcggaaatttctttcttccaattacagaaagtggtttcccgtctggcacagacagcaaagactctgcttgcaccttataatattgtggatcatcatgtgccataactgtcgtatgcacattggaaacacagacgtaatttccatgtacagcatcccaattggagaataaaaaggaaatacaactctccatattcactactgaaatcggcacaccgattatatttacgcgtgtaggaatattctttagtttgttacaatgtatcatatattttatttagtctttcatagtttgaagcaggtgtctggttgcacaagtaatagttataagcattaaacgaaaatttcgttcgttgttcataaactgcatccaacgctttcctaaaagagcccttgacttcaaaatcaaatagagttcctgcatttgattttgaaactaagtcgccagcatttccaatacttgttgatacgaccggtactcccaaagagaaacattctgcaatattcatagggtagccctcataccatatatagggcgtaatcaatgcgactgcggattttaaggaattgaataattctttttgtggacagaatccattcaaatgaatgttcggacatttagctgctaactttcgaacctcggctgcgcactcaccctctccataaacttcaagtacataggtgcccggcagattgatccattcattaagcagttttagtattccttttcctttatcaagtcttccggcataaatatatgttcttacccccccccgaacaaatgttcatatatatcgttttggagaacataatttttatcttttgacagtgtttcgctgtaataggccagtgcatttttctgatatattttgttgttctgcaaaacatcttcaatagcatttataaatgtatcgggcttgtcaggttcaaatgttgttccaccttttgaattgacaagaatatctcctgcattgcctatatttgtcgatacaacagggcaaccaatggccattgcctctgcaagaatcattgggaagccttcataccagatacttggaaatacaagtgctgttgcagttgataaatcttcaaaaatagttttctgtggagtaaatccgtaaaaggaaatattctctttcacattttcttcaacaaaatttttgagagttccatctccataaatgtgcaggcaataatccttaggaagcaacttccacaattccaaaaggagttttattcctttgttttcttcaagtctacttgcaaaaatgaacactcgcttgtgtgctcctttgcttggctccccttttctgcttacaaaattaggttttacgaatacctgatttgaatttatatcgatgagtttatcgaatttacttttgttgaattcggtcaaaaagatatatgatatttttttatagattcctagttttctgttaaccgttaacattgctgcaacaattattgttccaactgtagagtttcgataacatttgttttttattgcttctttgaagtttccgttctcgcggcacttttcgcacaccttgcctttgcagtaaaaagacccattcgggcagagaagtctgaaattatggattgtctgaaccacaggaactttcatacttcttgcagcataatacacagatggcgaaatcaatggaaacgtgttatggcaatgtacaacatcgatttgttcgttctttatcagttttctgatttctatataggttctaagagaccacactgttgtaaaaggcaaaaagagcaatttccatttatcagatttcagctcatcgttgctacgcgtatactctattacttcatggccattatctcgaagcagttctacttcgtttttgaaaaccgtatgttctccgccacctatttgataaaaattatgaaccattaagatttttttcttttttcccacggctattctcccaatctttatgtaagctgataccccttactccccacgccccagcaggcacaccttaaacgtcttaaaaataattttccaatccacccagaagctacgctccttgacgtatttcacatccagatccatccactcctcaaaagagaggtcgttgcggtgcggggcaatctgccaatagcagctcaagccgggagtcacatacagacgctgcttttcgtagtcgccgtactgttccacttcgcggggaagtgccgggcgggggccaacgatgctcatatcgcccttcaggatgttccacagctgcggcagctcatcgatactggtcttgcggataaatttacccacacgggtaatgcgggggtcgtccttaatcttgaacacaggaccatccatctcgttctgatccagcaggtcatccagctttgcctctgcattggggcacatggagcggaacttatagaacttgaagggctttccgttgcggccgatgcgttcctgactgaagacagggccggcagacgggtcatccaccacaattgcaatagccgtagccagcatgaccggcgacaacaccaccagtgccagcgatgacaagattacgtcctgcgtccgacgcccgatccagtacaggcgatggtcgcgcagattttctttgcggtcaacttcaacttccttatcgattccgacagtattcgtagccat

SEQ ID NO: 17 - DNA, 6608 bp, unidentified
  source 1..6608: mol_type = unassigned DNA
tcaagagacatgtcttgaaaaatactttttcatgaagagtacgtatattgcgctcaacagtaagatacaccctatcaagaagatatagccatactgttggtaataaatatatcctactattataaaagtctgtattgtcatataggccagagagactatgacatgaggaatcttcagttcattcgccataatctgatacagatgcttgcgatgcggtagcccgatattctcatgaagcatcaggcggtgaatgatagtcagtacactgtccacaccataaacggataaaaggactatccagctgaaatcttccgtttcaatgatgagcctgcctatcaggaaaagaaggatgaaggcaatgctcaccgaacccacatcaccggcaaagcatttggcacgcttgcggaaattgaagaagcagaagactagaacggaacagataacggtatagatgaaatccgcttctacaaaagtaaccacctccttattgatataggccaacgcagcaagaataaccagagaataacctcccgttatcccattaatcccatccataaaattgtaggcattgatgatgcccgtacagactatcaaggctatgactatccaccaccaggacaaggagaacagcccccactgataaaacatcatagccatagcagagaaatgaaaaagcagccttgtcatctgtccggtggattttatatcgtccacgaagctgatgaacgtcaccagtgtcaaggcaagcaggaaccagggatattcaaagccactcgtcaggaaataggcaaacgccccgaaatagaaaataatcccaccaccgcgtaaagtcactttcgtatgggaactccgctcattgggcttgtcgatgatattgcacctatcagctattctaaaataaaaaagttctgctaaaaacagcagaaccagtataaacagataatacataacagtattttcctctttaatttttaattcttaattgtttacttttatatttgagaacgattttatcgttctcactatcccctcctctgccctcaccggcattctgtcaatacccagggcagcctttatcttcgcattactcaccacataattctctgtcaacttgcgcagacgctctgcattcaaaggcaaatggagcagagtcccaagccgggcacagaattccatcagtcctctgtttatcttccagatatgcggcttgcgctccaaagcccgacacatcaaagttatcagttcatttgtggacaaggcttcgtcatctcccatgtggtagataccactcgccacctccttggtcaaaagaccttccaccacgtagcagagattgtctattgaagtaaaagaccttctgttctcaaaagcccccaaaggccagggaatgcctttcctcaccacattataaagaagattcagattgcctttgttgccgggaccatgaatcatgcagggacgcaggatataaacctgcttgtcatcataaggattagctttcaatttcccattctcaaccttcaacttgtcaaggatgtaattctcggcagctatcttactttccccataaggccctaccggagcaggcaccacatcttcagtcagtatatcacccaccacactgtcggcagcggcttttaccgaactgaagaatatgaatttcttcgcggacgattccagaaagaaatcaaatatcttttgggtcaatccggtattaatatcaaaataggattgggctgcggaccggtttttcgtatcatgggctttaccagccagatgaataatggcatcgaatttcggaagattccgcatcggaaaagaagccggttcaatatccttccaggagaaagtctttaccaccccctccttttcaggagcgacaatatccagcccgtaaaggctatgacgttcctttagggcaataacaagattggaacccacaaagccgtggattccagtgacgagtatgttcattgaaatatgctaaaaaatatactgaccggaaacgtgattattggttatgtatttgataaaataagtatctccaatgacagagaaaaaaatataccacgtcgtattagaattacgttgataagtgatgtaatacatatccttaccataacgttcaaaaaaagcgggcgctttctttttaaatttagaatgaatgttctgttgaatatcagctatcagttcttccacataagaaatagcaaaaggataagtacccaaatactccttctcaacaagtatttttataagcccatacaaatcctcctctacttcgggagcgaatacgactctcatccaaacaaagcctttatacgagggcaaagtctatccaataattcttcaccggaaatagcatgcctaatgtcatcacgtccttccgtaaggatattcggattattctcattacccgtatatacaactaccggttcaccaacattcggcaccatcggttcttgttccttatatggcttaatcttcctcatacatccaatctttccacaaagatatccggaaatatcaagttatcctaattattgactgataaatatcgtatgttcataaagcttcaactaagtctacatatttttgagttaccacatcctttgaatataatcgctcaatcacctccacaccatttcgacccagtaaagccagttcgctttttgagacggaattcagccaatccgccatttctcccaccttcttttccaaactcttctctgtaatcaattttgcacagccatattcctgtaggaaattgatgataggcgtatcctttcccgagcagaccaataaaggcctaccacatgccatgattgtataaaccttggaagggaatccctgcatctccatttcagggttcatgaaaataaactggatgtctgaataggcaagaatggacggcatcaaacttctgggctgatagggcaaaatatgcacattatccagctccaactcacgtactttctcctcaagaacgggtttcatgactccctcaccgatgataaagtattcaatggaaccccctttcgtcttttctgccagacaaattaagggctcccaatcctgggcataaccaatattcccggcataaagcaatttcaaagaatctgtggcagggaaaaaatggggattcagacattctacatttccaccctgagaattatacaattctgtatctacaaaattaggtattatacaaagcttggacttatccttaaaccttccgactattacattataaaatacctggtctattgtcgttacggccgttgagttattataaacataccgttccatcctacgtagctgttctataacaagcccgtcctttcgtttcaagatgtcaggatatatttcctgcacattatatatggttttacatcccttgattttcgccagccaaatgtttattacaccaatagtcaaaggaggggaaggtgacagtatgacatctatatttctctggaacaaaccaatcaggaaagagataatatgccaatagacaaatcccaggacacgcagaaatgtatttctgaatttcttctggggtacatgaagaactctgattccatgaaaacagctttctttacaaatcccccaaaccttccatttcagaggttgtgctgccagttgtgattccacaacattgtaatgaggcgtagttgtcaataccaatacttcataaccgctttcctggaatttcagagcaatatcattataaagataggctgtcgaaactccatccggactgaaaatcaagctatgtatcaaaattttcttaggcatgtctcaccattattttctccaaaccatcttgttcaccacccccgtatagctctgaatcaacttcacaaccttggccgatacattctcatccgtataattgggcaccggcagaccatcgtcctcattcctattcatctccacggcagtatctacagcctgaagcaaggatttcccatcaatgccggcaaggacaaagatacccttgtcaagagcctcgggacgctccgtactggtacggatgcatacagcagggaaaggatgccccacagaagtgaagaaactgctctcctcaggcagggtaccgctgtcactcacaacggcataggcgttcatctgcaggcagttgtagtcgtggaaaccgagaggttcatgctgaatcacacgtctgtcaagtgcaaagccacttgattccagacgtttcctgctacggggatgacaactgtaaagtatgggcatgtcatatttctcggccatagcgttaaccgcgctgaaaagagacaggaagttcttctccgtgtcaatgttctcttcccgatgcgcggaaagcaggatgtatttacctttctggagatgcaatctctggtgaatatcgctggactctatttcggacaaattctcatgcaggacttccgccatgggcgaaccggttacgtatgtacgttctttcgccacgcccgaagcgttcaggtatctgcgggcatgctccgaatagcagaggttcacatcggaaatgacgtccacaatacggcggttggtctcctcaggcaggcactcgtcaaagcagcggttgcctgcctccatatggaagatggggatatgcagacgtttcgcacctatcacgctcaggcaggagttcgtgtctcccaacaccagcacggcatcaggtttcacctgcaccatcagcttgtagccggcgttgataatattccccatcgtggcaccgaggtcatcgccgacggcatccatatacacatcggggtctttcagcttcaggtcacggaagaagacaccgttcaggttatagtcgtaattctggccggtgtgggccagaagacagtcaaaataactgcggcatttgttgatgacagccgccaagcggatgatttccggacgggtgcccactataatcagaagtttcagtctgccgttctcctgaaacctgacttgcgaataatccaattttagttccatctgttcctatattctttaactcgtttcagactttttcaaaataagtgtccggacgtgccgggtcgaaacactcgttgcaccacatgaaggtcaccaggtcttccgtttccgaaaggttgacaatgttgtgcgtatagccgggaatcatctccacgacctccatcctcccgccgcttacctcgaagctgacaacctcctccgtacctatcttgcggagctgtatcagaccgtgtccgctcaccaccacaaacttctcgttcttggtatggtgccagtgctggcctttcgtaacgcccggcttggagatgttcaccgagaactgcccgcggtcggaagtacggataatctccgtaaaactgccgcggtcgtccacattcatcttcaggggatagctgaaccgttcttcaggcaggtatgagaggtatgtggaatagagtttctttgtaaaggcatcgctcaaatccggaacggacaaggtaccgggcatttgcctgaaagaccttatcagttccacaatgccgcccaaggtaatggtatgtactacgggcacttcgcaataatcaccgttgcggtgttccctgccgcccagggcagagacaagctcgtccaccacatcgtctatgtaaaccagatgcatcaccaccgaagggtcgtttacccggatgggctggtcatgggcgatgttgttgcagaaagtggccaccgcgctgttatagttggggcggcaccatttgccgaaaacattcgggaagcggtacaccagtacctttgcacccgtttccctggagtactcgaacaacagttgctcccctgcccgcttcgattcaccgtaagggttgtcgagtgcggcctgcgtggaagaggaaatcattaccggacaggtattgccgtacttcttcaatgtatcaagcagcgtggaggcgaagccgaagttccctttcataaactcagacgcatcctggggacggttcacgcccgccagattgaagacaaagtcagcttgtctgcaatagacatccagttcggcagggtcactgtccatgtcatattcgtaaatggtaagttcctcacccgcaatgccgtaattacgggctttcccgtcacggatgttgtgcagctgggatacaaggttccggccgacaaaccctcgggagccggtcactaagattttcataaactaatgggttctgtttgtcacagaaaagagaagatattcatagtgaatgacagaaatcatccaaacctataaaacttacttttgggaaattatattgcttcaatatatgaaaatgatgatcttccgtaacaataaacttggcattagccacaattgcacagtccacaaacttattatcatccggatctgattttatcagattgaagttataataaggagtaaagaacaaagtataaggattattgagaatgacatcaatcaccagcttagctatttccacacctaccaaacgttctaatatttcctcatattcattaagaatttcatcagaaacgcataactgattcgttccatccaaaaagcaatcccaaatcttacggtacctgcttttgggagaaatgcactgtatcaagctatttgtatctaatacaattctattcat

SEQ ID NO: 18 - DNA, 8644 bp, unidentified
  source 1..8644: mol_type = unassigned DNA
atgtgtggaattattggatttacaggtaaattaaaagcccaggatgtcttattgacaggacttgcaagccttgagtaccgtggatatgacagtgcgggaattgcatactttaaagataccggaaaaatttcacttcggaaaactgtcggaaaagtaaaagatcttcgtgccatctgcgatgatgataacaattctacgtgtggaatcggccacacccgctgggcaacccatggtggcgttaccaatgccaatgcacaccctcataaggtcggacaggttgcattaatccacaatggtatcatcgagaactatcatgatctcgccaccaaatatgatctgacggatgaactgatttccgagacggataccgaagttgccgccgcattgatcaataaactctacgaaggagatccaaaagaagctctgcgcaaagcagtagccgaaattgaaggttcctttgccttctgcgttctgttcaaggatcatccgggtgaaatttatgcggtaagaaatgtcagccctatggttgcaacatactgtgatgacggtgcttttattgcatctgacctgactgcttttatcgcatacaacaagcgttatttcatcgtgccggaatatcatattttaactatgactgcggacggcattacgttagaggatttagacggtcattccgtagaaccggaatatatggaagtaaactgggatgttaccgcagcccagaaagatggttatccgcatttcatgatcaaagaaattcatgaacagccggctgccatcacaagaaccattaccccacgtatcaaagatatgctcccggatttttcggaagatgccattgcggattccttctttgaaaatgtaagcgacattacaatcgttgcctgtggtactgcaatgtacgcgggaatggtaggaaaaaccatgatccagaaccgcctgcatattccggttaccgtggcaatcgcatcggagttccgctatgaagaaccggtaatcaatgaaaaatccatggtgatcgttgtatcccagtccggagaaaccattgatactttggaagctcttcgccttgcaaataaatatacaaagaaaacactgtctattgtaaatgtaaaaggctccagcattgcacgtgaaagcagctatgtattatatacacatgccggtccggaaatcgctgttgcaagtacaaaagcatacaccgttcaggttgcttctttttacctgcttgcatgcaaacttgccatgaaacagcaaaagatttctgtcgaagaagcacgtacatttattggaacactgcaggaaattccaaattacatcgaggaagttcttgcacaggctcctgatattgaacagctgaccaaacgcatgatcaatgccaacaacgcgttctttatcggtcgtggactcgattataccctttgtatggaaggtgctttgaaattaaaggaaatttcttatatccatgccgaagcctatgctgctggtgaattaaaacacggaaccattgccctggtcagtgaaggggttcctgtcattgccgctgctacccagaaacatgtatacagcaaagttatttccaatatccgggaagtaaaagcccgtggtgcttatgtcattcttttgtccaaagacaaagaaatcacagatccttctatctgtgatgtacacatcaatcttccggatgtatccgacgaatttacgatttttgaatctgttgtaattttccagctgattgcatattacacatccgttggaaaaggcttaaatccggatcagccacgtaacctggcaaaatctgtaacggtagaataaaaaaactgtcgcgcgaaaattcgtgcgacagtttttttgacatagagcctttctaaaacttttgaaggcaaaaaaagaaccccagaagctctctaaaagcctctgaggttgcccctgccaaggattctctcacccatgtaccggaatccttgtatcgtcggcgcgacaggatttgaacctgcgacctctgcgtcccgaacgcagcgctctaccaagctgagccacgcgccgtttcaactgcccaattatagtaacacattctccggtgtttgtctagtgaatttttttaatttatggtacaatacaaaaaaagaatggagaagaacaatgaaacatactgctttgattacaggtgcatcccgaggaatcggtgcagccctggcatgtcgatttgccgccgaaggctatcatctggctctttgctgccataactcttatgaaacgctacaggcacttgccacaaaacttgaaacaacctgctccatacaggtgctttgcttccgtggtgatgtaggagactatacttttatctgtgacatggtgcaaaaaacactggataccttcggccagattgatgtgttaatcaacaatgccggcatctcttatatcggtctgctcaccgacatggatattaccgactggaatcagatagttgcgacaaacctcacatccgtcttttccacctgcagacaggtcatcccttccatggttcatgccaaatccggacatatcatcaatatttcttctgtatggggaaatgtcggagcttcctgcgaagttgcctattctgcatgcaaaggcgggatcaattcccttacacgcgctttgggcaaagaacttgcccccagcaatatccaggtaaatgccatcgcctgtggggtaatcgatacggatatgaaccgttgtttctccgaggaagaacgctctgcactcatcgaagaaattcctgccggccggatgggatccccggaagaagttgcttcactggcatattctcttgccacagcaagcagttacctgaatggacagattctcaccttagacggtggatggatttaatttcttatctctttggaaatctttttccatttatttaagaattaaaacgcaatacgcgttttctctgttttttatatcaactttctataaaatcatttgtatgaaaacgaatgataaaaataaatacaaagattttggtgaccgtctgagtctgattatgtataaacaaaatatttccaatatccagctggcaaatgcaatgtttgtttcgccgtccacgatcagcggataccgtaccggtcgtcgttctccgaccgttgcggatcttgcagccatcgtgcagattctgaatgtttctgcagattacctcatcggaaccagtgaaattacaaccagacccgataccaccgaaaaaaagagttgagcacgccctgtttccagagcggtgctcaactcttttttataaatcatgttctgccagtaaaattaccgtagaacgttccggaacacgcacacgtgtctgatctccctgtgtctgggcttcaaaatctgccccatcctggtattcacagaaagtatttactacaagtttccaatgataagactccggcaacgaaggcaggcgcatctccaaaggctcccaatacgcattcattccgtaaaagatcatatcatcatccgtatcatcggcatttcttcccgcatacatgattccaattaaatgtgtattatagtccgtataattccggttcggctctccgttatggatacttacggaaggtaacccgcagactgccggctttgtatcccttcgcagaatcggatgctttgcacggaaatggatcataaaacgggcaaaatcatgaatctcctgaaattcttccagtctgttccagtccagccaggaaataatattatcctggcagtatgcgttgttatttccatactgcgtattacaaaattcatcccctgcaaaaaacatagccggtccacggctgcataacaacgcggcaaatgcattcttcacgagtctgcgtcgcaggctcataaccgccggatcatccgtctcaccttccaccccgcagttccagctcaggccgttgttatccccgtccgtattgttccatccgtttttctcattatgcttttcattatatgaatacagatcatacaacgtgaacccatcatgacaggtcagaaaattgacggatgcactatatccgcggcttgccggatcatacatgtcggaggatccggtgatacgtgtaattgcacgccctgcgacgccactgtcgccctttaaaaagcttctcatatcatcacggtatcttccgttccattcggcccagcggttccaagacgggaaacttccaacctgatacaagccacccgcatcccaggcttctgcgatcagcttcatatcccccagaatagagtcaaatgcaagggcttccagaatcggcggattctccatcggtgcaccattctgatctcttcccagaatcgatgccaggtcaaaccggaatccatccacacggtactctactgcccagtgccgcagacaatccgtaataaacctccgtaccaccggatggttgcagtttaagacattgccacagccgctgaaattataataatatccatccggtgtaagcatataataaatattattatcaatccccttaaagcaaaaacatggaccgttttcatttccctctgccgtatggttgaataccacatcaagaatgacttcaattccattttctttcagttcgcggatcagacgctttaattcatcaccctcatgattatgctcctgatgaaatgcataacttgtattcggggcaaaaaaggaaaccgtattatagccccagtaattgtacaactgcacgccatccaccacacgggcactttccatttcatcaaattcaaaaatcggcatgagttctaccgcattgattcccagatctttcagatacggaattttctgccgcagaccttcaaatgttcccccgccttttacgccggaggacgcatctttggtaaatcctctgacatgcatctcataaatcaccagatcttcaaatttgtgattcagattccgataacgcccccagtcaaaatcactttgcaccacacgggctttatagacaaaatcctttccgccttccggtttttctccccagtttctctgaccggtaacagctttcgcatatggatcaagaagcgtatgttttctgttaaacagtaaccctctcgcctgatcggcaggaccgtccatctgataggcatactcaaagtcctctgcttttaagccaaaaacaaggatagaatacgtatttccaattttataactttccggaatgcggattcttgcatatggttcctgtgccgccggccggaataacagcaggacacagctcgtggctccatgggagcttacggtaaaacttaccccttcctctgtctgatatgcaccattcatctgataaaatcccggacgtacatcaaatcccccaatattatcgagtggatgaatgacttccccgagactttccatttcttcgtctatcggccagcttttctgttttgacggataattccaaaaacttgcattcatgtgctgattcctcttatcattattatttacttgccacataaaattttatattatctccctactcttccctgatgattaccctgccatttgcgtcaaatccgattttactgtacttttccgaatactcattcatatgatcaataatcgtctgttttctgtcgccttttgctatggcaggctgaaaattatttctttctgatgtggaagaaatgctgcatggtatcatatcggctgatatatctgtctgcagtaccccatccacaaaggtaaaggtctgttcatagatcgccgtatctttgtcttttggattcctgttccccccaaagcagaaatttccaagactgtagcagatcatttttccgttgtataattccattccctgcaatacatgaggatgtgtaccgaccagcagatctgctccccagtcaatcacctggtgtgccagcttctgctgataatcattcggataatgatccccctctatcccccagtggcaacaggcaattaccagatccgctccttcttcccgaagttctgcaatcccatcccggatataattggcatgtgtttcatcagcggatagctggcttgcggagacaattccgattttgataccatccttcgtggtataggtatccacatgatcattgaatccgaagataatccctgctttatttaacacttctctggtatcatcaagtccctgctgcccataatcaaacgtatgattatttcccagacttgccccctccacagaactgtctgtcataataccaacatactccggttttccttttaagttccacgttttttccacacgctcggtcgcatttgacaacacacattccagattgatcagtgtaaaatcatcctgctcaaaaatacttctgatatttttaaaaaaataatcctgcccgtatttatcatagtattcatgaaaggaacctgcatacccatgcgtctgtgttgccccaagcgtacagtcacctgtcgccgtaatttttaccgtctgtatcaccggttcctgctgcgtttcagttgcagtcccggtttccgtttcttccagcgtacccggttcttccgtcatctgtgtctccgtgattttttccgtagaagagggcaaagccgatgacgttgctgcaggagaagaacatcccgtcagcaaaaatcctgccattaggattggcaatatccattttttcatacgttttcagactcctctttcacaagaatatccaccgtgtgaccgcttgcacccataagatccatccgttcacaggttgccagatgatactgcagaaacgcatcaaactcttcttccgtcagcgcatttaaaaacggacgcatataatttgctgcaccgtctgccgctatgatctgccggcgcctgacctctacctgccggtccaatgcttcaatatcttccagacgaaccatggaatacagaggattggcttttgaagtacagtgataatcctctgtgagcattccctcctgaagcgcctccagaatatgtttttccttaaacgcatacgtgataacggaaaattcattcataatatacgccacgagaatcctgcctccgggtctggtcaccctcaccgcctcccgcagcgcagcaagcttgtccttttcctcatgcaggtgatacatcggcccaaacaacagggttacgtcaaaggaatcatcggaaaattttttcagattcattgcatttccctgatatgcatgcactcctgcacccttctgtttcagacgccccagattatgctttaccagttccacggccgtcacatcgaacccttcctgtgccagcggtacgctgtatcgtccggttcccgccccgatatcaaggatatggatttcctcttttgcacgttctttcacaatttcatccagacactgatggatataatgcatgcttgtcacaaattccaccctgccgtgtcggctgtccagacgcttctcttcattaaatttattataataggcttctaagtctgtcatattttaatactaacacattttctttaaaatttcactcacaatcgctgatgcgacatccgctttgctcattatttccagttccctgcagtcatctgccgtaatcagcgtcaccacattggtatctgtaccaaatccggctccggctaccttcaggttattcgccacaatcatatctgcattcttttttgcaagttttgcacgggaattctccagcatatgttccgtctccatggaaaatccacacagaaactgtcccggttttttgtgcgcgcccagatacgaaaggatatcttccgtgcgttccatcgtaagagtggcatccccgtcttttttcttgactttttcatcgaccgggtgatccggacgataatccgccacagctgccgctttgataataatatcctgttgctctgctgtctcctttacggctgctgccatatccgcggcagatacaaccggaacgacctttacaaacggcggcggagtgattgccaccggtcccgtgatcagcgtcacttccgcgccacggcgcatacagttttccgcaattgcatagcccatttttccggtagagtgattcgtaatataacgcaccggatcaatcttctcctgtgtcggtcctgctgtgaccatcactttctttccgaccatgtccttttcgcaggcaagatctttcataatataagaaaacagtgtttccggttccggcattttcccggctccggtatccccgcaggcaagataaccactcgccggatcaatgatatgaaacccataatgctccagctttttgatgttatcctgtacgatcggattttcaaacatattggtattcatggcaggggaaacatacttcgggcattttgccgcaagaatcgttgttgtcagcatatcatctgcgattccgtttgccatcttgccaattacattggcagaagccggtgctaccataaaaatatccgcacgctttgccagtgccacatgctcgacattgaactggaaattccggtcaaacgtatcgaccagacacttgttgcttgtgagcgtctcaaacgtgataggattaataaaattggttgcattttccgtcatgatcacatgcacatccgcatgctgcttgacgagcgcacttgccagataggcgattttataggcagcgatacttccggtcacaccgagtaccacacattttccttttaacat

SEQ ID NO: 19 - DNA, 13023 bp, unidentified
  source 1..13023: mol_type = unassigned DNA
ttattcatcccttttcattgaagtttgtcccgttttgattgtcacacctgaaccctcggttgaaataacaactgttccgttttcatcggttctgtatgtttcaactccgaatttatcaagcaactttaatgtgcttttgtgcggatgtccgtagctgttatccttgccgagtgaaataaccgcatatttaggatttaccttttcaagcaacgcttttgttgttgaggttctgcttccgtgatgacctactttaagaacttctgcactcatatctgccgtaacggtttcaagctctttcttttcggcatctccgaggaacagaaagctgtcgtttttataagttatttttagaattacagagcaattattcagattatcctcgtcaattgttacgggagcaagaatatttatgctgaaatcgttgtcatcaataatattcatacccgctttggctgacttgactttaagtcccttgtctgcaattgccgtgagcagattctcataggtcttggttgtggttgtaaccttaggcatatagatttcgccgatattattatgctttacaacataagccattgaaccgatatggtcggcatgagggtgagttgcaacgagataatcaatatttgtgtatccgagattattgatatattcggtaatacttttgccgtacatattttcgcctgcatcaatcagcatacacttttgattcggcagttcaatgaatatgctgtcaccctgtccgacatcaaggtaatgaaccgataatgttccgatttctgaaacagttgttttgctttccgaatcggaaccgttcacattgatattgattgaacacgaacaaagtgcaagacagattaccgcaaacaatgcagtaagctttaatattaattttgaattaattttaatttttaacacttcacaattctgagtcttattgtacaataaacaagtcaatatttcaagaacagaaaaaggagagcctttgcgactctcccatttcgattatcattatgcggttttgcctgtataaagctgatagtatctgcccttttgttcaagaagccgttcgtgtgaaccacgctcgatgattctgccattttcaagaaccataatacagtctgaattcttgattgttgaaagtctgtgggcaataacaaaggttgttctgccgtgcataagcttatccatgctgtcctgaaccatcttttcggtacgggtatcaattgaacttgtagcctcatcaaggataagtgcgggcggatctgcaacagcagctcttgcaatcgcaagcatctggcgctgtccctgactgagattgccgccgtcacctttgagcagggtgttgtagccgtcaggaagttttctgataaagctgtctgcgttggcaagctttgccgctgcgataacctcttcgtctgttgcgtcaagtctgccataacggatattttccattacggtatccgtgaacaggtgcgtatcctgtaaaactataccgagtgaacggcgaaggtcgccttttttgattttgttgatattgattccgtcataacggattttaccgtcctgaatatcatagaatcggttaataaggtttgtgattgttgttttgcctgcacctgttgaaccgacaaacgcaatcttctgaccgggttctgcgtacaaatcaatattgtgaagaacgattttatcatctgtataaccgaagtcaacatcgtccataacaagcgcacccttgagttcacgatactctgttttgcctgtttcactgtgggtatgcttccaagcccacatacctgttttttcctcagtttcaacaagcctgtcgccctctttgcgtacattaacaagtgttacatatccgtcatcaacctcaggctcttcgtcaagaagtttaaagatacggtctgcacctgcaagcgccataacaattgagttaaactgctggctgacctgattgataggctgggtaaagctcttgttgaatgtgaggaagcttacgagtttaccgattgtaaatccgaggaaattgttgagagcaaagatacaacctacgattgcacaaagtacatagctgatgttaccgatttgtgcgttaatcggcataaggatatttgcaaacttgtttgcgttgtatgaactgttgaaaagcctgtcattaagctcattgaattcttcaatgctctttttctcatggttaaatacttttacaaccttctgaccgttcatcatttcctcaatgtaaccgttagtcgcaccgaggtctgcctgctgttttgcaaaaaaccttccgcttcgtgacgcaagctgttttgttacaaaaagcattacaccaaccattataagtgtaagaattgtaagaggaatactgagtgtaaacatactgacaagaacggcaatgattgtaattccgctgttgaaaagctgaggaatactctggctgatcatctgacggagggtgtcaatatcgtttgtgtaaacactcatgatatcgccgtgagggtgtgtgtcaaagtattttatcggaagactttccatatgttcaaatatctgacaacgcaaatcacgcattgtcccctgtgttacataaaccataattttggcgtagataaacgccgacgccgcaccgattgcatagaagattgcaactcttaaaattgctccgagcatcggtccgaagtcacggctgccgctctgaatcatcggagtgatgtaatcgtcaataagattctgaataaacaatgaaccctgaacatttgcaagtacgctgatgaggatgcagacgaaaacaataatcatctgaaatttatattttttgaagataataccgaatagtcttttaagaacctgacctgaattttcaaccttttgtgcaggtcctcggtttcttcttcccattggtcccggcataattacagctctcctttcgcatcaaaatcaccgttgccgcttgtctgggcaacataaatttcattgtaaataggactgtttttgataagttcttcgtgagtacccactgcgcttatctcaccgtcatccattacaataatcttgtctgcgtgtgaaacgcttgacacacgctgtgaaataatcagctttgtagtatcggggatattctcgctgaatgccttgcggatacttgcgtctgttgcggtatcaactgcacttgtcgaatcatcaaggataaggattttcggatttttcagcaaagctcttgcaatgcaaagacgctgtttctgaccacccgaaacattagtaccgccctgttcgatttttgtgttgtacttatcggggaagctttcgataaacgcatctgcacaggcaagcttgcaggcattgacgcattcttcctctgtagcattttcgttgccccatctgaggttgtcaaggattgtaccgctgaaaagaacattcgactggagcacaaccgaaaccttgtcacgcagagtttcgatatcatagtcacgaacatcttttccaccgaccttaacagaaccttcggttacatcataaagtcttgcaataaggtttacaaggcttgtttttgaagaacccgtaccgccgataataccgattgtttcgcctgatttgatttttaggttgatatcgttgagaatcggtttttcggcttttgtgttgtatgagaatgaaacattgtcaaactcaatgcttccgtccttaacctcgtaaacagggttttcgggatttgcaagcgttgatttttcattaagcacacctgcaacacgcttgccgcttgcaaggctcattgtgagcattacaaacaccattgccaccataagaagattcataagaatgttcatacaatatgtgagcatacttgtaagttcacctgttgtaagctcactgcttacgatcatatttgcgccaaaccagcttacaaggatgattgatgcgtatgaagtaaccatcataatcggtgatactgttaccatggcattttcagccttaacaaagagtctgtaaacattgtcggctgccttgcggaacttgccgacttcgtgtttttcacgaacaaaagcctttacgactctgattgaagttacattttcctgaacgcttgcgttgagttcatcgtacttttcaaaaacctgactgaaatacttgtatgttgccttcataataaaggcaagaacaacagaaagtaaaattgttgcaatgagataaatacaggcaagccttgcattgatgatgaatgtcattgccattgcacagatgagcgatacaggcgctctgaaacacattcttaaaagcatctgatatgcattttgaagatttgttacatccgttgtcatacgggtaacaagtcctgcggttgagtaacggtcaatgttggcaaacgagaatgactggatatttgcaaacattgagcgtctgaggtttcttgcaaagcctgccgaagcttttgcaccgtagataccgcccatcatacctgcaaacaagcccgtgagtgcaagtgcgcccatataaccgcccgttatgagtatgtgctgcatatcgcccttgttgataccgtcatcaatcattgatgacataagaaacggaataattgtttcaacaattacttcgagtatcataaagaacggtgtaagaacagactctttgacgaaacctttgatattttttgccaaagtttttatcatacttatctccttccgttttaatttgcattttcaagtccgctgagaattttatttataagaaaaagaaattgtatcttttcttcttttgtcagcagactatcaagcaaagtttcgtttttggttatcatattttcgattttgtaatgaagttcaatacctgtttcggtcaagacaagttttttgagccttgcgtcactttcaacgctctccctcgttatgtaatttttcttttccataagtttaagaatacttgtaacggttgaacgggcaattgaaaatgcgttttcaatatctttttgataaacatcttcatcacgatgatcatagagatatgcaataatccagccgtgcataagagtcagcttatccacacccttatccttggcggaatagattaactttctctgcaaaacctgattaagcaccttgatttcgtgaccgattgaatcattaaagcgtttgttgcacttacagctttttacgcttttgtcatcacacattatttcacctccgaaatcacacttatgagatattgttctatatagaatagttcgatacaaaacaatttgtatcagtaattatagcaccttcattttgaatgtcaagagaaattacaaataattattcaaagtttcacattgctgtcacaaatcaaaagcgacagctaaaattacagctgtcgcagttaaaatcatattcactttgcgcaaattatgacaattgtcacttttttaggatttctgtcgcatcacggatatcgggggttttatcaccgttgatatcgcaaacaaaaagagcatactgattttcgtcataatcgtcaaaggtgaggtctttgataagatacttctgaataagctcagcatccttttcatctgttttgccgtcaatattgaggtctttcatatttttgggaacgcaaccgccgtcaagcacaaaatcaataccgctgtcgttcatgagttcatcggctctgtttttgtcaacatcaacaatgtaaagtcccaatgtgtcaaagcattgataaacatactttgcatcctttaaaatctcggctttcttttcttttgccctgtcatttgctatgcctgcaccttgaagatgtgaatcaagctttgcaatcatctccattgcgtaatcgttatccgtcattgcacggttaagatcaacaccgtttgtcatatagaaccaaccgagcgaacccataacatatagatctgtcacatcaagtccgcagtaaacggcaattttcccgtccttgtactgaccttttttcatcgacattttggaatagcccttgattatactgtaaccgagcttcattccgtcctcgctgatatagccaagatcaaatgccgctgcacttgtgcatgaaaagcacgctccgccgatgagcattgcaaatacgagcaatattgaaatcacctttttagaaaattttcttttcataaaaaacacctccattggtagtatcaccgaacggaagtgttttattttgatttatttacttttatttgacttattattttttctatcttttcttatttgattaagctctgaacctttggtttttacctttcttttaaattttgcaacggtaaacgcttttatcctgtcatgatagacataattgatttccgcacaaaccataagacaaaccataagaaagtaaaaccaaatcataataacggcaattcttgtaagacctccgtacacggaaaatccgttgaaatccgacacataaaccgaaataccgaacgaaagcacataccaagaaaccgtgcagagaaacgcaccgggcaactgtgacttaaagccgtattccttatgctcgctgcgtgagatgttcggaaagttcctgtaaatcagcgcaaacaataccgtgagaaacataaagataagtatatatctgagatgatagattattccgattatgtccggcaatgattttagatgcggtgaaagaaaatcgttaattgttgaaccgaggacaataagtacaagtgacgcaagcaaaattacaaacaacgcaattgtgtagaacatcgctcttattcttaaaaagaaccagtttctgttttcgtaagcatcataaattctgttaagaccgtttgtgattgcgtggattccctgtgccgccgaccacagagtgactacaagcgttacaagagaaattcccacagcactttcataggcagaggtcagaaagtatgttaagtcatcggcaatttttgacgaaaacacactgctgagtccgtgataaacaaaatcaatcggaatgtgcaggttttgcaaaagtgacacaaagaacattgagagcggcacagccgataatataataaagaatgccgactgtccggcaattgcaaaaatattatcgtgaacgcatttgcttgttatcggttcaaatctgcctgttattcttttgtaaagttttatcgccttgtcaacgaattttatcctcaatgtgtcacctcccctatttctatatgataattattttataccgtttttcttcatctgcacattataagaaattcttgtgagaagtttttcgggtgcaaaatgtctgaaaaacgacaccgctttcatttcaaagccgggggtgataatcattttgcccttcatggtcatgtcaacggcataccttgcaacaaacttcgggtcaagtcctcttatgcagaatttaacatccgcaacattattgaagttggtttttacgggacccgggcaaagtacggaaaccttgacatttttattatccctacgcatttcctcatgaattgcctgagtaagacggacaacataattctttgacgcatagtagcttgcaaatgtcggccctgcaagaaatcctgcggcagaacctacattgagaatatatccgctgtttctctctgccatatctttaagaaaaagctttgtgagaatgtgaaccgttgaaacattggtgtgaatgagttcaagctctctttcaagcggaacatccaaaaattttccgtatgctccaaagcctgcgttgttgacaagaaaatcaatctgttcattttcattcttaatatgctcatacaaatccaggctgtcactttctcgtgaaaaatcaagcgtaattaccctgacattcacatttgaaagttcttctttcagcttgttaagcttatcggttgagcgtgatacaagaataaggtcataaccgagttctgcaagatatcgggcgatttcttttcctatacccgaacttgcgcctgtaatcaaagccttcattagttttcatcatccttcggtttttgtgctgtggcacaaagccatgttgtaccttccttagtgtatgtgtttatgtgttcaaagcctgcagattcaagtacggctctgatttcctgcggagttaccgacttgatattcaacatattttcaaccttttcccacttgaacggatcatcgtctgttctgagcatttcaaaaagcagcataaccgttccgccctgtttgagaacacggaaaacttctttcacatcattttccttatcaggccagaagtagtaggtttcaactgccgtgatattatcgaatgtattgtcatcaaaaggcatatctgatacggatgcctgaagaattttcgctttgttgcagagtatattttttgaattgagtttttcggaggattttaccgagagttctgaatagtcgattccgtaaaccttgccgttggcaacaattgagcaaagtcggtcaacggtttttccgccgccgcaacctatgtcaagtacagttgcggtgcgttcaatattcatatgttcaagtccccatgaggtgaggcttgaatgtcctttattcatagccttaatcatcattttgccccaaaagccgtttggctttttagcattctccaccaacttgcggtatttcataaaaatcactccaatctgaaattttcatctgtttactgtctgctatttactttttttcctgttgaattaagtttttgaagtaagagtgcaaggaaaaacgcaccgcctactataacgatgaaccaaacaaatgacatatacaacggttgattcatcacacgcaaaaacgggtatggaccgtcaaatgcaccgactatgttaagtataataagcagaatcgcatatattaatgtagggattgtagccgtgaaagctgattttgtgttaaggtgaggttctttttcaaaaagcacaaacgataaaattgtaagaatcggacacaaagtatgtaaaaaggtgaagtctttgttaaaaagcatatagagccaaccgtttatgccctctccacgcatcggggaaagcacggcaagaactacgataaatgttaccgaaagcacagccgccgccatatatttgaacatttgaaccgagtgcggaatttcttttccgcttttgagatatcgcacctgaaagcctgccataaccgcacaggcaacaagtgcaaacaggttgctgtcctcagtgtaatatacaagcggatagcagcctaatttgaaaaacacgataattattgcggcaatctcacaagcgataatcgcaagattaaatgccaaagctgtttttgttcgtttaattttaagagtattttgcattttaattccttttctatattattttgttaattcctttcaatcaatgccacgctctctacatggctcatctgaatacgatgaatttcttggctgatttttggttcaagggaatacatccacagcctttttcgtggttctgccgtttgtggggatatgtccgtgaaactgaagttttcgcattatctatttcaatgtaaataatgctttttcataatccttaacataatacttgatattagtttttcctttttgcactacagtatgtccctcagtttcaagcattttcttttgtgcctcaattcctccaggatactttgcatttaattctccattcgcttttaatgttctccaataaggggttttatcctctgtgcgctgataactcgcccatgcaactattgaaacaaaaattccggctgtgataggctctgtaaaatcggcactgcttaactctgcaaagtattctcgtatttttccgacagtaatcactttaccatacggaatttttttcattactttgtcatagtcgattggcggtgcaaaatacattttatctccaccatattttttaatactcttttcatctgtgattatttgaaatttaggcatatccttgctatccataagcatagcattaaaatcctttttatcttcatttgccataatgtatcacctccaagccaatcatatctcaataaacagactcatgcaatgagacgcttttataatttctcgcaaaacattaaaatttccatttactcttctttcatcttttcttccagttcaagtaaatatctgtcatagtcagacataaacaatctgtcctgaatgatgcgatatttctcaaattccgtttctgcgtgaagttttgcctgctctgcacttatctttcctgctcctgtgagaatttcagtaccgttaaattcgaggaaaccgtcaagtcttttcgcccaatcctccatactcataggaatatgacgttcggcttgtaactctgcataatcgagatacagcgatacaatgcgttccaaaaaagacaattctttttcagtaagatagttttttgctacagatacatcgcttttcactattttaccatcaggagcattttcccaagaggttagtcccatatgttccttttccgcatccgctcgttcaacaatcagttccgcagcagtatgtctgtgcgtagcatagtgcattttgttctgcacagttttgaaaaagagtcttgtggtttttgcatctttatcatagtcgaaagctgttgcataaaggtctgtaaccttttggtagaattttcgctcagacaggcgaatttcacgaatgtattctaactgacggtcaaaatattcatctgtgaacatcgtgcccttcttcagacggtctacatccattgtccagccctgaatggtataatcttttacaatttgacctgcccatttacggaatcgaactgctcgttcattattaactttaaatccaactgcaataattgcctgaagattataatgttttgtttgataattcttcccgtcgtcggcagttgttaagtatttcttaataactgaatcctcgactaattcgccgtcttcaaagattttttttagatgttgattgattgcaggcacagaaacatcatacagcgttgccatcattttctgtgtgagccatatattttcgtcctcataacgcatttcaaagctatctgcctgatttcccacagaagcaacatatgtgagatattccgcagcacttgagcgaatacttatttcatttttcttctttgccattttgtgcacctccatcaaaaagcatcaccatcggtgtcactttttctttttaaataagtcaattcaatatcgtaccccaaaccccaaacatatttcattttatttgttgcactactcaataatcataataaatatgttacttttgactttcattaattacagaaccttcatcatataccttggttcatattctatatatccgtgtttcggataaaaagcataagattcaaaccactgctcttttggtgtccccaaatgtacttttgaaacagcaataccgttttcacgcatccataactctgccgtattaagtaactttgagccgattccctttcgttttaatgacggttttatataaagcctatgcaaaaatgcctgatctgtatcagtaattcttgaacatccaatacatccgactaccctgtcattttcatctattgcaagccaaaacatatcattgcaatcaagatagtttgccttaatatcaagaaggtcaggatttatagtaggttttctacccaaagcatcttttgcctgtaaaaccgtaaaaatcatatcatcacgatagatttcttcaaatttaataattttcacacttttactcctgtactttagtcaacagagccacgctctctacatgggaggttccggagaacatatcgcagggggtgatttctttgggggtgtagccgttttctgtgaagaattttaaatctcttgcgagggttgccgggtcacaggatacatagactacacggctcggcgacattcttgaaattgtctttacaagctcttcgccgcaaccttttctcggtgggtcaaggattacgcagtcgggttttaaaccctctttttcaagctgaaatgcggcgtctgaggcatctccgcagatgaatcgtgcattttcaatgccgtttgcttttgcattttcatttgcatctttcacggcatcttcaacaatctccgcaccgataagctgtttacaggaatccgccattgtaagacctattgtacccgttccgcagtataaatcaagcagaatttcgtcagatttaagatttgcatattctttggctttgccgtaaagcttttcagcctgttttctgttgatctgccagaacgaaaacggtgaaattttaaactgcaatccgcaaagtgtgtcggtaatatggtcacttccgtagattgttctgttttttctgccgagaacaacattggttttttctctgttagaattaataatcacactttttaactgcggaagttcggatttgagcattttcacgagtaaatcttcctgtttaagaccgtttgcgttgacaacatagcacaccataagctcgcccgaagcctcgccgattctgatataaatgtggcgaagtctgcccttgcctgttgtttcatcataaatttccgtgttagtttttgcgataaaatcttttgtaatttcaattacccttgcaaaaatttcgggctgtaaaatacagtcggtacaattgattatgcggtggctgtggaatgaataaaagcccgtcacaacatttccgtcacggtcaagaccgacaggatactgcgccttgttgcggtatcttgtgatattatccgacgaaattatcggcttgaaaacaacattatcaagaccgccgatgcgtgttacggcatcctcaactctctgctgttttattttgcattcttcttcataagaaatatgtcgccatgtgcaaccgccgcacttcataaagttttcgcagtcgggagtaattctcgccttggacggaacgagaatttcttcgattttgccgaaagcgtaggttttcttaacctttaatatacgcaccttgagttcgtcaccgattgcagaaccctgtacaaaaacggcaatgccgtcatctgttcttccgactccgctgccctcggcagttgccgaagttattgtaaggtttacaatatcgttcttttttaaagtcat

SEQ ID NO: 20 - DNA, 6355 bp, unidentified
  source 1..6355: mol_type = unassigned DNA
atgaatcgtgaaaataaacgcaagacctttgaaaaaggttactataagacccacgcctgcaacgacacctttacctgcaaagtctgcggacgggtctgcaccccgcaaaatgccggcagcgaccaccgcaaccattgccccaactgcctgtccagccttcatgtggacgaagaacccggtgaccgcgcctccgactgcggcggcatcatggagccggtagctgtctgggtacgcaagggcggcgagtgggccatcatccaccgctgcaaacgctgcggaaagctcagttccaaccgtgtggcggcagacgacaaccccatgaagctcatgagcattgccatgaagccgctgtgctctccgccgttcccgctggactatattgaggaaatgaccgccttgatgggcggcgatggacggatgcggtaagccgcaggaggaactacaagatggagtatatccgaatcacaaaagaaaacatcgacaaggaacacatctgttgtgccatgtccggtcaacagagccttgccaagaaggaatggctcaagcagcgctttgaggaggggcttgtcttttaccgcagtgcggagcgcggcaaatgctttatcgagtacatcccggcggaaaacgcatgggtgcccattgaagcggcaggctggctttatatcaactgtctgtgggtctccggttccctgaaagggcacggctattccagcgaactgctggaagaatgccttcgggatgccaaggcgcagggcaaaaacggcgtttgcatcctgtgtgcagaggggcgcaaacgggagtttctcgctgacccaaagtttttgacccataagggcttcaaggtttcggacacctccgattgcggcatcaacctcatgtacctgccccttgcagagagtgcccaatcgccaaaattcaaggcctgcgccaagcatcccaaggtggaggaaaacggctttgtcctctactataccgaccagtgcccttacacctattattgggtgccaaaggtgcaggaggccgcaaaggaacatgggattccgttcaaagccatccacgtcacagagaaagagacggcacagaatgtgcctgcacccgtcaccacctatgcactgttccgggatgggaaattcgtgacacagggcatccagtcggacaagaaatttttgaaattagcaggcgcagcggattgagagattcaggaggaaaaatgcaatacgatcaaacggttatcacaccaaaaggactgatcgtccacatccgaaacggcgtggcatccgatggaagcgctgtgcttgaaaactttgatctgacacacgcagaaacagattatctgctgagttatcccgatgaaaatcactttgatgcggaacaggaaagccgctacttggagaaaaaagcaaccagtccgaatgagatcgaactgatcgcctttgtggacggtaaagtggcaggaactgctggaattgatgcaatcggagcgcagtataaagtggcgcatcgcgcggaatttggcatcggtatcctaaaagagtattggggtctggggatcgggcgagccttgatggaagcctgtatccattgcgctaaaaccgccggatacgctcagttggagctggaggtagtggcggagaacgcaagagcaatctccatgtaccagacggcaggatttgtggaatatggcagaaacccaaaaggttttcgctctcgaaacgctggatatcaggaactgatctctatgcggctggaattgtaaagcttatcgactaaaacagccctcctgaccatgacggccgggagggctgtttttggtagggaggttgaccagtatgaggacgatacccggactaccgcaaggcgcggaacgagaggcaggaactggttcgggcacagaaaaatgtagaacgtttttttgcagaggaaaagaacaccaccgagaaaacacagacacgttaaaaaagtcgccgaggagcttcccagttgggaggcatcctcggcggattttttagtttatatagcagtttttcggagcaatgcgcctgttacccgtatattttccccacgatctttccgcgtgctgcggcgggcagaagcttgcacagcaggctcaggaacttatactgtgcaccggcaacataaacgaccgccggcttctttttctccacaataccggcgatgtaccgtccaatgcgtgccgggtccatgccgttttgctcgtcatgctccatctgactgacgctccgggagatgcgcccgccgtattcatcatcgccgagaatgcttttctgacgtgcttttgtaaaaccggtacagatgtcacccagttctacgacggtaacatggatgccgtagggcttgacttcatttgccagagcgtaagagtaagaagaaacggcggctttgcttgcggagtagaaggtctggaacggaatgtgtgctacggcggcaacagagctgatgttcacaatatgccccttcccctgacggcgcaggaaggggagaaccgctttatttacagtgactgtcccgaagaaattcacatcgaactgtgctttggcttgttccatggacgtaaactccaccgcaccggaaatgccaaagcctgcacagttgaccactgcatcgattttagtttctttttggatgacctgctgcacagcggcgttgaccgcatcttcatcggtcacatcgacagacagatgggtaacgccctccatagggatatttctgcggctgaactcatagacgatgcagccgttctccttcagagcggatgccgtgcaccgcccgatgccggagcttcctccggtaacaatgaccaccttgttgttttctcccaccatgattttcctcctgaaaatgttgatctggttcgagtataccgcatcgcagggcgactgtctatacggatagccggatcgtggaaaagtacagggatcaacctgcgtaaattttcacgcagattggcctctctttgttttacacaaccaatgccaattagcgcttgaaaacgaaacgctgcgcaagtatactatactagttatactgtacaagcttgatcacaaatcagtatgccagttgaccataaaaggcataccagaattgaagcgtgcggcggggtcaaaaccctacgaggatgaaaatgaaattcgatagaagacttacagatgaaatctacacttccgatacggtaaggctgggaaaaaatgcatttcaggccatgcaggagacgatctatcataatggcggtgtcggaaccattaccgggtactatgatgccgaattgtcgatcctgtcggtcagtgatctgttgctgcataatctgaaccacagctatgcatccctgatggaacagacaaagggttcgctgaagaatcttttctataagaaagatgccgcattcctcgacaatgcacgctttcgtcagattcaaggcgaaggggaaggccggatcctcacggcagatggggctcccgtctatgtgcgtctctacaaaaaagatgcagtcgatacggatggaacaccgatctggatcatgtcagtacagatgaactgggcgtatgagaaccttgcgctggttaatgaatccatccattctgcactatggtattttgagtgtaatgaaaacggtgagatcgttcatgtgaactggagccatgcgttccggcagatccttggttatcatgacattctggattttccgaacaaactggattcgtggtcgaaccttctgcacccggaggactatgaccgggtaatgcagctgcttttggaaacgattgcggacaaagccaatactacaaagtataatgttgagtaccgactgaaaatgcaggatggccaataccactggttccgggcatcggcggaggtgatacgccgtctggatggttcggccaatcgaattgccggaatcatcagcaacattgacgcggaaaaaagaagccggatgcaggcgcagcgggcagcggcatttcaccgtgcatttaccagcgcaaacctctgcgaatactatgtaaatctggaaaagaacacctttgacactttcaaagtggagccctctttgatgacggcctttgagcagaaccacacatgggatggactagtcagattccttgtggataactatgtggttgaagaggacaaaaagtctgtaacggatttctacaatcgcgcctacatcacggaaaaactaaaggggcttgagacggagctgcgtcaggagtgccgcatcgttctggatggggaggaacgatgggtcagcaacgtggtcatgcgcggcgagattgaagattccgaatatgcgatgatttttctgcgggacatcacagagtccaaagcagagacggcacggcggatgcagatggcctcagataacgcatcgatggatcttttgatcaagagtatggtgcgtctgctggatcgctttgtcgtctgcgatctggagaatgaccggtatcggttctataatctgcaaggtgaaatgatatacgcgccgacgggaacctaccatgattttgtggagcaggtggctgtaaggtataagacgttggagccattggcggcggtggacgcattgttctcaccggaaaatatccgcaagaatctgcagggcgagaacgacatctacaaatttgaatactgctccatagacgaaaacacctataagatcgcttccttcattccgctggagtgggatggcacaaagctggtcaaagcactgttggcatctatggatgtgtcacaggagaaaaaggccgagatcgaatcccataaggcactgaaggatgcgtaccgggcggcggaaaacgcaagccgtgccaagacggaattcctctccaatatgtcccatgatatccgtacaccgatgaatgcaatcattggcttgaccgccattgcgggtgcgaatatcgagagtcaggacagggtggtcgagtgccttggaaagatcacaaagtcgagtcgtcatctgttgggactgatcaatgaggtgctggatatggccagaatcgagagcgggcgaatgagccttgccgaggaggatttcagcctgccggagctggtcgataacctgctcaccctcacaaaaccggcaatcgacgagcacaagcatcagctcgaagtccatgttgagcacatcgagcacgaagctgtctgcggcgacagcctgcgcatccagcaggtctttgtgaacctgatgagcaacgccgtcaagtacaccccggatggaggaaacatcacccttacgatcaaggaaaaaccgaatggcttctcggagcttggctgctacgagttttccatcgaggacaacggcatcggcatgacgccggaattccagaagatcatgttcgagccgttcagccgggcagacgatcaccggacgaccaaggtgcagggcaccggtcttggcatggccattgcaagaaacatcgtcaacctgatgaatggtgacattcaggtcgaaagcgctcccaacaagggaacgaagatcacggtcacggtctatctgaagcttcaggagaacgagaaggaacaggaaaaagaactgctcgatctgccggtactggtcgtggacgatgacaagacctgctgcgaaagcaccgttgcaacccttcaggagatcggcatagcgggcgaatgggtcctgaccggcaaggaagccgtggaacgctgcgcggcgcggcacaagaccggccgcgactattttgcggtgatcctggactggaagatgccggagatggacggcatcgcaacggccagaaggattcgggaatgcgttggggaggacgtcacgatcatcatcctgacttcctttgatttcagcgagatcgaagaagaagccagagcagtgggcgtgaatgcgtttatggcaaaaccgctgttccgttctcgtctgacggcaactctgcggcagtttacatccgggaagaaggagaaaaacgctcggaactatctggaagactttgcgaaggaaaactatgcgggtaagcggattcttcttgtggaagacaatgcgctgaaccgtgagatcgcaaccgagattataggcatgacgggcgtgaccatcgacagcgccgaaaacggaaaaattgcagtcgaaaaggtgatggaagcgccagaaaagtggtacgatctcatttttatggacatccagatgcccatcatgaatggttacgaagccactgctgcgatccgtgcgcttgccggaagccggggcaaagtgcccatcattgccatgacggcaaatgcctttgccgaggacgtgcaattggcaaagaacaccggcatgaacgagcatatcgccaaaccgcttgatttgagtaagctgaacgatgtgctgaaacagtggctgtga

SEQ ID NO: 21 - DNA, 15649 bp, unidentified
  source 1..15649: mol_type = unassigned DNA
tatctctatacgcttttgtgacaagatcaatcgccattttattattatcaattacacttttgaaaggataaaaatcacagtgtgcaagatataacgccatatccccggccttatgcatatcgtaaccatctattgtcggaaacaaaacattaccttcgatgctattgtaatttgacatgcttttttattcctttcctttatctttgtatcattctcacatctcagccgaccataagatcgttgcctgctgctcaccacgaagaggtgtgtgattattcgagcagcatagggagctcctgctcccagtatatcacaatttcatccagttttacagacgctttcttgccttcatcgctacacagtaacacacgccacctagcgctccgcctactgtgttgtagaaaatgtctgatagttggaatgttcctagccgtagcagtagctgtaacatctctatgcttatcgaaaagataaatgctatcttccagctataccacagtatcttcttccagccgtttccaatcttctctccgaacgtccacatcactactgctgagaatggcaccatcatgatcacgttctcaatgcactcagttgtaagtttctgctcgccgttcacggtctcccagatgccccagccacccatgacatttgacaaaggatttagccacaggttccgattcagcagcgttcggaacaagatcatcgatgtcacgaaaaccagtaagaacatcttccgaaagaacacgctctctttaaatttctgataccaagtcactatggcgctcttccatcctttgcctgctgcggtaggctcatacgcatacagatagaaaaacatggccaaaaaggaaagaagaagcgaaaagccaaacggctcatatagcgcagttaggatgtttgtgaggatcttcccgaataaatcaatagtttctttcatcattgtttagagatcactgaacaggtcagccttgtacacgccgttttccagcatcttcttgaagctgtccttaacagctgcgacatcctcgtgataggtcatgccgtaccaggtatcgtttgttttcaatactttgacagacatctttccctgctccagcagttcaccaatgaagataggaatcagatactctgctttcagcggattgctgggtacttctttctcgaagaaccccttgaagccctcctccagcacatccaaaaaatcaggagtcaagccccacatattcatggaaaccagagaattcacatcaaccactacgccatctgcttctgctccggttgccgtctttacaatgttcttagtctcaacaatctcagtcagattgttctgctcgtccattttgcagataccacgagtcacgccgccgttatcggacagtgtgtttttcagcacaaagcctgccatgcaagacttgccaccattcaccaaatactcatggacggctttgaagccttcctttccatagtaatcatctgcatttatgacaatgaacggggtcttgatgacatcctttgctgcaaggactgcctgacccgtcccccaaggctttgtacgtccttccggcagagttccctgaatgtcgttgatatcctggaaagcgtagtccacagttacatcatgagacgcgcaaatagaggcaatacggtctccgatgacttctttaaactccttctcgatatccttgcggatgataaataccacatgattgaaaccagcttcaatcgcatcatggattgagtaatccataatgatatgtccagcatcatccactggctccaactgtttgattcctgttccaaaacggctaccgataccggctgccatgataagtaacgttgttttcataacttcttcctcttactaacttttattctactgtcacactcttcgccagatttcttggcttatccacatccaggcccttggctacagacacatagtagccgagtagctgcaacggaatcactgccaggctaccaacaaagtgctcgtccacctttggaacataaactgtgaagtttacctgatcttcgatttcatacttgccataagtagtgagccccatcagataagcaccacggctcttgcactccaacatattgctgatagttttttcgtagagtttgctttgggtcagcacgccgatgaccagcgttccctgctcaatcagactaatagttccgtgcttcagttcgccagctgcatatgcctccgagtgaatgtagctgatttctttcagtttcaaactaccttccaagcagacagcatagtcaatgccacgacctacgaagaacacatcgtgtgcattggcatactttgctgcaaaccactgaatgcgctctttatcttccaaagttttctgcatcttctccgggagagtcaacagttcagaaatatagtagctgtactgttcttcagtgattttttctctaaccttcgcaaactgaaccgccagacaatacatagccgccaattgtgcactgtatgccttagtcgttgcaacagagatttctggaccagcaagggtgtagaacactttgtccgcttcacgggcaatactgctgcctaccacattgacgattgccattgtggttatgcctttttcttttgcaagtcgcagtgcagccaatgtatctgctgtctcgccagactggctgacaacgattacaagtgctttctgattgagcggcattttacgatagcggaactcagatgcaagttccacacgcaccggaatatccgctatatcttccagcacatactgagcagccatgcccacatgccatgcagagccacaggcaacaatataaatctgctcaaagtttttaatttcgtcctcggtgatctccacactggataggtcgatagcgccgttcttgattacggaattaagagtatcctggacagctttcggctgctcatggatttctttcatcatgaaatgctcaaagccgcctttttcagctgcttctgcatcccacttgatctcggtggtctgcttctcgatttcatcaccattcagatcataaaagtgagcctcacccggaacgagctttgcgaactcaaggttgccaatgtaatacacgttgcgagtgtatttcagaattgccgggacatccgaagccacataggtctcaccatccgcaatgccgatgatcatcgggctatccttacgtgccacccagatctcgcccggataatcccggaacatcagctcaagagcgtaggaaccacggacacgcaccatcgtcttagcgatggcatcaataggaccgaggttgtactttttataatagtagtccaccagcttgatgaccacttccgtatccgtctgactatagaatgtataaccgtgcttcagcagcttttctttcagttcggtatagttctcgatgatgccgttatgtacgccaacgacctcagactccactgtgccggaaccagaacgggtacagttacctgaaacatgcggatgtgcattggtttggctcggctcaccgtgagttgcccaacgagtatgaccaataccacaggttcctttcaatgccttgccgccatctgttttctcgatcagattggacaggcgccccttcgctttcacaacctgtgccagattttctccgtcacggacagccagtccagccgagtcatatcctctatattccagttttgacagaccgtccagcaggatcggtgctgcctgtcgatttcctgtaaaaccaacgattccacacataggttttgcctctcctattattcatttttctatgatacttttccacttacacaaaacgactccggacactgccagagtcgtcattgactttataccttatatcccttttcgcagatcacattgaccacttcatcaacatacttctggcaggtatcatggtcaggtgcttccaccatcacacgaacgaccggctcagtaccggactcacgaaccagaatacggccggtatcgcccagtgcctcagcaaccttagacacggcttcctgcacagcaggatcattctgtgcagccttcttatcggtcacacgaacattctccaacacctgcggatagatcttcagcggtgccgccaactcgctcattggcttcttcttagccagcatgacttccatcatcttcaaactggttaagataccatcgccggtgctggcatatttggagaagatgatatgaccactctgctcaccaccgatacgacagccgttcttcgccatgtactcgtatacgtacttgtcgcccacagcagtcttggcgtaaccaataccttgctcatcaaacgctttgtacagaccaaagttggacataacagtcgtaaccacagtattggtcaacagcttgccacgctctttcatatagcagccatagatatacaggatatggtcgccagtgatgacattacccttctcgtccacgcacaggcagcggtcggcgtcaccatcgaaggcaaaaccaacatccaaacccttctccacaacaaacttctgcagaccctcaatatgcgtagaaccggcgttgttgttgatgttcgtgccattcggcttgttgtttatgacataggtatcagcacccagggcatcgaaaacgcttttagcgatattccaagagctgccgttggcgcagtctaggccgaccttgacacccttgaaggaatagataccgagactgatcagatagcccatataacgattacgacctgccacgtagtccaccgtgcagccgatgtgctcacgacgagcaaagggcagttccggccagtccttatcgaacacatggagctttccgtcgatataatcctccaccagcagcagggtttcctccggcatcttctcgccgtagcagtcgatcagcttgatgccgttatcatagtaggggttgtggcttgcggaaatcataatgccacagtcgaagtcatccacgcgggcaatgtaggccacggacggggtagtcgtaacatgcagcaggtaggcatccgccccggaggctgtcaggcccgcgaccaagctgtattcgaacatgtacgaactccgacgagtatccttgccgatgacgatacgggcggggtcggtatctcccttgcgctcacgtaaagcattgtaataccaacccaggaatcggcctactttgtaggcatggtctgctgttaatgtaattccggcttcaccacggaagccgtccgttccaaaatactttcccatttttcgttattcctttacttttttccttcccaccatccatggcgcaactcttacaacagcctcatatgccatactgcatattgccatcgtaatagctaccatgaccaataagaagttttctctcactacatctgttcccatgtgcagcgaaattgacacgatttttaacatccctccacatagaatcacgatcaaaaaaatcatattatttttttatcattctgataattttactggaagcactgtttttcagcataaacacacacaaaaaatacaccaaaacagctattacaatctcaacaagcagtctcatccatacagcttgtccaaaaaatagtttatggcataaaacaagcgtgagcgacatgacgaacgctgatgttaatattgaaaaaacatctctacaacacatattgactttaatcgttcttcttgttgctacaatcatgcttatggatacagtaaattcagctatgacagaggcaatcgcagctccgttttgtgtaagagtaggaattaacaggtaatttaatactgcattgacgactgttccaattaagacacaagctaaataacttttttctttaccagcggtgagcaacagctgacaaaaaaccccaccagacaatggcatcaatacaataagaattgataaaattctaatcgtactaatagccggcaaaaactcaacgccaaaaagcacttccacaatttggtctgcgaccaatattattccacaacaacacggtacagatattaaaaaagttacattgagaaactgtcttgacaacttttttatctcacttttattatcctcgctaaaaagataactaaatctaggcatcaaaacagcggaaatacctgttaacgtatttgcaacagctttaacaattttcgtagaattagaatagtatcctacgcttgtagcattagacatcactgtaagcattgacacatcaagtaaagaatatatctcaatggcgataacagaaacgaaaaacgtcataataggtctaatgtgttttttcaaggagatattgcaaaagcttaatttcacatacctttttagattgataaaattcaaaacataatttccaatgctaccgaaacaaataataaaagcatatgcaactaaatcactttttttcctgacaaaaataaaaagcaacaaaatggatactatttttataacaaggctacgaatcataatatattcatattcttcatagccttgataaacccattcaatattaatgacattaaatacgataatactagagaaaatcaatgccagtgccgtattcgaattattaatcttaaaacagaatgcagtgatcagatatacaacggttgctataatggaggatatgaaattaatcgtaaaaagttccgaaaaagttttgttacaactattttcatctctttttgattgagcaattgctcttacaccataagaagggattcctagcgcagctgccatgctaaaataagtcgccaggttttgtgctgaggaaacttctccaattcctgccgctcctaaaactcgtgatatataagaaaccgtcactagaggaaaaacgacggataaccctttattaatcatgctaaaagccgaatttcttgaaactgatttccccattgacgattaccccctttcacataaagattactttttaatcacgataagactctatcaatgatggaattgatatatgtgctatcattatcataaacatctgaacaagttttcacgccactctcattaacatactttccttcaatggtttcccttaaaattgcatgtcttagataccacatatattcaacatcaacatgtccaatatccacaaattgatatccctcatcacacaactgcgacgctagaatagaagctgtaggtcctaatgcacctaaaatcaacgtatccttttccacattcaatcttattgaagattttatagcttctagcttgctatatgcattttctgccggacaaataatccgctttatagaagttgcattatcaaacaagtcgttgcccatccccaattttgttttttcgccttcgacgataactacatctcttttatcccatattctcttcaacaaatcgaagatcttggcactataatttctatctctataatcaatatatggtcttgttatgctcgcatcactatacaccctgtttacatccataaatttcactagtcgggaaagaaaattggcacgaataattctccaatgcattttcgcataaagattgcatttggatgaatcaaacactccgtgaggaattccaaccaataagttttcattatcgtttttaaatgccaaagtcaaatctctcgcaaactcagctgaatagtcttgaaaagaagagatgcgctcacctgacatccacataaactctccatcaccaaatcggctaagtgatttccgctccttgacaattaatgacactgtttcttcatccgaataaaatttaatatccggaatttgagatttgtcctttaacgccttcagatattccggaacagtccttatcacattgtaactgtataccaacttatcgggtaacaatttttttatctttttcttccacgtcattcagctatttccccttcccgaattctttgcattttaattccgtaaagcagcacgatgattgccaaaaattttgatgaaaatgttatttcgacagttgccagtaagacaaacacatatgccaacgctgttagtgatctgacatcactatggtttatgttgcaaagattcttcggttgtttcattgcaatacatagccatatagccagcagcattgttccaaaaactcctatttgctgtatccaatcaaatatgccattctgcgtatctactattccgtacctcattaacacttcatatcccgtaccatatccaaatccccaaagccagtgacccttcatgatattaggaagcattgaatagatcaaagttctaaatgataatgtaacatctttacctagtaattgtgttatgacatatgtaaccacactgttagaaagaatcacctcaacaaaaactgcaaaaagcagacttgccatcaaagcgacaaaaaaaatcttaccgcttaaaaagagtccaatatttttttcattcagccataaaaacagcagcaacgcaacagtacccactataccagtagccgcccccaattctatagatattgtcattgtcattataaaaaataaaactagaattgcattattaagtgaactttctctaactgttcgcagtctaacatttttatcagcaatgaaaaatgaaataagataaaaatgcatataaaccacttgaaattttgttcctacaagaaacacatctcctccatattgtagatgaatagttgtaaacagtatcaaaaaatctgtagctatcacaactaatagggtcattcgataaaaaaccttaattagattctgcatttcctctcgttgacaaaacatttccactgttaacacaaattccactaatgttgccgtaaaaacaatagctgccaaaaacggattcctatccgtgtagccattcctattaatatacgatacgatcagtgtcgctaaacaaaagaaggctatgccgacattcagtcctcgataagtattcctagacaaaatcttaatatttgatgctatcatcattgctactacaacaaggaggaaatactttatgggattgtatgaaatatatgttgttgaaaaaaagacaagtaaatatactaatacagcatgtattgttgaaattttaatcttcattcgctttgttcctttacgcaattagtacatttctcaaaacatttttctataaactcatcataggaagaaaacattgctttatgtgcacgcatatattcaacagtatccagttcatttttgcataatgcgattttatttctaaatacatcatttttttgtgcctcttcagccgtttcaaatagcataaagtactcatggaacacttctttcccgggtctttttccatatctatcaaaatactcaacagcaagttctttggcttcattgaattgtgctcgttctcttttttcataatattcatctattgacataattcgttttgctggcacacctgcatacacgccattgtgatcacaactagaagtgacaacgctccctgcaccaatgattacattgttaccaatttcaacatttctggtgataatagtgttcattccgatgaacacattatcaccaatttccactgtaccgctcgctcctaatatagctcccggattctctgaaacaccctcatatagcttgagcaccgaccaagagtaatcatgtgttaatattttaaccccctcagtgatacgcacatgatttccaattgttatcatccatggatactgttcatcaatcaatgttttggatgggacatatatagtacaatcctcacctattttcacaccgattcttcggagataatctatatatgtttcagatgagtatctttttccatatgcaattttctttaaaacttctttgactcccatgaattatctcctcacccttttgcctttaacatccaatagcaaagttctttctgccgttttttattgcttcgagtaataattttcgcaacattttttcttttgtcagcggagtcttatttataacttcctgcaacactacatcgtttataactgtttcaagctgctttaactgttcttttttaggctactctgccccaacgatcatcttcattaccttcatttttgcacctttacttttagagatattcttttatcaaccataatggggtaatccatttccacttcacgcaccatgtcacaaatctgtactttattggcatttgaaaaatcggatacgtactgattatttttctaatagttgtatcatttatcattattcgtatgtttttcttcgctactgtagagttcttattaccaaccatttcgctttttatacacatacgcaatcttgtcaatagatgcctctcaagcctcaatttacaattctcgtatattccacactctttgctacgtctaatcaattcataatatagtactagttctttagcaaatctatctgttttatatgtctgcgttagtgacttctcgttaacaatataatgataaaatttttgattaataactgcagccctctcacaactcatcataaaatcaatattaaaaggaatatcttcagatatcaaatctcgttctgaaacaaactgcaatttcaaactatctattattgctttcctatatatatttctccacacactgcaggaaacatactttgaaccgtcatccgaaggatttaaacccaactgtgtatataataatttctctcgcaattcttgttgattataaaacccctcatgcataggtggcacatagttttgattcaagactgcaccatccgtgcgttccttataattgtcgacgcgaacaaaatctgcatcatatttttttgcagaattatacattgattcaaacatatctaaatcaacataatcatccgaatctacaaatgctatatattcgccagtcgcaaccttcattcctgaattgcgtgcgtatcccagtccaccattctttttatgaataactatgattcgagaatcctgtttcgcatattcatcgcacatccttggacagtcatccggtgactgatcatctactaggataatctcaatgtcttgcaatgtctggttacaaagtgacctcacacatctatctaaatatttttctacattgtagattggaacaattatgctaattttaggcattgctctttccccgattaattctaataatataattatgcatattaagtacacttctcacagttttcacatcatccctattacccatgataacgccgaggaattggtgacctcctgagagtacttcatgcattgcattaattccaaacaatttttttccatacaagccacgatctacaccatattccggtttcattctatatacaatatctggataattttctactttcgcaccttcatagatttcttcacgccttttcacccaaatcattataggttgaccatgatcttcaatttgcaatagtccatcaataatcttctgtcgcattacttcatattcttcgtcagaatcaaactcagatcgatttaccataattccaccgaatggattacagccatcaaatttgggtgcgtacactttctgctttttatccgaaaaaacataatctgcgttctttaccttatgtgcaaacttaaactgcttaaagaatttagtacctgactcaacaatatgaaaagtagccaaaaatctaaacatagagtttttggcgtactcgaccgctctttttttcttgctcttgtccttgattatcccctgactaattaaccattgattaatataaaatgttttttcacagcgtttaccgtgtccgtggtcactgataacaataatattgtattcacttccatactcatccattattctttttacatttttttccattaacttatacatctcaagaatggagttctgaagtttgttctttccaggataagttctgtcactttggtcggtataccgccatagaaaatgctgcattcgatctggtgtggtaacacccagaaaagcaaaatcatattgatccttcttaaaatacttatggaaagtatcaaactgcctctgtgataattccatcgtattctcaaaaaactttggcatttctttgtcagtcgggtggtcaaccattcctccaatagaaggcatagtcttcatatctactaaatcagggcgatttgtgctaacatctccgccctcaaacacgggaccacaaatcatcaatccattaacattccaagctggatatgccataaatggattaaaaatgaatactttttttccttcttcactcaatacatcccaaaacgagtgcccttgaataacagagtagtctcctttaactttatttttgaagtcaaggtaatcaattgattcaagcactccatgttctgctggattgagccccgtatatatagtagtccaagacggaatcgaatccgctggaactactgattctaaaggacacagttttttattatcatataattttttgaagaaatggaatttatcaagatttttttcaatatatgtataatcaagcccatccaaaatgaccatgatcgttttcttttttgtatccaattttatgcgcctccaaacaaatatttatcagtctaaaactacttttttaatctgagagttcactttttcaaaaggctgttctccatcaactgtaatccatttatttccttttgccaggaattcataaatctcatagcgcttgttcaaatagtccatattgggaatatcattttttcgcttatagcaggtttcaggagatacgcgaatatatacataattatccattcgtggaaaaagaaatctatatttttgtatttccttactaattctatctggagaaaaaccgaaattaattccctgatcaacaaacaagtcaagataaaaacggtcaaaaattatatttttacccgtcaatataaaagataacgtttttatgtgaaattgaaaaaaataatctaccagcgcaaaaaacatccacgttcctcgcattatgggatttctaaatatttttccctttaaaccagccttagtattataatcagcatttaattccgcctgctttactccgcattttccgtcaacttggacattcatcttgatgttcttattcttatcagatacctttttctccatcaacatataaaccggctttaagagcgtcggtttccaacgaacccataaaaaattataatctgaataatcagaatcccgtttcatcttttcaatatttgcagacttaccagaaccatccaagccaatcaaagcaactcttttacccattaatctattctcctatattaattatcctctgaagattatcaatagaattcttccaatcatattccaacactgcttgtctgttattgacttctgtctttaacaatgccttttccaatgcctggtttaatgaatccgaatctaacgcatcgataaaaagaaaaccctcttgttctctaaaagcagtcagttctccatattctgttgttacaatcggcaagttacaagaagctgcctcaagaacggacaatggaacatcaatacaattttcgatatccattacgggaaacaaatagacatctgctaattgatatatttcctgaatactctgcaaataagaatctattatggtcacgttacctctattttcaagcaaagttctaattgagctatccttctcagattctgtgaccgaactaactaccagtataatatgatattgattattaatttctgctagtttgtcaacatttcgaccgccttttaagtgcccaacatgtaaaacaacttgtttattagttggaatatggtacttttctcgaagaagtattttctttttatcatctactggaacgaatgtctctgtatcaattcctgtctttaaatagaaagccctattgccaactatttttttataaaactggtaagatgcctccgacaaagctattacttttgcgccactcagaattaaaaacagctttgctaggggattcatttgatacctcaacgcgaataaaactccctcttttcttcttgaaaaaaaagaaagaatgaatgtacgcaaacaacttgccgttgtgttagatgcaaatggtatatataaaacaggttctttcttttggtgcattatctcacataagcgctcattcaaaaaaaatttgttcaatgacatgtgaatatcagaataatccggtttacgttcaaaagaaataaccatggtgctagcatctgcttttttcagtctctttgtaagactattagccacctttaagcatccttcatcaattttatttgttagacaatcagataatacaatcataattttttcctttgtacgtttacttcttctagaaatattctaccctcttcattttcttcataactcaagctaaaataattgagtccgcatttttctcttgttcttaccgctgtcttttcacccattactttgtctccatctgctgtgcgatatcggcatccacaatttcctcgccggtcttatgcttcagctgttccttggatgcctcactcagaccgttgttgatcacgcagttcatatcgcaggtgctgcacttatccagttcctctttggtaacttttccatcacggtagtcacggcagattttcagctcatacatgctgtacggatgcttggtgaacagagccttaaacttgtgaaccagaacccaggtagcaggcttccagatgtacttgtgcatagccggggaaacagaaccgatcatccagcaatcgcggtcacagcaacgaaccttcgcacgaaccttctcggcttccgggctgttccacagctcatcccaggtctgattgttcaggttgcccatgacttccttatccttggtaccattgcaaggcataacatcgccatacggatcaatgaagaaggtatcaaagctcatgtcgcaaggcagcagacgcttctggccgtagatgtagttgatcaggccgtggttaaagtatgcacggaaccactttttcgggctgttactacgaagcagttcgttaaccagattctcgaagttctttgcgaccatcggacggtcgtggatgatgttcttggcctcaacgaagtagaagctgttatgcagagaagccgtagcaaactccatgcccatctcatcggaaatcttgtacagaggaaccagatcaggagcatttttatcctgaacggtcatgccgaagccaacgtccttcatgcccatttcacgcaacttcttcagcgtaccgtagccacgctggtagccgttttgcagaccacggatctcattgttggtctgctccagaccttcgatagagatacggataccgatctgcgggaattccttgcacagatcaacgatacgatcggtgaagaaaccgttcgtggaaataacgatacgatcagacttcttgtacagttcacgcacgatatccttcaggtcggtacggatgaacggctcaccgccggtaatattggtaaagtacatctttggcagcttcttgatggtttcgatgctgatttcttcttccggcttggaaggtgctttataacggttgcacatagagcaacgagcgttgcaacggtaagtgacgatgaccgtaccattcagtttcttttcgttattgttagccatttttctaatacctctgtctctctttttatctataaaccttcataattttctcgtaatactcatcaatggtatcaaagctgatatccttacagttcgcactgtactccgcacacagcttcttatcaccccagagcttct

SEQ ID NO: 22 - DNA, 17758 bp, unidentified
  source 1..17758: mol_type = unassigned DNA
ttttataccctaataagctgccggaaagtgaacgggtatgctccggaatatgtacagcagaacaggtaatgcgtatttccattcttttccaggtattctttcacgtcctggggctttcccaggtacggacattcctgtggaaatttcgggttcggctcaaagtcgaaatacccctttaccctgaatccggtccagtcctgagtcgtcagttcataatatagctcgcggttgttttctgaactacccaccagcactacatagcgcaggttaccacctttcgaacggtatcttttcaacccccatcgcatgaggatacggaatacagatagcgaaataaacagcagccctaaaaaagtcaggtagaaatacgaccaggcatccatgaatcgtcccagctccagcactacccccgacaatactccgaagcagattgtacttttcaataccttactcagaatctggtaggcatataccttacgccggtaaagcaccacgccagcctgcatggccgatacgaagtagcaaagcatcaccgtcagtatgacctgcaggtgcggtgcctgtagaatcttgtgccatggcgtatcttccgtagtgagatacaacagatagaacaatccacccgtaataagcgtttcacaagtaacgataaaaaggctcacccaacgatcgtatgcataatattttgttctcatgcgctatgtttttttgtatttttatcaaaaatgccgatgcaaagtaattggatttttgtctaaaaatcaatgaaataatgaaaagtttaatcgcataatggtaaattatacgattaaacctcaaaaaagtatactgatgttacgttttaaagtctcagttggctatttccttcttagaaattcagtttggccgaaataaattgcggtaccttccaggccattttttgcagtttggtgagtgtaggggcgaagccgtggctccggtacattctgacatcctcgtcccacattttttttcgtcgtgcactgtcggtcgataaacctcccatgcgcatgcgtacgatgtattcattcagatattccacctttaagtcggcttcgtataggaatcttaccagcaaatccgagtctgctgcaatcttgtaactctcatcgtataatccgtatcggtcatagcattctttccggatgtagcatgtagggtgcagtggaagccatccgtggcgtaccttccatttgctgtagcttcctcccatccagtttcgaatcaccttatccgtattgtccgggtcaacaaacaagccgttgccatacacaaagtctgctcccgtccgttcaaattcttgcgccatccgactgatggtatccttggcatacagaaaatcatcactgtgcaatagtccgattatatcccctgtagctgccttgatgcctttattgatgccttcgtacattcctttgtcaggctctgagataattttggatattctgtccttgtagcgattgataacttccagtgaacggtctttgctggctccgtccactacaatgtattcgatgtccggataatcctgtgacaatacgctttcaattgcttgaccgatggtcgcttcccggttgaagcatgaggtaataatggatattttcatatcaaagttctattatttagcaataaataatccgttgcctgatgtggtatgtgacaaaactattacgatagttttctgtatcttgctgcgaatccccagatttccataaagcaaaccagtggtacgataaatcccactgccatggaaatacggtcggctatgagccccattaacaagggagccactgctcctcctacaatcgacataatcagataagaagaagcctgtttggtttgtgtgccagcgtggcgcaaagatagcgaaaaaatagtaggaaacataatcgattcacataaaaagcacagtaacaggaaataccatcctgctccgcccggcatcagaatgactgccgccatgcatacacaagcaccagccgcacaaacggccagcactttttcccccttcacgaagcgcatcagccagcttccgcccatacgtccggccatgaacagtcccatgccgccgaacgacagccataccgaagcctcctgtgccgaaacacccgcattttcggtggcatagttgatgaaaaaactgttgatgcccgtctgtgcagccacgtaaaggaaaagcgacagcagtcccactgtgaacgaggtcgttctccacagcgatttcccgctcgcttcagcctgtccgctttcagcttcccggcctatttccggcagtttcacccgcgaaaagaggatggcgatgcacagcaccaccgtacccagcactgcgtaaggagtagtcacgtcacctcctccggcaaagagaaagaaacctcccgccagcggaccgcaaatccagcccagcccgttgaacgactgcgccaggttgatacgccgctcactgccttccggttcacccagcaccgtgacatacgggttcgaggccgtttccaggcaggtcagtccgcaaccgatgacgaacagtgccagcaggaaaaactcaaacgactgaattcgtcctcccggaatgaacagcaacgccccgatgccatacagcaccaggcccgtcagcacccctgtgcggtagccgaagcggcggataatccgtcccgccggcagcgccatgataaaataccctccgtacaccaccgcctgaatcagggccgagcgcgtgcgggtaatctccagtgtatcttgaaaatgtttgttcagcacatccagaatactgtgtgccactccccacagaaaaaagagggaagtaatcaaaataaaaggaaccaggaaactctttccgtccctggttcttactaatccaatcttttccatctcagcttctactgatttccagtcccttgttcgataaactcatctccacgaagcgcgcccgttcgttcggacgttcctctgtcagaatccggcggatacgcaccgccgcatccggatccttggccaccatgtacaggtaaccgccgcccccggcccccggcaacttatatcccaggcagaggtcgtcaatccgttccgtcaaggcctgtaccgtcgccgggttcgtaccctcatccagcaactggttctgcttccacgtctttcgtatcagtcgtcccgtttcctcgaaatcattccgcaggatggcatcgtacatatccatggcgtgacccttcatctgctccagcaggtgcaggtgacggttcgagttcaggaacatgcccttcacaatctccgccaggatgcccttggccgtacgcgtaatgcccgtgtaatacagcagatggcacttgcggtactcgtcgctcgtgaacaggtaatccggcaaccagcgcaccttcggttcctggtgccatcccggttgcgtctgtagcagcttcaccccgtgcagcacacccccgtactgatcctgccagccgccccccgtggtgagcaactgttccaataccagtgtacggctgccgatgccctgcttgtcccagttcaggccgcagaaatcattcagcgcccctaacaccgtagccgccaggatagagctggtgcccagtcccgaacccgccggaatggccgacagcaaggtcacttcaatacccgtgccgaacgctttcagctgtgcttccagcgaagcaaaccgttccatggagaaatccggatggaatcctgccagtaccagtgccgccttgggaatagagaaaggcgaacccaccttgttgaaatgctgcagctcctcgtaggtagacaccacctccatggcacctaggtcaatcgaacgcaacgtaatgcggtattccttcgacggcttcacgtacacctgcagcggcggctgtccgttcagctcaatggccaggttcaccacatttccgccctccatcaggctgtagggtggggtatccgtccatccccctgcaatgtcaatacgcaccgggctgcgtccccacacaatctggtccgcatacaccgacaatttcggctgctgacggtaatccatcgtgctggtcagtccctgacgcatcaggccgaacgcccgtgcctccagttccttcgcttccggattcccctccagctcgcgcaccttcgcacgaaacatcgcatcgctgatacgcttcagcagagaagtcccttccggcagttcctccggcagggcgatgccccctttggcaaacgcttccgctgcttcctgcaagtccacctgatagaacacgctccgttcctggttcttggccagcaggctccagttctccttgcggaacacctcccgctgggcgaacagccgtcgcaggttcgcatacgccgaaatctcgtcggccgataccttccgtgccttctgccagatagcccgtccggcttcaccctgtccgccgtccgtcatccattgcagcaccgtacccaaatcctctatcgagtctgtcaccgggaaaatcgcagccgactgcaagtcctcacagccccgaatctcgtccgctgtcagacctctttccgccagccattccgtcaccggacggcccagatatgccgtagaagcctccttcaggctccccttgaatttatcgttaaaaccgtacggacgtgcggcaaactcccgttcgcccatcggcaccacgtcgatgcacaccccttccggcacgttcagcgcccagtcgttgcgcggcacccccgtgatgatgttccggctgtgcagtgtccagctcttgcccacgtggctgttttccacccacacctctgcgttgtctgccgtcagcgggaactccatctccgcattctgcacgaacaccgccggatgcggtttcaccttgtggtgcataatcgcccgctggtccgtcacgcagttctgcaccgccagcgtcgacgaaatcatctcccggctcgtaccgtagtggtggaactcaccgcccggcagcggcaggatagccaccttcaggctgttcagctcctcatccacgatgcgcggatgcgctcccagtgccagcccgaactccgagtacatgtcgtagaatttcacgcccccgtccttgtcggtagaacgtttcaccatcagctcgatggcgcggtcgctcagcagccagatgccgatgtccatcaggaacaggtaatcctgcatcagctggcccatttcctccacgctcggtttctgcagcatgaagtccagcttctccggttccttccgcgacgacacgaacaccccgtggttcttcgccagttccgggtccacccacaagccgtagcacaccacgtccacgtccggaatctcctgcagcggttccgtggcacggatgtacacgtcgccgctcgcaatcagtgtacgcagcccttttggcgcccgctccatgatttcctcatacagcggcaactgcagcgacagcaagtcctgtgtgatgcgttgtccgcgtgcccagcggaacaccggtatcggcgtcagtaccttgcccgacggcgcatagcccggcagacggcggctttgtcctcccgcatgcagcaggatacgcttctcccgcgccagccagtcgtccagtgcggcatccttatcctcttcctcccggcaagcattcagcagccaggccgtaccacctcccgaacccagtttctttcccaccgggtccgatgtgcagaaccactccttgtggtccgcgtgcataatatcgtgaaaacactccaccagattcggtggcaatgacaatagctttttcatgtagtccaattaataatgaagaatgaagaattaataatgaaaaatgaagaatgaagaattaagaatgaagaattaagaatgaagaatgatgacgcttactcgtttttaattattcattattcactcattacagcttaaatatccgcgtcatcagcttccatttctcctgcgaggtggctcccggagcagctttctggaacttcgccatgtgcgcttcccattccgcctgacggggcagggtagccagccgtgcataatcccgttccatgtcaaactcatccgtggtatccataatcatgaacaggcggtttccgtcaatgtaaatctgcatgtctgtgatacccacttcgcggatgcccgctttcacttcctcccacacgtgcgcatgttctgccacgtaggcttcaatcagctccttgtcgtcatagagctccagtgtctggcaatatcttttcataatttactctttcgttatctgcccttatacattgagtcataatacttctgatagtcaccgctcgtcacgttgtccatccattcctggttgtccaggtaccagcgtaccgtcttttctatgccctcttcaaactgcaggctcggttcccagcccagttccttctgcagcttcgtagagtcgatggcgtaacgcatgtcgtggcccaggcggtcggtcacgtaggtaatcaggtccatgtcttcaccctccttgcggcccagcagacggtccaccgtgttaatcaccaccttgatgatgtcaatgttcttccactcattgaaaccaccgatgttatacgtttctgccgtcttaccgttgtggaaaatcacgtcgatagcccgcgcatggtcttccacatacagccagtcgcgcacgttttcccccttaccgtataccggcagcggcttgcggtgacgaatgttgttgatgaacagcggaatcagcttttccgggaactgataaggcccgtagttgttcgaacagttcgtcacgatggtcggcatgccgtacgtgtcgtgaaacgcccgcacaaagtggtcgctgctcgccttgctggcagagtaggggctgtgcggattatacttcgtatcctcgtagaagaaatccttcccgtacgccaggtgatgttccgacgacgaagccgtggtagtgaacggcggctcgataccctccggatgcgtcatctccagcgccccgtacacctcgtcggtagagatatgatagaaacgcttgccctcatacttctccggcagactttcccagtacaccttggccgcctgcagcagagacagcgtacccatcacgttggtacgtgcaaaggtaaacggatccttgatgctgcggtccacgtggctctctgcagccaggtgaatgataccgtccacgtgatacagctccatcagctcctgcatcttctcatagtcgcagatgtccgcctttatgaacacatagttcggctggttctcaatgtccttcaggttcgccaggtttcccgcatacgtcagcttgtccaggttgatgatacggtattcaggatacttgtttacaaacaggcgcaccacgtggctgccaataaatccggcaccgccggtaatcagtatgttacgtttgaaagtctccataatgaataatgaaaaatgaataatgaaaaatgaataatgaagaatgaagaacggtgcacgtacccgtttttcattattcattgttaattattaactgtaactagtctcttctgaaaatatcacgtgtataaactttttcctttacatcatccaggcacgcatcgtagcggttggcaatgatggcgttgctctgcttcttgaaatcctccaggttgttcaccacctttgagccgaagaacgtagtgccgtcttccaaagtcggttcatagatgatgaccgtagcacccttcgccttgatacgcttcattaccccctggatgctgctttggcggaaattgtcactgttcgacttcatggtcaggcgatataccccgatgacacattccttctccgcttccggactgtaatccccgcggttgtaatagtcgtagtatcccgctttcttcagcacctggtcggcaatgaaatccttacgcgtgcggttactctccacaatggcctgaatcaggttctccggcacatcctggtagttggccaacaactgcttggtatccttcggcagacagtagcccccgtaaccgaatgaaggattgttgtaatgcgtaccgatgcgcgggtccaggcagataccctgaatgatggcctgtgtgtccagtcctttcacctctgcatacgtatccagctcattgaagtagcttacacgcagagccaggtaagtattggcaaacagcttcaccgcttctgcctctttcagtcccataaacagtgtatcgatgtccggtttcaaggcaccctcctgcaacagcgccgcaaactcgtgcgccttttcctccagatcttccccggcaatcgcctgaatagccgcgttctcctcgtcgcgtccgttaatcagtttcgggaagcccacgatgatacggctggggtagaggttatcgtacagcgccttgctctcacgcaagaactccggtgagaatagcaggttgaatttctttcccgcaagggcaggagtggagcggaatttttccgcatacttcacgtacaagctgcggcagtagcccactgggatggtactcttgattaccattaccgcatccggattcacctccagcaccagatcaatcacctcttctacatgcgacgtatcgaaataattcttcaccgggtcgtagttggtaggagcggcaatcaccacgaaatccgcattccggtaagctgaagccccgtccagtgtagcggtcaggttcagttccttctctgctaaatacttttcgatgtactcatcctgaatcgggctgatacgatggttgattttctccaccttttcaggaatcacgtctacagccgtcacctgatgatgctgtgatagcaaggtagcaatggatagccccacatagcctgtgccggctacggcaatggtataattcttcatattattgtaaacttccaaattatacaatatcgttaatgaattctttgaacgattcacatttaccagaatctttcaagcgtatataatcacttttagacaagctagatgtaatggcatgcgcgtctcctttatgtttatcatatttcatacctaccagttgataaatatcattcagtagtttggccggatgataaactgtaatttccgggtcttgtgtaatgtctgtacccagttgagtttttatcagtatggcgtgaaatatagtccgatgagaagaagtcaaagttgctgagacccgtaaatttgaaatcttcgaacagatcaggactgttggttgtattgacaggtatcactttttcaccttttcgttccagaatattccaatactgcaggtccacaatatccatcagaaaagtatcgtttgaactggccagcagctggatacctctttcatgacagaagtcaaacagtagttttcccagtttgaccgtgcggtcatagtccaatccttcgcctaagtcgtcaatcagccagagcgaaggttttccttgtgcggaaagatattccatctgaatcagaaggctgatggctctgcacatacctttcgataaagaagatatggacaaatgctctttgatgcctttttccttgaatagaacgattttaaatctctccggcttgagagttttgatggcttccaggtggtaatccagattttgggcctgttcgattattctttgtatggattcagaaggaagtgattttaccatggtgaacaaatcatctttatgaataggcgaaaggaatgaattggttttatttcccctgtccgcttcaatttcattgaaacgttgtccgtacacattttccgcccatgtaatgattttctcaaaataggggtattgtatgatgtctctgcgcacgtgaagcgtcagcttatccgttggaggattgattggcatcccttccagcaatgtttccttttcatttcggttcagcaggttttgtccgtttattgtcagattttcttccgttattatcccccgttgatatgtgaaatggtattctattacttcttcttcatccttaaaggagaaagtggaagagcaggaaattcttgatacaaacggcatatcttgttgcaagataatattggccatgttaaaaattgcggcaatgactttcgatttgcctacagcattttttcctacaagcagattgacagctttgaaaggaatggcttgggttagttcccaggtaggttctttataaaagaagtgagtgagttccattttatttactgcgattattagcaaaggtaattaaaaatatggaatgaagcatacttttatcaaatacttttaccggtctgctttatacggcgtttttatcatgcatggggaatttccattcggattataccgtctgatgattgatgcagatacctttcaggtaccattcatacaagcggtgaataccttcgtctatttctactttatgatgccatcccaggctgtgcagcttgcttacgtccgtcagcttgcgcagtgtgccgtccggtttcgatgcatcccagcgcagttcacccttgaagccgatttccttcatgattttctctgccacttcgcggatagacacttccttgcccgtacccacgttgatgtggcagttacggatttcagtaataccgtccgcatttttctttgacgcatcatacgtctgcttgaaatctacgttcagcaacacatgtacgctggcatctgccatttcttcactccacaaaaactcacgcatcggctttcccgtaccccaaagcgtaaccgcttccggtgtgataccgaatttcgccagcttttccagaatctcttcgtccgtattacttccgtttacaccttccaccgggcgcaggttgatgtccttacgtaccgcattccaatcgccctcattcaggcatttcgccaggtgaatcttgcggatcatagccggcagtacgtgactgttttccaggtggaagttatcattcggaccgtacaggttggtcggcattacggcgatgtaattcgtgccatactgcaggttgaagctttcacacatcttcagtcccgcaatctttgcgatggcatacggttcgttcgtatattccagcggggaggtgagaagcacctcttccttcatcggttgcggagcctcacgcggataaatgcaggtactgcccaggaacagcaacttcttcaccccgtgacggaaactctcgccaatcacgttctgctgaatctgtaagttctggtagataaagtccgcacgatattgcaggttggccatgatgcctcccacatgtgccgcagccagaatcaccgcatccggctgttcctcgtcgaagaacttctttaccgctatcgggtccagcaaatccagttccttgtgcgaacgtcctaccaggttattatagcctctttccttcaggttattccagatagcggaacccaccagtccgtggtgtcccgctacatatatcttcgctgatttgtccatattcgacaaattaattgtttattgtttcagagacagaagaacaaaagaacatataatcttcattattaattcttcgttcttcattcctcattcttcattatttcacgattcccttctccaggtactctgccaggtttgtgcgaatctgttctcccgccttttctacggccactttcgccatatccgcatccaccatgatttttaccagttcctcaaaggttgtcttcgacggattccagcctaacttagccttcgcctttgtcgggtcaccccagaggttcaccacgtctgtcggacggtagaaatcctcgcttacctctaccaggcacttgccggtagccttgtcgtaacccttttcgttgataccttcacccttgaattccagttcgatgcccgcatacttgaatgccaggtagcagaattcacgtacactgtgctgtacacccgtagcgatgacgaaatcttccggtgtttcatgctgcagaatcagccacatacattccacgtaatccttggcataaccccagtcgcgcagtgagtccagattacccagatacagcttctcctgttttccctgtgcaatgcgggctgcggccagcgtaatcttacgtgttacgaaggtttctccacgacgttccgattcatggttgaacaagatacccgagcagcaatacatattgtaagcctcgcggtattcctttacaatccagaagccatacaatttagccactgcatacgggctgtaaggatggaacggtgtgttttcattctgcggcacttcctccacctttccgtaaagttccgaagtagatgcctgatagatacggcaagtatctttcagtccgcacagacggacagcctctaacacgcggagcacccctgtggcgtctacatcagctgtaaattccggagagtcaaaacttacctgtacgtggctttgtgctgccaggttgtaaatttccgtggggcgtaccttgcttaccacttgcagaatactcatggagtctcctaggtctgcatagtgcaagtgaaatttcggttgtccttccagatgtgcgatacgttcgcggaagtccactgacgagcggcgaatagtaccgtgtacgtcataacctttttccaataaaaattcagccagaaacgatccgtcctgtcctgtaatacctgtgattagtgctacttttctttccataaataatcaaattttaccccgcaaagatatagaaaaagccccgtactgccaatgacagccggggcttttcttctgattatatgccttttgctttagaatttcttaaactttaatatagcataatcagactctaaggtcatgtatttcccgtttgtttccactaccttgaacgtcgtattcacattgtttagtccgtagggctccagttcccatacctcagccggacgggagttttctggaaggtcatacgtgctcatgtcgttcatggtgatgctattacttgcttcatcgtactggtatcttccgcggaaaggagtcaatccctgtggcccttgcttctctgccacttccactacccaaagctgtatgctgtagtaaatacgttcgcatggatgcacctcattgtccgctttcgtagtaaattccaataattgccagtgtccttcaatctcagtgtttattggttccttcttgcagtcgttgcatatcatggccagtaccatcatgcaaagccctatatagaaaattcgtttcatacttctttcttcaattaaaaaatcactcctgtttttctgatggtcagcatgcctcctgtagaattacccaggtaattacctcggtcaagtcccagtgcagccgaagcactccatccttttgcccatttcggtgtataagttgcttcatagagcgaactgaattgtttccgctgttggtcaagaggaatgtcgtatgtaccccagtggcgggcaaatgaaatcagcatgcggtatccccactccgaagaaggctgtccgctgatgcccaggtgatgtgctcttacgcgattacttcggaatgaaatactatggtctgcattataggctggtcctggaagcaatgggttgcccatgcccataccttggtgctgccagcctccataaatataatgattgtaataattatcatcggcgctgatttggtattcagggaattgcccccaaaagctatcaaataacaggggacctgcttgatcttttgtgcaaagtccttcccatacagccgaagttatccaccggtttttcgggaaagtaatttccagtccgatttgtccgtctttccagcgtccatattcccaaaacatctgcgatgtatcttcaaaataatgttccagataagcccggaactcccattgtcccaaatagtaattcagtgcgaagttccagcttcctaacatgtttccttccacgtttacttgttctccttcaggagtatcacttcctcccgtttgagggaaaaaagctttccagtaagccttcaaattgtccggcatgtccagcacattctctgtacttccgtcttccagcttcagatactgatcacctccaaattgtgacgccatcaaaagaccaaattcaaactccaatggaagtttttccttgttccctaaccgcagcatgagtgatttgctatggtaaagcacatcctttgtgaaatactgcccaggttgaacaaaatctttctgccagccattgtctgtaaatgaaccgtatgcaatgtgtcctttaaaagccagccatccctttgtgcccggcacgtttagaaactccttgatttctcctctgatttgtggaatcggttgcgtgttaggaccttccaccatcattccgctacttagtgctgtgttcttggtcagcggaaaccccgggcgttccttacttccgatgctcagtgtcagcatcttccaggaaaaatcactgtatatctgatgaatgaacacatcttgcgcctgatgaattcctcccgccatgtctagtccggcttcaatacgccatccgcgttcaaattgtttttcgtatgagatgcctgccagcagatatcccgaatttggatttgtgcttcctaatccgtaacggtttcctgtgaaccacaatggggcgtacgtaccgtttccggcagtagctcctaattccacgtggtaggtgagggaagagttttcagtctgtgcttgtgccaaactgccggatagtatagcaaagagtaaaattgcttttagtttcatagagaattgtagaattaatctttctttttcagttcattcttgaagtcatgataaatgtctttcccgaaaagaatccatgcagactcaagcacaaaagctaagaatgcaaaagcaatgatgatgagcattttcttgggagatgccggagcaagtggtacggtggctggttctactacggcaaacaccggtttggcctcctgtacttttccacgcagaacctgcagctgtcccatggactggctatagatttgttctgctaaacttaagtttttttgtaatctatctttttccgaagttacagcttgaaggatgacattccggttggcgtctgcaaatttggcatatttctgttgtgcatcaaaatactctttccggtattgttcgcataaacttaattggaaatcatagtcttgctttgctttgcgagtacgatagtctgttatatactcttgtagtttatgtaccgcactatctgctacgattgcggctgtaagtgggtcttgtagtgagatacttacttttgtcatattggtctttttatctgtttccacttttagaacttttttcaacataccaattcgttcaacttgttcaggggtaagatgaaatgggtcaattgtttggggaatgctatctattggtgcttttttgaatagtgacataattccattaatagccatgtttggagcttccattatataactccaccatggttttttttcagaattgagataatcataaagtatgtacttttctttattttgtgtcttgatgggagtttggagcatctctaatataaatgggttcgtttttacgatttcaggaaacatgttgaaatttaaagcatcttctccaaatccggtagcactatttcctaatccaaacatagatgctataccagataatccgttggtaacattaactcctgattctggagataatataacttcaaccttataagttttgggcaaactaattcctatgattaagccaattagtcctcctaatccaataatctttaggagtttctttctaaaatggaataattttcgaaataaaatgattaaatcgatttcgttaatggccttgtcctcttctaattgtttgttattcattgtttccattattcttggttgtttaagctgcttttatattaaagtaaattcgaatatggattatatatttatttaattagggttatagcaataaaaataaaattccaattttattttttcctttttagacggatgttttttgggcagccgcctaaagacgtttacaaatttaacgattattatttgtatattatcattggaagaagtgtttcatgatttgttcccatttttagtttccttagctattttcaaaagtaattcctgaagatagcacctatcagcttgcttgtttctatagattactaagttctgtatacctctgacactcctgaaggataagctgtttttctttgtgtcgttataagtctctggctcttttacagtcatattgccgttatttctataggtgaaaatccaactctagaatttgttcaagtttattttctatgagtttttctaatactatcttctccatttgtttatgtgagaaaaaatgtttgttttcagtgaaatatgactcttttactgatattcagactttggttggaattttgaaagcaattattttagaatatataacttcatatattttataaaaatatctaagggatagtaagaaagggttcgtgtaaatattgttttctttaaaagctctaatatgttctttcattattagttttctgctagcaaatccagatgtacttgcgcctccaaccctcattgtaacaaaatctttttcaatgtataaagtgttaatcctttttatataaattgctcttagtagaaactcaaagtccgcagcaattttgtatgatgttttgtagagcccgattttgtgaaaatattttttcctaatataaaatgaaggatgagctggcatcattccatatttcatcaaataggggcgaaatattttagaagaatagtatctgactattttgttgggatttttatcgtttatgaagtgtacgtcaccgtatatagcatcaattttttcattttgaaatgatttagaaatggtgcctaagatattatttgacgaaaagaaatcatctgaattcaaaatccctataatttctcctgtcgcaagtaatatgcctttattcatcgcatcgtatattcctttatccttttctgatatccattttaatttattgcctagaataggttcatactcttttacaatatctattgtgtgatcatcggaagctccgtctatgataatgtactcataatctgtatatgtttggtttattatggattctatagtgtcacgtatcgttttttcactattgaaggtcgttgtaataattgagattttcatttgtgtttttggattaatagtcgttgtactaggttatatactagatataatcgataagcaattttaaaactcaaagtagaggatttgctaaaacctcctgtagatgagtttgtgctgtgtcttctgtattttattagttgttcatttgaaatcgttgatttataaaagcttttagcgatgagaaaaatccagttatcatgggtacaatattgatggttgtgtggaaaaggaagaactttctctaaaatatttcttttaaaagccatgcaacatcctaaatagccaaatttataaatattccctattagacttttataaacgattctttctttataaaatgaatcttttgtagcttgcccatctgaatttatgataacagcatcagaaactataaaatcataactttgtaattcatttatgcaatatgatactttattttccatccatatatcatcttgatcgcataaaaatatatattcccctagggctttttgtaaagcgttctcaaagtttggtgtatatcctttttctccttgatttataaaaatcttaatccttttatcattaatacttcttattatttggagtgtgtcatctgtggaatggtcgtcagatataataatttcatcattatcacttagttgtggtaaaattgagttcaattgttcctttatatacaatgctccattatatgttgctatacatacagatatcatgatgctaaaaatagtaaacttccaattttagggtatccccttttagacgggcgccagtcggcacccg

SEQ ID NO: 23 - DNA, 13592 bp, unidentified
  source 1..13592: mol_type = unassigned DNA
agcagaaggaaggcaaaaagaagatgcgtcagctgggcagcgtttccctgcccagcgaggcctttaccgccgtgctcaagctggacagcgacgacgattgatctgcaaatatacaaaagggatgctgcgtgcgcggcatcccttttttgatgggaactcccaaatgtgaaatccgcccatggcagagatgctctctttgcttttcctactaaatatgttataatttatttatatatcagtttttgtatccgtttttggaaagatgggctgcggccttgtgctgcgcccttctctatgcaacgttccccggcagaaaggatgtggcctttatcaaagcaaaacacggaaaaggcgcagcgcaaaacagcagacatacacacagcggcggcgcacagagggcagcgttcctctggaagcaggtgctgctgacgctgctggttcttgttgccctgcttgccctgctgggcggggcgctgtggcagaatatctgctataaccgcacccactatacggcagagttctatcagatccattcccgcaagctgacccagagttgccgggtcgtttttctgaccgacctgcatctgcgggaatacggagcagataactgtgagctggtgcaggatgtccgcagccttgccccggatctgatcctgctgggcggcgactttgtgacctacggcgaaggcaccaattatgataatatgctttctctgttccgtcagctgagcgagattgccccggtatgcggcgtgctgggcaaccacgaggacgagctgtattttctggacaacgaccgggaactggtggaaaagttcaccgccgccggggtgaccgtcctgcgcaatcaggaggcgcgctataccatccacgacaatgtcatcagcattctgggcgtggagggcagcccggaggacttttacaactacggtgccagtacctttatggacagcgtggagccgcagacggactatgacctgcgcatctgtctggcacacgttcccacctactttcccgagcatctggaaaattattcctttgagctgggactggccgggcacacccacggcggcatcgtgcgtctgccgaagatcggtccgctttataccgccgaggagggctttttccccgactatgccgggggcagctatacgcttgccaacaacgccaccctcattgtaagccggggactgggcgattccagctgggtgccccgcatcaataacgtgccggagctttcggtcattgacatcgactaagcagtctgcaccgcgcgtgcaggccgctgcaaaagggtagaatgccatggatgacatcaaagaaaagatcaaacaggcgctgcgccatatctggatcaataaataccgtctgtttttctgcctgctgaccttgtgctgtctgttcgggctggttcactatttcaaaagtgcggacagcgccaccgccagcctctccttcaattactccgaggcggcgcttggcatgaaccccaacaagacccgcttcaacgcctacgagatcgtttcggacgaggtgatggaacgcgccatccggcgggtgggcttgcaggacagcctgactgcatcccagctggcccagtgcctttatctcagcccggaaggcaccggcagcgccaacggcagcgagtatatcagcaccaactactatctttccatcaatacccgcaagctggagcttggcagccgcaaggctacggatcttttgcagagcgtgtgcgaatcctaccgggagatctttcagagcaactactgcgacaaccagagcctgctgaaggaaaagctggaagtgacctctgcgtgtgagccttacctacggctgaacgagctggaggtgcgcgctgaggggctgaaccgctacctgaacgctcgtctgcaggagaacaaaagctttacggacgaggcaaaccccgactctgccaccaacaactttaccacgctgggtaaaaagatcaacaatctggtggattacgacctgcccaatgccatggcctttgtcattgagggcggcgttgcccgcgacccgtccatgctgaccagcattctggaatacaagaacaagatcgacgatcttgccatgcgcacccagcaggcttattatgacgccgacaaaaagggcatttccatctacgaaaagtccatgacctccatcatgatgatccccaccgtggacgaggacagcgaatactatatgtcccgcaccaagaccgccatggatgcgctggcgcgagcggcagacgcttctctggccgatgccaccgactaccagtccgagatcgtgagcacgaattatgtgatccagaagatccgggagctggatgccggccagccgcgtctggccgaggcgcaggccatggtgaacaagctggagaccgccatcaacgagatctcggagcagctgtttgtactggacaaggcgtatatcaagtacaaatcccagaactatattacctttacctacggctcggcctccttcctgcagcgcctgagcctgaaaaagaccctgatggagtccgttgccgtgatgctgggcagcgcatggctgctccacgaacgtaaacgcagaaaggcaaggcaccgcagatgaaaaagtttgagatcctgcgctatctgaagcgtttcagcctgctgatctttctggtgtcgctggcaggtgcggccgccatctacctgtatgcagacggtaggcagaagtacactgcatcggtcattatccgctataccaacgacggcatctcggacggctacaccccggacggcagcgagctggacgtcaacgagatttactcctccaccgtcatctcgcaggccatggatgcactgggtgcttccgggcggctgagcaccatccgttccaacatctcggtgaccccggtgatctcggaagatcagcagaccatcaacgaggcactgctgcaaaagggcgaagaggtgacctatttcccggatacctacaaggtgagccttgtggtggatggagagcagggcgcgggttatgcccgcaatatgctggatgccatcatccagagctactgcacctattatacggaaaaatatgtggagcagaagctctcgctcaacccctcgtccggtctgctggacaacggctacgattactacgagtgcatccgcattctggaaaacgataccaacgagatgcaggactatctgctgagcaagcgggagcactacccgaattttcgctcctcccgcaccggctacacctatgcagacctgtgcgatatctattccgacttcaaaaaatacaccatcccggcgctgtacgcctatgtgctcaacggcccgcaggtgcgggacggcacggtgctgcaggaatatctggccaacaccatcgaaactgcaaagcagaacgaacagatcaccaccgagcagcgggacagtctgtggagcctgaccgaccagtatgtgtacaagaacgccgatctgctgcaaaactactttactgaccggggcgaggtggtgtcctcggactatatcctgaataacatcgagctggaaggtgctggcgataaggcacagaccacctacgacggtctggtgctgaaactggtatcgctggaacagcaggtcgcatccagccagatcgaccggcagtttcaggaggagatcctgcaaagtttccgcaacgtggattttggcggtacaagcgaacagcatgctgcaatggaaagcatgatcaacgactacgaggcgcagctgaaaagctactacgagatcatcaataccagcagcaaggagctgaacctgtacatcagcgcggattatctgaagatgatcagctcggtgcaggtggctgccgccatcaatgtcaagctgtacctgatgcttgcgctggtgctgttctttgtcatcggctgctgcggcgcaattctgctgggccgcatctcggatgcggtggattatctgctgtatgtggacaaaaagaccggtctgcccaaccgcgaaaagctcaacgtgtatatcaccggcatggccgaccgcatcctgccggaggactatacctgctttgctttgcagctggacaacctgaccgagatgagccgccgcttcggctaccatgtgggtgacggcatcctgaaggatttttccggtcttttgcagctgatgggcgataccgacggcacggtgggctacaacggcgcgggcaagttccttgccttctttgatgaatgcagcacccggaaggcagaggtcatgatccgcatcctgcaaagtcaggtggacgagtacaataagctcaacccggagtaccccatcctgttcaccgccgcatgggccaccgcctcggaggagaagctctaccatgtgcgcgaccttgtgcgctgcgcacagaaaaagatggccctgatcgcagaggagggcggcgctgtccttgccggaacggagcgtggtgaagcatgatccagaaccgacgcgcttaccagctgatccactgccacacccgcagccgtctgctggcgggcgctgccgccgtgtgcggcgcagcctgcggccatgcagaccttgggctgtaccatctgctgcaccggggcggtgccccgctgccggacagcacacaggccgaccgcgccgcgctggcagccctgtgcccgaaacccgcagcagaagagacctgcccgctgctgccgccgcaggacccgacggtgaccctttcggtcattgtgccggtgtacaacggcgaagctaccatcggcccctgtctggacagcattttgcagcaggagaccagctgcaccgtgcagctgatcgtggtggacagcgattccaccgacggcacagccgccgtgctggaacgctaccgggcactgcccggggtgttgctgtgcaattgcagtgcgccccgcagcgccgccgccgcccgcaacgaggggctacgccacgccgtgggccgctggctgatgttcgtggacagcgacgatctgttattgcccggtgccatccgcaccctgctggaggccgcacagcgccttgacgccgatgtggtgcagggcggctggcagtacctgtacaccgacggcacccacggcccggtgcagcgctacccggcggcagtctacgccggtgctgccgcgccggagcggttcgagctgcccgggatgccatggggcaaggtgtaccggcgggagctgtttgcacaggtgcgctttccggcttactatacctgctttgaggatgccatcatccattttctggtattccggctggcaaagactgtggcctctgtgccggagatggtctatctgtggcgcaaaaaccccaaggggcttaccgccacaagtcagcaccgccctgccgccgtgcagagctactggatcatggagcagctggcagtgcaggatgctgcgctgggcctgccccacgatgcgttgtaccgctgcaccctgacgctgcagctttcggctttctgctatgccactgtatccggcctgccgccggaaacgcagcaggctgttttccggctgtgctgtgctttgtacgcaaaggcgctgccgcaagagggcgcactgccccgccgtgcccgctggggtgcccgggcgctgcggcagcaggactttgggctgtggtgccgctacggcagaagatttcagttgttataatgtaaggagtacccatgatacgagtgctgcattcggtcagcaatatggaccgcggcgggatcgagaccatgctgatgaactactaccggcatatcgaccgcgaaaaggtccagtttgattttatcgtcaacaagcaaaagcccggcgattacgacgacgagatccgccgtctgggcgggcatatctaccagagtccgggattaaacccgctgcactacccggcgtatctgcgctttgtgcagcagaccgtggccacagacccccgcatccgcatcctgcacgcccacaacgaggcgatggggctttatgccctgaagggtgcggagaaggccgggctgcaagtgcgcattgcccacgcccataatatctggatcgtccgggactacaagtggccgctgaagatgttctgtaagcagctgctgcccggcgccgccacccacctgtgggcctgcggccgggatgcgggcatctactactttggcaaagcggactgggagcgccggggacagatcattcccaacgccatcgagccggagaccttccgcttctcccccgccgtccgcgccgaaatgcgggcgcgctacgggctggaggaccgggtggtgctgggtcatgtaggccgctttgatgtccgcaagaaccacgagcgtctattggagatctttgccgcctttttgcagctggaaccccgggcgatgctggtgctcattggtaccggcaggctggagcaggctgtccgtgcacaggcgcaggaactgggcatcacagaccatatcctgtttgccgggttgcaaagcaatgtggccgactggtaccagatgatggatctcttcgtcatgccctcccgctttgagggtctgccggtggtggggatcgaggcgcaagccgctgggctggggtgcgtattttcggacgcagtgccggcggaggtgctgctttcttcccatgccatccagatcccgctttccgccagcaatgcagactgggcagcaggcttgcagcggatgctccaccagccctgcgaccgatctgctggtgcagaactgatccgacaggcgggctacgatatcaacatcgccgccgcccgcttacagcagcagtacctgcaactgggagggcaggcgtaaccccccggcggctgcgggaacacccacaataaaaggagagcccttttcatgcacacattggatcagatcctgaccaaaaaggattacagccggaaaactccggcctctttgttttataaggacagcccgctgtggcaaaaactgctgaccatcggttgcgtggtctttttggccggtgccgggctgggagagtggaaaccaatcaacagcgcagtgggcggccttcccaaagccatctctctgggggtgatcgggctggcaatgctgtacaccctgttttacccggacgaaaagcgtctccgggagttatggaagcctaccctgctttatatgtccctgatggcggcgctgtttttctggtcgatggtcatctggatcgaaagctttgccgcagtgtcttccatgatccgaagctgctccaagatcgtgttccagagtattgccatcctcactgccgtggcgctggtctatctgttccgggaaaaagccatcgagctgtttaccatcagcatctgcattgccaacacggccatcatgctgctgagcattcctggctacggttttgcagccagcatccagtctctcgttacctgtttgatcaccttcggtgatgcggatggctatgcgctgcagctggagattcacgacctgacctttgtgttcgggcagatgatcttgtactacgccgtttttgctcctcgtactacccggcaggaaaagcgcaagcgctgtctgtatctgctgctctgctgctggttttttctggtcggcatgaagcgcatcgccatcccggcggtggttctgttcgtcctgatcgctctgcttctccgcaagcgcaaagtccccggctggttttacccggcagtgggcgtctgctgtatcctgttttttctggcattcctctactgtgtgcgctacggtgttatttcaaggttgctgaacagttttggcattgacatgatgggacgggactatctgtggagcatggcgaatccctactatgaattttctatcacctatatcggccgcggttttgaatatgtggacaccatcatcgcccagtggtataatgacgggctcatcaaccagccttaccccttccacaacgacatcctgaaggtctttgtagaggtaggctttccgggttttctgctctggtccagcatccagtatgttctgactccgctgttctggcagcgctatgcagaccaagagaccacgttgctgtatctgtccgagctaggctatatgacggtgacctacctgaccgataataccgccttttatttctggagcacgatggcgctgcgtctggtgacgcttgcctacgccatggagcgcaaaaagcccccggaacccaaggtgtggatgccggacagtcggcaggagatgcgggaccgcatccatattctgatgaaggaagtgtgacggcaaggagtgaaaacaatgccctgtatctcgtttatagtgcctgtttataatatggagcgcctgctgccccgggcgctgcgctcactgcgggcgcagactttgaccgacttcgaggccattctcatcaacgatggctctaaggacggcagcgccgcgctgtgtgcacaggctgttgccgaggatgcgcgctttcgcttcatcgaccagcccaacggcggcgtagccactgcccgcaacgcgggtctggatgcagcccggggcgagtatatcttctttctggacccggatgactgggtagagccggatgcggcagaagtgctgtatcatgccgcccggaatgctgatgcggactgcgtggagtttgggctgtatctggacagctatgatgaaaacgaccggctgctgcacacgcagaccagcggcagcaccctctccggcgtgtaccggggcgcgcccttcaaggaacatttcgacgagacggcgtcctcgtatctggtcaccaataagctgttccgccgggcgtttctggagcagcatcggctgcgtttctcctgccatcagctgggggaggacgggctgttctttgtagccttttatcgtcaaaatcccggctgtctggtggtgctggaaaagccgctgtaccactacaccgctgcccggcggggcagtctgtccaacagctaccacccggagcgtctggaggataacttttatctcagcgatgcagtgtgggacaccgttgccgcgtggggcttacaggacagccccatgcaccgcgcaaaggcgagctactgcacgatccgcgacctgatgatgggaatcaagaatcttggatgcagcccgctttccctttccgagcagactgcttggctgcgcagtaccctgcaaaagccccgggtgcgcacggcggtgcgcagcaccccactgcacgccatgcagagccggaacgaccaggtaaagctgttgctgctcaagctgcggctatgccgcgcggtgctgctgctctcgggcgcaaatcagcgtaagaatacctgaagagaaacgcaaaaatccccccgctgccgactggcagcggggggatttgttaccgatttaaatgaaaatcagcgcttagttctgcttcatgcgagcgaagcagtcagagcagtagaccggacggtcctcacggggctggaagggaaccttgcaggccttgccgcaagctgcgcagacagcgtcgaacatctgacgctcaccgctgttgctgcgtgcgccgccgttcttgcgggcgtcacggcagggcttgcagcgctggggctgattctcgaagccgcgagaagcgtagaactcctgctcaccagcagtccaaacaaattccttaccgcagtccttgcagaccagagtcttgtcttcaaacatagtagtatctcctctttagttagttcttgcccacggaaggattgtaaccatacctttggttttgggaccatcgcgctgatcagtaagcttaccaggggcttgaatagataaacgccctcggattgaggactttcctattgtaccgttatttttgagatttgtcaaccaaaaaacaaccgttcgcccttttatttgtacacatagcacaaaccgacagcatatatttgggtaaaatcaccgccggaagatggaaaagcggcgcgccgcacaggttatacgcagcggcagataatttatgatttgcggttcagaaacacctacgggtgtttctgaaccactttttcacacaagcaaaaaggggctgccgcacattctgtgcagcagcccctgcaaagccctttgggaaaagcttacttctcgatgacttccttggtgtcgcgggcgatcatcagctcctcgtcggtagcaatgaccagcgtgcgcacctttgcgccccaagcggtgatctcgcacacatcgccaacagggtgcttgttcttctcggtgtcgatgcggatgcccagccaatccatgtggtggcagatctttgcacgggcaatggcatcgtgctcgccgatgccgccggtaaagacgatggcatccacgccgcccatagctgcaatgtagctgccgatggtctttttgatctggtagttcagcatatcggaagccagctgtgcgcgcttgttgccggccgcggcagcctcttccacgtcacgcttatcgctggaaacaccggagatgcccagcaggccggacttcttgttcaggatctcgtccagctcgtggccggtgatgttcagggtgtacttcaggtagttgaccacagaggggtccagatcgccgcagcgggtgcccatcatcaggccggccagcggggtcatgcccatggaggtatccaccaccttgccctgatcgactgcggcaatggaagaaccgttgcccagatggcaggtgatcagcttcaggcgctcaatgggctcttccagatactcggcagccttgtgagcaacgtacttgtggctggtgccgtggaagccgtagcggcgcacgccgtacttctcgtagtactcgtaggggatggcgtacatataagccttcggcggcatggtgctgtggaaggcggtgtcgaacacagccaccatgggaatgttgccgaacaccttgcgggcggcctcgatacccagaataccagcggggttgtgcaggggagccagcgggctcagctcacgcagggtgttgatgacctcatcggtgatcaggcagctgctcttgaacttctcgccgccatgcacgacgcggtgaccgatggcgtcgatctcgctcacgtcattgatgcacttgcctgcaccggtggtcatcttcttcacgacctcggcaaaagcctcggtgtgggtggggaagattgcgggcgtggtggccttgtggccgttggcctcgtgggtgatcatgctgctttccatgccaatgcgctcgcacaggcctttgcacagcaccttctcgccgtccatatcgatcagctgatacttcagggaagaagaaccgcagttaataaccagaaccttcatctgtgttgcctcctgaaaatttttgtaccgtccgtagcctaaaaacctgcggacagaattttacagattcctatgtttattatataataggcgtgacggcttttcaaggcgcaacccgggcaaagcggtaaaacttgtgtacaaggtttttgtatatcctgcccacaaatcccggaaacgtcaggatttttctgtatatccgatataattttaacaatcttttggcgaaaaggagcagttccatgaagtttgcaggcatcattgcggagtacgaccccttccacaacggccacgcatggcagctggcgcaggcgcgggcgctgggggcgcagcgggtggccgttgccatgagctgcgggcttacccagcggggagcgctgccgctgttgccggaggcggtgcgggtgcaggcggcgcttgcctgcggagcagacctcgtgtttgccctgcccgcgccctgcgcctgcgccggtgccgaggcttttgcccgggcaggggtgcgcattctggctgctgccgggtgcgatgcgctggtctttggggcagagaacccggacaccgccctactgcaaaaagctgcccgggtgctgtgcagcgaagcataccgcaccgcgctgaaacagcagcttgccgccggggcacgcagctttgccgccgcccggcaggcggcggtgcaggcgctgtgcccggggtcagacgttgccgcactgctggacaagcccaacaataatcttgccgtagagtattgtaaagcaatcatagaacagaatgtagaaatgcagcccatcgccctgccccggcagggcgcagaccacgggcaggcgctgaccgaaagcagccatacagcctttgccagcgccagcgccctgcgggcgctctgggcagagggcggcgcggcggcactggcaccttatgtgccggaaaaggcgctgaaactgtataaacaggcagaatatgacggaaagtatacggattttgcggtcatggggcactgcgagctggcactgctgcgggcagcctgcgcagggcaagccccctttgccgcggtgcgcggggtatccgaaggcttggagcaccggctggaaaacgccgtgcgggagaccgcaagcctgcccgctttgctggatgccctgaccaccgtgcgttacccccgggcgcggatgcggcggctggcgatggatgcggcgctgggctacaccgcccagaccccggcgctgccgccctatctgcacctgctgggcgcacgcaaggaggctctgtccctgcccggggagacggcgctgccgctgtcccactcgctggcgcggctggcacgggaaaacgagacctgcgcccaaatggctgctgcccagagcagagccagcgaccttggtgcgctgtgccggacaaaaccggagccgatgggcgggatatatcgtcaaaaaattatctttttgacgaattgacaaaaaataacgccaaaaattttatattgtgccctcttgtatccggcgcagttcgggtgtatgattaaagcaatgcaatgttggatacaacgaacctgtaaaaaacgactgtccccgcaggggaaacacaaggaggaacccatggcacttcatgttctggacgaagccaaccgctgcctcggctgcaaaaagccgatgtgtcaggagggctgccccatccacaccaatatcccggaggtcatccgtctgctcaaggcaaaccagatggacgctgcgggccggatgctgtttgaaaacaaccccctgaccactgtatgcagtctggtgtgcaaccacgaaaagcagtgcgagggtcactgcatccgcaaccggatgcccagccacgacccggtgcacttttccatcatcgaggactatatctccaccacctacgccaacaagatgaccgcaggccctgccccgaaaaacggcatgaaggccgctgtggtgggctccggcccggcaggcctgaccatcgcggtgctgctggcacgctggggctacgatgtgaccatctttgacgcccgggataagatcggcggcgtgatgcgttacggcatccccaactaccgcctgccggacagtgtgctggacgatttccagtatcgtcatctggaactgaagggcatcaaggtgcgccccaacaccaccatcggcaagaccatcaccatcgacgatttgttccgcgacggctataagagcgtgttcatcggcgccggtctgtggaaggccaacgccatgcacatcaagggcgagagccttggcaacgtggctttcggcatcgactatctggcaaactccaaggccttccgtctgggcgatgacgtggccgtcatcggcgtgggcaactccgctatggactgcgcccgcaccgccatccgcaacggtgcccgccacgttacctgctacg

SEQ ID NO: 24 - DNA, 7737 bp, unidentified
  source 1..7737: mol_type = unassigned DNA
  misc_difference 4228: note = a, c, g, or t
  misc_difference 4229: note = a, c, g, or t
  misc_difference 4230: note = a, c, g, or t
  misc_difference 4231: note = a, c, g, or t
  misc_difference 4232: note = a, c, g, or t
  misc_difference 4233: note = a, c, g, or t
  misc_difference 4234: note = a, c, g, or t
  misc_difference 4235: note = a, c, g, or t
  misc_difference 4236: note = a, c, g, or t
  misc_difference 4237: note = a, c, g, or t
atgataaacaaagatatgacgattatggaagcgctcgaacaaaacagagcttccgccactgtttttgcgggatacggcatgggttgcataggctgtcttgccgcgagcggcgaaacaatcgccgaagccgccgcccaccatggcatagacgtggacgagttggtgaacaagctcaacgaaacctgcaaataaggccggtttagttttttaacgcggaaaaagggcgaagcttccgcttcgcccttttgttaaattggttttcaatacgattcgttttttgatttaagcgcactttttttccaagccggcaacaaatttttccagtctgtccaaggccttgactatggtatccatgctcacgcagtagccgatacgcatatatccttccgcggagaagcacacgccgggtatgaccgcaaccttgcattccttgacaaggcgcgtgcaaaattccatgctgctcataccgaatttgcttatattgggcatgatgtaaaaggcgccttcgggcttaaccacgtcaagtccaattgccacgagtctgtcgtagcagtagtcgcgtctttttctgtattcctcgacaaagggtgcggggtcgaatctgagcgcttcgattgccgcatactgtataaaggtgtttgcgcacactgtcgtatactgatgcaccttgaacgcctgctcgatgaattccttgcttgccatcatgtagcccagtctccaccccgtcattgcgtaaggcttggaaaagctttggcaatacacgattttttctctcaaatcctgaaacctgacaaagcccggtctgcgctcgttgtaaaccagctggttgtagcattcgtcgcagatgacgaacatatcgcgttttttgacctgttcgtaaacattgaggagggacttttcgtcaagtattgtgcctgtggggttgttggggcttgtgagaatgattgctttggttttgtcggaaacgacggaggcaagagccttttccgttatctgaaagttgtcgggagcggtgttcaactcgacgtacctgcccttgcacagctcgatgacgggcttgtacatggaaaaggcgggcacgggaactatgacctcgtcgccctcgttgacaacggcaaagagcgcgctcattatggcttccgtgctgcccgtagttatcataatttcgttttcgtcgtaatccactccgttgaattttttctcgaaagcggaaatttccctgcgaagctccgccacgcccatagtgggcgcgtaaaaggttttgttgttttccaacgcgactccgcaggcgtccttaacctgctgaggggtgtggaaatccggctcgccgagagtgagaaacagctcggcgccctccttgtgcgccatatcgttgaaggcgcgcagcgggctgggttcgatacgtgtaacctgttcgttgaatttcatagattgttatctccttttctttgaattatatcatatacgcccgaaagcgcaggtgtaatttgtttgaaaaaaccttttccttttttgcggtttagcgaggcgttgtccttttcgttctgtgcgggaagggcattttgcggacaactcttctttttttgtttttctcggttgccaacgcgcctttgcggtgctataattgctgtcggagaaatttacatgatttacaatatgctcggaaaaaccaatcttgtcatatccgcggtgggcttgggcggaatccccttgcagcgcttagaccgggaaaaagcggtggaaacggtgcgttacgccttggagcgcggagtcaattttatcgacacggcgcgcggatatacggtcagcgaaagctacataggcgcggctcttgcgggcggactgcgcggggacgtggtgcttgccacaaaagcgccgccgacggaccgcgggggtatgctcaaagaaatggagggaagcttgaaagacctcggcacggattacattgatttgtatcaggtgcacaacgtgaaggattgcgcgtcgattgaccgtgtgttcggcgacgacggcgcatataaagcgtttctggaaatgaaagccgcgggcaaaataggccacttcggcgtgacaagccacaagcgcgaggtgctgacttatctgctggaaaactacgccgacaaaacagaaacaataatgtttccctacaatatcgtggaaacgcagggagaggagctgtttgcgctggcaagcagtctcaatgtggctgtcatagtgatgaagccgcttgccggcggagcaatcggggacgccgcgcttgcaatgcgtttcgcgttgtccaatccgcacgtgtcggtcgtcatacccggcatggcaaatcaaaaagaggtggacgaaaacacgtcgcagcccgccgagctttccgacgcggacagggaaaaatgcgcgttgcttgcgggcgagctgggttccgagttctgtcggagatgcagctattgcgcgccctgccccgcagggcttgacatacccaccattttcactttcgaggggtatctcaaacgctacaaccttgccgaatgggcaaaggacagatacatgaatctgaaaaaacgtgccaaagactgtcttggatgcggtgagtgcgaaaagagatgtccttacgagctgaaaatcagggagagacttaaaaacgtcgcacgtgagttcgaggacgccgaaaaggcgttttccgactccgaaaggagttgaaaatatggcgttgttcgagtgcaagctttattcccatgtactgcacgagccgtcgcaggtagccgtttacgcgccggaccgaaaaaacgctgggatgtccgactttaacgtcgtgcttttgctgcacgggatgtgctgcgacggaaaggattttttcatgcgcacgggcgtagccgcttatgccgacgctgcggacgccgtgcttattgcgccatcctgcggcaacaactatttcgccgacgggcagaacggacttaaatacgaaacgtatctgttccgcgagctgattccttttttgcaaaaaaccttttctttaaacacctcccgtgaaaaaaatttcattctcggcacgtctatgggagccttcgccgcggtgcggctggggctgacttatcccgacaggtttaaagccgtttgttctttgtccgcgccgttggacctgaaaaccgcggtggaaacgctgcgcgacaatatcagggactgccgccgccgcgctttttgctcggtctacggctcctgcgagcagttcggcggctcgtcggcggacatactgcatctgattgagcggactcctcccgcaacggctccgtttctttggctgtatgtggggagaaacgaccctcttttgcaaatcaataaacaaactgcggaaaaaatcagagaaaaaggctttgccctttcgcttgaaacggacgacggcgcccacgactgggcaagctgggacaggcaggcgaaaagatttttcgacttgtacgtgggaaaataatattccgtaatataacgagacttaaaaggacgcggaagcgtcctttttttgccgtatgcgtttgatgtcgaatttggacgaaaacgcgccaaatcgcttgacaaaccgccccgaaactctcataatggttgtaacgacaaagttttgccgccgcacaacaggggaaacaaaggaggagacaattgaaggagaatttatttgaagcggcgcgttccgacgagaagctcaggagcgctgcgtttgatacaagctgcgcaatggatgaaattttgtggaggctcaaggatttgagcctgattcacaacgacatttccgagctgataagcgtgggctgcggcttcggcgacgttgcgggcgaccttaaaaacgtctccgacaagacgcgcgacagaatacgcgaggctttcagatacagagagatgaacgacgcattgaaccgcgttttgggatacgagcttgagagggtgtgcgaaagcatagaaaatctgatttatcccgcgcccgacgcgcctgaggaataatattgcgtcccgctttgtcaaagcgggatatttttttgtcggcacgtctaaaacgattgacaaacccgattgaggctgataagataacacgcgaagaaacctatcgagagtgtcggagggacggacccgtcgatgacacagcaaccggacgaaatgtcgtcacaggtgctaaattccgcagggcgaggctctggaagataggacggcgtcaaaagctgtttcgtagatcggaagagcgtcgtgtagggaaagnnnnnnnnnnccccgcgctgtccgcggggttgttttgatttagaggttttaacaatcgcagacgaaggagaaaattaagggaatgacaggaaagagattttttacaagcgagagcgtgacggaggggcaccccgacaaaatgtgcgaccagatttccgacgcgattttggacgcgatactcaaagaggacaaaaacgcgcgcgttgcttgcgaaacgcttgcttacacggggggcgttgtggttgcgggagaaatcagcacccgctgctatgtggacataaagagcattgtccgcaataccgtcagagaaatcggctacacgcgcgccaaatacggatttgacggcaacacttgcagcgttttgacgtctattgacgagcagtctcccgacatcgcgctcggagtggacaaaagtctcgaaagcaaggaaggcttcggcggcgaggcggagcttggcgcgggagaccagggcatgatgttcggctatgcctgcgacgaaacacccgagcttatgcctgcggcgcacgtttacgccaatatgcttacaaagcgccttgccgaggctcgcaaaagcggggaaatagagctgttgcggcctgacggaaaagcgcaggtgactgtcgaatacgacggcgacaaggtcaaacgtatagataccgtcgtggtttcctcccagcacgcggcggaagcggatatggaaacgctgcgggaggaaattctcaaaaaggttattctcgccacgctgccggcggagctggttgaccgaaggacgaggtatttgataaaccctacgggaaaattcgtcataggcggacctatgggcgactcgggactgacgggcaggaaaataatagtcgacacctacggcggctattgcccgcacggcggcggcgcgttttcgggaaaggacccgacaaaggttgacagaagcgcggcttacatggcgcgttatatatgcaaaaacatcgtggctgcgggcgcggcgcgcagagttcagcttcaactgtcttacgccataggggtggcgagacccgtttcggtttgcgtggacaccttcggcacgggagccgttccggacgaaagcatgacggagctggtaaagcgcttgttcgaccttcgtccgcaggcaataatagaaaagctggatttgcaaaaacccgtgtacagacagattgcgagctacgggcatttcggcagggacggcatgacgtgggaaaatacggattcggcgcaaatgattgccgccgccgtcgaggaatataaatcgggcagatgacgttaaagggagcaataggcaacatagtttttttcaacgcggaaaacggctacaccgtttttcagttgatttccgacagcgacggcggggaaacgacctgcgtggggtatcttccgcagctcaacgtcggacagcaaatcgaggtttcgggcaaaatagttactcatcagaagttcggcgagcagttttccgtcgaaaaattttcccttgccgcgccgacaggctcggaggggcttgtcagatatcttgcaagcggactgataaagggtgtgggagaggctacggcgcgtcttatagtaaattcattcggcgacgacactctttccgtgctggaaaattctcccgaaaggcttgccgagctgcgcggaatcagtctgaaaaaagcgcgcgccataggagaggagttcaacgggcacagagccatgcaggagcagattatgtttctgcaaagctacgatattaccctcaacacggcaataaagatatatcgcgtttacaaggacaagacggaaagcgtattgaaaagcaatccttacaggcttatagacgacgtggacggaatcggctttttgtcggcggacagaatcgcaggcagcatgggcataggcaaggacagcgagttccgtctgcgcgcgggcatagtttattgtctcaaagacggggcggaaaagtcgggcaataccgttattgaggagcagactctcaaaaaatcggtgggcgagcttttggggtacgacgtgtccgaaagggcggagctttacgaggaaacggtagacaacctgatattcgaccttatggcgcgccgtttcgaggacggagagaaagcgggactggctcttacgaggtattacaatatagaaaaaaacattgcgggcgcgctggtcaggctggacgaggaggcgcccgccatttccgcgtcgtttaagacgctcatagaggattttcagtcggcgaacggagtcaagctgcactccaatcagcggcgggcggtggaggcggcgtttgaaaacggagtcacggtgataacgggcggaccgggcacgggcaaaaccacaatcgtcaggtgcgtttcgtatatttgcgacgctcttgacataaaggcggagtattgctgccctacgggacgcgcagcaaagaggttgggagcctcgacgggcaaaaacgcaaagaccatacatcgtctgctcggcatggaggcgagggaggacaggctggttttcgcttacgacgcctccaaccctctcgaagccgacctcgttgtggtggacgaagcgtccatggcggacgccgtcattttcaacagtcttttgaaggctttgcggcgcggctgccgtctggttcttgttggcgacaaggaccagcttccctccgtaggcgcgggaaacgtgcttgccgacgtaatcaagagccgtctgttttcagtaaacgagcttacccacatttacagacagtcggaggacagctatatagttaccaacgcgcacctgataaacagcggaaaaatgcccgtcatagaaaaggacagcaaggattttttctttatcgcgagggacaatcaggaggatatcctaaacgaggttacgggacttgtgacgacgcgtctgccgaagtttacttccctttctcccgcggagattcaggtgcttgcgccaatgaaaagcgggcttgcgggcgtcgccaacttaaaccgcacgctgcaagccaagttaaatccctttgagcgttcaaaaagcgaaatcaacgtcggaggcgtggttttccgcacgggagacaaggtcatgcagacggtcaacgactacaatatggagtgggaaatcaacgactcggagggcgtgaggtcgggcaagggcgttttcaacggcgacataggttatattacgcgaatagaccgcacagaaaatcttgctgaaattctgttcgacgacggcaggcgggcggtttacacctcggcggatatgcccgacctgactctcgcctacgcggttaccgtgcacaaaagtcaggggagcgagttcgacgcgctggtcgtggcggtgacaaacggaccgcccacgattttaaaccgcaatctgctttatacggcggtcacgcgcgcaaaaaaaaccgtggttttggtatgcagcaaaaggatgctgggaatgatggtcaaaaacaattatatcgaggagcgcgccaccatgctcaaagcgtttttgaaggaagaaaaacagaagcgctcggcgctttacctgtga

SEQ ID NO: 25 - DNA, 14073 bp, unidentified
  source 1..14073: mol_type = unassigned DNA
atgaaagaagactggaaacccggaacaatgatttatccgctgcctgccgtattggtgagctgcggaagcactccggaggaatataacattctgactatcgcatggacggggacgatttgtacgaacccgcccatgtgctacatctccgtacgccccgaacgccactcctacgacatcatcaagcggaatatggaattcgtcatcaatctcaccacgaaagacatggcccgtgccacggactggtgtggcgtacgctccggaaaggactacaacaaattcgaggaaatgcatctgacaccggggaaaagcaccgtagtcagcgcgcctcttatcaaggaatcaccgctttgcatagaatgccgggtaaaggagattatggctctcggttcgcacgacatgtttatagcggatgtggtaaatgtacgtgccgatacccgtaatctgaaccctgaaaccggcaaactggaactggcggaaacgaatccgctggtctatgtgcacggtggatattatgagctgggagaaaagataggcaaattcggatggtcagtagagaaaaagaagtaataatgcgataaaggttttaagagatggagttgcgacgaatcttgatgggcttatatctgttggccttccccgccatgatgtggggacagactccggttgtgcccggtactgccgacgaagagcattccagacaccgcaaggaaactccggtcaatttcggtttcaaaggcggtttcacctcttccttgttccttgtatcccagttcagcgtcaacggagtgcccattgacgaagtgcagaacaattacaaaataggatatttcggttcccttttcatgcggataaacttcgaccgccacttcctgcaaccggaaatatcctacaacatcaaccggtgcaacatcaccttcgagaaacctctgcccgaagacgccgcatcaggagcccggccggaggaagcctccattacatcgtccatccacagtatagacatccccgtcatctacggatacaacttcatcaaggaggggccgtacagccttgccgtctttggaggacccaaagtgcgctatatatgggacaggaaaagtgacatcgacttcgagaatttcgaccaggtgaatatccgtgaaaggctgcgtccgctcaatctcagtttcaccgtcggcgtatccgtcaccatctcacgcgtctttttcgacttccgttacgacatggggctgcacaacatctccaagagcgtgacatacgatattccggccgacaacaacgctgctgacgaaaacacgaaaaacgaaatccgttttcaccgcagggacaatgtgctgagtttttctttcggagtgttcttttgacagtaaatttcttccttttctttcaatttattcatttatttcccgtaaatttgtgcgcttaataagagaacacagatttatcaaacttatctaataagcagaatgaaaagagatgatttaattttcgaacttatcgaaaaagaacaccaacgtcagctcaaaggcattgaactgattgcatcagagaactttgtaagtgaccaggttatgcaggcaatgggctcctgcctcaccaacaagtatgctgaaggataccccggcaagcgttactatggtggttgtgaggtagtggaccagagtgagcagattgccatcgaccgcttgaaacagatcttcggcgcagaatgggccaacgtacagccgcactccggtgcacaagccaatgcagccgtattcctcgccgtgctcaatccgggcgacaaattcatgggactgaaccttgcacacggcggtcacctctcccatggctcactggtcaacacttccggtattatctatactccctgcgaatacaatctgaaccaggaaaccggacgtgtggactatgaccagatggaagaagttgccctgcgcgagaaacccaaaatgattatcggcggcggttctgcttattcccgcgaatgggactacaagcgcatgcgcgaaatcgcggacaagataggtgccatcctaatgattgacatggctcatcctgccggactgattgcagccggtgaactggataaccccgtgaaatatgcccacatcgtgacctccactacccacaagactctgcgtggtcctcgtggtggcgttatcatgatgggtaaggacttccccaacccctggggcaagaaaactccgaagggagaaatcaagatgatgtcccagttgctggattcagccgtattccccggtatccaaggtggtccgctggaacatgtcatcgcagccaaagccgttgccttcggcgaaatcctgcaaccggaatggaaagaatatgccaagcaggtgaagaaaaacgccgctgtcttggcacaagccttgatagaccgtggcttcaccatcgtttccggcggtacggacaaccactccatgctggtagacctgcgcagcaaatatcccgatttgaccggtaaggttgccgagaaggcgttggtatctgccgacatcaccgtaaacaagaacatggttccgtttgacagccgctcggctttccagacttccggtatccgtctgggtactcctgccatcacaacccgtggtgccaaggaagacctgatgctcgaaattgccgagatgattgaaaccgttctgtccaacgtagacaacgaacaagtcatcgcagaggtacgtgcacgcgtcaatgcgaagatgaaagaatacccgctgtttgcttattaataagcaaacagaattaaaaattaagaattaaaaattaaaggctgcgcagttcaaagcgaacattgcgcagcctttaatttttaattcttaatttttaattctaaacgcgctccgcgcgtttagctcagcccttctatatttccgtccacaatatcaatgtgttcggcttgtggtttcttgggtaatcccggcatacggagaatttcaccggcgatggctacaatcatttccgcaccgttattgaccacaatatccttgatgtggaactcaaagttgttgactgcaccgtatatcttcgggtcggcagagaaggagtactgcgtcttggcaatacagacggggtaatggctgatacccatctgctctatcagtttgataaccttgcgggagtggagactgtaagtcactacgcttgccccgtagaggttgcaggctaccttttctattttacgttccacgcaatcgctctcttcgtaggtgaaggtcagcggttcggatggtttgttctcgatagtatctactaccagattggcaaggtcaacggctccctctcctcctttggcaaaggcgttgttcacggcaaaacctacctcaagcttttcttcgcaatggcggcggatagcttccacctcctcgtccgtatcactggcaaaacggttgaatgccacgatgacctgctggccgaatgaacgcaaattgcgtacatgcttgtccagattgccgaagccctctttcagtccttccatattgggttccttgatgcggtccagactgacaccgccatgcatcttcagtccttgtgcggtagcaacgattatcgtcagcttgggctgtaggccgctcttgcggcacttgatgttgtagaacttctccgcacccaggtcagccccgaaaccggcttccgtcactacataatcgccaaatgtcatggccatttttgtggcaagaatggagttgcaaccatgggcaatatttgcgaacggtcctccatgaacaaaagcagcagagccttcggtagtctgtaccaagttggggttgatagcatctttcaacagtacggtaatggcaccggctactcctaactccttcactgtgaaaggagtaccatcgaaacggaatcccagaataatattttcaatacggcgacggaggtcgtcgaggtctgttgccagacagagaatagccataatttcagaagccggggtaatatcgaagcccgactcctcggtaatgccgttggtgctcggtcccaatccggtgacaatgctccgcaaggaacggtcattcacatcaagtacgcgccgccagatgatttctttcagtccgaagccgtccgcctgatgctggtacaagtaattgtcgagcaaagcggaaatcatgttgtgtgcggaggtaatggcgtgaaagtcgcccgtaaagtgcagatttatcttctccatgggcagcacctgggcatatcctccaccggcagcaccgcctttcatgccgaagcaaggacctaacgagggttcgcgtaaagccacaatcgctttcttgccaatcttgttcagccccaatgccagcccgatggacacggttgttttaccgatacccgctttcgtagccgtgatagccgtcaccagtatcagattgctcttcttcactttctcttcatcaatcagatgcgtaggaatcttggctatgtaacggccatagttctctacttcgtcacgcgggatatccacactttcagccacctgctttatcttcttcagctctatgctgcgggctatttcaatgtccgatttcatacagagtcttttctttaaataacaactttaatgttttgaaagttgcaaaagtacgaaagatgtggcaaagtacaaaagaataccgtattttcacctgaccacctgcatcttctatctatttgaaccgcgacgtatccaccgcctcccgttgcttctccttatatcctccgaatttataggtaaacgatacgccgaattcgcggaagcatgagtaatgattcgtcacattctgcgtcttgaaacggatgcggggagaaatctgtcccgtctcaaaaatatcgttgcagtagaggttgaggatggctttgttcttggcaaagccgtagcgcagggcaatattcacattgcccgacgtaggcaggtcgtagatgccctgaatggctttactatgcacaaatccggtcaccgtcagcttcaagtcgggtttggtggagagagtaaaagtattgttcatctgggcaatgccatagcattgctttctgtcgaaaggaatatcccagaaatcaccatccttttcgcgatgccacaagccgatgagggtaaggcgagaattcaaccaatccttcaccttaaatgggatagaggcttgtattcctgcttgttgctgataatcaaaattgagtgtcttgtagatttcaaccagacgttcggaagattggtaaagcgtctgtacggagtagtctttggtgtggttgaaccaggcgctgaagatgtatttgcttttcaaaatataggtcattttcagctcatactcttgtgccggtttcagcaacggattaccatgcagctcagagtatccgccgccgatgtaagagacggcatcctgcacggcccagtagtcgggatagtccttgtcgctgctcaaggagagctggaggatatgtcccggtgccggcatatagttcaagttgacaatgggataccagtcccactggtcccagacgggagtcttgtaatgctccacagccagagaagcgtccaaagcaagtttgtcgccgaaactcttgctgaaacctgcatagatattccaagtttgctcgcggcggcgggacttcatattgctcaaggcatctgatgaggtcaactgttcaccggtatcgggatcgtaataatattggtagctattgtcaatactggtagtgtagacggctccataattcaagtcccagcctttccccaagttatgctcctgggccagaaagaacttccagcggttgatgcgctgacagtcttccgtgtagaaatcgagttcctcatcctgcatacggctatgcagtagttggttggacggagagcggtagtaggtcagttcggcaccggctttgaggccgaaaggggtacgatagtccagacggccgttgtgcagccagtcggtgctattgctatgagttgtggacacctgcgtgcccgtcacgcccttccagttgtgggaggtggaatagccaccgttatagacgaaactcagctgatggttcttggcgatactatagtccgcccctaccctgaaattatgggtatggctgcggccacggcccacctcatctgttgtcatggggtgaaccgagccgtccgccagggtgtgcacagcctctttgtcggtagtagagtagccccggccatggctgtgcgagtaaagaaaatctgctgagaatttatttttgctgaagagcaggctggcgcgttcctcaaagccttcgttgtgcttctggcgatacttgacgtagagttcgccttgccaggagccggggccgcctgccgattgtttcaaggtgatattgataagtgcgccacgcacctggtagcgtgcaggggcgttgtacatcacttccgccttctctatgcggctggcagggatgctgcgcagcaaggcatagagctgccctgtgctgagggtggttactttaccgtccaggataacggtgactccctggcctgccaactgcagcccgccattcatctcgatgacgccgggaagctctttcacggcatcgtaggcattgtctacggggaggttccggataaggcggggcaggtcgtacaccagcttgccttgcgctgcctttacgatggggcgttcaccggtaatcatcacttccggcaaggtctgataaaggctgtccagacgggcatcggtcgtgataaggctgtcggcgctgaggatacggttgtcgtccgcaccggaggtggttgcagtgccgttgttctcttgtgccgaaaggctgatgctcaatgcacagcatacaagagggagtaaatagaatcgtttcatgttcttctttttatttatgttcatattcttcttctgtaaatcttcgtctgcaaagtacggcagaatcagcagaaacttgtgttatcagcggcttaccaagtgttatccagtgttatcgggagtgttatttagtcttatcggatgatagggttcacaatattagtcttacctttgtatgtataaaagtaaccggaaacaaacatgaaactgccattcaaatatattgccatacttgtcatcgtctccctggccggcatcttcgcctaccaagcctactggctgacggggctctaccataccatgcacagtgaaatggagagggacatcaccgaagccatgcgcatgagcgactataacgaaatgatgatacgcgtggataaaatgaagcaggacgacataaaccacggtgaagtcagcgtatcagccggatacagcgatgacggaaaatcatttgtccgtagcagtaccaccatctcccgtgaagattctttggacaacaccaccctgcacgaaaccttcatgcccaaaggagacagtgtttacgtgacccacccgaacgattcaacccgcgtggaagtcagtgtcagggactcggacagctctccccaatccgcattgagtgccaaagggggactggatgtgattttgcgcgaccaaaacagtatgctggaactcgccacctacttccagcgcggactgcattcgggactggacatcatttccgaccccgacgtagtgctttatgacagcctgctgacttcattcctgcacgaccgtaacatcaatcttccccataggctgctacatcttcacaaaggcagtaaatgggactctaccattctctatatagatacattggtaaacatcggtactcccggctatgtgcctacctcaaaagctgtggaatataattattctttcgacatcaatacaagtcaaagctaccgtctcatcatggaaccggtcggcatgctggttctgcggcagatgtcgggcattctcaccacgtcattcatcatcttgattgtactcgctttctccttctggttcctgatacgcaccatcctgaaacagaagacactggaagagatgaagagcgatttcaccaacaacatcacccacgaactgaagacccccatcgccgtagcctacgccgccaacgacgctctgctcaacttcaaccaagcggaggaaaaggcccaacgcgacaaatacctgcgtatctgccaggaacagcttcagcgcctcagtggactggttgaacagatactttccatgagtatggaacgccgcaggactttccgcctgcacccggaggagtttgcaatacgtgatattctggaaacgctcatcgaacaacacaagctgaaagcggaaagctccgtccacatatcggtggacatcgaaccggaagatttgagcgtacttgccgaccgcacgcatttcagcaacatcatcagcaacctgatagacaacgccatcaaatattcgcacggagaggccgaagtggccatccattgccgcaaggtaaccgtcgaagggcagaatgaacagaccgaaatctccgtcagcgaccacggtatcggtattgctcccgagaagcagaagcacatcttcgacaaattctaccgcgtacccacgggtaatctgcacgatgtgaaaggctatgggctgggattgttctatgtgaagaccatgatagagaagcatggtggcagcgtatcggtaaagagtgagttgggaaaaggaagtacctttacgataaggatatgataacattatttgttagggtactttacattacttgttaaggagctttacattacttgtaacaaaagcgacaattatggaaaagataaccgtacttctggttgaggacgaacagaccctcgccatgattatcaaggacacattggaagggcagaacttcatcatccacaccgcagcagacggtgaagagggattgcgcaagttcttcgacctccgtcccgacgtgctggtggcagacgtgatgatgccccgcatggacggctttgaaatggtgcgccgcatccggcagaccgacaaacagaccccggtactgttccttaccgcccgctccaccatcaacgatgtggtggaagggtttgagctgggtgccaacgactacctgaaaaagcctttcggaatgcaggaactcattatccgcataaaggccctggtaggcaaagctttctcctttacagaagaaaatcccaaggaaactaccgtttttgaaatcggtgactaccgtttcaattccgtcactcaacgacttgcttttgcaggcagcaccccgacttcacctgacgcggatacggaagtggaactctcccaccgcgagtccgagatactgaaacgtctttgcgagaaccgtaaccaggtggtcaacacccagaacgtattgctcgacctctggggagacgacagcttcttcaactcccgcagcctgcatgtgttcatcaccaaactgcggcataaactggccggagacgagcgcatccgtatcgtcaatgtgcggggaataggatataaactaatagtaaactaaactaaaactaaactactatttatgagaaagttattattcattacttttatctgttcctcactctgcgcctatgcacagagcgagattccggaagacacaataaagaaccggcctcccgtaaagaaagagcagattcccttttctccaaaagagaacaagcgtacaggccttgatgaaagccagccccaacaaagtctgcagggcgaacagcaggaagagataaatctccatctccctccctccgactatgtggagcccctgccctggacggacatgaagaagatacactttcagaaaaacatctttgaatgggacttccagcgtttcgccgatttcctgctctcgccggaagtcgtactgacgatgtacggcagccataacacctatcctgcaatgggctccatcatgcaggctggcgcaggagttacttattacagtcccgacggacattgggaattgagcggaggggtatatgccgcccattattccatctcccaaccttcatccattaccggtgcccagtatgccaaaagggatgccccccgaggtactcaatgggacataggctacaatgcctccgtatcctaccgcatcaatccctacatgcgcctgcatgccttcggccagtattcgggctacgggagaagcaactcctttcatggatatatgaacccgatgtatccgcaaagcggttatggcatggtactggaactgaaagtgacggactggctcgacctcaacggaggcctgggacggagctacgaccccaccaaaatgaaatgggtgacttcgcccgtcttcgcccctaccattcgtataaagaaatagaaataatacaaagatatttccggaaatagagggaaacgagtatctttgttcagtccgcccctatgcggcagacagcaactgaaattgtgaacaaagaactatgaaacgaatcttcttctgcatcatcattttacttgcaggcatgtcatccgtcagcgcacagagcgagatgcctgccgatacggtacgtactgcagtacgtggcgaagcgtctcccgaaggcatgtctccgtctgaaaaggagcttctgccggacgtgaagaattacgacggcttcctgctggatatggggctgatgaatctgtctgcccccactcttcccaaattcactttggagataccggatgccagcaaggactacagccgcatcttccggttaaacccgaacgtgacttattcacaaggcctttcgaacatattctcactcagcaactcccggtatttcagttcgaatcccttcggactgacgggcttctggggctctactgacaacctgcaaatgggaagtttcactttgaagaacggcatgcgcatccatacgtacggcgaatatgacaaggacggctggaaagtgcccaacccttccgcactgccttgggaaaagaacaatttcaaaggggcgttcgagctgaaatcagccaacggagcctttggcatacgcatcgaggtacagcagggcagacacgtgccctattgatgcccatcacttaacaacagaatcaatgacaagaaagaaaatactggtgataggcgccaacggttttaccggcagacgcatcctggatgatttgtcccgcaacttgtcttaccagacaacgggctgttccctgcacgacgacatctgtccccattcgggcgactatcgctttatccgtacggatatatgcaaccgccaggcggtggaaaagcttttccaggaagtacagccggatgttgtaatcaatacctccgccctctccgtccccgattactgcgaaacgcaccatgcagaagcggatgccgtcaacattactgccgtggagcatctggcagaatgctgtgaggcgggaggcagccgttttatccatctttccaccgacttcgttttcggtggtgatacggaccgaccctatacggaggagaatattcccgctcccgttaattattacggctacaccaaactggaaggtgagaaacgtatcgccgccgtttgcagggattatgccatcgtgcgtgtagtggtagtgtacggtgccgccctgcccggacagcatggcaatgtgctccaactggtggcaaacagattaaggaacaatgaggaagtgttcgtcgtatccgaccaatggcgtacgcccaccttcgtgggagacgtgtcgcaaggagtggagaagctgataagtcatccgcaaaacggtatctatcatctctgtggcagcgagtgcctgaccattgcagacatcgcttatcgggtagcggacgtattggggctgaatcgctcgctcatccgtcccgtcactacgaaggagatgaatgaaaagacgccacgtccccgtttcagcgggctgagtatagaaaaggcaagccgggaactggggtatcagccgcacacgctggaagaaggaataaagcagatgttcggatggtaaataatgcaggtgcggatggcagcagattcgactacagcaactccggctctgccagtcctttctctttgcgatacacacgtaccatctccagaatcacatctccatatttctccacccctttttttccgaaatacggaatgcgtacaagcatggccttatccgaaggaagcagattgctgatgcctagaattgccttctgctgaatgacggtgtatacgggcagccctaatgcggaagcttctgcattgcgccatgctaccaagcggttgtaaagttccggatgcagcacatccgtgggtacttcaacagccgcagcatcgcgtttccgctcacgcggacgtttctctttatcagcctgcttactgcttccctgcccttctttggcagaagcacttctccctttgcctttacccttctgcgaagccgaatcatcaatggaaagcagtgctttctgcttcaagtatcctgccatatggaaaccattctccagcacataatccagcaaatcagtcttcatgtcaaacacttcctccagctcctccatggcatcccggagcttcttcttcaactctttattatcagaagttaccgtactcgccatcaccgcatccagcggttgcaactgctcttgaaaataagtggcggcagagtgtatgcgcccctgcaaagtcgggtcggctgcatagtcctgcgcagtatcaatcaggcgggtatactggatactgaacttctgggctactttcgtcactttgtcgtgaaaacgttccatttcctccttgcaggctgcgagttgcttgggaaagagcttgtacaagtgttcgtctatcagccgcacataccgccgcaaagcctgctccatgggctggaaatcgaacaagcccgacagcagttccaggaaataggtctgctgcaaggaacggaagcgtttctcgtccggctcgtttctccgtgcctccatcgtgaaggtatctactgcatggtcactgataacggcctttgcagaaagcggggcactgagcaccactccctccaatgtcttgcagcgactcaaagccacatacgcctgcccatgcgcaaaggaggcgctggcatcaatcacggcacgttcaaacgtcagtccctggcttttgtggatggtaattgcccaagccagtttcaacggatactgccggaatgttccttcaatatcttctgtaatctccttggtttcctcatcgagcacgtatttggcattcgtccactcttcctcctgaagtaagaaggtagcgtcgcttcccttactgcgcacttcaattccatctgccgacacggctgtcacctctccaatcatgccattgtagtaacggtgctcaccggaggtgtcgttcttcacaaacattacctgggcaccgcgtttcagttccagcacctcatccgtaggataggaatattcgggaaactttccgtcaatcttggcgcgaaaggcatacgagcgtcccggaagttgttccagctcatggtcattaatccgttgggcctgataattgtgggtcaccaggcggatgtatccttcttctttatctggtacgaaattgggaatataccggcggttcaaggcttccagcacttgcccgtcacaacggttttcgcgaatgcggttcagtaattcaagaaaagtcccatcgttctgccgatagactttctttagttctatggtgcaatattccgtctgcttcaaggcctggctggagaagaaataaggcgtgtcatagtatttgcgcagcatctgccactcatcgtctttcactacgggagacagctgctgtaagtcgccaatcatcagcagttgcacgccgccaaagggtttgttccggtcgcggaaccgcctcaagacggcatccaccgaatcgagcaagtcggcacggaccatactgatttcatcgatgaccaataaatctatgctgcgtataatgttgattttctctttcccgtaacgaaaacggtaggttgccttgccatctgcgctgaatgagctttcgggcacataaggagcaaaaggtacttggaaaaaggagtggatggtgacaccgcctgcattgatagcggcaattcccgtcggtgcaagtacaatcatccgtttcggactctctgccctcagttttcgcaggaaagttgtcttaccggtacctgccttgccggtcaaaaaaagatgagtgcctgtgttttcaatgaattgccatgcaagcgctatttcgggattattctccat

SEQ ID NO: 26 - DNA, 92248 bp, unidentified
  source 1..92248: mol_type = unassigned DNA
ctagcatgaaagctccgcaagtatccggattgttttggcaagaagcattggatcagttccgttcggaatgcgaagccccgtgcttcctatcaccagctccattacggaggcatcagtgcttttatcaatggcatttgaagccgaaagcgaattcatttcgatttttacaacttcctgatcagcaggtacataagctgataccggatttttatcaggaatatctacgctgttacttttacggagacgacttacccagttataaaaggtgcccggatttatgtcattgttcagacaccactggtgatcagacaatccacttttacggcattccatgatcaggcggtattgttcctcggctggtactcttggtgatctcatagtttttacctcatgataattagagtaaaatgccagcaaacagaagtatagtaaaacactagcatttcctaatgcttattatgagagcttctcgaatttagggcaatccgttgaattattttgcgcttacgactgttctgccatttctgtacctccattatgcttaaaacaacaaaaacagcaccataagcataccacctatggcactgtttcaagttcgaccctgtatattttcaatcaatccactgtctgccatatcctttacctccacaggattcatggtcttactaattattctaattttatcatattgaatccacatgtcaaccaaaaactgcgctgtctctactgtctttctactgtctttctactgtttttcttctttacctataattctattctcccgaactttccttctttgattttgttcacaaataatttttacactttgcctgtatttagtatttatgccattttcacaaagtaacggataaaaaatcattcaaatcagataaaccactatcgtaaatagaaaatcaaaatcctttatcatacctatgccaccataatatacaactaatgaattcatttcatatactccaaaaacacccaatcccaatagtgcaagtacatacaaaaccttcttttgtttataattacccatatccttaatacattgaacaatacctgctatgccagctggcatttccaccgcaagtaatatccacatcatatattcaatattaaaatcctttttcaaaacataaaaatgattatatgtaacatatatgaggctcaatattaatgttcctctaagtaccacccaataaatattccctttaaagtcacgtttttctttttccattttttctattatttcccatatatgtgcatcctgcattattcctactgtaacttcattattttcaaccggcatcatattcttgccatagggattaatccgcagtttcaattttgttaaaattgctgataatgttctataagatctgcaattttccaattcctcggcaatagttctgatttctcttctccattcatttctttccttcgaaaaatattgtgtaaaattaatttttgtattactcaaagcattaattactgcggctataactgttgcaataaaaactgagcccaaaatatcattcactttcacctactatcccctgttatatttcactttatcatgcacactaatctcttttccgatttgcacttctattatactaagatttgtttttgcaataattgtatgtctgcatccaacttttagcataataacgtctcctgtccttacctccctttcgacatcatctacaattgctgtaccattgcccgaaattacagtccacacttcatcacgatgctcatgactgtgataattcatctgatgtcctgcatttaaagttactttgatggtcatattgccatcttcaatatccagcacacggaaatttccccaggatttttccgcaaacataatttgctgattaatatcgtctacaaaaggcttaatatagcttgactgatttttatcagaaacaagaattccttccggactggcagatacaacaacatcttttaagcccatacaaagtactggaacatttaattcattaatcacatgcgtattctcgcaggtttcattgaaaattgcttttcctactgcatttccgtccattgcctcagtcaaagtattccatgtacctaaatctttccactttcctgcaaatcgcattacctgtattttttcttcatgctctacaaccgcataatcaaaactgattttctgtaaggtatcatacttttcaaataaatcattataatccttaaaatcaatcaactcatgtgcacgttctaaaacatgtcccaaacggaatgcaaatacgccaccattccaaagcgcacctttttcaatatattcttctgcaatctgttcagtcggcttttctttaaacattgcaacatcactaatctcatctgttgtttttggaataatatatccatatttttcacttggataagtaggctcaattcccattaaaacaagattagcatccgacttttctgcctgtaaaccaagttttttgattgcgacgaaataatcttcctccacgtatggatctaccgggcagaccaccacagactcattctcgctgattcctttcacatcatgcagatacgcaaccgcaagtgcaatagccggaaatgtatcacgtctgcaaggttccacactaactccgatattctcaccaagctggttatggatcgcagaaacctgtgattttgaggttgcaatggtaacagttgcatccttatcaatatttaaaatctgacggtatacacgttgaaccatcgactcataattaccatcagctcctctaaaaatcttaataaactgtttcgaccgtatatcgtttgacaatggccataaacgttttccggatccaccagataataatactatattcatatttccttcctatctagcgttctgcgcgcatcggattattcaaaaagtcctcatatgcaagacggataccatcctcaagctctgtcttgtatgtccagccaagttttgcagctttgctcacatccagaagctttctaggagtaccgtttggtcttgtagtatcccacttaatctcgccttcataaccaatgacctttgcgacaagctctgtcagttccttaatggtaagctcttttccggttcctgcattgacggtctcgtcaccggaataatgattcattaagaatacacataagttggcaagatcatccacatacaaaaactcacgcaatggactgccatctccccaacaggttacctctttcaatccgtttacttttgcttcatggaaacgacggatcagtgcaggtaatacatgagaatgttctggatgataattgtcatttggtccataaagattggttggcataacagagatataatctgttccatactgcttatttaaaaactcacagtatttcaagccggaaatttttgcaagtgcatatgcttcatttgtcttctctaacgcactggtcaaaagacagctctccggcataggctgtggagccatacggggataaatgcaggatgagcctaagaactccagctttttacatccatttttccatgctgaatggatcacattcatctcaaggatcatattgtcatacataaaatcagcaagcgcattctggtttgcaacaataccgccaaccttagctgctgccaaaaatacatactccggcttttcctctgcaaaaaatgcttctactgcatcctgtctgcataaatccagttctttatgtgtacgtgtgataatattggtatatccctgacgctctaactcacggacaattgcagaacctaccattcctctgtgtcctgctacatatatttttgcatctttttccatcatgatgccattcctcctaacgtaatgctttttcacgttttgcaagttctctgtcatgctctgccataatgcggacgagttccggataacttgtcttctgtggattccatccaagaaccgttttagccttggtcggatctccccaaaggttatctacatctgtagggcggaaccactgtggattgacacatactaacattttacctgtctgtgcgtcgtaacccttttcatctacgcctgttccctcccaacggatcgtaataccgtttgctgcgaatgccttttctgtgaaatcacggactgtgtgctgttctccggttgcaataacgaaatcttccggtgtttcatgctgtaagatcatccacatacattccacataatcttttgcatatccccagtcacgcagactgtccatattaccaagttccaggtgatcctggattccttctgcaatacgtcctgctgccagtgtgatcttacgtgtcacgaaattctcaccacgtctctctgattcatgattgaataaaattccgttcactgcaaacattccataagcttcacggtactcttttacgatccagaaaccatactgttttgcaactgcatatggagaatatggatggaacggagttgtctccctctgaggaatttcctcaactttgccaaacaactcagaggtagaagcctgatatacttttgttttcttagccagacctaaaatgcggactgcttccaagatacgaagtacaccgatcgcatcgacatcaccggaatactccggcacatcaaaagatacctgtacatgcgactgtgctgcaagattatagatctcatccggctgtaccagcccgataatccggatcaaagaagaagaatcagacaaatccccatcatgtaatgtaattgcgttctttgcaatcagatggtcaatacgagccgtattggagatagatgcacgacgtgtaataccgtgaacctcatatcccttctctaataaaaactctgcaagataagaaccatcctgtcctgtaatacctgtgatcaatgctactttactcattcagtaatctccttttcatacttgtatatcaatctttaatttttatttttatagcgtattaaattataacataaacattttattttttttactttttatttatatattccctggcatccaataaaaaactaatcgtaatcataacaataacaattccgattggaaatgctgcaataatgctcactgattgcagattactcatcgaactttctgcaaaaagcaacgctatcggaagtaatattaacaagatacaccacatcaactgtattattttatcaggttcctttccattctctaaactatgataactatagcatgacgctgttaatgcaattgaatcaaacgatgtagcataaaatgcaaccatagttattaaaactgctaccatcacaattggtgcacaaggcatagtacttatcattgaaacaattaattgatataaatcgccagtttcattatatattgctataaaatctgtcacacccgacatctgtaatcccatggaatagtttcccagaataataaagcttgtcaaagtcgagcctactccaaatccatacccacctaaaatcacttgacgaactgttcttcctcttgaaatatttccaataaaaaatggggctgccacacaccaaaccatccaatatgcccaataatatattgtccaattttgtggaaattctgtcgttctcagagggtctgtataagttgataattcaaaaaaattttggatcatttttcctaatgaagatattccagtctcaattatataccttgtctctccgccaaaaagtaatacaaaaaacagtaacccaaaaaatagatatatacatacctttgctaaaatgcttattcctttaaatccatgtaatagtgaataagtataaacaaaacatgttacaagtaaaataactatattaattaatgtcctgctaacatgtatatgaaatagtgttcctataatttctgccattaatggtgttgcaacactaaatgttgttgccgtacctgccagtaatgcaaaaacagccaagagatcaataattcttcccggcaatttatctgtatattttccaagaattggacgacaagcttcactatacttctgttttgttctgtttcgcacatgaagcataaatccgaatgcaactgcaagtacaagataaaatccccaaggaataaaactccaatgaaaaaggggaaatacacctgcccaatcttgcattgtccccaattcagtaatatgtggatctgttgcgtacaaaatccattccgaaaacgaataaaataaaatatctgccgccaatccacatgtgaacatcatagctccccatgtaaaaaaattatacttaggtttttcatcctgctcccccagcactatatctccatactttgatattgccataaaaatagatatcaaaaaaatacctaatcctataaccaaataatagcttcccaatgtatcccctaagaaataacgtattttccctaaaataatatttgattgctcaggcaacaagaaaaaaagaatgcatagtatcacaatacttataagcggaactattgtaatcatccaatcaatttttttatctgctgaaccaccatcctgtattttcctattcattctacatttcctccaaatatttttcgtaactattatctacagcaattaattctgccatattatctatttcaataatatctgttctattcatcggccaaatacctaattcatattcctcaaaatgacaaaacatcggtatatcatcccaatatatttgccggttcattttactttcaaattctatttccaaatgcttttttaatttttttccatcttctgctgtccaccttgatatactataaagctgccatccacgttttcctccgtttctactgcacgcccttacaattccattttcaacagtttgtaaccactctttcgtttcttcctcaatccacacactattgtatccagacttttcaaattccggacataagatgttactattataaattatctgatctccatccaaaataattacatcttctaaatagttccttgcaacataaagcgaagcaatattattgcagacattgtagtatggattttctatcaacttaagtcccggatattgtatctcaaggcttttgaattgttcctttagatatccaactacaacatatatttcatatatttcattttcatgtaatgcctctattaccgtgtcaattatccgtacaccattaactactactaatggttttggagtctttaatgtcacaggtttcattcgatttcccaatcctgctgccataataatagctctttttatcctatacattttttattgtctcctcttttcattgtccaaatcttccagctccatttgtgcaattctgtaatattcctttgcatatcggtattgttttaacgaatattctccaaactcaaccccaaatttacttttatattcgcaccaattactccataacaatccacaaactgcaatataacaatatatctttattcttacttctttacagcatccctcaacaaaatatgcatcaattagttgatccattttctctttattatataaagaataaatcccgaacatagcaatatcaacatgtggatcctgcattccagcatattcccaatcaataagcctgatttgttcttttccatctattttaacaaacaaaaaattgtcagaaacggcatcaatatgtgtaagtaccttttcttcaacatgctgatctatataagcctttagcgaaagaacattttcttttgtctgtttataatcgctatatacagaaggatttccttcccataggtcttcataaaactctaatttagaaaacatatcaaattcatgctcaacctttattttcatttcatgaaattctcttaaatatttcatacataattttacatcttttatatctaccggattgcacactcttactccttccaaaaattctgttatcttgtaaccattttgaggattaatgtacacaatattatcgcatatatttttattgtctatcgccttatatacgcatgcttcctgctttcgatcaatcaattcgtccgttccctcacccggaatgcgcataatatattttttttctttacagctaaatgaaaatgaacgatttgtcattccttttttcaaaaccgttatatctttaatgtctttaggtgcaactttcaatgcattgcaaataacatcgatggcttcaaccttcaattgatcagaattttcatctatttctcttaattgttcatatgtattgatttccactacccgatcattctgaaccactctcgcagcaacaatcatttttttctttatatatagtgccttctcccaaaactcattatcattacccttatcttcacaaagaagttccagcgtctgacaaacaattttggctgtatcctctgttaaataagcaattcctaccattgaatttcccgcaacttcttttggtatcattattaattccagatttctatttacttttacactactactgtcatccattcgattcgtgaccatataccatgaatacaattcatatttattaaaaggattaaaatcacaccatatatcacatggaataatatatgaattagctaaatgctgttgtactaattttaatgaaaacatattattttttttagcatattcaggatttacaactaattccactccatatttatcaattaaatattcatatttttctttcataaatcccacaactatatatatctcttgtattccacgttcatgaagttgttttataatacgctcaattaacgtttcacctcccacctcaatcaaccctttgggaacttccatattaattggaaccatcctcattccaaatccagcagcaagaataatggcattttttgttttatgcctttcaaaatactctttagcttttaaagtcggatgcatctcctcatttataaatccctctttcaacaattgtgatatagagcgatttacgattccaagagaatgtcctgtcatctcagataaaactctctggttcacatatggttccataaacaatttgttcaaaatatccttttcctggttgttcatgtacattgttcctttcgtttttatgaacatcgtgcgtaataaatacccggatatacaaaaccgggtacgtatactatattacttcttttattcctttttgtaaaccttaaaaaaatgatgacctacacgatccttttctggtggcaattgcatataatccccatattcatgacgtaacacctcgtcataatacttgggaactctaaattcatatttatcaaatggcattaatatcgtttcatcaaaccacttccgtggaaaaatatccttttctccccatgataaccaaatgacacaacctacatattcgctactatcatattcttttactcttgcaagtttatccaatttattttgaaaatactctttgccacgcaattttgcataaataaatacaggaaactttacaattttccttataatagaagttgttgtttccattgcaaaatgatcacgtgttgcctgataacaaaaagacgataaacgatcaccttttagaccatatttcacagcttcttctttcgtattaccaagaccatcatacggatatatatcaatgaatactcccataccaaaaggcttttcgttttccatttttataatatatctctcatcactaattcgtgtaatcatatatggatactctgaacattcttctctattgaatacacgaagattgggatactcctgaatatgtagtttaaggtatcccaataaacggtcataatccggtcgtggcatcataatatctacatcatcatcccacgggatatacccatgatgacgaacagcaccaattaatgttccatatattaatgcatatctaaaatgttgttcctcacaaatattggcaattgtatgtaaaatttcaagtgatatttcctgtatttccctaattgataattccatttgcttcgtttgttgcatttctgttttcctcaatataattcaatttcaaacatgatttttgttaataattatatcataatatgtgccttgtatttccatatcctctttttgaaatttataacttagtttatgaaaaggggtctgttcctttacactaatccaaatatcttcattatactgctcaaataatcttaataagataatatgtggtgcagcattatcaaacggtataatttcactccattcctgtgaataaaattctaaaactatagatagaaaattgtgtaataaaaaataatctatcaactcattatttttttcccaatatttataacataaatattttgttgcgcacaatattttattattagattttgcatttatgaaccaactggaaatgtatgtgctttgaccatctcttccaggttttagctgttgaaacaaaaacaaatctgattcaaaaaaatatgaaggtatttcttcttcttttcttgtacataatacagtcgcatcaatccatgttcctccatactttgtcaaaagttctaatctaagtaaatctgtcatgtgcgtatgtgttattttcccacatttccatttttctaatatatattcaggaaattgtacataatcatccatatttttttctgtaataactattattttcttttgagtcaaatttgtttttaatgcctcgtaacatctttgaactagctctggagcgttatccaatccctgaaaccagcaaaaccatatcttatcacttaatttatgttcatcttcaacataatctttatcaaactttattaaatcattcttatattctttttttaatttttgttttatctttagctgggcagataaacgtaatatctctaatgctgttctgctttttcccaaaaggattacttgtcctatcgctgtaaaaaatgctcctcccttccaataactatgtattaaatttattccaccttgttttttcaaaatttcttttaatttcactttacaaccacctcaaagtcagtccatattcaggatacttttttagatttaaatgtccaaaatttattaattacataattcaatggaacggaaataataaggttaattataggagctattatcttcgagattccaaacatggcaatccagacatatgaaagaatgttgcataatataattccagtaattccatatgcaagatacattttaataattttacaaaatatatttcttttcgattcctttatattttcatttttatcctgattaaaaacatatttattattccaataaaacgaccataaaacactcaataaaaatgagacaatattccctgcaataaaatcccatttcagttgaaaaggattcaaaatatatattgttaatatatttattgcataactcagaatcgtgttacttgcccctactatacaaaatttaataaattcatttagtacttctaacttactagcattcatttctttctttaataattttatataaattattgatatcaatgcatttaatttttctaaattccacttgatttttttctcttttttcaaattagtactataacctttcatcgtaaactaatgtaaaatcatatgtttaataaagtatatcaatggcactatatataaaatcatataaaatgctattattcctaaatataccatgcattgtgtatttaaataagctattttagaataatgcttatacaaaattaattctatcaataccacaaattgtgccagtaagaaaaaatatattccctcttttacccctttgggataaaattttagtttaatatccatattggaatctattataggtataagtaaaagcccatttaaattttgtgtctttactttttctccgtttatataacatgtccatccatcatcatataatactggcaaaaatatatattccttattattttttattttaacatttgatacttttatgtttactccgttatttttaaaattcagttcataatctatctcattattggatatttgcgttattcgtttttctaacaatgatgtatccattgttgccaaatggatcccagactcaacatttatatcttcaaattgtaattctatattacattcttctccctttttataataccccaaatcaactattccattattaaagggagctggatacattacgttttcatcatccgtaagattggatattaaaacactttcaccatcaatagaaatagaaaattgttccgttcctgtcccgaaaagatataattcactatcattattaaaatggatttccattttatgttgactaattaaagaatcaacgtctatctcttcaaataatatatctcgattttttccagtaaaagcctgaaacaactcattctgataactaaatacatccttattttctatttttttaatattatttatatcttcctcatttaaactccaaattagcggacattgatatttcattgtataccagttaaaattttcaattgttttttccttaatccatgcattcgaatctatatcctttgatgcaaacgcatttctataacctaaaataatatctgaaaaaattgtcccgccattatccaaaaagcgagtataattaactgagtatcctaatgttttaaatgtttcctgctgatttttttctactaaatgaatccagtttgcaatggaattaacattcataaccgcagcataattgctcgcaaaacacccatcccaatcttttgtttttatccatcgattctcactttgtgaaatttcttctcctattgctattgaatcataaatatatttcatatctgcacaatcctgacgattctgccaatctggtgcaaaccaaaccaaacagtttaccaaaatttcaattccaaatgttagaacgaaacacattctcctaacgcatcctcttgcaaagtaaaaaataagactatatattcctactaaaatacacacacaatataatattaccttatcaataacagaaaattcatttccttgtttataaactatgataaatagtaccaaaccaataactgttataattgttaccgctacttgaatccactttttttctatgatatgtcttttttctgtttgattttgctgcaatacaacagcaaaatcaattaacacaaactgaaaaataaaaccaaatctccatgaccaacctgaatgtgatcccatatgccataataattctatcgaaggaataaatgcagccaatactaataataaaaaaatacagcctttacataccactttcgtattacttttatttgaatttttcactaaattgcaaattattaaggcaataaatagagaaagattaataaaaataagccatccctgatctggtaagctaaatgtattaattgctgtcaaatatgtattattttcatttacagttaatctggatgaattgataaaattatacaaaaccggtatccatataattgcactgaatgccaaactctctaaagaccctataaacaaataaaatattttctgcttcttatcctctttttcctttatcacatatacaccagttacaattattaagtaaaagcaaatcataacgctcatgtaaaaattcacaataaagcataaagccaaacaaatcggatataaatgtttttttcttcctgccagtccctcttcatatgaccacattaatattggaaataaaattgctatgtctaacgtcattacaattggctgctgtacaagaacgctcataccggttgcatatgccatagctcctgcaatttttaaccattttgtaactttataattaaaaagataaaaatacattgctccagacattaatgccatttttacaatgactaaaattccgattgctccatatatatcttctcttttaaacaaaagcaaaagcaaattaacaggacttaacattccttgttgagaaataattcccaatgtttcaagaccacaaccaaatctccatgtaaaaaaaagagagtcatttccttttaatgcatcatataaataataatataatggtgtcgtattggtcatatctgcccatattactgtgttattaccaaatggccaaatatcttttatcatgaatatagcgattccaataaaaaaagcaaaaaatactatacaattacattcaaaaaaaactctctttttcatattaatcttccaattaatccgcaaacctttgtctatattaattgccaaatgtaaataacagaaggcattattaacactaacacattaataacatttctaacactatataatagattttctgtttgcttttgacaataaaattcaactttgctttggggtctattgatatataacaaaacacatgcagcaacaatacatatagaatttaacactaataaaatatcctgactaaaattaattaaatataatttttcacctaatgaataaaacctattatcatttgcaactgtatcatagcgttttatcatttcctccaacaggcctgcttttgaatctccaaatggatatcccacaatccaccactgcctaatattcattgacaaatacattgaaatagaaaataacatttcaaatattatatttattgcaaacctttttctatttgaaaaaactaaacctgttaaaaatggtactaataatacaatccaataactattatattgaaagaatgtgaaaaaaataaaccatgcaactgcacatacataaaaacttttataaaaaaattctctagacttatcaggaattaaaaaataacagtatatacataaaaatgcatatgctactatgcataatgaaatatctcccactccaaatacactgcttcttcctgaacgtaatacttcagcaatcgcattagaatatactaatgaatctactccagatgcttttaatgcaacatcattattaaaaatacatttttcaataagagaaactgaacatcccaaaaatacatctctcccaattttccatatattcttttcatataataatattagtggtatatatacccaaaatgcaaaatacttcatacttatagccactgcaaataatacaataaaaagtatttttttatcgattaacagattataaattccatatagtataaatgtcagtgataaaatatcataatttcctgtatacaatgaatatgttgttaaaagcaaagatacactaaaaaagaatgtaggactgtatttttcatccatacttattgttgtatcaccaatcatattatatatacgttttaatattttaatacaaaatatatatgcaattaatactattacttttccgtaaattataaccaacgaataattttgtgcatttatattaaatatcctttcaattatccatattggtaaattccacagtgcaaatataaaatataaagaaaaatcataagctgcagcacaagatgtatgttctaaacaataattataataatctttaattctgccatcaatgagcgcattccaaacctctattccatgtcgctgcgttgccaacgcatcctgatatgcatatgatataaatgcaaacaagaaacacattcctataattatttttacactttttttcattacgatttttctcctagttttattcatataccgctatatataagtaatagtaagaatcagcaaacgatgaatttttaatcaactgcatcttcattccaatattttcttcatacaccaataagtcttcttgtccaagttcttcattcaaaaacaaaagcactatatccgtatcatcttttgaaaaattatattttgtttctttatcaatccatccatattcctcactaggaaaatattgttttaatacagtccaaatatagtgagtattatctgtaagaataaacactttgttattcttaatatatccatttacaatttctatcgtttctacagtttctttatttttttcataagtatcttttatctgtaatacaaattttgatccatacgatattaaaatcaaacaacttaataataatattgcaattttctttatactcttttgtggaataccgccaattaacattgctactgaaagccaaactgcaacaccaactggataaatataccttgtgacaaaaactggtgaaaacacatgtccatatactatttcaaaaattaatataatgattgctgcaccacaaatactaaaagacatccaaattgcatcatcatcaagtgtatgtttttttccaaagataatccttatttttcctttttctttcctcacagaaatacttatatatgcaagaaatgaaatcaacaatagtatataaaaccataaaacaattgatgagtcgaaaatatattcaaacccttctttaattgatacagtactacttatccagaaatcgcctgtaatctgagtcacagcggacacaaatactgttatccatggtaaatatcctattatagatacaactatagcaactatacatttccatatattttttttgttatatattactaatcttaaaaatacaaagaaatataatataataatgcccgcaaaagcaaaataatgtgaatatgcagctccaataccgcctacacaaaatacaacccaattttttaattttgttcctctagttacaagaatcctatatccctcataaaaacaaatgaccacaaaaaaggctgcccatgcatacattcgcacttctacagaatatatccgtcctgtagaagtcattgtcagaaataatataaatatgctagctggtgcatttccaaagttcttccttacacatgtaacactgaacaaaagtaacaatattgttggaagtgcagaaacaaaatgatatacccaatatttttttcctaatattaatgtaaataatttaaaaatcaaaaagaaaaatggaggattagctatatcacatgttgctacatctataaatgattttgcaccattgaccattaaaattgtataactttcatccccccaaaaattattgtcagcacattgaaataatgttatgcatgcactaacaattgctaatccgtacggaaatataaataaccccagtttctttattgctttatttatcattctctcattcatgtataaactcttctatctgttcttccatacattttattatattaccatggtttagataacaatcagaccactctactatttttttcattgtagtctgtacgttccaccttggtttccagccaaacatcatttttacttttgaacaatctaactttaagaaattggcctcatgtggtccaccatcatattgatttatccacttaatttcatatccggtttgttttttccactcactgcaaaacaaatcaactaaatcccccgttgtccaacaatctgcctcatccggaccaatattataatttcctgcatattttttatcctcatactgggcttttgcaatcataagatatgccactactggttccaatacatgctgatatggtcttgttgaaaatggattacgtacaataatatcctttttactttctactgctcttacacaatcaggaatgattcggtctgccgcgaaatctccaccacctattacatttcctgctctacaagttgtgattgctacatctccgtcctgaaaaaaagactttatataactactggttacaagttcagaacaggactttgaattggaatatggatcatatccatttaattcctcattttcacgatatccccactcccattctttgttcaagtacactttatccgtggtaacattcacaaaagattttacagaattggtttttcttacacactcaagaatatttactgtacccataacatttgtttcatatgtatacactggattttgataagattctcttactaacggttgtgcagccatatggatcactatttgtggttttacttcatcaaagactttctgcaaatgcgctaaatcacgaatatctccctcaaccgaatttatctgtgctcctaattgacacatttcaaacaagttcggagtcgtaggtgcttccaaagcataccctgttacatccgcacctgccatgaccaacagtttacacatccaagttcccttgaatcctgtatgacctgtaatcaatacttttttccctttatagaaagtcatatcaaacatcctatttatcctcctcatacctttcaaaatttagtctttcttcctctataaccaacggtctcttcataatacgtttattaatacttaatacatattcacctaacaaccctataaagaaaatctgtacagaacccaaaatacatactgccaaaagaattggtatcgtacctgcaacaaatcgattccagaaaactaatttcagaatcagataaattaatgctacaaccagactaattgcagataatccaaagccaattatagttgcaattcttaaaccaattttggtatacgacgtaaaacttaacattgctgcatcatatagagttgcccaattattatgtgtttttccggcagctcttttctgttgctcataaggtatctcttttcttttaaagccaagttcagctactatgccacgcaaaaatggggtaggatcatctaattcttttaaaatatttataaattctctgtcatataatccaaaacctgtaaaatgttctatctgttctacatctgacatcttttttattgctttgtaataacaacttctcaggaaacgcataattttattttctttgctagttgttttgataccactgactattttatatcctttttcccattcaccaacaaactgtgatatcatttctacaggatcttgaaaatctgcgcatattaatatagtacaatctccagaagactgacataatccataatatggagaattaaattgtccaaaattttttgcattaaaaattgcttttatttttggatttttttcacacaactgccttaataatttttgtgttgaatctgtcgagcaattatcaataaataatatttcataatcataattagataagctacactctatttcactcactattgcttcacttaatggaattacattttcttcttcattataagttggtactacaatacttattttcttcatctgtttttcctcgtataatattcgaaatgccttttgtaaaatctgtttttgcactccagtctaattcgttttttaattttgatatatctggaatgaaactgaccttccccgtatcaggataagggattttcccatagtcaagtttagaatcagaatctaaaatgcactttatattttctatataatattttaatacatgtgtttcaccagatgctatattatatacaccactcttacatcttgtctgtgcaaactttacgaaagcttctgctgcatcatctatatataagtaatcccaattttgtgtgcattctgttagtgcaacctcttcattcttcatcatcttatcaatgcaagtcattatcaaggagcctgcataatcacctggaccataaatgctaaacactctcccccagatgcattcaatattgtatttccgggcatactcaagtatttcatagcaagatctatacttatattttccgtactcagttacaggattacatggataatcttctgttatccctccatccatatatccatactctgcctgtgaaccacacccaataaacttctttatatttaactttctacatgtttcaattgcttttttagctgcttcataatttttcacttgcatctgctgatcatctctaagcggagctctgactccctcccatgcaagatgaaaaaacacatctacatcttcatcaatatatgtagagacattttctatatccaacatatcaagttctatcactgaaacatttttgctaattggaatcctttttctattagccgagtttggtcttataattgcccatatatgattttcagagttttgcattaaacatctaataatcgatgcaccgataaaacttgttgcccctgtaataataattttcatctataactccattaattcctgaaacagctttctatcaattaacggttcctgatcttgatttggttttccaaattcgagtttcggaaatacatatgtttctccgtgcaatttaatttcaacaataacaggaccttttattgccataaactgatctgtaacatcctcaattttctcataacttaaatacggcatgccatagccatatgcaattccctgaaaatcaggtgaatcatatccttttccctgaactgtttgagcataattattatcaaaatacatttcttgaaaatgacgaatcatccctaatgcataattgttaaaaataataattttaattggtaaatgctctctgcgaataaattccaattcctgtatattcatctgaacaccaccatccccattgaaacatattacctcttttttcgtggcataatatgcaccaattgcagctggaagagaataccccattgcaccatgtccaccagaatataaaatttgttgtccatcttttgttttataagactgtgcaacccacacctgattttgtcccacatccgtggttatacatacattctcaggtacatattgactaattttctttacaaaataatttggaattttatcatccatgccgatcaatttttgctcaatttttttacacacatgattccattctgcatatttcttttcactttctggatacgccattaataaataatctattactttaccaacatccgcttgtatattaatttcatcttctcttataaaatattgtaattcattttcgtcaatatccacacgtattattgttgcatccggagcaaaattacttctttttccaccaacctgtctaacatccattctgcttccaagtactagtatcagatcacttttggctacaacaaaattcgctgttcgatttccataagcacctataaatccataattaaactcattttcagttggcagtaagtccatcgccaccatacttgtaactactggaattcccatatgttcgacaaattctaccactttttctcgcggcaccatttttaacgctgcccccaataaaatacatgggcgttttgcctctaatagacactgtaggatattttcatccttaaactctacattttgacctgaaacatagtcatagtgcaccagtttatctctgtcaatttctgttctttgtatattcattggaatatcaagcaaaactggtcccttgcgtccatcaagagcaatctgatatgctttttccaaataataagctattttatttgcttcttctacatacaccgcatattttgtaacatctttgaccatatttacaatattggtttcctgaaatcctcgctgtctcacacgatatccttctttggattcaaatgtgtttacctgtcctgtgataaaaattacaggtatagaatcaaaataagcattacaaattccggtaatcatattagtggctcccggaccacttgttgcatatgcagcccccacttttcctgaagcttgtgcatatgcacaagcttcaaaagctgctgcctgctcatgataacacacatgagcacttatcttattttcatattttgaaaaagaatccatcaaatgagttaccatgccgcccggatacccaaatacatgttcaacttctttttctattaaaaactctactatataatctgatactttcatatatattcatccaaaattattctttactgctgaactgcttctttaatggtctttgccatataatcaatcatctcatctgtcattcctggataaactcctacccagaatgtatcattcataattctatccgtattctttaagtctccaacaacacgatatccttttccagatgctcgcatttgatcaaaacacggatgttttgtcaaatttcctgcaaacagcattcttgtctgcactccgtgagcttcaatatatggaactactttattacggttcacgccttctttacatgtaatcaaaaagccaaaccaactcggctttgcattttcacaaggtaccggtaaaatcagtttatcttcacagcctgcaagtccttccaaaagacgatcaaaattatgtcttctcttttctacaaaagatgggaattttttaatctgagcacagcctacagctgcctgcatatctgttgccttcaaattatatccaaaatgggaatatacatatttatgatcatatcctaatggaagttctccatattgtttgtcaaatcggtgcccacaaagattatcctggccagatgcacatacacaatctcgtccccaatctcggaatgaccgaatacatttattcaataatggattatttgtatatacagctcctccttctcccattgtcatatgatgtggcggataaaaagatgatgttccaatgtcaccaattgtacctgtaaacttgtcctcaccatcaattatatatttggatcccaatgcatcgcagttgtcctcaatcaaccataaattatgcttatcacagaattcttttacagcctttaaatcaaaaggatttcctaatgtatgcgctgccattacaaccttcgtcttatcagataatgcagcctccaactgtgtcacatccatattatattgtggaattgtaacatcaataaataccggaaccactccatactgaatcgcaggtgttaccgtcgtaggaaagcctgctgctactgtaatcatttcatcgcctggttttacctgtctgtctcctaataatggtgacgtcaatgccataaatgcattcaaatttgctgaagaaccagagtttactaatgaacaatattttactcccaaatattttgcaaaagctttttcaaattcatctgtatatcttccggatgtaagccaaaactctaatgcagaatctactaaattacacatttcctcatgatcatacacacgtgaagcataggtaattctatctcctggttcaaactcttttttcttattatgatatgtatcacaatactctgctaccatatctaatatttctttttttgcctgttcttctgttttattctcaaacatcttctttctccttttttctatttccatgatttccaaggtgccttacctgaatcccataattcattcagcttgtccatttcccttttagtatccatacattgccaatatccatcaaaaataaatgctttaagttctcccatttttgctactgtttccaatggttctttctcgaatacggtactatcaccctcaatgtaatcaaaaatttctggttctaacaccatatatcctgcattaattcgagagccatcatccatactcttttcgcggaaagattcaatagaatcatcacttgtaatatcaagcactccgaaacgctgtcctacattggccgctgttaaagtagctattttcccatggcttttatgaaattcaagtaacttctttatgtcaatatcgcagacaccatctccgtaggtcaacataaatgtttcgtttcctacatacttttgaatacgttttacacgtccacccgtcattgtatttagtcctgtatctacaagtgttaccttccatggttctgcaacattattatgtaccgtcatttcattgttattactaaaatcaaacgtaacatcgctattatacaaataataatctgcaaaccattctttaataatatgctgcttgtatccacagcaaattatgaattcattaaatccataattagaatattccttcataatatgccataagattggttttcctccaatctctaacattggcttcggttttaaataactttcttcgctgattcgagttccaaatcctcctgctaaaataacaaccttcattttatgttctcccttttattttatttatatcttaacattaataaattcccgcttcaatgcatttaaaattttcaaatccatcgctcataatatatgccgcttcagatccagaattttcagaacacataaaagatgtacattttgataataaatatatttctgtaatatatcccaattcatttttgtacccttcttcataacttttcacatgtatctgacttccctctgaaagttcttcataactttttctgttcctttcaacacaaattgccttatccttaaattccttttttaataattcttccacatcttttgtctgacatgtaaaaaaaatatattcacaattccaaagttttctatatttctttgtataactcagaatttgatctatctccaattgtcttggatgtccagcaagtctttccggttctgtctcattcagttttatatacccttcacgaacagaaattcccaaaacacgttttccatatattaatttttttccctgctcttctaaaaatttagtcgtttcattattgaatcgtatataacgccttgctattgttctccaataactcaccacatccatatcctcgcaatgcattaatgaaacaggttcaaatttagacggaatatgattaatacaaatttctccaccactatcataagctctttcgattgtatattctaatggttgttcaaaaaaaacttcccaggtgttaacctgctgatctgctggaaaaaagatattttttatgctctttcgatctacaataggtatatatcctctttgtcttgcatattctatttccttcaaaaaaactatataatctgaaaaaaagccaacattctcatttcttcttaatagtatcataaattttaaactatttgttttttctgaattacgaaccaactctattgtaccatctttttccaaatttcttatatagtctctatattccctttttaaaagaaatttcaaatattgtttaatatttcccattctttactgctctccttataatatcgctacacaccttgcaaaacaacttttctcttaatatgcctaaaattagcaaatatataattgccccgataaaaatatgtaaaaatactccttctatagaggcataatgtatctgtctaactttaaacattatgacatacatgaccacacttgaaaaataatatttccatgattcggaaatcatttcttttacagctattatatttttactcatatatataattacaataaagcagactatacttgctaatacagatgcaattgcagctccaatggatttttcaattcttattgccacaacattaaaaataatattaactagggcagataaaataattgccaaattataatctttttgccgctctcttgcaattaaacactgttgtcctaacaaattgcacaaggcagtaactaatacattaaatgacaaaatacataaaacaaatgcactcttttcatacccatcaccaaagaacaccggaacaaactctcctgcaattgcaataatcccaaacactgcaggagctgaaatcatctgcactgccgccagagaattatatataagtttgtccgccttttcccttgtattatcattatgatataaatatgatgcacgaggtaatataacatttccaattgtactcactgcgctcatacaaatttgtgatattttgcttgcttgctcatatattccaacttcataagcccctgcccaaattcctagcatagttttatccgaagaagaaaaaatagtgtttattaatcctggaacaaaatatattcctgcgggtttaatatgttgaaatatgtcaacattctttggtattttaatatctacttgttttaatacatttggataaacagacagatttgccaccaaatttgccccctgcataattaatgcatatatcaaaaaatttttttcatcctttacaaaaataaaaattccagcaagatttattatacggacacaaatgcttctaattgcaattactttaaactcctccatcccatttagaaaccatgtcacatctattccagatgcaataatattcaaaatcataattatgcataacattttctggcttccagacttattcatcactattacaactaaatatataataatgctgattatcatcagtaatattttcaaagccataatttcaaaaagagttttacttactttttctttatcatcccgaaaagaagctatcttaatttgtccatataacgcaaatcctaagcattctattaaaacaaaatatgagctatttgcaaatgcataactatattgtcctattaattcagcattaaaaactcttgcaatataaggtgccgtaataagtggcacaattaatgccactacctgactgaccatgttatacccaatattttttataagactattactgcttttctttttaccactcattttttatttatccattattatttttgtcatattttttatatatgcatctacagaaaatttttctttaaattcttcactattcaaaaatttttcaatgttatttaaatattcattatattcttcttcttttatattttttacataaagcaacatatcttctatactagaaaattttctccaatctataaatgtattttccggaatatagtcagatatattcgctgctccccaatatatcgggatacaatttgcaaaaaaacaatcaaaaattttttctgtaatatatccctttactttttgttgattttcaaaacatattgaatatttatattttgataaagtgtccaatttattatcaacaatccccctataatttttataattttctttttcccaaccaaatccatataaatcaaactgctcatttcttgtttcgaaatattctacaacattttttctttttgaatataattcatttggatgactactaactttatttccactaatcattacaaactcttttttattctgaaatttttcataaggccttttttgtggaattggctgtggataataaaatttaaaatattttttattatctactaaatcatcgtcccatgttagtatttttccaaaatatttatgataacatttcatatatgatttttgcgcaacagcaggtggttccataatcaacaatattcgatctctctctgataatagtcgacttgatttaaacaaataatctttttgtaatatacactttaccccaaactttatttttttgtctaacgtttctaccgtatatattgattctggaatttcctgaaaaattattttatcaatttcactccacctgtacatatctaatgtatgaaattgatgtccatttttctccaatgatttttttaattttataataggtacaagtagattttccccaatcttacatgtacttgcatcaaataacttatccttttcatataacttaccataaatatctgtaatcgctattttcatttttctagaaattagcctttccattttatttttttaaaattctgtatgctattttagagagaataaaatatttttcatcaaatataatcattttatatttgatatggtcccatgtagaatatctcattactttctcatatttttcttgtgcaatcaaagaattttcgcaatttgtagttccaacttgaatcatacatatttcattatgcattaaccatttataataacttttttgaccagcaatatttttttttaataattccgaatagaatccatctttgtttagagccttaaaaagttgtacaatcatatctacacgatgctgtgaactatcttgcttctgatgctttctatatgccataagattttgttcatatatcgcaatcacgccacctttttgagcaatatcaaaacacatatatatatctgctgaaggtccaacatttgaccttaaatatattgaattttttttcataaattctgttctataaattatagatgggaataaaacaaaacatctttcactcaaatatgcattaaatagttgttctcctttgtatttttgaatgcctccattccatttataactagatatttttttatcatttttatctatgcaatcacttttgcagcttatagctgaaatagcatgatcattttctaatatctctacttctttttcaactaatgtttcatacataatatcatcatcgtgaaaaatcataaagtactttgctgttgcatgctttattgcataattaatattttcaagtcctccaatattcttttcatgacgtatatattttatcctcgaatcaaaaaaactatttattacctgtgttgtatggtcagttgaacaattatctaatataattaaattaaattctttatatgtctgtttcaaaatactggcaatactttcccttaaataattttccctattatatgtcaccaaaaaaatatcaataactgccttatccattcctttttccttctataacattactatcatattgacactgtaatccgtaacaatatataaaacctatcaaacaatactgttgttgcatcaataaatatgtatccatgactgataataacaaaaagcactgtaatgttacaatcaaaattaatcctttcgatttaattatttttttataatttttacatgccccaaataaaaaaaacaaataccatccaagtccaatgattcctgtccttaacattaattccaaaacaatattatgagtatgttccgttccatacaatacgtagttcactatttgatcatctgataaaactccccatcccaaaaaaggtttttcttttatcaactttattgccatgtcccaaataattgttcgagagtttaacgtaacaccctttattcctttgtcaaagaccatgctcaaaaaacttgccagataagttggtgcattaaatacaattacagcaaccaaaaaaattattattaaaataatagtctttttgatatcaaaaaaagctaatatttttctacatattgatttaaatacaaatgcacaaaaaaacagcataaatattactgatgcagtagcactcttgacccaaacataacaaaacagcaatccaataattaatgcataatcctttactaatattaaatatttatttgcagacatcatttttatttcatctatataaatgacaattcctaacatcggcaatactgcaaaagccgaataattatccctgccaaataaataagtatactcatttaccgcaccaatatcaaatattccgtatcctatttgagccaaaacaacgctgacaatatgcaaaaacaattctattgagaacaatatgttaactgcatctaaaaaaatttttttatcatgccccatcaacgcaaaataaacaaaacacaacaaaaaaatattagtaatggcattatttaagacatctgaaaaacttgttttatatataatggtatttattatatatataccttcaaaaagaactaatgaacatattcctttaaaataattatttaatttaagttttaatttagaattatttattatatacaaaaaagaaaaaaataatgtacaaatttttccgcattgaaacactttatttaataaaggataagttgctataccaaccggtttaaaatacggtatcaaaatcaatataaatataattttatataaatatacattttttgatctatcagtttctcttttttttgatatagccacattcatattactagaatcaactaatatattactttgcatttattctcctttgtatattttttctaattttatgaccatattttttatatcataatttttttccacatatttttctgcatcataagctttttttgcatacacatcataattttcaattacatttcgtaacttatttgctaaatcttttgcatttcctgtttcgaataaagttcctctctcctctcctcctattatttcacgcggtccatttaagtcacacgcaacacacggtatattcattttcattgcctcaattaacgatataccaaatccctcaattcttgatgggagaacaaatatatctatactttcaagaaatttaggaatattatctacattgcccataaaaacaatttgtgaatttgattcactttctattttctccgctctttttttcaattcgttatattcatgttggtgttctttgtctgctgcacctgcgaataaacacctaatagtgtaatctttttttaattcatctatagcagaaacaagaatatcttgccccttttgccgacaatcaatccttgcaacattccctattgttatcgcatgtgttctctccaccacttctttatatttcttacgttcgaacttttccaaatcaattgcattataaacaactgaaatctttttaggaataatcccctcattaattatatcttcttttacactttccgatatagcaattattgaatcacacacataatttctataaaaaattctatatttacttatattagcaaactgtcccaaaccatgtattgtatatattatccttatttttctttgaaatatcttcgtaactattaacaattctggtatattaaacgaattacaatgaatgacatctattttgtgttttttacaaaatgtatttatttcaaatatttctctatatttcttttttgatccaacaggtctgtttttgcatataattcttacatccggcaaaagattttcaaataacttagtgtcatacaaatcatttataatatacagatatacctcattattttgttttaccatttcattacatatatcaactatgaggcgctccgtgccacctactgtaaatgaaaataatatatacatcactctcatactttaatgtctccagcctattcgcctaatgattttttcaaaaattaaattttcttttatgcatcaactcaaacttcttcaaaaattttttcataacaattacagatgtatttccaattataatgttctataattcgcttttttgctacattttccagattctccctctgtattaattccattttatctactttatcaattaaagctgcaaggtttccttctttcaattgccaatataacgctccatcttcagcaacttcacgattaaaccctacatcataaagcaaatttaacttcgtacttccaagtgcctctagtaagcttggatttgttcccccaacagaatgtccgtggaaatagccatatgctctctccctgattttcttaagcaattcttgatcatacaccgttcccacaaatttaatacgtttgtcctttgagaagtggagtttttcatccagagtattcaaaaacttttcatcccttgtcgtaataatcgcaaaatcttttgcagaatggctcttcatgaattcacggatcattgtctcgaaattattctctggaacaaatcgtccaacgctaatataaaattctccatcgtgtaatccatgttcttttagccaaccaatgtattttggatcattatctgccatagatgatggagttgtctctgagccatatgcgataaaagttgtctccggtttataatctgcatactctttctgaatatacttttcaatatttttgctgtcacaaatacttaaatccgcgtatttcaccatcatccgctcggattctttccagtattttctaacaggaacactccattttgcccgcatccattcatgtccatctggattcaaatacacttttcctccaagtgcatgaattttcttgacaaaatgcttcataaagggtccaatacgacatgccataatgtagacaatcggctttttcaagtgttctttttttataagcttgcaagcctcactaagagctgtcacatcatagtagatagcttgtgctgcgccgatttgtggcacatgaagtaaaaacccacgtgcattacaataagtaaattctgtctcatttactgctttcgctcccggaagtttactgacattcatgcatccacttccatttgctttgcaatatacaaaataatgcaagtttttttcatctttatggtattctaataatttatttataaaagattcatacccaccatattgaccaatgctttttgcaccaaccaatataatattcacttctttttcactcatcacatacttccttttcccgtcaacacaacctgcacggtcttagcaagaatccgcaaatctttccctatactccagtccttaatgtaagctgtatccaactttaccacatcctcaaaatccgtgatattactccgcccagacacctgccacattcctgtaattccaggcttcgcagacaatctcgccttgtgatgtaacttatacttctcatattcatccactgtcggtggtcttgttcctaccaatgacatatctcctaacagcacattgaagaactgtggaaattcatccaggctgagttttcggatcagattaccgattcccggaacatactttccatctgcatcaaaatagcttccaatgattcgcggatcatcttccatcttgaacatcataccatctgccacacggttctgctccataagtgctttcttccgttcctctgcatccagatacatcgtacggaacttgtacatcttgaacattttgccattctttccgacacgtttctgtgtgaagaaaattggtcccggcgacttgatatagatcagtggtcccaaaataattgtaagaattactgtgatgagtgatcctgtgatgcctcctgcgatatccatcacacgcttggtcagatactgccggttactgaccagctgcatccctgatgtcagtaccagatatccacatactttctctgcgatctgatgattgtccgcatcagcgaaatcctgcatgatagaataatgtgtcacaattcccatctccgagaatgcttccatatattctttaccaaaatgctgctcctgcggtaatacgatcaacgcctcatctacccagtttctgcatacccattctgtcatctctgactctggaataagagggattccctcataagtgtctgatactccttttcctctgccaatcagcacgattcctgctggaaaataggtttgaaaattattgctgcgcacattttccaacacctgctcaagatactctgacgtggtaaccaataataaagaattttctccttctttcgactgccggcgcatcacatgcttcttccataagatcctcaccagatatccacctatcaattcatagattcccaacaaaaacaatactgttcgagagaaatcatctccagacttcactgcaaacagatagaatgcaagcagcatttccagaagacatacttcttttaccgcagataccagctcaatataataaccgcgttttaggatatcccgatatccatctataaaaaaaagatatacaaattcaaatactgccaataaaagcacaacattctgataaacggaatcactatataatctgctaagctctctatgtcttccaaaatatgccagtgccagacaaatctgcatacacattaaatcaaggacagcaaaatccagatgtttcagccatcctttatttctcttacgatacataacaatcccctttatgataagttcttttatcgacaaataaccttatcaattttaccacaaatataaatcgattacaacgctagttgccttttttgtatatttgtaatagttttctcttccagccaatatgatatttgccagatatttacctatatgctacaataatttctgtcgggcttcaacagctcccatctaatcttaaattataattaataaacgaggatcatactatgaaaaaatattttaaatgtctgactaagatgcagcttatttcctttttgcttttattcctgactgcatttctgttcaattactggacaccatatgcagctgatgattactcttatatgtataacctcggcaatggcgaacggatcacttctgtattccaaatctttccatcccttgccgtccattatatgcaatatggcaatggacgtattgtatcacacttttttgtaatgctgtttcttacggcaccaaaaatcatttttgatgtgctgaatgcctttctttttgttttctttatcgcttttgttttacgtattactgcaagtaagaaatcattcagtgtccttctgttttttgcagtgcctaccctgttttggttatatatgcctgcatacggtcaggtgtttctctggctgaccggctgcattaattatatgtggagttatctgtttgctctgttgtttctgaatatttatatctcgttactgcgtggaaagtccctattggataagaagtggaagctgattttattctgcctgttcacatttctttttggtaattattctgagaatgtatccttttcagttatattcacaggatttcttcttatgtgcgtcacgatgtatcaacataagactatccggaaatatctgtcatatgtgttcccaatcacctgtggagcagcgggctatctggttttattactcagcccctccggcagtgcgaagttttccgataaccttaccttatccgttcttgcaaaaaatggaattgatcttttcaccacttattataatatgtgcaaatatcctttgatcctgtttttcattttactctgcattgctgtttatcacaaaatggataaaaatgagattctgattgcgattgcctacctttttatcagcttcgttgcagcggcaatgctgatcattgcaagctatttacctgaaagaagtattgcaaacagtgttgttttccttcttatcggtattgttcagctgcttcagattctccggcgcaacagtcatctggaatgtctcacattgtgcgtatgcgtatatcttctcatcagcagtgtaatggcttactgggatggttcctacgatatttaccgtgtgcacagagaacagactgccagaaatgaacgcatcgagaattctattgtttctggcgaactgacgatcggggttcccatcatcacttctacaacaaagtatagctgtaaatatggactattagatctcaatcctcagaattctaacgaaccatttccaaatgtatatgtagcaaaatactatggattgaataaaatttatgtcacttatccagatacttctgataaataaatgcagtaaacaaatccaccgaaacaatctgttcattaactcggattgtttcggtgtatttgtttagatttttttctgtaacaaccagtcataatactctctgagaccatctctgattggtattaatgcattcttatgaacgctcatgatccgtccattattcagtataatcttttttgcatcgacacttctggctgaaagatactccacttgtggttttaaccccatttcctgtaacatttctataatgtctctctgtgacgttccaacattggagctgagattgaatgtatcaaattccccattataagtaaacagaaccattaacattctacacacatcatcgatataaatataatctctgatattatttccatctccccagatttcaattttttcttccttaatcgttttcttcaaagcagcatcaataaaacctactcccttattgaaatcctgtcccgggccataaggatttgatattctcgcaatcagaatctttgtatgtgcctgataattaaatgtccgaatggtattctcgatacacaatttcacatttccataatgattgattggtcgtggaagtgcatcctcgctgattggctgtatttcctgatttccataaacagttccacctgaagataaaaatatcatacgaattttcttatcaacgatcattttacaaagctttgtagtctggatgaaatctctctcatatccctgcagatacttttcattagaatttcccggattcactgtactaagtgcatgtacgacataatcaatcccctccaatgcctccatcagggaatagtcatcaaaaaaatctccacatatatagcgaacaccttctacctttttcgcaggtactgacatatcaaaacagaaaacttccatattactctttatcaaatgtttcgataaatttgttccaataaatcctgctccaccgataatcaatactctctttcccaaagtatactcctttttcttacctgtctttttcttctgcttcgctctggttctttttataatccaacaatttcttctcgatatagattggtctgtgcttctcctgtatatacattcttgcaagatattctccaataattccaaggatcgtaagttgtattcctccaagcaataatatcagaacaacaattgtcgggtatcccggaaccggattcccgatgcataatttttgtatcacaacaacaaataaatagatgattgcacataatgaagtaaataatcccagtcctgtcgcgattttcaatggaaatgtcgtatatgagataaaaccttctactgcatatctgaataatttattgatggaccatttggtttctcctgcattacgcttttccgcagtatatggaatatagcaggtattgaatccaacccaggaaaaaatccccttagaaaacctgtgatactccggcaaactcaaaacagcatctacaaccggtcttcgaaatgtcctgaaatcggatgcgccgggaaagaattctatctcgcttgtcctgttaatgattttataaaacatatctttcaacttactgacaagctttccttcctgacgcttctcctgatatgctgcaacacagtcaaattcttcattatcctgaagaatcttcaccattctggcaactgtttccggtctttgttgcagatctgcatcaatcaccgttataaaatctcctgttgctttttgaaatccggcataaattgcggcttcttttccaaaatttctggagaaagtttccacgacaacacatgcttcgtgaagattaaatacgctctctaacgcttcctgtgtcttatccttacttccatcgttgatgaaaatcatttcatattcatattcttctgcatcaaaaacatgctttgctgcatgatagaaatcccggatattatcctcttcattatagcatggtaccaccaaagataatttcatcttattcattcactttccgttattttccatacactctgattgccgcattataacatcgcttcgcaaaagcatgtttcggatcattcttattcggtacaatcttgcgaactgcgattctcaacatttttttatatggattctctgcctgtgcctgcattgggagcttttctctgactttcatgtgtgttgcccccatctctttcatgatcatctgccaatctgtaacatgaacctcaaatatttccggtcttgccttatatgccataagaacaagctgctggtcatcatccatacaatccaacataagaagtgcattcatcgcgtcttctaccaaatgccagaatgtcggcaccagttctcttgataacccatacatacatcccatcacacagtcatcctgaaactgcagactctgcagacctattactgaatcaggatcatgcagacaggaaatgtgtatcttattcttaaaatcatatttccacaggaaattatagtcctccgcatcactgtaagtaattccaccatggtcgaatccaaagtccatccatacaacattttcagataataatcctctttcataggcatcattcatgaaataatacttcatcatccacagatagtcatatttgggattattggaagatgcttccggaagatatctgaagttcaggaaatctttattgtgagatattttttccagctttggcaaaagacctggtacaagttcaaacaaattatcaatctgtataataatagttttctctcccaatccgtattctgcccttattcctttgatgatttccgcgctgtcagaatccgtatatactaccaacgtattttggattcttgcccatcttttaaattcatcaaaataccgctgtgctgttcttcgtaaatccttattcttatcctgccctcttcctatgtcaaaaaagtctgttacaagtgttatttctcccattcttcttcctctaattcttttctggttactcgaaacgcgttaatgcataacataatttatttttactggaatttcctaacataatcacaagatcacgtatgaaatatcttcgaatatttcttactacaattttaatctgcccatttttcagaagtccccacattctttgtctgtaaaaaatcttcttagaatcttttgttatgcgggcattataaatctgaactgctttctccggatttgttgctgaagttatactttgccgatatttcaccactacatgatcaaaatgattaatatgatctccctttgccgttatcttcaaccaaaagggataatcctcaatcaatgtatatgcttcatcaaatccttgatatttttttagaaaactcattttataaaatgcggctggtgtgcatatcagatcattgtgtttcaataattcggcatattgctgccttgcactcattttataaaatgcatcttctgcacgtttattctcattgtgcagtgcaggactttttccatcatcctgaacccattctgcctttccgattaccatctcccagttatgatccagacacaccttgacgctgtccgaaatacaatttgacattaatatatcatccgccgcaataatttttataaacttccctttacaatatttcagtccattattaatattacgtactgtaccgttattacgatcagaggttaataaccgtgttcgttcaaaccgcccaccattcattaacagccaatgcttaattttctctatagtacgatctcttgaattatcatctgctatgatcagttctaattcagcgtactgctggtgcagtatactttctaataaatctataatataagcttctgcattgtaagacatcactaatacagatactaatattgtattttctccccccatgcatgtctcctattattctaatattgtcaatccacggcatattttattactatttgaatttcccaagaaaataacaatatctcttatcaaatatcttcgtatatttctacaaattacagaaatctgacgttcctttaacaaaccctttaatcgcaaattgtaaaaatttctttttgaagcttttgagattcgcacattatatatggatgtatttttttccggattacgcacagatgtctcgctaatacggtactttgccactttcttgtccaaaaacggaatcttaacaccctcttctgttattctcagccaaaacgggtagtcctccaataaatcatactgttcatcaaaccaatggaatctctccatgaaactttttctgaatatttcacctacagtaataataatatcattattcagaagaagttctctgtgctggtgttcagcatccatcttgtaaaacgcttgttttttttctatattttcatgatgctctgcataggtcattccatcatcctgaacccacattatatcaccgatcaataagtccagtttcttcttatcacattcatttacaagcatttcaatgcattctggaagcaaaatatcatcaccatcaaccagcttaatatactctccattgcttcttttcattgcctgattgtaatttttgcatgtgccttgattttcctttgcaaataaaagttccacccggaaaaaacgaccccgattttctgtcacccaatcagatattatgttctgtgtattatccgcagaacaatcatctgcaataatcagttcaagattttcataagtctgtttttttacactgtctaataaatctaaaatatatttttcagcattaaaagttgcgatcactatacttaccagtttattttccatcataagtctacctcatataaaaatataatacataacgacagagatattcttatcactgccattatgtatcataacctttttttatttcttttcaatagacttaagaaactcttcataattcctaatataatcttcttctttgtaataatccgatgcaagtaccatcagcactgcatcggaagagaaatcatacatctctctccagatattatttttaatgtaaagtccctcatatggtttttccagtggaacgatctttttttcctctccattatctaataatatcttgcatgacccatgaatacagatcagtatctgctccaatgatctatgtgcatgatgccctctgctcacaccctctccagtatcatacatataatataccctcttgatttcaaatgggatatccttatattcttctaatgctactaattgtccccgctcgtcgccatgctgttgaaatacatatttaactatctgcatctatatactctccaattatctacttaaatgcgttcaatgcgtctatgatataatttacttcttcatccgtcattccataatacattggaatgcttaattctgttgcagagatatcttctgctattggtaacattcctcttgacatgttcaagtctttataagcttcctgaagatgcattggaattggataatgtttattcgttcctattcccttttcatggaggtatttttccaactcttctcttctttcacatctgataccatagatatgataaacatgctttacatcatccatcttctccggcaaaataatctccggattctgaataccctcataatatttttccgctgtagctattcgatttgcattccaatcatccagatgccgtaacttaattcgtaaaacccctgcctgaagttcgtccaatctggagttgttgccctgataaatatgatgatatttataatctgatccatagtttcccagtgcccggaccttatctgcaagctttttatcattcgtaacaaatgcacctgcatcccccaaagcgccaagattcttacctggatagaaactgaatcctgctccatatcccaggcctccggtttttcttcccttatattctgcgccatgtgcctgagcagcatcttctataacaacaagtccatactttttagcaatcgtgttgatttcatccatctttgccggctgcccatacaaatgtactgccataatcgctttggttctatccgtaattttattctcaatctctttcggattaatattaaaatacttttcttccggttctacaaaaaccggtgttgccccagtatacgatactgccaaagccgttgcgatatatgtattggaaggtacgatcacctcgtcaccttctttgattccatatgccttcaatgcaagaaacaatgcatccagaccatttccacatccgacacagtactttgttccgcaatatgcggcaaattcttcttcaaatgcagtcacctccggtccctgaatgaaccagtttttctcatatatctcctgcattttagcaagtacttcatcttttatttcattatgcattttttcaaatgatacaaatggtatattcattttcaacatctccgttccctatacaacataaatagaattatactatacgtcctattattagtcaattttacggtaaaattcatccggtttcatacttaattttccaatataattgatatgatcgctcatacaataatcatacaaattctttcccgcataatcttccatatccggtgtaagtcccatatcaagtatgtattcaaacatcgtagtgtcccccgaattgagatagcagtcttttgcatacatcaatagattggttccattattatttaatatcttctcatttgcgccctcatcaattaaatatcttgccatttccatattattattgtacacggcaactgtaagtgctgaccagccatgagtatcctgtgcttttatcagttgttttgaactgcacaatttttttgccaaaacattatcatgttttcttattgcttccatcaggctttcaaaattatctttgtaaaggattgtatcataatcaatcgttgctattttagtaaacacttcattgtcttccaataccgtcccagcttttttctctgataatttatctaatataactgcatcaatatattcgacatttttccatttcaacacctgatacggtctaaaattaaatgctctgatctgattttttacctgattccccgtctgttgtacctcaagttctaatgtcgaataatctatataattacggctataatatgttgattttattttttcctgtggagtagttgtaaatgtgttattaattaacttcaacaagttatctcttacaacttttgtaccactctctatcaatattttatataaatccagcgaggtatcatttgctccgatttcaaccacttcctgtgcaattatttcgcctgtatcaattccggactggatcttatgcaatgtaacgcctgtatattcctcatcgtgtaaaataggaagaatcgatgtataacaccccttatattttggaagcaatgaaaaatgaatattgtacaattctgttgtttgaaatctttccggaataataatttgatcaaactcaagcgaaagaaatatcatgtcttttatattataagcatcttccagttctattatttcgacatctcttttttccgcaaaccatttcaaggatttttgccatgaatttattcctgtttcatttcgatttaaaatgcatttaatataatttttttcatagtgttccagacaataaagtaaaatattaacagctatgtcattctttcctgccaggcaaatagttttcatttgtactcatttcccctttttctcataatcttatagtatgccgtttttatcatgccagtaaagtatttccattcttcgcttcttccaaatattacaaagttaatgccaaacggaacaataaaactaatgattaatccactgcatatattgagcaccgtgtgtgtcgtatatgctatgttgaatataaaaaggctcaatccccccatactaattgctaatataatatacttgaaaaaatcaaaaaaatattgatataacggcttttcaaataaaaagcgataattaatccaggcaaccgtcactatggaaacaattgtactcaccgatgttccaaggaaaattccataaattcccatctttgcaaagtgtgccaatgctatggaaaccacaaggtttactccaccttccagaagcgcaatatattttacgaatggttttggactatataaccccgctgcacttctaaatgcttcagccgcctgcgtacaaaagcgaagataattattaaatactaacactgctactgctgccatggggaaaacataatcctctcctaaccatacttttccaatgaattcgttcagtaaaaccagcaatgcaatagaagtataagatgttatcaaataattcaggaaattcagtttattataaaactgatatatttcttccttattatgaccgatgagataatttccaatattagcagtaatatagccaaacgacctgttaaaaagattgttaataattccaatgatcaacgtatatccagaataaattgcaaccgcagtaagatccgcaaatgcagacaacagaatattatctgtaccaacaacacaataacttgctattttaattacaaatagtgccttcacattgtatacaatcttgttcttgacttctttttcaatctcaccatgcagatttttatcattcaggtaagggaacatttttcctgcttttatataaagatacaagttattcagcactgtaaaaatgagtttcacgatcagagatgcaatataacttttccacacacagataataatgatctgcaaaattccagtcacaatataaagaaatgtatctgcatttttattaatataatccttctgtgcagacacaataattgttcggcgatatgccataaaataagaaaatacagcatctaataaaaaaatcagatatacagcaattacataattctgatcaatggttgtcctgacaaaaaaaggtaaaaacggaatcagcaccagtccaattactgccaccgctattccaatataacggtacagtctgctgaaaagctgcataatcgctttcacttcgccataatttttctcttctaatggcttatacaggctgtatcctatagaacttgccacccccagttccaatagacttaacatggaaatcacactgactaccagtccgtttaatcccagtaattcactaccaaggtatacggtaaataccttacggttaatgaatccaataatcgaatttgccacataatacataattgcagagaatacattcatcactgccattttctttctattgctcataaatttacttatcctttatcgaattcttattacagttccctggttattatcttctgttccacaaatacactgccagattttatcattcaacatatgtttattatactcaccaattcccatagaaaaaacagctgcaatgtgactattctcagcttttaccaaatcaataaatgcttccgtaactgcatccgtatgattgctgttttctccaagcatctcctctctgttttctgcctgaatattttcctgatatatgggttttttcaaaaaaagaataatttcttttcctgaatctgtaatcttctgcattttttccatggtatcctttgatacagtgcccttactatcatcaacagcacataaaatatattcattctcttccaccatctgaatttctttgttttgctgaaaataatgtgtatattcctgtgtttctctatccacaaaagctacatgattatctggatagtacacgtactctcttccaccatctgtcacttccggtatatccacatcctcatcatagtaggtactgatatccgactgaaatgccccactatagtatttatcatacaccgtctgtgcaatcacatcataatttgtccgataaaccgcatagtcctggctgttaccaatataagagctgcccgcactcatgagcattgccgcagaggcattatttccttttggaattacaatataatcgatattagcctgactgataattacttttccaagaaaaccactcacatcacaattattgctttcaagcatattccataagtatccgtcatctccttccataactttctggatattcgcattatattcacgtataccatacataatcgaattatctgcaagcaccgtaaccgggcttttctcctgcctgtccttctcaataatatcgcatacgtctaccgtattctgtggcatttgatagatattctccggaaattgaaaaaattgttgcatgctgattcccgatgtcattgcaaaacataaagcacatatgcctgccgcaaaaacctttcttttccggctgtctatcatttcgaacagtttcattatgacatacgcacttataattaccataggaatcatccagagaaagcggtaataggtcataccctctcccaatttccggataagataataggttacctcattaaaagtaagaagaagtacgccaagatatacgatcagatagtttgtgttttttttctctctgactaccaaaaaaagaatacctatcaaaataataatagggatgattgactgaccattatactgttgtacgactttccatactctatttacaccatccatataaacttaattttccttttttattctgaaaataaagagtttactgaatacataattcaataaaacaactacaacactgacaactatttttgccataaatccctccaccccaaacaaactctgtttcataccgatataatagagcaatggcagtccgagaatctctatggctcccgttgcaagtcttgcacctacaaactttataagttcccggcatacaaatctcatttccatatttttactttcaaatacaaacactttatttgtaataaaagcaaataatactgcaacaagccaagcgatacagttacttatattcatttccattccactcttcgtcagaaatgcataacaaaaccagttcaccaaagttgtaagcacaccaaatatcagatacatgataatttctttgtatttttttattaattttcctatcattttcctgttcacatctttctggctttcgtattaaaagttctggatatcagataagctaaaagcatcgtacctgcacctgctatactgaccatagctgctgtggatgatattgcagaacatccccatattaataatcctatcaacagtaaatatgactttctcttcgtctgcatcaggcagatgcacagataaaccatgaaataaatgagcgcatttcctgcataagcttttccttcatatgttctggtcaaaaaaaatgttgcattactatacattgtactatctgctataaagtaaagagccattgaaacacagacaagtattgccgatttttctaccgttttttcattacagaaaacagttgttcctatcaatgcaatcgtgagtgctgtcaatatgacattcagatttcctctgaatatcctcatgataatgattggatgtactccaaatatcctgcacacaactgctgcattaatttcaaatgttaccagtacacgcctgaaataatgagatggcattgcaacacctgtataagcgttatactgaaacatcgtatctgttgttactgttgtatttacaacaccaatataataaatagaatcatcattcaattccccattcagtgttgtataccagcatacaataaggactgctattatagttatacccataagcagtctgtgttcttttaatatttttttcacaaaacaaaaatcttctggaatccgtttccttgctttcaccaccgccacaattacgatgactgttatcaacgcagtccatacaaatgttaattctgtcagactccgcttcaaccaaatgaagggaatcgcacaaacctgaaaaataatctggtatacaataaaccctataattatgtgaaatgctacattcctttttattctgtttttaaatctctctgtgatagcagtacctattacataatatatggctatatctaaaaacaggactcctatcgcctttatgatcataatcattccgtatatgctccattatcgtttcacgattctacgaaacgctctctttacccgattatactgataaaagattttttctctcatcgtcgcaggatgttccagatgataaaaccgcatctcaagttccaaaagatgatccggtgcaaaataatcaaatctgtccgggttcttttcatataccaaccgcagattcttaaggtttctgcttcggtacatttcctcatattcttgtaaatttctttttaatactgtttcactgatcacatcttctgccggtttcttccaattatgcttctctacatactgatttagcatttcactgtatgtaatcagaaaaggtccatttcctatcagagatggaaattctgccagatatgaatcaatatatgtcatatcaagattcttcatcttattaatatccatctgtgcaacatttatattgtgtgtcttattcaccagaatcatatgttgttccggctttgcgaaaagcatattatgaccaagtgttccaataattccacacaaaagttttgtattgcgcacgactgcaatctgctcatccagtgtcaactgttccggagagataatcgtaaatccattcttagaaaagaggtctaataaaatattctcccctatttccgtcccttttgcctttttaaactgctttctggaataataaactttctcataagatggatacctgctgcaatcaacgcactctgccaccttttcgaatacatgcagaaactgttttgaataatatgcattaatcatatacccctgttctgggataatcactttcttacatctggtaactttatgaatgaaaatcagacactccgctattcccaataattcaaaaaagcgcctgatcggagctattgcctgataatattcattctcattcacaagaaatgcatacttatgattttcatccatatgttcaagataataatacaatctggtggaacaatcgatcaaaaaatgtccccaatgattattaatatatcccagatagattatttcttcgtccagatattcaactttattatcatcaatggcgtatccttctcccagatagatttctttttcatcttgctctgtgactggaactgcatattttgcatacgcattcatttcagatgctttcacataatttttttccgcatcaagcactcctccacaaccaaacagacggtttttcgcaaatcgatttggcaaaagatacccctgttccacctctgttgtattcaatttctccctgcatggcaactttcgctctgccagtttttgataacgctctgcattatacgagtataaataggatgtatccattctcctgcaactccctagttttctaacatgatcattcccagaatctgaatattatttgcatcacaaagctgcatctcacttaaaatttcagaatagtatgattttcttcttctctcaatgaagataacggatcccacctctgctgcacgaaggagttcttctgcattgtagtttatcgcatctccaaagacaacgtgaatatttttctgtttcaaccccgcttccaacatcgttaataaatctttgtctacagtttctaaaatactgcctgacagatatatactatctgtctttctatccctgcatgctatatagatattggaaattaacatctgaacctgctgttcatataaaagcttcttatgtccaaagttctctaatttccatacaaacttctcgattgggtgatctttttcctcttttctgactgttcctaatagccttgtctgataaatgctctcaacttcatccttcgtacgtatacgtgtgctaagaaggtatgccaggaaaatatacacaactgcaattgctgcgcctgccactgcaccgatcataatctgtttcttattaattgatacttttacaacctctgtacctgaaacgctatcttctgctgtttctgtctgttcctcttcgtcatctccccagataaaaatgtctttctccatatccagatatacacgaagctgatttgcattcatatcggccttaattgatgcaagtttattctgctgatcttctgtctcctgtgcatatgcatcctgtttttctgccagtgcctcatctataatctgaacctgttttctactatccagattgagaatatgcgtttgattattctcatttaattttgcagcatatgtcgttaattgatcattcacggcatccgccaataacccaacgctttcagcatcagaattcattactttcactgtaaagtttttcattgcatcctctgtctgatttggaagaacttctatcaattctgacagataaccctctgctacatgaactccctctttattaatatcagaaacaatacttccactgttaatataattaacataactatttacaatgttttccgcttcagctccttctactgagtactgtaaaatcacggcatcctctgcatgtgcattaatgttcatcaacactgattcattcatataaagacttttggaatctattgcagccttcaatgaaacagcaagaattacacgctcatattgatctttgtccagatctgcatatgcatcttccaaagttgtattctttacttccggtgctggtgtatgtgctgctgcatagtctttccgatatctcattgcaccgaatatgagtccaaaaataatcgaaaataaaacgattattttccatctacgcaaaaattcaagcagaatatcttttaattccagatctatttcttttttattttctttcctattgtcactcataaacaattacctttctctgcattgctgtcttttcagtatagtttatatctatatagaagtcaatttaacctctttttccatatacccattttaccagcttgagtcctcctctgtttgtacacatttttgcgatcatactgtcacttctgctgtattcgctcttgatggcacaatctggaagagttcctttatagattttctctctaagactgatatctacatgctttgcaagttctgcaatataccggtccgatttttctctcatagaaacattatttcttacggttttccgcataccagttgcactcctgcggtaccagaaaccaatcattggaacatgtaccggatatacacctttactcatcaatttcagatataacgcccagtcctcatcatagtgctttgcaatctcagaaaagccaccaactgcaagaaactgttccttacgaaatgctgctgcattgacaagaatattattaaatgtcattctacctgccgaaaacttcttgcaccatacatattgctcacttccaaagcctaccagatccatatagctccatccggcattgggttcttcctgcaaagccttgtaaagatattctatataaaatggttccacgagatcatctgcatctaaaaacacaacaatgtctgtcatcgtcttcttcacagcctcattttttgccttagactgacctccgtttttctggtgaaacacatggattctggtatctgattctcccagacgctctaacaattcaatatcctcttttctggagcttccatcatccataataatccactcaaattcccacattgtctgatttataacgcatcgataagtttcttcaaaattccgacccgaattataatacggcgtaacaatagatactcttggcgtaatctgttcctgtatacattttttttctaacgtctgtcctggtttttgctcaaaattgaaaaccattgtcttgtcctcatttcaaattttctcgtaagaactgtaaggatgattctctgtattctgccagtctcttatgcacatcctcataatcaatctctgttatctcatcaatctcttctgcactggatacatgtttttctgatatctgaagaaattccagtaaattatctactctgccatttttcttatatacactgtagaatggtcttctatatataactgaaaatacagttccgtgaaatgaattagtgataacaatttccgcattctttatataagccagaaaatctgctggtccaaaatctgcaaactgattcgcttcactattctctggcatatgataataatgcagttctatcaactgcaatcccagctttctggcaactttcttcgcacattcttccacagccttttcctcaactacaaaatatgcgaatacatatttttcctctgttggaagtttaccatctggaagtttcctctctgttgtcataattttctcataatcagctgccttaagtaataatgtcggatctacaaccgttgacacttctcttcctgtcaattgtcgtaactgctctgccagtttttcttcccggacggaaatcgtgtctacattcttcaagagctccacaaacgcagcttcctcactctctgctattttaccatttgcaaggcttgccgcataggaaataattctttcctttttcttaaactcaccaaaatagacaggatccaattttcccgtcaaaaaacttgaccaaatctgatcgcttcccagaatataagcatctttatgcagacactcaaacccatctactcctattaaccgcctgtcattgtctagtaattcttccgtgataaattgatcaaatgctttccattgacggttccatgccttctgtccataaatcccacgaattgtatcatagacaaactgcttccagtttttcggattcaaaattttttttgtaaattttggtcttaatttttggggatactgtccttctattttcgggttccgataattgacaattgtcacatcatgccccatctgctgtatgcacatttttaacgcatatgcctgtaaagacgctccataattgtgcgcattatgaaatgttaaaataccaactttcatagttatccattcctctcctgtattctattcgaatactttcagatagctgttataaaatctgcttctggtaaaatcttttgctcgcttctcagatgcttcactcatttttcttcgttcaaccggattgtccataaccgtttcaattgccattttgagattctctacaattccgtttctttctatctgcatggcaacttcttttggtgcatactccactaatccgccagattttgttacgactaatggaagtcctgataacattccctcaatcgctaccagtccggcagcctcttcccacatagatggaacgacctgcatatctgcacattgataatactgatataattctgcgttctcaatatatccggtaaatctgattctgtcagtatcttgttgcaccaattcttctacttcctttaaaaaaggtgtcgtcgtatttactgcgaaatcagcatttccaatgatcaatagcctgcaattatgctcttttatccctgcaaatgcccgtaataattcccggactccctttacttcctgtattcttccacaatataaaactacaaagtcatcttccttcagacctaactgtgctctaagcttatttcgctgctcaactgttatttttttattaaattttgcctcattcacacagttataaacaacatgcgcacccgtttttttctgttttgtagtacgcagccattctttttttgcaaattcactgaccgcaataatatttccaaagatttcatcatattcaggatctgccattacatgatgatgaatgtgcagataagttttctcttttccaaatttctttgcgaactgacgaaattcatgataaagaccaccctcacagacgattgcatcacatttgatattcctcagaatatggtaaattttgcgataatatccggaatccaacaaggttcctggtttcagcacactggaagcatatcttctgattctgttatttaccttatccagaacagtatcgtctggaatataaataattctggaatacttatacttttttgcttccctttctgcctttttattctctcttgagaaaataataaattctgctttctgctctatttcattctgatcaagcagcattgtgataagttcttcaacagctccccccatcactgccggtacaggcaatgtatttcctacaacaagacatatttttttcatatgcttctccgttttccttttacttcaaaattttccttgatatataacttgccagttttggagtatgaaccagcataaatgttgctgcttttgttttcgtatccaatttatgtttctccttgatggaatgatataatttcagatacatctccacatatttatcataggtctgtctgacctctttatcttttatatcaagtttatcatatacattcataagataacgcgacatccaccgtaagaacgcctgcccaacttcttccagtccatgttccatgcaatattctattctgttattcactgcttccacatataccagattcttcacgctgtatttctttgtcataatactgttctcgcgaatcacatatttatacaacggctccgagattcccacaattttttctgctttatcataaaataaatgtgcagtaaattcgtcttcatgtatttttccgaccggaaagctgatctctcttgcaatctttatcttatataatcgattccaggcagtcacccaataatgataattcggtccgcagagattactgattgcctcttgtgatgaataggttctgtccttaatatccattttctggttcttctcggtaatactctgcccctggtctgtcacagcttcataattgcatactgcaatatcagcattctcttttttcagagcatatatcattttctcgtaagtatccggctgaatataatcatcactgtcaatatacgcaagatattttcccgaagctgctctcatacctgcatttctggcgtcagaaagacctccgtttttcttgtgaatcacttttattcttgcatcttttttcgcatactcatcacatatctggggacatctgtcatctccgccatcatctacgagaataatttccagattggaatatgtctgctgcaataaggattccacgcagcgttctatatatgtttccacatgatataccggtacaacaactgatatcaattcgtcttctctgctcatttattcttccttttccgtataatcaatgtccatagatataaatctggtacatatactttcagcactccagatatttttctgtgtctatctgatacattcaataatgcctttttatattctttggcatttttcttgcaccatctgaaatcttcctgtatcttttttcgttccgcatgtgacaactctgctatacgctcgaacagcatactgacagaacaaccgacaatattaatatcaccaaaacgtggcgagatctgaatcagtctgtcatagcagttttcttctaccttcacaccatctatatactttttctggtattcctggcggatcgcactgttatccctgataaaataatggtaatacggaatatcgataaacactactttatcgagcttaccttcacagataatgtctgtattaaacaacaggtcttccgctattttgtatttctttaatcgaatattatgtaataaatctgctctatataatttacaatatacagaccatggtaacaatagctgaattcctgcttccacctgaccttccgcaatggtaacctgtccatcttttttttcatccctgctcagaaattctgtctgatgagactccacatatctgcaggcacttacacctgcctgatgcttaagaatcagttcatgcaaactttctatcatttcaggttctacccagtcatcggcatctataaacatgatgtactccccaactgcaagatccagtccatgatttctcgcaacagatacacctgcattctcctgatggacacactgtattctgctatcttttttcacccagtcatcacagatttttccgctttcatccgttgagccgtcatcaattaacagaatctgcagattcgtgtatgtctgacatgttatgctttttaatgcccgttccagaaaagatgctacattatatactggaatgattactgttattttctccattgctcttccgtccttgcagttgtctctttttcttcctaaatactctgattctgatattttcaacagtctttacatttatattaaaaattttcaacagtaaataaatactaaatggtaaaatacaaattccaatccccacaataatggaattaatagttcctccatccaaaagtatcttcacaaacggaattgtcatcagacaaattgacaatccatctcgtttttttaaaaataaatttaaaaagtactctgccagcagaaatggaatcaacatatttacaaccgatccaataattccaaaatttgcatatccttctgcaatcaagccgggctgtgcataagatgcctgaatgtaccttgctgatatggcaggcagactaacatattcaaatccaaaatacggtgccagaaatttcacataggtaataccatagaagaatccatttttatggacaaaatctatgatattaccgcctagttctgtccagataccaaaaattcgataaaactgattagcaccaaaatcaatgtaactctggaaatttgtcaattcatataatagattataatttccattccaataacgatttaactttacaatttcagacagcataccataaagcagcactgcaataattccaagtatcattaaaggaacaactttctttccttttcttctatcatcattcactgctacaaacactaagaacactaatattactggcattgcatactgaattaccagatatctctgatctaaaatccgataaattccatatattccaagcaacaatccaacaaagcaaaatatactctgagataaactgaatttcgaatacatcagtctgccaaagaaataacacaaaaccggtgtcattaacataacgccacttgtccctgtcatttccatgaccggaagtgccaacagaacactgcctgcaagtatagcaaaatcatctgtgtccttatattctataaaatcatacctttttatctcattagttgtatgctttaaacacaacaaataaaccagaataatagacattaatataaaatacaccttcatataaatcatgaaatgatcattgggcatataataattatcccgctcatctctgagcaaacggctgtccgtgtaatagcagggacatatggttccgtttataaaagcattgatcatcaggaataaatatcctgtgctaaatatctttctttttgcttcatataatctggaaattattaaaaataatgtcaagctggcaaattccaacatacatctaagatagatatgcttatccaatatcatgacacgtccatctaacaataaagtcaggcacacaccaatcgtaagcacaaccatcaatattctggaaatctgaaacattttctttgtcatatattatttcctcatatttatgccttttatattctgtatgtctcacatcattccaacatacatttcttctaatcgttccgcctccacacggatatcaaatccatgttctgcaagctcttttccaaaacttcgtcttgcctttccgttgtctttatagcgtcctgccgctcttaccgctgtcttcgcccattctgccttactttcctccagcgacaggaatggactgcccatcacatccacttctctggtgatcgtatcagaaaacacacatggcagaccgcatgcctgtgcttctacaccagtcattggcagcccttcgaataaagatggcatgaccatgacatccattgcctgatataactctcctgtgttatccaccattccaaatatttttactgaatttatcaacccaagttgttttattttctccacaatctgtggtcgaagttcgccatctcccaccagccataatacactgtctttgtggatttttcgtatctccgaaaaaatatctaccagatacatctggtttttctgctgactgaaccggcctacatttccaataacaagcttatcttttgcctgatactgtgttctgatttcatttcttgctgtttcgttataggcatattcatcacagcagatcgcattttttaacacagtataatcttttttgccaaaaaggaacgctcctgctgcctgcgagcatccgatccgatcggtaatgtacttttgagatatgctccaaagcattctattccgcaccgcttttcctttactctccgcatatacagttgcatggctatgtacaattcgatgactgattccatactttgcagcaaccggcaggcataaaaatgcaatgtagggtgcatggagatgaacaatatcatattcactgtgatgttctgaaaaaaactgttcaaaatatttctttgtctgtctcatctgtctgccggacaatgccggataagtataaactcttgagccaagttttttcacttctttatcaaatgtctcttcctgctctccgaagatcagataatccatctggacacgttccatattcatatgtctctgataattgagcatcactgtcccgacaccgcccaccgggcgttttccaatgatctccagcacacgggcttcacgcatgattttttcctccatttatgccttaccctttaagcatttatagcataattttctttacacaaaagaatttttctatgaattttttcttagttattcagatttgcgcaaaaatctcttataagagtactccttcatccaccccggcatcatgagtacaacaaaagttccaacctgcacctttatatattcaaacgtatttgtaattcccagctcgtgctgctgttttctaagtttttgaaaatccttgtaataagcccatccacttcttcgctttactaatcccatgcttgttctcgcccggacaagtatatcttccatgttccggaactgatatccctgtgacaacatcctgctccatagagagtagtcctccagaaatggaaaatgtttataatttcccgcttttaaaatagaatctttcctatacataactgtcatgtgatttaatggattacgcactttcacatactctaaaatttcttcctgagtctttggcatattcttgacgcggtctatggttccttcatcattaaattcccggatagcaccacctaccacatccacttcaggatgtgcttccatatatgcctcctctttctctaatcgatccggcatcgcaatatcatctgtatccattcttgcgatcagatcatattggcataattccactccttttgccagtgcacgaccaagctgaacattctgttccatagcatgcacgtggagataatcacattttttctgatactccgccactacctgatataattcctgtgtcagaggtccatcttcgatcagaagaatttcatctgcggtcctcgtctgaactaatatactttctaatgacgctcttaaatattctggattttcttttttataaacagacatcaatacggatattttactcatattttaaaactattactccttcgctttaattttaataatagtgccgtttcctgcaaagcttggatctatcacgcattcttctattttatcagtaagcattcccttataataaaaatgattatctcctgtaaaaactgccactacagggctttcatctgaaaatgccattttcatgaattttcttgtaacctctgtagtatctcttgctccctcaccgataatcagtggcactccccatgtattaatagaagcttcctttaaagtttctatctgtgatgtgtaaaatggaacatgtgccagcaaaataattggcttacccttttctatctccttttgcattgcatccagtgcctcaggtgctacctgatatgattgattatctactgcacatattgtaaactccggaaattcccatgcttgaaatgctgtgttattctctctgaacaaatgatatatctccgcatcttctgcaatcgtttcattccacggtgaatacatctcatgatttcccaacacgtacaaataaggaacttttaatttctgaagattgtcagctaaaaattcaacattttcctgcgaataataatctatcatatcgccacacattaatacaccttccggcttcaagcggttggcatatgcaatccattctgtaaactgtgtagacgaaagtattccttcctcattgacaaacgccttcattctttcatctgcatcacccagagaagcgcccagatcttgtttcgttttaatagccatatgcatatctgttaaaaacaaaaaagtgtattcttttcccactcccggaatgataaccgtctctgtattacttaccttaatatccggcaatggagcatagtacgcattatacgctagcacaataaaaaatattagtgttacaatcacagcacctattcttttcataatgactccttagatttttttatactctccagaaaatccaccacttcatactctcccacctcttccggaaatgatagtttccggtcataagtcaggctgccaaaaacctttgagaatatgttaactcttccggtaagcttaccgatgatccactcgaatcccggaacgagccatatacttcttccatagctttcggcgatccgtgctaccatatctgatgtattcacatattggctgttttgtgggcaatagataccatctgcatctcctctgataatccgatataagaactcgcacaaattctcgatgtatatcatgcttctctcattgctcactctcggaaaaacaggtatcttgcccgccagcttctccaatgaagcataatttccggtacaagctttcccataaatcattggaggtctgataactgctactttgaatgtatcacttctttgctcacataagtaccgttctgcggcaagcttgctttttccataaaaagtaatcggtgtacattctgtttcttctgtaatctgtcccattgtcattccataaacactcatcgtacttaaaaaaacgaactgacgagcccgctcagcctttgccttatccgcaagttcttctgtcaattttgtattaactgcataatagagtgcctccatttccggctgttctttctgatgtacaattgcagccacatggaggatcgtatcatattttgaaaaatccattttcttccattctgaatttctcacagaaacaaatgtaacatgccatcggtcttccaacggcatgtttccattttttttctctatatactgtttgaatgaagtcccaacataactgttggttccggttatcaaaatctgttttcccattattttccctcgaataacccagcatgtctttttatccgctgctactagctatttatgcatttctccggttccaccttccacaacacctttgtgtgacaagactgctgtgatcgttccaaaaaagcacttcagatccattatgaatccaaattttttcacatactcaccatccagttttgcctttacatctatctccaactcatcacgtccgttgatctgcgcccatccggtcagtcccggcattacatcattcgcaccatacttatcccgttcctcgatcaaatcatactgattccacaaagctggtcttggtccgacaatactcatctttcccataaggatattgatgatctgcggcaattcatccagactgctttttcttaaaaatttccctactcttgtaatatactgttccggatcagccagcatatgggttggcatatcctttggcgtatcaattctcatagttctgaatttgtagatcataaagtgtgtcttatggattccaacccttttctgtttaaaaaggattggtcctctactatcaattttaatcgcaatgcataaaatcaaaaacaaccaggataacagaattaatgccagagcagataataaaatgtcaattacccttttcactcccatataaattttctgtgaaattgtaaactgtttcatctttttgattcctttcatgtatctgcaatttatgcaagcatcagacaataaatagatatacctgtgcctatcagcattaaaaacgctataagactctgataattctctaatttcatgctgcatctcactttttggtttataaaaatgagactcagtggaaagatcagcggcaaataatatcttggtgatactccgttaattaccatcgaccctaccggtgtaaaatccaggtataatgccgtccagaccagacatgctgttccaaatattaatactgcattccatattttcatcatcaatatttttcttttcatctgtgcatcatatgttttttctgtcattccaaaatcggtcacaaatgtaaacaacatcgtaagcagtactacaaaatatcctattccatcatagattccacggtatgcaaaatttgcaagcactttggaaccaataaaataagatgcaaacgttgttccaagtgatttcaacaaaactcctgtatacgtcaacggatatcccaaaatcatagataactgacttgtctggctcgtatctcctccacggtaatctcctacctctgctccgcttgtaacattacctattaacggcagtataaaggacgcaaacattaatattaataagacaaagattcctgctttaaacagattcttttgtctcctgctataaaacttgtccttcggcataagccaatataatgccaaaaatggaatatagaccgcctttgaaaagcatcccacaaccatagcaagaatagataccatcgtccgttttgtttgaattttttcttcactcaggtactctgttacaaacaatgctatgcccaacattaaaagtgctatcacaaatgcatcatatgtaaatgacgaaaaaagaaataccgttgtcggcagcaacccaacacacatcaatgtacgttttccatacttgctgaaacgaatcgcacacgtaacgacagctgtacaaaacagtaaattaaaaaactttcctaaaaatactgttgctacataagacaatcccagtgttcttcctaatccaagtcctaatatctgtggaagataagccctttgtccatatctgagaaatctacctttttgtgatgataatacaacggtatcatttgcctgattaagccattctcctatccattgttcttcctctaacgtgtcccctgttggtacgcgcatttctacatttgacatcacagcatcactgtactccatataattccatacccaggagtctgtatatgctatattataatgaatctgttcatcccatgaatcaaatgaatgatgtgctgataagataatcaccgttcctaatgcaactgataccattgcgtacatccattcgggtctttttccaaaaaaagtacaatgagaaacaaataagtaacttagcaacaatactgaaaatacaagcagaaactttgcccaggaaaataccgtgtgatttacaaatattattgaatttaacttatccgcatctttgttttccactgtcaatttcaggctgtcaactttctgatctacccaaactgcagattttccaagcaaaaatgatgcagtatcttccagttccatcacttctttttgtccatatccatcatagaatgtcacttccattctggaactgatgtccgttttgctttgataaatcaaatagatagagctcacatatcttccatcaaataaaaaatcatacgttgtctctccatctttattctctgccttttgtacttcgctcacctgaaaagtctgctcatatttttcgtttttaaacgaattccactgtaataatacctgttctacaaataacgataggaaaaatattacaataattgcaataaaatctctaagatatatttttttattttttagaatttgttttatctgttccattttcctttttcctatcaagctgcaaaataaatcccattcctgcaagcacaagaattaagatgacttcccatattttttccatattagattccctgttttctggttctaccgattctgaatagagtatgttggcaccatcttctgcacccattcccgtatatcatccggttcttctaccacatgctctttgatttcttctaactgttttaaaaacttctcttcatccatctgtattggtttgccaatatgaattaatttattggctgtttcctgcatgccttcttctttcatgagcatctcttcatacaatttttcgcctggtcttaatcctgtaaatacgatctggatgtcctcgtcaggtttatgtcctgaaagaagtatcaggtttctcgcaaggtctacgatcttaaccggttctcccatatccagaacaaagatttctcccccttttgcataggctcctgcctgtaacacaagagatactgcttccggtattgtcataaaataacggataatatccgggtgcgtaacagtaaccggtccccctgcttcaatctgcttcttaaataaaggaatcacacttccgttgcttccaagtacattaccaaatcgaaccgctacatattctgtcttagaacgattattgtatgtctgaataatcatctcacagattctcttggtagcgcccataatattcgttgggtttactgccttatctgtagaaatcatgacaaaacgttttacattgtatttatctgcggcctgaaccactttccatgttcctaaaacattattttttactgcttcattcgggctgtcttccatcaacggtacatgtttatgcgctgccgcatgatatacgatctccggacgatatttatcaaagatcagatccatgcgctttgtatttcttacggaagcgatcaatacaaccagatcgagttcaggataatttctctttaattcctgctgaatatcgtatgtagtattttcataaatatcaacgatcactaactgttttggattgtgtgatgcaatctggcggcataactcgctgccaatcgaaccacctccacctgtaaccataactaccttatcagaaacatatcccataatggaatcaagatcaaccgtgatcggatcacgtcccaaaagatcatttacatcaacatcttttaatttgctgatactgacatccccatttaccaactgatacataccaggtaaacgttttaattcacagccggtctgtttacaaatatctaaaattgcctttgtctcttttgcactcgctgtcggaattgcaataatgatctcatctacaagatactcatttgcaatttctatgatatcatttctatctccaaggactttgacaccatgcatatattttccaattttgcttttatcatcatccacaaaacctacaatatgcatattcacaaaacgactgccggaaatttccttgataattgaatttcctgcttctccggcacctactacaagcactctcttaagattcttctcatccactttttttccaaaaaaagttctgactgcccgataagaatagcggctgataaacataaacgccaataataatgttccataaataaaataccagcttctaggcagcggatactcctgatctctgtaattcagaagaatcgtcactgtattgagcagcgtatctacaatacatgctgctgcaagatacaataattcggttacccctgcatatacccaaaggctgctatacaaacgaaatacataaaatacaataatcgcgatcactaacgttgccggcaatgaactccatacaacaccaatataatactttggtacagccgaaagactaaattcaaatcttacaatcaatgccgtgatgcttgtcaatattacaatgcaaatatccatcagcaccataaatattctcttgatccataatgttttatctaagtttttcataagtccgccacttttctctataaattattttgcatatacttcataatgttctgtattataaattttactaaatccaatgctattaaaaaattcaatattgtcatactcagaattaataaccagacaattgcagccataggaatctgtttccatctgcagctgttccagattctcctgtgtaaaagataaaccttcaccataaataactgcaaatctggtatcatattcacgaagctcgcctgccacctgttccggtgcaagaactcttggtttttctacaaattccaactgttcagcgatctccatgacttcatttgatattttataactattcgtgataaattccaaatgctgcgacgtataatttaatcccatccctgcctggagcagtaaaatatatatcactatgacaattattttttctttcttagtgggtatgtttatcagatagtctgtcattacaactccaacaacagctactatatttagtattccatagaccatccaatgatctgtgttctgaccgctcatatttagtatgccatttgcaattcccggcgtcatcagaaaaagtataccaaaaatctcatatattaacaaatttctttgtctttttttatttataatcaagaaataaaatattgcaacaaaaaggaaaaaaacatttgttcccatcccattgtaagaaaaatatgcatttttaatgtcttcccacaacccggacatatttataccccttccttacaaaccagacaagaatcatcagcaacatcatcaggaacacataaaaccagcctttgtgatgtaacaattgtgccgccggatataaaataataaataatactgcctgcatcataaccggatgttttacacaatcggatactttatttttttctcctccatacatgaaatttaacatacgcatcacttgtaaaaacgcatatggaagaatgcagcattccaacattacactaccattccaacagcttcggaatatgcctgtcaccggagtttctaccgctgtatatattggtacataatagataatttctacaattattaaaaatactgcctgcattttttcctgcttaaaaaagaactttccaatttcccaataacagcacataaaaaatggtaaaatgaataatggaagtattacctttatcagcaatgccggatgtaatccggaaacccatgcattgaccgcatatagcatctcataaggtgaaaatatcttttccatctgcgtggcaggatactgctcgccagtatatggttgatatatatatgcagaattggtatcaattgatgtcattactgtttgtactgtctgctccatctgtggttttacacaaactacagaaaacaatattgctattatggatactaccatggcaatttttacggtcttgtgtccattttctgattttcttttatgtttaaaacatccatatattgcttttttatttgctaatatggatgccacgcatatcgtaatcgtcgcaagcatccaaaccatactaagtttttctaatgtacagccacgatataaaaaaagtaccgcaacaccccaaaatattccaagcatagcaacaaatccatttgcatatgtgcttgatatatttctcctttttacacctgctgctgcatcaataaatgcacctgctaacaatggtactaaaaaaaacaaataaattaccagcaatattcctgctgcatttttcattcattttctcctaacactttatcgactttgcgttctaataaagttttatatactttcgtccccttaatatactccagttcgttttctactttgttcatatgacattttaactcactaagtgcactgagtatcggattgtcctgcaaccctgcttccctgattctaaatgcaattttgatctctctgacattattttcccattgattttcaaatatgatctgcggatcttccgatgcaaatataaaatcatgatcttttgttatgatggcattgtgccgataatgttcaatttcatattcattgttatcttttgtcacaatttgcaccttgagattttgcaaaacacatgaaacatttaatggatccaatcgtatttctgatacatcctgtgtgaattcaatcggaatattcaattttacattctgtcctataatatgatttgtaattgccttgtcttcaagatagtttgttccatcatttaagaacacctgtaagaataagttttcctccggaagcagttttttcacatcgtatacttcttttttgtaagcaataaggcttgcgttatagccatttttcccaccatatacatattgattaaatgcttcattcatattttcaaatataacaatttcttcttccgtaatatcaaagcaatcataaatttcattgattgtcatgatatctttcatagcactgccatttctggtataaaaagcagacaccgcacggtatattacaaatttcactggaattggaaatgaaaatacccattcataatcaataattttatatttgctgtcagtctgatcttttatgatattatcaaagctcatatcgatattcatttcttttccacattccatctcatctgggaaagaaacttcgccaaacacctgtacaaattgtgcatccggcataaatgttcttctttctatattaacattgcttcttatgattccatcatacattcgaagcaaagaaagaaatcttacttcgtctttatcctcaagagcctccaacattgtattgcaaagactctccccggttaaaaattcaaaagcgatctcgttttctgaaatcagtttggatggacacaggataccttcatccttatttttttcataataatcagacatcttcctgatatgtgctactccgtcttttgccaatgctctttttacaaccagtctctgttccccatccttcattatgcaggtttctatctgaaactgttttcttctctcttttgtaatttttgagtaaattttcttcaagatatcacctcacactattttgtaacttctataaagaacgaatttgcaaaaaattcaaattttttttcttttaaaagatttgcatagactctgttttcgttaaaaagcatcattcttgtattatcgaaagtatctaaacctatattaagatcatcttctcgtggaaggtactcatcagaaaaaatctgtacagggaatttataatccggaaacggataataaaattctgctttcccatatccagcatctgtaattattttctttaacgcctctttactaaaagttctcactttactatctgtatcaatataaccttccaaaccatcaaaaaattttccagtatggtcttctctggagcctgcccaatatttcaatccaaatttattttcaatagcaatcagcagttttccatcttctttcaaatatccactgattttttttaaaaaggcttcaaatggatgttcatcatccgtgtaataaccggcatattccaatactccgatcaatgtaatataatcatacttttctttcaaaacaacatcattgaaatttccaaccataattgtaagattatcgtattctttattacggtttgcattaattaatgatctgcgtttagaaagatctacacttgtcacatgctttgcatttctgcaaagtactccactgatagctccacatcctgccccaatttcaagtacagatgcatcttttttaaaaggataccactccaatatattttgtctgacaggtgaaaaatgatataacactggccaccggtcatcttctgcaagtatcttctctacgtctggttcttccataataagctgtaacagatcattctcgatgtccccgtcactatattgatcctgtccattataaaatgtataatctaacgttacttttccaatctgctctgtcatagaacctcttttctatagttatctacaactattattttttacccaagaatctccttgatatcctttataaaatcaaatacatgctcattttttacatataatggattcgctgtcacatgttctacctgcggtctgtaagctttacagatttcagtcagatgtgttgcaatgttcattggactgatattatccagtgataccatgttatcattgaaatccttaagatctttattcgcataagtattcgtgatcgtctttacatcaaataccgacatctcaagtggcggataacttggatgtggtgaacacatcagtgaaattcctgcgtaagtttcctgcaaagtccgcgcatattcttcaattgtaagctttccaacggagacaagctctttgccgtttccaagcggaattgaacggtgcatctcccctgccgaaagaatctcccattcctcaatatccggctgcatcatcacccattttttcagagccgctactacaaggttaaatgcattacgctccgtacctggacgtccataaacaagaatctgttttttcttatcaacctgtgcaggcatttgctctaacgcttttcttaatccatcatttaagacaggatcaaatgcaaagctatgcgtaaaatggtaatgattttcatcgaagaattctttcaacaacatactgttaaaaattgcaattgttggataatcacttttgtaggtagaatctgcaagcaggtacttcgtagaccaggagtaaaatcctggctcataatcctgaataaaatagagaaaaatatttggtttgattccaaatgtattttcaaatccaacataagcatcctgacaacaatacgctgtccaccagccagtaaataagaaatagtcattctctgacactggaatactgcggttaaaacgattgctgtatggaataatctgttttgcaacgagagaatcatcttctgcttttacaaatgtatactcatcggaatattttttaatggctgctttgtctggctctgcgtctactaaaataatacgtgcatcatagcctaatgctttcactaaagtatcgaaaaacttcagtgcagttgagattccaccaaagacatgctctgcattgatagacggaaccagaaggttcattctgcggttcggatattctatcttacggaaagtgtatggtgtaatttcatatacattcgtatccaattgtggaagtccggtttctctttttctcttcagaagcattttttcctcctgctctttgacagtctgctgcaccgcggcacaaattttgggctgacaacaataataatcaagatttctattataatatggatctccgtttttccggtaggtcttatacatctgatccgacaaatcaaagtcaatctgtgggattttacttgcatccctgctcttagattcataatgatacagacgaacatttggatcgtagatattcacgagtccatgctggtttgcacgaagtgcaagttcaatatcgcttccacatacaatgaatttctcatcaaatccaccgattttctcaattgtcgccttcgaaactgcaagacaggctcccgttaccgccgaaacatttcttgttaccatcggtgacacaaatggcgatccatagtgctgcggtttcattcccttgaatacatgatcagcccagccacccattccaataactactcctgcatgctggatcgtattatcttcatataaaagcaatccaccgacaacaccaacatcttttcgtatagctttctctaccagtcttgtaagccattccggttcaataacttctacatcattattcaaacatacatagacatctccggttgcgaacttcattccataattattaagccttgaccagttaaactcaaacgccgcatctttcacgatgacattgtcatgttcttctttcaccttcttcagataagtaaaagtctcttccttctcagaattgttatttaaaataataatttcaaaatttttataagttgtcttcgcataaatactgtcaattgcagcctttaacaaatctgcatgatctttaattggaataataatggaaaccttcggttcctcattcatgtgatatctcacatcatagacaaacaaattctctgtctcatttgcagtcgctgctcctttgccataaacacggtctaaatgttcctgaatcgcattaagtcctgctgtctgtgcatatggctttgactccgggttggctgctgtggagctcggaagatctctccaatgataaagtatctcagggacatgtccaatcttgtccgtcatctctgtcattcgaagtaacagatcataatcctggcttccgttgaactcaccgcgaaatccacccactttttcaaataaggacttcttgaatccaatcaaatgtcctaaatacatctggctcaggaaaagatccggagaccagtcaggtttacataatggatctctcgtttttcctttcgcatcaataatatccatatcgctgtatatgatctcagaaccttctttttttatcttctgataaaattcatgtaatgcagacggtgcaagctcatcatcattatccataagaaggatatactctccggatgcaagcgctgctgccgcattggttgctcctgaaatcccctgatttttttctaataatttaattttaatccggctatttttcattgcagataagtgctctcttacctcctgctttgtagaacagtcatctgcaatgcaaatctcccagtttttgtaattctgcttttctatagattcaatcgccttatcaagccacttaatttctacattatatacaggcattacaatggaaaaaagaatctctccactataattttttaatttttctttcttcactctgccgtatccaggttcataatttacactggcagataaacgctgtttaaagatttccggtccctgattttttaaaacttttaatcctttttttattttctgaggatttcttactccctcttttataattgctgcaagcttctgtgttcttcccataatgctcctttttatatacagcgattcctatcatcgctgattttactcgctgttcgccttcccatagcctactcttcattacaacttactatcgagttcaaatcaaaatacccaacagtaacttttttagataaaacctgtatacaacaaatatcatataatctgtgatgaacttctaattcgtcaccattatatcctgtacatcctaactgtagcagatactgtcctttttgaaatggcaatttttgtctgaatgatactgtaagtgtcgtccctgcctctatcagtccaggctctaacccttcaataagtgaattggttccggtaagatctgttccctttaaatcccggattgtaaatgcaaaaattggatttagcacatcctcatgaaactgtacctttaatttcaaaacacactcttcgaatttagaaacagtattcgtaatctttcctgttgcatcgaaaattccaaagtcaataatctctgcctttttatcgccatactcctgcttatccggatttaaaatcatggattctttccatgcaactccttctattgctgcatgaccgtcttcttttttggggctgtcttccatctttgattctgccattacccttttgtaaagatcgatcatgtcctttggtttaccctctgcaagctttacccctttattcaaaaggacaactctgtcacagtattttccaatgctccccagatcatggctaacaaaaagaatggtctttcccattttcttaaattcttcaaatttgtgataacatttcgtctgaaaaaatacatccccaaccgaaagtgcttcatcgacaataaggatttccggctcaatattgattgcaactgcaaatgcaagacgtacaaacataccgctggaatatgttttgaccggctgatttacaaaatcaccaatatccgcaaaatctaaaatatcctgcagcttttcatctatctcttctttggtaaaaccaatcatggttccattcagataaatattttcaattccggtatattccatattaaatccggcgccaagttctaacaacgcagaaatacgcccatttactttgacttccccatcggttggattcaaaactccagtgatgatctttaaaattgtagattttcctgaaccatttgttccaataatgccaactgtctctccctgaccaacctgaaaagatacatcattcaatgcgtaatgctcttttccaagtggtttttttgaaaatcctaatgcatctttcaagcgatcccggtttctgtcatataatttatatattttttttacatgttctactgaaattgcgatgttatccatgcagttacctttctataacacatctgcaaaatgtggctttaattttttgaatatttttgtcccgattatgaataatacaattgtaagaatccaataataaattgtcatgcctggttgttcccaaaatccagccttattgatcaaagaatccctatatcctgccacaatataatacattggatttaactttaaaattgtaatcagaatcggattcaattccatcccatcaatattccacataattggtgtcatccagacacctatctgcaaaataatgttaatgatctgtccaagatctttgaaaaatactactattgcagatgttgcatatatcagtcctaataaaaggatcatcatcgcaaaggtataatataacatttgcaatgtatacaaatccggataatacccataacacgcatataaaataattgtaaatgcaataaaaaacaaatgcacaaacaaagctgatatcaatttaataattggtaagatatcaatctggaatactaccttttttaccagatagctatactccatcagcgcatttgttcccccactgagcacctcctgaaagaaaaaccacggtacaagtcctgctatcagccacaaaacaaaaggtgctgtaattcctgatctgagattaataccgcttgcatgcattcccttttcaaatacaaaccaatataccaatactgttacaatcggctggacaaaagcccagataattcccagataggatcctgcaaatctggttttaaaatcattctttgacaagtcccatattaattttcgattacttattatttctttcagcatattggcttgttttatttccgttggcatgcttttcctctaactttcattctcttaagctataacttatttacggtttttgacatattctgagattccactccatactttatccttatcagataatgtaagatccgcctcagtcattccttccggcattggccattccacaccgatctccgggtctttccacaacagcccgccctcatcatttggatgataaaaatctgttaccttataacagaattctgcataatcggacaatacgataaaaccatgggcaaatccctttggaataaagaactgtttcttattctctgcagataaagttacaccaaaccatttgccaaatgtctctgaaccctcgcgcagatcgactgcaacgtcatacacctctccgtttaccacacgcaccagcttgtcctgtggataattaatctgaaaatgtaatcctcttaatacgccttttttggatgcagactgattatcctgtacaaattcacagtcaattcctgcctctttgaaatcattgtaattataagtctccatgaaatatccacgggcatccccaaatacggtcggctcgatcacttttaatcctgcaattccattgcaattgtctgttacttttatttttcccattttttatacttccttttcgaatcttttttatccatagatgaaaataaagactttataatccctctgcaatttccatcagatattttccataatctgtcttcaataatggctgtgcaagtttcacaagctgctctttgtcaatgaacccccgcttgtaagcaatttcctcgatacaggagatatataatccctgacgtttctggaatgctgacacgaaatctgccgctgcaagaagcatgtcatgatttccggtatctaaccaggcaaatcctcttcccaatgtttcaacatttaaagttccacggttcagatattcattatttacgcttgtgatctctatctcaccccttgcggatggttttacattctttgcaatctcaactacatcattgtcatagaaatagagtcccggtactgcatagtttgacttcggattttccggtttttcctcgatggacaatgcttttccattctcatcaaattctacaaccccatattctctcgggtctcttacataatagccaaaaatggttgcgccggcttcattttctgtacgctcagctgcgctccgaagaacttttgagaaactctgtccgtaaaaaatattgtctcctaataccaatgccactgcatcttttccaataaatttttcgccgataataaatgcatcagcaagtccccttggctgttcctgtaccgcatactcaaatctcatcccaagctgtgatccatcccctaataactcctcaaacaccggcagatcccttggtgtagaaataatcagtacttctctgattccagcaagcattaaagttgataaaggatagtaaatcattggcttatcataaaccggcatgatctgctttgaaattgcttttgtcaatgggtataaacgtgttccggatcctccggctaaaataattcctttcatttttcatcctcctaaaaaattcattttatcactttttggtaaaacgcaaacaagcagtatcatccgacctacggacggtactgctatttgtgctattattattttccctgatacatatcttcataatatttctgataatcaccactggtaacattgttcatccagtcttcatgttctaaataccaggcgatggtcttcttaattccatccttgaacatcgtctccggttcccagcctatctcagcttttatcttgtcaggtgcgattgcatatctgcgatcgtgtcccttgcgatcctctacatatgtgatcaaatctttgcttacatttgcttttcttggatcagtatcaggaagaatttcctgtagagtctcaatgataatattgataatctcaatattacgcttttcattatgtccgccaatattgtaagactcaccaagctttccatgttcctgaaccatgtcaattccctttgcatgatcatctacatataaccagtcacggatattcaatccatctccgtacaccggtaatttctttccgtgcaaagcattgttaataattaatggaatcaacttctccgggaactgatatggtccataattattagatgtattcgtcacattagccggaaaatgatacgtatcaatataagccttcactaacatatcagaagacgctttactagcggaatatggactgtgtggctgatatggagttgtctcataaaaatagctttttccatcatcaggaagtgaaccatatacttcatctgtcgatacatgaaggaactttttaccagttttaaaactgccatccggcagctcccatgctttttttgcacaattaagcataactgctgttccaagaacatttgtcttgacaaaaacttccggatttttaatacttctgtcaacatgactttctgccgcgaaatgcacaacacggtcaatatcattttcttcaaaaatcttcatgatagcatccttgtccgtgatgtccgctttaatgaaagtgtaattatctctattttcaatatcttttaaattctccagattacctgcatatgtcaatgcatctacattgataattctgatttcattatcatatttgcgaaacatataatgaatgtagttcgatccaataaatccagctcctccagttaccaaataagttctcattccgagatcctcctatcatcacaattatttgtcattttaccatattttatatactaagacaagttttacacatcttaggattttattaactatttcagctctgccatataaacatccaatgcgtctttccagtcagccatctgataaccatccgctaatctcatcatataattatccagaatagaatatgccggacggtcagccgctgccggattcatctgtttatactgcttacttgttacatgatttacctttgtgctttttcctgctcttttgaaaatttcctctgtaaagtccgcccagtttgtatctccctcgcaggtagcatgatacagaccataattttccgttccctcaaaatgatggattgcctttgcaagctctactgcacttgttggcgatccaagctgatcgcagacaacactcacttcatcatgagtctccgaaaggttcagcatagtttttacaaagttttttccatctccatataaccaggctgtacgaaaaataaagaaatggtttgaaaactgttgaacaaacttctctccctcgagctttgttttaccataagcactcaccggattcggtgcatcaaattcagtatatggttttgtaccatttccttcaaaaacataatctgttgaaacatgaatcatctttgcgccaactgcctctgctgcaatgcttaagtttcttggacccaaagcattgatacgataggctgcatcccactgcttctcacatgcatcaacatttgtatgggccgcacagttaatgatcacttctggctgttctgcacgtacaagtgataatacctgctcaatttttgtaatgtcaagtgctgtcacaccttccccttccactacatctgtattaataaatgtcacatcacttcctgcgtattccttattgatcgcacgaccaagctgtccattacatcctgttaccaaaatctttttactcattctcttcattccctctttctttttataaaattttccatcttttatcacacttcagttttcttcttcctgtcctttacgacacaggatgttattattaaaaatactataaatactactccaaacgaaagggtacaactcagtgccgctcccagcattccaagactctttacgaaacccgatcccagaaatactgcaaatataagtccggctccatatcccagcaataaaaaaatctgttttcccgtaactgttaccacataatagagacaatatacataggcattgagtcctccgcatatcataatgatcaccaattccattcgatatgccctcagatcaactccatacacaagagataatattggtattcccaaaagataagcacccacacatgctgcaatcgtaagtgcaccaattaaaatcatcatttttttcacaatgtctgtaaactcttttatattttccccctcccaatctctggcaagatctgtaagaagtggccggaatacaaaaaggcttaataaattaatcacaaatgcaggcataaataaaatattatagctgttctgaaccgtctcatcataatatgtgttaatcgcatatttgggtgcattgttcagataattcataataaaagatgacacaaacaatggccagcatgcattataaatacctaaaatccctctccattccagatgcaccggcgttggttcaaagtattttttcatatgtaaatcataaaacagcataataaccagtgacgttaatgtaagtgtcatagccgcatataacaggttgtctgttaaccataatataattgtaaatgtaatggttgaaatcccgctccgcattaacatctcttttccggaaatatcaatgcgttctctctgttggaatagtccactatatacatctgccacagcctctaccattcgataccccagaatccaaaacacggtaagtgcttctactccagtataaccattcacaacaatatagcctatcatgcagatcagcataataatacaatttaacattctgctggtaaaatattgatcaaatgtaaatttattttttatatccgtcgactgaactggtctgatttcaaatccaccgacagaaaacaaaagctgcgctgtagaatacgccaatgcaaaaaatccacccctgctctctccgctaatccggttaacgataatcaacagaagcatagaggaaagtgaattgcaaagacttccagccatattccacataaatttcttctttgctgttgtttccttcatttatttctgttcccttttttctttctcatcaattgcaatcttctgtactaattcttttactttattgtccagtttagaaatgtccatagtgagttgaaaacatttgacaagtaatataaatataatcaaaagaaatatgaaattagttgtggaatatacgcctaccaactctgacatccaatctgcaatctgtggaaaaatactaaacaaaacgagcattatcgcaaacaatgtccaaaaaatagaatactctatctgtaatttttcctgttttacttttttgcacatataaagcaatgtaaaaacagatacgataatcaatgtaattcgaaatgctatcgacattcttttctcctttatcctgtctattttgtaaaatccactttctttttattgcgaaagttctgtattaataatatagagatcaacattctggccatatattttgcagcattgacggcattaagataactttgtccggcaattctttcatccatctttgcctgtatttctgccacttttgctcccattttaatcaaatacgatacggtatccggttccggtccaaaatttatgttgtttgccaatacttctattaattttttattatacatacgcattccagatgtcggatccatgatttttgtacctgaagtaagtctgatcgcagtggtgatcaatctgcttccaatcatccttgctgtagccggtttcttttcttcaacaaatctggatgcgatcacaatatcatttccttcttctattttccggatcattgctgcaatatattccggtctgtgctgtccatctgcatcaaactgtactgcgcaatcatatcccttttgatatgcatatttcataccagtctgaaatccacctgcaagtcctaaatttaccggaagatctataatattgtaatgatttgaatggcatatctcagatgttttatccattgatccatcattaatcaccacataatcatactctggataattttccgtcaaatgcttcaccacacgttctatattgtcctgttcgttgtatgccggaatgatgatcaatactttcattctttctctccattcatgtcttttgcaatctgcataaccttttcagcagtggcatcccacgtgaaatattttactaatctgtcataacttttacattctgcctgtgttcggtatgcatcatcttctattactttttccaaatttttctgaattgattcaactgtattatctctcatgataattccatactgttcatctacaagtaactctttcgctcccccctgataggttgttatcacaaaacacttacatgccacagcctccaggacagaagttggaaaaccttctgaatccgatggcaggcaaaatatatctgacgcatccaaaattttaacaatatgttcaaaatcaacttgtccggtcaatatgatatacggatctgacatttctatcaattcctgatataatataccatcccctgcaatcattaaataaaccggtatctgtccgttttttatcctgcttatatttatcttttttaccgctgatacaagctgtttaattcctttttccggaattaatctgccagtaaaagaaattacttttgcttcattcggaatctcatattccttccgataatcaatgtcagactcttttaaaatccgctgaaattcttcgatttcaaccgcattatatagtgttccctttgatttgatatggaaatgtccgctccactcacaacaggcttccgaaactccatagtaatcatcacaatactttttcaacaaaaatgtaaggaaatgctcataccatccccccactgtgtcaaacaacttattattcacactcagatgggatgttccatgttctattacaatggatggaatccccttacttttagcaaatttcgcaccatataatgaatgcagatagaatctcgtattaataatcacaagatcatattgattcctctcgatcagtttttttacttttttaaattctttgtttcttttgaacaccggatatcttccgcctaataaatcgtaacatggcagacgataaatctggattccttcttgtatttcatctcctgataaatcacccgtatttgatgttactatagtaacttcgtttcctgcagcgatcaattttctgctcaaatacaaagtataacgttctacaccaccaacatgcggataatactgtgcagaaaaaatgcaataatgttttgacatttttttcacctgttcaattgctctaatgtattttttcattatgaataataaacttttttaatatataacattaaaattcttgatgtcaatccaaatcctaatatacgatataccctatgaaccagacgaactgccgggtttatatcataagttaacagatatgcatattttttcattatctcacgatcatttttaatttgctcattctgttctatcaagtatgcctgtcccatccagactgcaaacggatacgctaaatacgcataaaaaactttccgatattcttgatccaaatatttttctgcatattgggtatattctattataatatttttcagatcattcaccatataatatttcatcttctgacttgtctgagctgtttcatggcctttgcgatacacataaaatggtttatcataccattcaaaccgttctgcgtaaatcagcattctggcaatccagtctgtatcttcattgcggattccctttttaaaatacagatcatgttcccgtatcaaagaggtttttacaagttttgtccaaactgtaacgctaagcattccagcttttatcagattttccactgcctcttttcttttctttcccgatacaagtgtgcgatcaaaagaagacggttttacagttctatttttatcctgccaatacaccatgtttgcgtgcatcacaacatccggttctgtctcacttatcacttttatgatatcacacaacgcatctggatcactccaataatcatcattgtccataaatgtgatgtaatcaccactggctttctccaatccgacgtttcttgcatctgatgttccaccgttctgtttgtgaatcgtaacaattctatcatcttttttggcatattcatcacatatcatcggactatcatccgtagatccatcatctactaacaaaatttcgaaattgtgatacgtctgcgccaatatgctttccacacattgtttcaaatataaagttgagttgtataccggtataataatgcttattttcatatcttacttaatatctttttcttttaatttttgaaaaaatatcccttactctcccaatccatcctcaatcgcttccacgatcgcttttaaagcctcttcctcatcttcgccctcgcacatgagttcaatctcatctccggacttgatacatgcacctaacacgcttaagacactttttgcgtttgcgatattatcgcggtagcggaacgtgatatgtgatttaaactgcattgcatccttacataaaattcccgcaggtctcaaatgcagtcctgtcggattttttattactactttctgactaaccatgctgtattaccctccaaattccagtcccctgattttttactctgtatgccggtctggattcccctgtcatagtcagaccagcattctggtcttctataacataattcttgtgatcagttctgccagtttcttcgcctcttcatcaatcactttctggtcttttccttcgatcatgacacgcaccagaggctctgttccggatgggcggatgagaacccttccctcgcccttgaattttttctcaacatctgccacggcatctgcaatttcctgatattccatgaatttttcttttttatggtttggaacttttgcgttgacaagagcctgtgggagtacttccataatctcagcaagttctgacaacggttttccggtattgaccataacttctaataaatgcagggcacttaataatccgtcaccggttgtattatcgtctaagaagataacatgaccggactgttctcctccgatgttatagccattttttctcatattctcaagaacataacggtcgccgacttttgtcttttccacatggatgccctctttctgccccataagggtaaatccgaggtttgtcatgactgtgactacgatcgtatctttcttcaaagttcctttggacttcatgtagttgccacagattgccatgatctgatcgccgtccacaacatttccatgctcatccaccgcaagcatacggtctgcatcaccgtcaaacgcaagaccaactgctgccttttcatatacaacacgcgctttcagctcatccatatgagtggagccacaattggaattgatgttcgtaccatccggatcggtgtggatcgcgataagatctgctccaagatctgtcagtgctttgacagatgtataatgggatgcaccttctgcgcagtctacaacaattttcatacctttaagatccaccggaacacatttttccatgaatttcacgtattcatctctcaggtcaaagcggtaatcaatctttcctacgccggaaccgatcggaagtaccacgtctttcatattatttttgatcagagactcaatctcatcttccatctcatccggaagcttgtagccctctccattgaagaacttgatcccgttaaattccattggattgtgtgatgcggagatgactactccagcatctactttgtgttttctggtgagatatgcgatcgcaggtgtcggcatcactccgacaaatattgcatttgcgccaaccgaacagatacctgccattaatgcgctcgctaacattcctcctgaaattctcgtatcacatcctacaataatggttgcctgatgctcctgctcttttgtgagcacgtaagctcctgcctgacctaactttgttgccagttcaattgtcagttccgagccagccacaccacggacgccgtctgttccaaacattcttgccatattactgttcctctctttgttcctatttcaaattttttaaatctgctaacgttcacttgttttccttaccgttgaggtactctccagttcctcatctgtattatcagcagaagctgatgtatcagatgcgctttcaatggtaaccgcggcataggtatccgcatagctgaccgtatttgtatccaattcaaatgtaatcagtacattatgtgcacccagctttaaatctgtcagatcgatactgccggaaatcgtcttttcgtccagcgcatcgatcacactgcttcttcctgacactgtcaaggcaatgttgtcttcctcatactgtactttttcatccgaactcagtccgatcacctgaagattcgtcaccgggatctgcaaagtctttgtctttactgcctccaccacaactgtaacatcaatcttggagtctgaactgatcactaatgcagtgcctgaaggaagatatgtggaaatgtccacagtcttttcaatatttgaagttgcatctgtaatatctaacacttcttccggaatcgtgatcttattgatggtatttaaaatagccgcctcgcctttaatacgtactttctgtggtgtataggtgatattccctgcctggtatccatctgccggagttccggttgtcaggaattccagttccacatctttcgtattcaggatttgtgcactgatattgactgtgctcacactcagcgtaagctttgtcgtatccacaacctctccctgtgcatcataaaatacaggtgtcacacggtctgtgatatccgttgacatgccatctacattaatagtcgccacaacggtatcgatctgatttaccacagaagccggaccggatactttcataacattcgcatctgtgatctcaacatcaccaagcgcgcatcccgacgcaaccgtaccggttgtgtttgtcttgatcgggaactgctttgaagcagaatcctccagttcaagatccagatacagatctttgctggtaatattaatactgctgttgttacggttacaggtcacgacaaccggcacacggtaagtccctgttttctcatcatattcaattttctgtgcatccgccgttgctgtaaagttcgcattggtaagtgtattatgcacagagcgttttgcatacacgctgaacgtgatcgtattctttccatccagataatctgcccattttcccatggaggtgatataagatttattttccagtgagacactggttgtgtaaggttttgagttgctcggatcatcaatattcacgactacgatccataaaacaacagcaaacaaaacagcaaggattttaaggccaaagttattcattactctctttccgaatttttgtaacatctttcagcctccttctccatgatttcactttcgaagtgtcctgctcacgtttctgaatgtaagccagtttattttttaagaattctgcatctacattccggtaaagttcaccgtccagtgcaatggatacttttccggtttcctccgatactacaattgtgagtgaatcgctcacctcactgataccgactgccgcacggtgtcttgttccaaggtctttgctcaggcttaaggagtccgtcagtggaagatagcaggtggcagaaacaactctgtctcccctcacaatgactgctccatcatgcagcggtgtgtttttttcaaaaatattgatcagaagctggctggtcaggataccatctacggcaatccctgtcctctcatactccgtcagaacgatttcatcttccactacgatgagtgctcctgtttttacttttcccatctcatagcaggctttcaccagctctgtgatagtcttgtcggaaaactttccattctccactttgttgaaatcaaaattaaaaagatttaccaaaatgttcttccgtccgagattttccagtgccttgcgcatctccggctggaagatcacgaccacagcgatcattgccacgttaaacagtttgtcggcgatccagacgatcgtattcatttcaaacaaaactgcaagcaaaacaaaggcaaggatcacaaggattccacggagaagcatccacgctctcgtatctttgatccaaaccagcatataatagatcagaactgaaatgataatgatctctataatatctgtgagggacatctgaagcgtcaggtaagacaccgctttttcccaaaacgtccgcaatattacgcctaaattctgcaccggattcacttccttttaatctaataaattttcgtctatgtccatctcttctgcaaatttcttcttgttcaaacgttccttctcgtttttgccgttaaaacgtttgatctgtttatccttctctgtcaccagagactttggaactgcttttacataataatagtaatcatcatcctcgaactggagtcgttccgttctggagtaatccagattaaaaaacagaaactggatgatcatggcgatcacaccggagatcacgcttccaatgatcacaccggcaattttgtctgaaatcccaagtaaaatgtatcctgctgtcagtccaatcgcttcaaataaaataccggatgcccatgcaaccgtccatgaatgctcaatgtcaagctttctcaccacatagacaatgagtgtcgtaatgataaaaatgccaagaacaaggtacatctctttatttccaatcagctggttcaatgccactactacttttgataccgaagaatccgtctcttccgctgcatcgctcaatgcgcttgcattctcgctcactccatggataaagaaatagatcaccgtaccgcaggcaacagacactacagaatacgcctcactcagcagaccggagccaaccggtaccgcataaggaatatgcagcttaaagcagaccggtgtcagaaccgcattgataccactctttggggaaaaacggaaataaataaaatagatgattgcaaacatgagaagtcctaccagacatacctcaatggataatgcgtacagatccgccaaaacgaccaacgcagcaattgcgatcagtccattgaccggaagcatggaacacacaagtgcaagaatgactgcaaccggagtcttgctgaccagtttcatatatccaatactgttgttgatcacaaggaatgtaaacaatgcaagtacaaaccggatcgccggtttcacatatatttcattttttccgtaaaaacggatcagtttctctttcaattctaataaggttgtcattttagcctcccgccgtttgttttactcctgattttcctgccccccggcagcgttcagtgattattcccagtctttattctcagacattttcagcttgtcttccctctcgtataactgattcagcttcttcagattgccataatacttctttacctcacggcgtccctttgtatatcttctattataaacaaaatacgtgatcgccatgtaagcaatcataaacacaatatactttaccagcacggatgtcagcagttcctgaatatccattgcattcagattctccattaactggttcatggaataaatgccccatgtcacaaggatcagcgcaaagccaatcgttcctgacacaaagcttccaagcatacgcagcgaaacataatcttttcttgcatactgtgtcatcggcttacattcttttccctgattggtgtcaaatatcgccatttttatcatatgatgtaaacgttcttcgttaaccatgcagatttccttcctgtctgtcacacaatgtatctactataaaataaacccatctcattttctgaaaaagtacattcttcacgcaattatgcattcttattcatcattataacacagtaggcggtattttcaaacaaaaaaaagcagatgcgacctttctacgtttctatctatataaataacgtagctatgcgccctgcttttttataaattctgtccttattttcagatatgtgacattctgttcccggttctatctcaggaatctcatcttatccccttcatcacgctctccgcccgatctctgctgcattggacgtggtctgttcaaagcactccgcagattatttgccatagcagctttacacttgtcacagaagcgtccgcttgtgatcggtctgccacagtgttcacacaacacaccatctaaagaagcttccgagaggatcagtctctcctctttcacccactgtttgatctgtttcacagaaacatccatatcctctgccacctgactgatggatgcctgtggatgttcaccgatataatctttcacgctgctaaatttcttctcaagctttgccctgcattcagggcaaagctgtgcgccactcatataattaaagagttttccacagcccttacaatttcttacatccatagcatattcctcctaaaatccctcgccgatactgatacataggaaataaatctcatccacccctgcctgcaaaagtacctctgccactgcatcgatcgtgcttcccgtcgtatagatatcatctacaattaatattttcctatattttactatatttggtactaactggaaagctttttttagatttatcttccgttcgacatcatttaattctttttgcggcgtggtattccggattcgttttaccatgcgcttttccaccggaagattcattttttctcccagagtccgcgcaaatacggctgcctgattataccctctccccttttccttcaaacggtacatgggaacgggtacaattgcttcgatctgttttctccggatccagtctccatagatgcgcactgcttctttcgcataaaaatctgcatattcgcgtttattactatatttaaaacggtacatggactggcggatttctccctgataaacaaaaaccgcttttccctgggaaaaatagtgttttttcctcatgcagtctgtgcagtattccctcctctggtcttctaatggcttgccacattttttgcaggacggttccccgatacagatcactttcttccggcagtcttcacaggtatctttcccaacatatatcacctcatcacagacagggcatcttggaggaaatacaatgttggataacccctcttttattttcataaaatcctttctaaaaatctctccggtttccatcctaacacttttctgccctgcatactataaaggttttcttaagattttaaatctttttcttatgatcctcaccgaaaaaatgagtgtcctttacacattttttctcaaattccggttgacgaatcctgtatgagtgattataattcaatcattaaaagtattaatgctttaaagcattaaaggctatgatcaatgataaggagaatgaatatgaaaaagatgaacaaaatactctctgtcatgatggcagctgcaatgacagtttccatgacagcatgcggcggcgatacagcctccgacaatacctctgcatctgctgacaattcagcagcaacaacagaatccgctgcagcaggcagtaccgatggtcagaaatatacgatcggtattttacagcagttagagcaccctgctcttgacgctgcttcccagggctttgaggatgcactgacagagctgctcggtgcagataatgtaacatttgaccttcagaacgcacagggcgagcaggcaaactgtgctaccattgcaaataattttgttgccggcaactatgacctgatccttgcaaacgcaaccactgctttacagtgttctgccgctgctacaagcacgatcccgatccttggaacttctgtcacagattatgcaactgcccttgagatcgacgactggacaggttctaccggaagaaatatctccggaacttccgatcttgctcctttagatgaacaggaagccatgatcaaagaattattcccggatgtaaaaacagtcggtatcctttactgttccgcagagccaaactccaagtatcaggctacccagatcgaggctgctttagatgctgacggcattgcgtacaaagaatatactgcttctgattccaatgatatcacctctgtggtacagacagcagtttcagaagtagatgttatttatattccaacagacaacacaatggcaaacaacacggaaaccatcaataacatcgctcttccggcaggtattccgatcattgccggtgaggaaggcatctgttccggatgtggtgttgcaacgctttctatcagctactatgatatcggatacacagcaggccagatggcttatgatatccttgtaaacggtgctgatatcacaacgatggagatcaagactgcaccacaggtaacaaaagagtacaatgcagatatttgttcccagcttggaatcacacctcctgatgattatgttgcaattgaaacagaataatctttcatcaatgcaacaagttaaagctttaaatcgttttagtattatgttataatatgcctgcggtatttcgtctcaacaaataccgcaggtattttatgctgtgggtattttgttctgcaagcaattgatttcatgaatattattttatatttgtagataatttttgcaccaaatagttccgcacaggcattttataaaaaaataaggagagatttcttatgacgatgatgttaacaacttatttagcttccctgagcccgctggcattgctccgttccctgccgggcgcatgcgcacagggactcatctggggactccttgcacttggagtctacattacttacaaattgttggattttgccgatctgaccgttgacggttccatggcgaccggaggtgcagtcgccgttatgctgatccgcgcaggcatgaacccatggcttgctcttatctttgcttttcttgcaggaatggccgccggatttatcaccggaatgttacataccgcacttgggatcccgggaatccttgcaagtatcctgacgcagatttcactttactctatcaacttaaatattctcggaagctccaatcaggcagtcagcgttgacaaatacagccttgttgtgtcactccgttatatttcggactcaactgcaagcaaaatccgtatgtttacgacctgtatcctcttctgcgttgtactcgttgccattctctactggtatttcggaacagagcagggacatgcaatccgtgcaaccggctgtaaccggcagatggcaagagcgcagggaatcaacactgattttcataccgtacttgcactgatgatctctaacggtcttgtaggactttccggtggactttacgcccagtatcagggagcagcggatgtcaatatgggacgtggtgcgatcgttatcggacttgctgctgttatcattggcgatgtcctctttggaaaaatgtgtgccggcaaaaaaattgcatttgcttacacactgctctccgtcattgccggagctatcctgtactaccttgttttaagtgttgttttatggttgaaattcccatccgacgacctgaaattattctctgcaattgtagtagctatcttcctttcaatcccgtatctgaaagcgaaacatagcaggaaaggagtggcaaaataatggctgaaatgttaaaaatcgatcatatctgcaaaacatttaacgctggtacgatcaatgaaaaagttgctttaaacggagttgatctgacattagaagatggcgattttgtcactgttatcggtggtaacggtgctggaaaatccacaactttaaacgctgtcgcaggtgtctggccagtggattccggtaaaatttttattggcggtgatgatgtcacaaaattatccgaatacaagcgtgccaaatatttaggccgtgtcttccaggatcctatgactggaaccgccaccaccatgtccatcgaggaaaatatggcaattgcagcccgccgtggcagaaaacgtgggttaagctggggaatcacgaaggcagaacgcgacacctaccgggaaatgttaaaaacattggatttaggtcttgaagatcgtcttaccagcaaagtcgggctgctttccggtggacagcgtcaggcaatcacactgttgatggcttccatccagaaaccaaaacttttactgttagatgaacacaccgctgcccttgatccgaaaacggctgcaaaagtacttgagatttccgacaagattatctccgacaatcatctgaccgctatgatggtaacgcacaatatgaaggatgctattg

SEQ ID NO: 27 - DNA, 9529 bp, unidentified
  source 1..9529: mol_type = unassigned DNA
atggcaaagaaagttgttttagccggtgcatgccgtacagcgatcggtaccatgggtggctctttaagcacaacccctgctgctgagcttggcgcaatcgtaatcaaggaggcacttcagagagctggagttgctccggaagcagtagatcaggtatacatgggatgtgttatccaggctggacttggacagaacgtagcccgtcaggcatctatcaaggcaggacttccgatcgaggttcccgctgttaccatgaacgttgtctgcggttccggtctgaactgtgtaaaccaggcagcacagatgatcatggcaggagatgctgacatcgttgtagcaggcggtatggagaacatgtccctggcaccctatgctgttcctcaggcacgttatggatatagaatgaacaatggtactttagttgactgcatgatcaaggatgccctttgggatgcattcaatgattaccacatgatcacaactgcagacaatatctgcagagagtggggactgaccagggaagagctggatgagttcgcattaaagagccagttaaaggctgaagaagcacagaagaatggtgctttcgagaacgaaatcgtacctgtaatggttaagaagaaaaaagaaatgatcgagttcaaggtagatgaaggaccccgtcatggttctaccatcgaaggacttgcaaagcttcgtaccatcaatcctgacggatttgttactgctggtaatgcatccggtatcaatgatggtgcagcagcagtcgttgttatgagcgaagagaaggctaaggagcttggcgttaagcccatggctactttcgtagctggcgcacttgcaggtgtaagacctgaggttatgggtatcggacctgttgctgctaccaggaaggttatggctaagacaggcatgaagatcgaggacttcgatatcatcgaggcaaacgaagcattcgcagcacagtctgttgcagtaggtaaggatctgggaattgatgttgacaagcagctcaaccccaatggtggtgcgattgctcttggacatcctgttggagcttccggatgccgtatccttgttacactgcttcatgagatgcaggcaagaggagccaagaccggtcttgcaactctttgcatcggcggtggtatgggatgctctacagtcgttaagattgaagactaagcatattttaaggaaaataagtaagcaggcttaacttcttaggtctgcttacttctgtgaacaaaataaaaaggagttaataccatggaatttgtaacatatgagcagaagggtgcttatgccattatcaccatcagccgtgagaaggcactgaacgcactgaattctacagtactggacgagctgaatgcagttctggatgctgtaaaccttgatgaagtaagagcactgatcctgacaggtgcaggacagaagtccttcgttgcaggtgcagatatcgctgagatgagcacactgaaaaaggcagagggcgaagccttcggtaagaagggaaatgatgtgttccgcaagattgaaaccttcccgatccctgtgatcgctgcagtaaacggattcgcacttggcggcggatgcgagatctccatgagctgtgatatcagaatctgttctgataatgccgtatttggacagcctgaggttggtcttggcatcacacccggatttggcggtacacagagacttgcccgtcttgtaggcgctggcatggctaagcagatgatctacacagcaagaaacatcaaggctgacgaggcttacagaatcggtcttgtaaacgctgtttatacacaggaggagttacttcctgcagcagagaagatggcagcaggcattgcaaagaatgcaccgatcgctgtccgcaactgcaagaaagcgatcaacgaaggtcttgatgcagacatggatcaggcaatcgtgatcgaagagaagctttttggtgactgctttgaaacagaagaccagaagtacggaatggcattcttccttgacaagaacaaggaaaaggtaaaagagcccttcaagaactgctgatttctgaaagcacagatctgtaaatgacagtcggcgtagtgcctgcggcaggaaaccggctgttaagaataaaagataatgaaaatctcaggaggaaaagaaatgaaagtaggtattatcggtgccggtactatgggacagggtattgcaaaggcatttgcccaggttgacggatatgaagtagcgctctgcgatatcaagcaggagtgggctgacggcggaaaagcaaagatcgccaaaggctatgctaaattagttgaaaaaggaaaattaacacaggaagcagtagatgctatccttgcaaagatcactcccggtctgaaggaagacctctgtaaagactgtgatctgatcgttgaagcagcatttgagaacatggaagtaaagaagacaacctttgcagagcttgacaagatcgctaagcctgagtgtgtattcgcttccaacacatccagcctttccatcacagagatcggaaacggactgaaccgtcctatgatcggtatgcacttctttaaccctgctgaccgtatgaagttagttgaggttattgccggtgtaaatactcctgcagagacagttgataccatcaagaagatttctgaagagatcggtaagacccctgtacaggttaacgaggcagctggtttcgtagtaaaccgtatccttgttcccatgatcaacgaagcagccttcatcaagatggaaggtgtttcagatgtagccggtatcgatgcggctatgaagcttggtgcaaaccatcctatgggaccccttgagcttggtgatttcattggtcttgatatctgccttgctatcatggatgttctttacaatgaaacaggtgacagcaaatatcgtgcatgtcctcttctccgtaagatggttcgtggcggtaatcttggtgttaagagcggcaagggcttctatatttacaatgcagacagaacaaagacccctgttgatgcacagtaattttaattgaggattccctcaataacatatatttaatggaggatataaaaatcatggattttacgttaagcaaacaacatgaaatggcgagaactcttttcaaagagtttgcagaaaaagaagttaagcctttggctcaggaagtagatgagacagaagtgttccccagaggaacagttgagaagatggctaaggctggcttccttggaattccggttccgaaggaatacggcggacagggatgcgatcctttaacctacgctatgtgcgttgaggagctgtccaaggtttgtggtactacaggcgttatcgtttctgcacacacctctctttgctgtgatcctatccagacctatggtacagaagagcagaagcagaaatatctggttccccttgcaaagggtgagaagcttggtgctttcggtctgacagagcccggagctggtactgatgcacagggtcagcagacaaaggctgttcttgatggtgacgagtgggttctgaacggatccaagatcttcattaccaatggtaaggaagctgatgtttatgtaattttcgctgtaacaagcgttgtaaccgatgctaagggcagaagcaagaagatgatctctgctttcatcgtagaaaaaggaactcctggatttaccttcggtaccaaggaaaataagatgggtatccgtggttcatccacatacgaactgatcttcacagactgccgtatccccaaggaaaacctgcttggtcaggaaggcaagggctttggtatcgctatgcatactctggatggcggacgtatcggtatcgctgcacaggctcttggtcttgcagagggcgctcttgacagaaccatcgcttatgtaaaggaaagaaagcagttcggcagagcaatcggtgctttccagaatacacagttccagttagctgatatggctaccaaggttcaggctgcacagtacatggtatacagagcagctatggctaaggctacccagaagagctacacagtagaagcagctatggctaagctgtatgctgcagaggttgctatggaagtaacaaccaaggctgttcagctccatggtggatatggttatatcagagagtacgacgttgagcgtatgatgagagatgccaagatcacagagatctatgaaggtacatctgaagtacagagaatggttatttccggttccctgctgaaataagaatgaaagaataaggagagataatacaatgaaaatcgttgtttgtgttaaacaggtacctgatacaaagggcggcgttaagttcaatcccgatggtacacttgacagaggtgcgatgcttactatcatgaatcctgacgataaggcaggtctggaagcagcacttagattaaaagaccagtatggcgcagaagtaactgttctgacaatgggtcttcccaaggcagaagaagttcttcgtgaggcaattgcaatgggcgctgacaagggtatccttgtaacagaccgtgttcttggtggtgctgatacctgggctacctcccagacactggcaggcgcactgcgtaaccttgagtatgacctgatcatcacaggccgtcaggctatcgatggtgataccgcacaggttggacctcagatttccgagcatcttggaattccggtaatctcctatgcacagaagatcgaagtagaaggcgacagcgtgatcgttgagcgtcagttcgatgacagatatcacgtattaaaggcaaaaatgccctgcttaattacagcacttgctgaattaaacgagccccgttatatgactcccggcggaatctttgatgcttacaaggctgacatcaccgtatggggaagagcagatctgaaggatgtagatgattccaatttaggtctgaagggttcacctacccagatcgctaaggcttccgataaggtaagaaagggagcaggcgagaaggttaaccttgatgcagcagcttcagttgattatattattgacaagttaaaagttaagcacgtgatctaattaaggatgataatggaggttccaaaatgaatattcaagaatataagggagtttttgtctttgcacagcaggtagacaatgaactcagcggaattgctttagaattagttggtaagggaaaagatcttgccaaggatttaggcacagaagtaacagcagttttagttggcagcggaatcaagggtcttgctgacgagcttgctgagtatggtgctgataaggtcatcgttgtagatgatcctgaattaaaagagtacagaacagagccttatgcacatgcactggcatctgtgatcaatgaattcaagcctgaaattttcctggtaggtgctactgcaatcggccgtgaccttggacccagagtttctgcaagaatccatacaggtctgacagcagactgtacacagcttgatatcggagatttcccgatcaacccgatccccggcaaggagcagcttcacaaccagctgttaatgacacgtcctgcattcggtggtaacacaatcgctacgatcgcatgcccgaacttccgtcctcagatggcaacagttcgtcctggtgttatgcagaaggctgagagagttcccggagcaaaggctgaggtgatcgaattcaatcccggattcacacctgacaacaagtatgttgagatcttaaagatcgttaagtccgtatctgacgtagctgatatcatggatgccaaaatccttgtatctggtggacgtggtgttggaagcgcagagaacttcaagcttcttgatgatcttgcagaggtacttggcggtactgtaagctgctcccgtgcagttgtagatgcaggctggaagccgaaggatcttcaggttggacagactggtaagaccgttcgtcctaacgtatacttcgcaatcggtatttccggagcaatccagcatgtagctggtatggaagagtctgatatcatcatcgctatcaacaaggatgagtcagctcctatcttcgatgtagctgattacggtatcgtaggagatctgaacaagatcgttcccgccctgacagagaagctgaaagcagagcttgctaacaaataagaatatctgaaacagagataaagaatgccctggtgccatgcaccggggtattctggtataaagtgtattttatatttacagaaatattgtttcagacaaaagagataaaaaagcatgaataaatttgaagaaaaaattgatattacctattctatggggatcataagagagctgtcaggaattgttgataatgaactgacagggaaccgctcatcggcgtcggatgcggagcacagggcagcagattttcttgccttggaaatgaaaaagatcggacttcagaatgtaacaaaggatgaatgtccggttgacagatggcagtatgaaaaaggtaccctgtcctttcaggatcctgaagggcatatgtgtaccgtaccccttggaggctatgcaacggaggctgatttttcacaggaaacgctgcagcttatatatgcgggaaagggaaccgaaaaagactatgaagggctggaggtttcgggcagggcagtcctgatagatattgatcagatgaatgaatggtggatcaattttccggcctatgaggcagctatccatggtgcagcggctgtgatctgctgtaatacaggaggctttggacagactggtgatgaaacgcttgtttcagaggatatctgcggtccctgcaaactgccggtattttccatagggaaaaaggcagcagggctgctgaaaggactgcaggaaaagtctaaagagggaatcagtgtctgtattgatgcaaagagcgtagtcgagcgtgataagatcagctacaatctgtggggcgaaattccaggagaatccgatgaggcgatcatagtcattaaccattatgatgcgtattacagaaccgtttttgatgatgtacagggagtcggatgggccatgggggtagcaagggcactgatagattccggatataagccgtaccggacaatccgttttgtgatgcatgcatctgaagaatggggacttattgacaataaatatgactgggcgatcggtgcatttaaacagatccacagaatacggcctgagtggaagaagaaaggctttgctgttgtgaatatggacgggggctatgtctgcaccggggaaacgaaattcaatatttcatgctgtaaggagttatatggctttgtacaggaaagcatcctaccctatacggagcatgcgaaatatacattcgaggcagatacggcgttaaccactctgacggaggatttcagctatgagcttgcagggattcccagctttgctgccggaacctatgatggctgtctggctgaccggactgtactgcattcctcctggtctggatttcagaccggctttgatgaggagctgttccgtatcattcattccatgtttctgaagctgatcctggagcttgaccggctcgcagtgagacctgttgattttaccatgcggataaaagaaatcgctgatactatgccggagggatatgcagaagggcaggaagagttcctgaagctgtccgctctggcaggggatatccacaccagcatagaagatatcaatgacaggctgcggtcagtccggcagacagaggcattaaaagaggcagccaaagacaccaatcttgccctgcatgaaatttttaaatatcttatgcagaattatgtgaaatttgactggaatgaccggatgctggtaccccatcagagatatgtggataatattaagctgctggacagggcagacagggagcttacagaaggaaacagggctggagtgatatcggcattggaggctgtggattacaattattatgcatcatatttcagcagggaaacctgcagatactttgtcttgcaggtaacagagaataccgcagatacatggggaaagggcatggtggaaaacggaaaccaggatctttatgatacgctgcggcttctggaagcagagggcggcatgatggatacgggtgtgatcaggaaaaatatttctgatgcgcggaaaatgcagacgtcttatctggagacagctcttgagaagggacgcgaacagctgccggagctttccgggctcatgaagcaggccagaatatgcctgtcagagctaggaaagcttgccgccacgtgaatgaaagatagaaaataatgagagcaatattatttatagtattcctttcgttgggaaaacatattttatgtgagtgtatctgtcagactcttaagtatcagggtcggcttattgagaagtttttcaattgccagagcagctgcaccaattaatgcaggatcctgatgaaaggatgttaatctgatctgaagtttttcaaaggctatggacagagtatgctcttttattaccttagatattatatttagtagaggttctccaatgcatgataattcatctccaataattatcatatctggattgtaagtattaactaaggatgagaggccaaagcctagaaaccaagctatttcttcaaatgatgtaacggctaaagaatcacccttcaatatagcattttttatatcgctgagagaacagtcaggggaaagaattgtgggctgtccagacgctataccaatcttaattttattttgtaatgcaagtaccgaacaatagttttcaaggcagccgcgattgccacattgacactttggaccagcataattgatgctgatatgcccaatttctccggccatgccatgagaaccatgaataatattgccgtttatggcgatacctgcaccaattccctgccctgcagcaacatatatattaacgcctgtttgcattctatatttaccaaaccaccattctgctaaagcacctgcattggcatcgtgttcgatgtaaattggtatggaaattttatgagaaaagtgctttcttatattaatattattccatccagaagtaccgctgagcattacaatatgttcttcattcttatcaataaatagtggacctggaacagaaatgccaattgcaagtattttatcgtctgattcatcaatcaaatttctgatatggtctgttataatgtttaatgtatattctgcactttgatccatattaatgtttgaagtaatactcttctcttcatctccaccaatattgaacttgctgattgtaaaggagtgtctggttaaacggagagcaaggattttgaatgcattatagcggagctgaattccaatagaacgccgacctttttttccttcaatacttcctacttcctcaacaagaccgcaggaaattaactcatttattatattggttatagtagattgttttaatcctgattcttttgctaattcagatctgtaacataatcctcgtttttgaagtagtttaattaccatgcttaaatttgtttcatgtacttcttcaagatttctgatagacaattgatatcccat

SEQ ID NO: 28 - DNA, 5544 bp, unidentified
  source 1..5544: mol_type = unassigned DNA
atgaacaagaaagtaaccgaaccttatttggtagacgcactcagctttacagaagcagaagcacgcatcatcgaggaaatgactccgttcatctcaggagagtttaccgtatcagacatcaaacgggcaaattatagtgaattgttcccttgtgaagaagacgcggccgaccgttggtttaaatgcaaattggtcttcatcacattggatgagaaaagcggtgcagagaagaaaacatctacccaagtactggtacaggccgctgacttacgcgatgctgtgaagaagttggatgaaggtatgaaaggcacaatggccgattatcagattgcatccgtagcggaaactgccattatggatgtatatccgtacagtgcagaaccgaatgacaaacctgaagtatagaaaagggagaagcaaataatagaaattgaaaattctattgtgtatacattattatattatatacgatgagtattgcagaaaacattaaaaaagtgctgaacgagttgcctcaaggagtgcaactggtagctgtttccaagtttcatcccaacgaagcgatagaagaagcttacagcgcaggacaacgtgtgttcggagaaagcaaagtacaggagatgactgccaaatacgaaagcttgccgaaagacatcgaatggcatttcatcggacatctgcaaactaacaaaatcaaatatatcataccctatgtagcactgattcatggcgtagattcctataaattactcaccgaaatcaataaacaggcagccaaggcagagcgtaccgtaaactgcctgctacaactgcacatcgcacaggaagagacgaaattcggtttcagcttcgacgaatgtcgggaaatgcttgctgccaatgagtggaaacagcttaagaacatccggatatgcggcttgatgggcatggcaacaaacacagataataccgaacaaatcaaagccgagttttgttcattaagtagcttctttcaagaagtaaaagccacatggttcgctgatgcggaatggttccgggagttgtctatgggaatgtcacacgattatcacgaagcaatcgccgcgggcagtactttagtacgtgtaggaagtaaaatatttggagaaagaatatattaataactaataactattatcatggcaacattagaaactacttttgcagggttgaaacttagaaatccgattattatcagcagttccggacttactgacagtgcagccaagaatcagaagctttatgaagccggtgcaggcgctatcgtactcaagtctctttttgaggaacaaatcatgatggaagccgactggctgggagatcctaatatgtacccggaaggaagcgattatctggtgggatatatacgcgagcacaaattaggtgaatatttgaatttaatcaaagagagcaagaaagtttgtgacattcctatcattgccagtatcaactgctatcaggatgctgattggattgaatttgccaaaaagatagaagaagccggcgcagacgctttggaggtcaatatccttgctttgcaaaccgatgtacaatacacatacggtgctttcgagcaacgccacatcgacattctgagccacatcaaaaaaacagtaaacatccctgttatcatgaaattgggagacaaccttaccaatccgatagctcttatcgaccagctttatgccaacggggtagcggcagtggtaatgttcaaccgtttctaccaaccggacattgatattgagaaaatggcccaaagcgccggaaacgtattcagtacagatgcagacttgtccaagtctttacgctggataggcattgcctccgcagcagtcaacaagctggactatgcagcatcgggcggcatacatgctcccgaaggagtagtgaaagctatcctggcaggtgcttcggcagtagaactatgcagcgcactctatctgaattcctatgctgtcattagtgaatacacccgcttcctgaacacatggatggaccgcaaaggaatggaaaatatcaatcagttcaaaggcatgctgaatgtcagcgacctgaatggtgtaaatacatttgaacgtacacaattcctgaaatacttttcatcacacaaataaaaaggagttgataccataaaaaaacggatgatgcatcttcaatgaacgcatcatccgttttttaattcataacctcgttaattcaaatccttttttatcttcatttcttcttatccaacacttcaaaacaagaattcttgctgacaaattcgggaacgatatccttcatggcagctacgattttcatctgatcataagtatagctgacatcaatcaacttctggatacgctcattcacttcatcatagtcgtactcgcgcacagtagcaatcataattttttcatgataagtgggcttagtaagttctttgacattcagcaactcctcgtacaacttctcaccatgacgcaaacccgtaaattctatcttgacatccgtacgcccggaaaggctgatcattcgcttggccaagtccacaatacgcaccggcttacccatatcgaaaatatagatctctcccccatttcccatgcttccggcttcaagtaccaaacgacaggcttcggggatagtcataaaatagcgtataatttcaggatgcgtcacagtcacagggcctccacgctgtatctgatcgcgaaaacgaggaatcaccgaaccattcgaacccagcacattaccaaaacgcgtagtgatgaactgagtgacatgtccgccctctgccagcaatttctttgccagtgactgcacatatatctcacaaatacgcttggagcatcccatcacattagtaggattcacagccttatccgtagaaatcatcacaaacttctccgcaccatacttcacagccaagtcggcaaccgttctcgtaccgtaaacatttacctgaatagactcggacacattgtcctccatcatcggcacatgcttgtaggctgccgcatggaaaatgtactgaggcttgtaacgtctgaagatttcctccatacgcgtcacattggaaatatcggcaatgatagtctcggcatcaatatccctccaacggtcttgcaactccagacggatatcatgcaaaggagtttcagcctggtccacaagaatcagtttataaggattgaaagaagccacctgacgcataatctcactaccgatagacccggcagcacctgtaatcatcactcgcttgccttccaaatgagaagcaactttgtgaatatcaatttcgataggattacgttgcagcaaatcctctatttgaatttctttcagctgggtacgatccagaaattgattgttccactcgctcaatggaggagccgtcatcagctttatgttatgtgccaacaggcggtctgccatatcagaatgtttgagcgcttccatttttgcaggagaaatgataatggtatgcacatcccggtcatccagattctcaatcaacgtgtcatcattagggaaaaccttaacccccatcatcaccttgttgatcagttccggttcatcggctatgaaaccgcgcaggcggtaatgattacgaagactgacgcgcaatgcctttgcaatatttactccggcctctttggctccataaataaacacattggcactgcgagaaccatcaaaattcaacgcttcgaagaagatcttcacaacaatgcgggaacatgccatcatggcaaaactgatgatataggacatgaacagcaccgttatgggagccacatttatgtttgtaaagcttttcaccactatactcgctatcagcagcaatgcatacgacacagtcagtgccacgaagatgcgcatgatatctacaaacgatgaaaagcgaaggacattagagtatgtacggaatgccctgaaaaatatcaggtttacggctactgtacatacaatcgttacgtctatggacgacgactccgaaaaaagactccgaaaatcatatcgcagtgcataagccagcaaactggatacaacaataataaggacatctatcaatagaacagtccatatcggtaatacctttgctgaaaggtaccgatgaaaaaagtttcgcttcatcacgtttgacagtttttgttttaggcaccgcaaagatacactattttttatcaaagcgaagaagaatttgataaaatattacatcaggttacttgctaactcactcaactggctacgctcccctttcaccaaattgacatgagcaaacaaattctgatccctcatgcgatctatcatgtagacaagcccgttggactggctatccagataaggttggtcaatttgctgaatatcacccgtaaacaccatcttggttccctctccggcacgcgttataatggttttgatttcgtgaggagtaaggttttgcgcctcgtcaatgatacaataagtctcgctcaggctacgtccgcgaataaatgccaaagcctcaataacaagctggtcacttttctgcatatcttccagacgtttcacctcgctcgaattggaagcgaactgatgcttgattacgttcaaattatcaaacaaaggttgcatgtaaggagccaccttttcattggcatcacccggcagaaaaccgagatccttattggacaatgcaacgataggacgtgccaacaaaatttgtttataatccgtcagtttgcctaaggctgcagccaatgccaacagggtcttacccgtccccgccttgccggtaagagctaccaacttgatattcggatcattcagcacttcaaaagcaaaactctgttcggcattgcgcggttcaataccataattcttcgtcttgtttacgcgacaaatggaatgggtaaaaggattgtaacgggcaagtacgctgctacggtcgctcttcaatacaaaacattcattaggatgaataatatctttaaaatcgaactcgctaatatccaatccttctttagaggaatagatacgatcgatcaaagtggggtcgacaccttcgaacacctcgttcgatttttcaaatatatctacatttattaccttatcattgatataatcctcacacagcaacccgatagaacgtgctttcatgcgaagattgacgtctttggtgacaagaatggacttcattttcggtttcttctccgtcagccagtcaacgacggacagtatctgatgatcgggaatccgttccgggaaagagttgtgcacacgcgatgaatctatcgaaccggcaaccacaaacaaacgtcctaaaccttcacccaacggagcacctttagtaaagaggttgtcgtcggtgatcatgtcaagttcccgaacaaactcacgagcattgaaatttatctgttcgtttcctttcttgaatttatcaagttcctcaagtactacaatgggaagataaatgtcattctcttgaaagttcttcaaacaattatagtcgtgaaggataacattggtatcaatcacaaaattttttttagctcccat

SEQ ID NO: 29 - DNA, 13527 bp, unidentified
  source 1..13527: mol_type = unassigned DNA
ctattgatggatgtaatccagaatctgctctgcatgaatcttggtcttgatctctttaggagtgaagattttctcgatgacgccttcttcgttgacgagataggtggtgcggaggatgccgatggtctttctgccacaggttaccttctcgccccagcagccgagttcctgcagtaaggtggtttcggtatctgcgataagagggaactgcaaacccttggtttcggcaaacttcttctgcagagcctgcttgtccttgctcacgccgataatctcgtaaccggctgctgccagctcctccttatgtgcttgcagggagcaggcttcggcagtgcatccgctggtgttagccttcggataactgtagagcactatcttgcgaccacggtagtcgcttgcctttatctcacgtccgtcctggtcaatgccaagaatctctggtattttatctcctatattcataattctatatttattaattatatgtcttgttatgatgcaaagataataaaaataatgcgaaccgatgtgattcttatgatttttaacacaaataatcgttgtttatctttctacctggaagtttaaacgaatctttcttttggataaaaaaaagaaaaatatagggatgatatttggtaatatgctgatatttacttacttttgtgtgatgaacgttcatggtatgaaacagggagcgtgatactaaacaggtaaaaaaggaagaaaatgaagaagatatttttgtttatattattctgtctttccgtatgcagcatgtcggcttacgactttctgcgagctgtgaaagatgagattccgggaggttacaacttctgggtttatacgccagtagattatttttattcgcaagagcagacaccggtcatcatctttctgcatggagccagtctttgtggaagaaatctgaataaggtgagaagatacggaccgcttgatgccatcgtcaaggggcgcgatatcgatgcgctgaccatcgttccgcagaatccgggaggagcttggaatccgaagaaaatcatggatatgctagactgggtgaagaagaattacccatgcgattctaatagggtttatgtcttgggcatgagtttgggcggttatggcaccatggatgtctgtgctacttatcccgataggatagctgccggcatggcgctgtgtggcggctgttcgtataaggatgtgagtggattgggcgatttgcctttctggattatccatggcacagcagatagggcagtaccggtcaagcaatcgaaggtggtggtagataaacttgtgaaggatggcaaggatacccgattgatatacgactggtggaagggtgccaatcacggtacccctgctcgcgtgttttatttgaagaaaacctatcagtggctcttctcgcacagtctattaaataaagatagacccgtgaaccgcaacatcagtattacgatgagtgatctgggcagagcatatggtgatgtaaaccgaaatgcccctcagcctgaactcatcgatggtccgagtgtgatcaagcaagagggaaatgaatattaaggaatcttttataataagatgttctgccatgatgtctttttatttgattaaatccctttatgcgaatgatttttatgccttgcaaagatactgttttttctaaaattagggacttagaatgggttaaatcttctaaaattaggggctaagaataggttagcctgacttaaacaagatatttttcaggtctttttctatgttatctggcgtttttttattaattttgcaatcgaaatcataaaaacaaactataatgaatacaaaaactattttaatggctatgacttgcctttgtgcattcaacagccttcagggaaatgctcaggtagcaggagggaatactttggttgctactgccattgagcagcgaagagtcactcttcgtgacagtatcttgaaccatatttctggtgcaaagattgcagcgaaatcattacagattaagaactttggagccaagaacgatggtaagaccgattgtcgcgcagcttttgccaaggccatcaagaaggcttcggcgatgaagggtgccaagattgtggtgcctgcgggtacctattatattaagggacctatcgtactggcaagcaatatctgtctggaactgcagaagggagctaccctgaagtttgcgccagaagagaagtactatcctatcgttaataccagttgggagggaactttcctctacaactattctcctctcatctatgcctatggctgtaagaatgtttctatcattggcgagggaaccatcgacggcaacgccatgactacctttgccaagtggaagcctaatcagaagaaagcgcagcagttgagccgcaagatgaatcacgaggaagtgcctgtaagtgagcgcaagtttggagatggctactggcttcgtcctcagctcgttcagctctacaactgccagggaataaccctggaaggcgtgaagatcaccaattctccattctggtgcatccatctcttgaagagtgagaatatcatctgtcgtaatttgcgatatgatgccaagcttatcaataacgacggtcttgatccagagtgttcccgaaacatcctgatagagggcattgcttttaataatggtgacgacaacgtggcaattaagagtggacgtgacaatgatggctggaatgccaagatgccatcagagaacatcatcatccgcaactgtcatttcaagggcttgcatgcggtggttatcggtagcgaaatgtcttcgggagtaagaaacgtcatcgtagagaactgcgattatgctggttattgcaagcgtggcatctttatcaagaccaatcctgatcgtggcggttttgtggagaatgtatttgtaaaaaactgtacgtttggtgatgtggaggatctcttctacgtaaccagccgttatgcaggtgagggacagacaaaccatcatttctctaccgtgaagaatatcttcgtggatggtttgaagtgtaacaacgtgagtgctgcagccttggttttgcagggtacagaggctaagcctgttactaatgtttcattcgacaagattgaagtaaaaaatgctaagacaggcatcagcttcgagaatgtgctgggtgtgaacatgggtgaatgcagcataggcggcaaggtgggaactcctacccaggatactccaaaggataaagttttcgaaagaaataacaagtaagttatttgtttttcaatctttttttgtacttttgcatcatcaatttaaatgaagaaaatccagttttttaaaggaagtaagaaaatggctgataaagatatgaaatggaagacgctctcgcagaagtatctgatagagaagccttggctcacggcacgagtggataaggtggaattgcctacgggagccattatcgatgaatattacgtgctggaatatcctgattgggtgaacaccatcgccattacgaaggacggaatgttcgtatttgtgcgccagtatcgctatgcgataggtaagacggtgaatgaactctgcgcaggagtgatagagaagggcgaggacccgatggttgctgccaagcgagagctgatggaagaaactgggttcggtggcggaaactggcagaagtggatgacgatttcggctaatccgagcactcataccaatcttacccattgctatctggctacggatgtggagcgcatggatgttcagcatcttgaccaggctgaggatatcgagattcgcctcctctccagggatgaagtgatggatatgctggagaagggagaaatctggcaaagcctgatggcggctccgctctggaagtattttgcgaaagcaaagtaagctgcagggcttcatttataaaagccaagtaaatattagacattaaacaataaacattataaagatggtaatagatttcgaaaagattgctgaggctcacttggagggcttcaagggtggacagggtaaactcgatactcgtaactatgtggatgacaaggtgaagattatgtattctaccttgcgtccgggtgcatcaactggtcttcatactcacgagggcaactgcgagattatctatgtggtaagcggcactgctactttccattatgatgatgccgtagaagaggttcgacagggacaggtgcattattgtcctatgaaccatgctcattatatggagaatctcaccgaccatgatctggtgtatctcgccattgtgcctgagcatcattaatatcccttattagggaaaatcacatcatatttctcctgaggaaaatgaaaaaagaaagtccaactcggatgcctctcttataaaaaggctccaagctggactttcgtcattcttatctctctcttttatgttgctatgctaatctttgtttatctaaaagccaactggcgggttagagtttttcacagaactcgattttctccttgtttggcccctcgatggtgaagaactttacgccgttttcccagaaaggaagaccatttacctgctgatccagcaacttgaaggttcctgcttccttcactaccaggaagagatcctctatgttctttacatcgatggcgatgtggtcgatggctccatattccatctttgcctgatggttctgataggtctcgatgatgagattgtggagctggaggaaggctacttcctcggtgccgtttactgtgcggagggctgtctcaaagcccagggcatgataaaactcaatggtcttgttgatgtcgttggtaggaatgccaatgtgctgcacgcctgttgtaaaatctttgatcttcataatgaatctgtgtttagatgattgttatgataaaacttttttgtgtattgaagatttagaagcggatgatttctgctccaatctggaaatagctctcgttgctctgaggattccacatgcccttggcataaaccggaacggtgtagttgccgagcttgaggtcgtgggaggcttgcagcgatacgtgtacgatgcctgccgtggttccaaagaagtgggcatcctcgccagctctgttcagggcgaaggctccaccaactcctgcatctaccttccagccatccttctggtagatagggtattccgcataggcgaaggtggaatatttctgcttcgtattgtcgctgttgcggtcgcgtccgaagactaccgttgaccagctcaagagcagtggaaacttctcgtcctgaaaccggtagcttaatgtagcatcgaggaatcggccggtggtatgagcagagtagttccagtattccttattattataggtggcgccaggggagaagttgtaggtgtcccacagggcgaatccccatccgccagccttcagattcagataatgattaaactccttgtaggagccttccgagttgcagccaccccaaagtcccacggtaacgtggtcattggccatcgtatagctcaggtcggtgaggaggacgatgccgtcggaaacttccatgccacgccacagatgattgttctgcacgttggctttcagatggagctgtgcctgggcatttcccaggcaagcagccatcatcaaaacaataactacaattcttttcatggttttactacaaaataaactttttgaacctaactaactatgaaccttatatacgttaactaattacttaaaccatatattaaagataaatataatttgcatataatttgggcaaataagggcttatcttgtaaattccttaggcaagaccggcatggctccgttctgggtacagacgaatgccgaaacctttactgccaattcatgagcttcctttacgctcttacccttcaggatgcttgccacgaatgcgcctgtgaatgaatcaccggcacccactgtgtctgccacttccactttcggtgtctcgataaaagaaacctcgccaggggtgaatacatagctgccgtttacgccgcaggtaagaatgagcatcttcagattgtacttgcccaagaggagccagcatttattctccaagtcgatgcccggatagccgaagatgcggcttacggtgatcaattcctcgtcgttgattttgaggatgttacatcgcttgatgctctcggtgataatctccttggtatagaagccttgacggagattgatatcgaagattttgaggattccttctccctcaggcatgtggtcgaggaagcggtagatagtgttacgggaaacctcgttgcgctgagccagtgaaccgaagcaggctgcggtgcagttctttgccaacttctccagggttggcgtgtaggggatgttgtcccaggctgctccctccttgatgtcgtagcaaggaatgccgttggcatcgagtgaaacctggacggtgcctgtagggtaggctaccttgtctatctgatagttgagatggtgatcgttgagttccttctccagttccttgcccaactcatcaccgcccattgcgctgaccgcacagctattgagtccgaactgcgaaacgtggtaagcaaagttggctggtgcgccacctagcttctttccttctggaagcacatcgaagagtgcctcaccgatacctatcactgattgtttcttttccattgtcatttttactttaagaatgttagagatgttatttgatttctgttgcaaaggtagcatttttcagctaccttcacaaagaaaaatcatctaaactttctgcaaacgttcccgcaatcgtttccaatttctgcaatcgtttgcagtatgtttcttctcttctatctttttacttcttctctccaggtttctgttcgaaatcgatgagaaccttcatgctggtttcgcgatgagtgtcgataaacttgtaggcatcatcgtattcttcgaaggcaaaacggttgcttacgagtggcttgaggttgacgatgcccttgcttacgtaatctatggctgtgagataatcttcgtggcgatacatcattgaaccgatgagtctcaactcatgctcgcccagatagaacatgctgagggctgggtccttggcaaagactgccacaaccacgatgtcgctacctttctcgatggtctccatcagcgaacggatggaaacttctacacctgctacctcgaaacctacctgatagccttcctcaccgaaaagttcctgggctgcctccttcaaggtcttcttggtgatgttgagggtgtgcttgatgccgcattcgcgagccttagccaggcggaggtcgcttacatcggtaatgagtacattcttggcgccacgagcaatgcagaactgggctatgaggttgccgatggttcctgcaccgctcacaactacattcttacccttcacatcggtgcggttgctggcatgggcaccaacggctgaaggctcaatcatggcaccgtagtcaaggctcatgccttccggcaacttagccacgcggtcgtcatctactacaaagaaatcctgtgctgcaccatctgcctggaaagcctgaacacgcaggtgctcacaaacattatactgtccgcgcttgcaagggttgcacttgccgcaaaccaactgtgggcgagcggtgatgtggtcgccaggcttgcagacggtaacttcgctgcctacagccataaccactcctgagtactcatgtccctgaaccactgggtagaaggtggctgggtgaagaccgtggtaagagtgaatctcgctaccgcagatgccgatgcgcttgatgttgacgagaacctgatgagcagttaagtctgctgcctttggttctgctacttccttgaattcgatatgctttggttctaccaatattgcctgtctcataattataatgttttgaaattgttattgttatgttggtgggatgaaagatcccgttttatctttgtattcttttctgaacccactttttaagtgggctcttttttatttcttcttattctccagatcggtcatgatctgcttgtattgcttcttgttgagcttgtagaagcagaggcatcctgcggtgacgatccacaagactcccggaatggtgctgaaggcgtggtgcatgatgttcaatacttctggattctgcacagcgttgcttacatatcctgcactgcccagggcaatggcgagaagcgatgtgccgagtgccattcctatcttgttgcccagcgagatgaaggcgtattggaatccgtcgtttctgatgcccgtcttccactcgccatactccacacagtcggggatgatggcatagatggctgtattgaagcctgagaagaagaaccacgacaaagctgagaacagatagaacatgatggcgctgccgttagggctgaagaagtacagacctatcatcgtaataccggtgaggaaagcgaagatggctgccgtgaaacccttgttgcccgtttttctgaataccaaagggaagcaggcggcacctatgatacttggcacgatgatggccatggaatagtaggagaagagtgttgctgaatcttccacataagtgaaatagtagagcatgtcggcgttgcgtccgtagtggatgaaaccgaagagcaactgtcctaagagggcgagcagatagggcttgttcttcatcacggaacgaagctgcacctttaatgggagcttctgtcccacaggaacttctaccacttccttggtcttatggaagcagaacagatggcaggcggcgaagatgatgccgtagagtactgccactgccagataaccatatttggtgtcgcctgcgccaaaccaactgatgagcggaacggttacgatgttgattactccgatggccatcatggcgctcaccgaacggctggtgttgagcttggctctctcatcgatgtcttgtgtcatggctccgcagagtgtgccgtaaggcaggttcacgcaggtatatcccagcaccaggatgcagtaggttactgccatatagataatcttggcggtctggctccattccggatgtgcccagaaggtgagtatcagtaccagtgccgtgataggagctccgaagagcagccatgggcggaatcgtccccatcgggtgtgggtcttatcggtaagtgtgccgatgatggggtcgttgatggcgtcccagaatcgggaaacaagcatcagggttgctacggcactcatgctgattccgaacacatcggtgtagaaaatcatgaggaagttgcccacgaacatccaactgaagttgcagcccacatcgcccattccataggcgagcttactgatgaagggaacctttccctgtgaattgttctctagcgaagtgttcgcttgaaatttagaatcttgttccatatttcttttttaggtttgattgtgatacttaatgttgtttattctttgtcttgtgaagaaatagagcgatttgagaaatcgtttttccttttcacgctgcaaagatagaatgtttttgctggtaaaacaagaaaaaaaacgattcttttttcgcaaccgttcccgcaaccgttcccattttccgcaaccgttcccaaaaagatttctcagttttttgttgttgctttcatagaaaataagtatctttgcagtcacatttaacaagaaagaaaaagtgatatggcaaaatatgtaaccatcatggatattgcaagggagttgggaatttccaagtccaccgtttcgcgtgctctttcgggagatacgggtaatgtgaagacggataccttgcagaagatattggcaactgccgagcggatgggctatcatcgcaacgaactggctgtgaactttcgccagcagagtactcataacatcggcatcatcatccccgaaatcgtaacaacgttctatatgacctttatcaatgatgctcaagccatcttgcgcaagcaggggtataaggtaatgattgccatctctaacgagaatcctgagcaggagagagagagcattctgatgatggagcagctgcgtgtggatggcatcctgatgagtgcatgcgataaggagcataatgtggacctatataataaggtgatagaaaggggcattcccattgtgtttttcgatagaacggtggagaaggtaaaggcttcacaggtgcacatggacgattacatcatgtcgtttttcatggtggagactttgttgcgcaaggggtataagcatattattcatatcccgggacctgcttatatccgaaacagctatgaacgattgaggggttatcgggatgcgctggaaaagtttcatatagagtatcaggcgcaagatgtcttgtcgccagcattgtcggctgaagagggtagttgggtgatggagcgtttcctggagaagaatgtgccctttgatgcggtatttggctttacggagactgctgtgttgggagctaagagtgctatccagaagcgtggcttgcgcattccggaggatgtggcgctttgctgcatgtctggcacagctctggctactttggttcatcctcagttgacggtagtggagcagcctattgagaaaatggcgcaggaaagttgccgactgctgctggagcatattgccgatggttatagaaggatagaggaaattgcattgagaggtgaaacagtgataagggaatctacttaataaaggtatcggcttcaggaatctgcataaaagaagctgtttcagaaaacagtgtaaaaggaagctgtttttgaaaacagtgtaaaagaaacgggtgtatcatctatattattgaatgatacacccgttttctatttctttatcttaagcttttaaacttaatctatttccttatcttaatcttcctcttcttcttcattctccagcaagtcggtgccgaggtgagtggtctgttcacgcttcaaacgatcgcgcacttccttaggcttggtggcgtaggtaatcattcggatagaatcgttatagcttacgtacttccagagccagttgagcattaccattactttgttctttacgccaaggatagagcggaggtgaactaccagccacaatacccaggcaaagaagccctggctgtggaacttgcctagttctactacagccttgtgtcttccgatggtagccatagaacccaggttcttgtagcggaaaggcttgagttgggaatcagtggctccctcggcaatcttctggatattcttagccaggagtgctgcctgctgaatggctacctgtgccaactgtggatgaccgccaggataagctgggtctgtggtctggatacactggtcgccgatggcgaagagaccgtccatgccagggatgcggttgaattcatctactacgattcggaaaccacggcccagatggtcaccatcaatacccgtgataggctgtgcctttacacctgatacccagaggaaggtgcgggtaggaatctcctgaccatccttcatcagtaccttgtggtccttgtagtcggttaccatcttgccaaactgcacatccacacccatgcttgtgaggaaatcgtatgctttcttagaagagtcctgtgacattccggcgagcagtctgtcgcccgcttccagaagatagatgtgcatcagagatgagtccatatccggataatcataaggaatcacgtagcgcttcatttcagaaagggctccggcaatctctacacctgtggcaccaccgcctacaatgaccacgttcaggagttcctgtcgctcctcttctgtggcacaggtcaatgcacgctccaggttactcagcacggcgttgcgcaatcccattgcctctgaaacggtcttcatcggaatagcccacttctcgatgttggcattgccatagaaattggtagtggttcctgctgcgaacaccaggtaatcgtactcaatcttaccgatggaagtctgcagaatcttcttgtctgggaatacggctctcgcctctgccatgcggaagtagaagttcttgcgcttgcggaaaatctggcggaaagggaaggagatggagcttgggtcgatacctgctgaggctatctgatagataagtggagggaactgatggaagttattcttatcgatcaacaccacctgcaggtttgaattgcagaggtcttctgccaaacgaagaccaccgagtccgccacctacgataactactctcttcaactgatttctcttgatattaatgctcataactactgctgtttttacatattaattacatatatttgctgaaaattctgttctctataaggcgtaatgcctggttcttgctgaaaattcgattgcaaaggtacaacattttgatgaggtggcaaaggaagatgggtagaaatatgggattgaagattgttgcaatcgttctctttttagattcaggaaaatgaagttgtaaaatgtaatattcagatagcattttatgagcactttttttgagaaatgttgtcggtttaaaggaaaagttgtatatttgcatcgacaattttaaaagacgaacgaatttttataaaaacatcatgatgaaacatgtaacaattaaggatatagcccattcgctctgcatctcggtttctaccgtttccagggcgttgacggatgacaagaacattcgcaaggagacgcgcgagatggtgattgaggaggcaaaacgactcggctacaagcgcaatccggtggcgatgaacctgaagatggggcgtacgaacaccattggtgtcatcgtgccggagatgcacactccttatgcttcgcaggtgattaacggaatacaggaggtactttacaagaagaaccagaaggtgatgattgccgagagcgatgagaaaccggagcgggagttggagaacctgaagatgatggagcagtttatggtggatggtctgattgtgagcctctgcagctaccgcaagaatatcgaaatgtatcagcagttggcagcagatggtatggcgatagtcttctacgaccgcattccatacggattgaaaatgccgcaggtgatggtggatgataatgtagattcttatttcatggtggagcatctgattcgcctgggcaggaagcgcatcgtctatctgcagggacccgacgacatttataatgcctatcagcgaggcttgggttatcgtgaggcgatggagaaattccatcttttcgacccggagctgattgtgaagacgggaatgaccttcaagaatggagctgatgccatcgaccgtcttatatataataaggtggaatttgatgccgtcttcgcctttactgatactttggcgataggtgcgcagaatcgactccgtgccttgggtagacgggtgccggaagagattttcgtggctggtttttcgggtaccgaactatctaccatcgtatctcctcagattactactatggagcctccgttggaggagatgggcagaaaggcggcagaactggtgatggagaaaatcaataatccagagatggaagatagacaggtggtgctgaagaccacgatgaaatgtagagaatctacgggagaataa

SEQ ID NO: 30 - DNA, 9013 bp, unidentified
  source 1..9013: mol_type = unassigned DNA
ctatttccattggaaaagaacaattccaccggctgcgatcaacaatccaatcagttttctccatgaaaatggttctttttccattccgaacattccggatagtgagatcagataagcaaccgccagctgggaaacaacaatgaaaagtgctgatcttgcaggtcccagagcatccacacttttaatgacagtccatgtgatccctgctccgatcacacctcccagcaacatatagcgcggctggacttccataagtgctgcaacagagtctcttcctgttgccagccagacaaacagacacaaaaaaaatgctgaaagttgcacccacccattgcttacccagattcctgtcgtctttgtcacctgcgcgttgaacactccctgtacactcatcagcgcacctgatagcagtgcaatcaaaaaaccggccataagctcatacctccctatagaaatagtataagcaaatgccggcttttttatgtataaaatttcttatgcaagtgcacgtttcagtttttcgatcatctcatcaatatgcttttcttctacgatcagcggtggaacaaaacggatcacatttccctgagcctgaataatcagaagtccttcctcaattgtcttcttattcacttcggccaacggttttgtgatctcgattccctgcatcagaccttttccttttcttctgactacacagtccagttcatccacaagctcatccagtttttttgtcagatatggagcaacctgatttacatgtcctacaatatcttcacgttcaaaaatctcgatcactgtcttaacagctgtacatgccagtggatttcctccataagttgcgccgtgatctcccggctgaagagaatattttgccacttcttccgtcattgcaaatgcaccgaccggaattccgtttccgattgctttcgccatagtcagaatatccggttttacaccaaacccctgccatgcaaacatatttccggttcttcccattccgcactgcacttcatcacagatcatcaggattccattttcatcacagatcttacggattccttccataaattcctgtgtcgcaagattgattccgccttcgccctgcagcggttccaaaataattgcacaagtcttatcatttaccagtgctttcacactgtcaagatcattaaactctgcaaatcttacacctggaacaaccggctcaaacggttcacgataagaatcatgtcctgtcacagaaactgctccgaagcttcttccatggaaagaattctgcatcgcgataaattcatatcttcctgtcttctttgtgtaagcatatcttcttgccgctttcagagcaccttcatttgcctctccgccactgtttgtaaagaaaactctgtccattccggaaatgcggtttaattcttttgctgcctctccacagctctcatggaaataaagatttgatgtatggtataacttatcaatctgatcttttaatgcctgattcagttctttattatcatatccaagtcctgacacagcaaatcctgctgcaaagtcaagatattcttttccttctgtatcatacagatacattccttctccgtgatccagtgcaatcggaaatcgattgtatacatggatcaggttctcttctgccgcctgtattttactgttcaccatcataatacctgctttctttctgatttaaaattgctgtaccgattcctttgtttgtaaagatttcaagcaacagacaatgtgggattcttccatccagaatatgaacacgggatacaccactttcaatcgcatcaatacaattctgaagctttggaagcattccacctccaatatatccgtcagcaatcaattccttggcttctttgacctccagttcagaaatcaatgtagaaggatcttttggatctttataaacaccttcaatatctgtcaggaatgcaagcttctcaactttcattgcacgggcgattgcgcaagctgcatcatcagcattgatattataagtattgtattcctcatccataccaaccgggcaaatgatcggaaggaaatctttttccagaaggtcatacaaaatctctgcatttactttcttgacatcacctacgaatccgatatcctgtccgtctgaaaacttcttctcaacctggagaagatttccatcctttccactgattccgatcgcacgcacgccaagactctctacaagctgtacaagactcttattcacgcgtcccagaaccatctcagcaatctccattgtctctgtatctgtcactcgaagtccgttgataaactctgcttcttttccgacttttccaacccacttgctgatttccttaccaccgccatgcacgatgatcggtttgaatccacacagtttcagaagtgtaacatcctcgattactctgcgtttcagactttcatccaccatggcacttccgccatattttactacgatgattttacggttaaagcgctggatataaggcagtgcctcgatcagcacctgcgctttatccagatatttctgcatattgcttgtcattttttctgtctcccttttttatcttttcagcgtctttaaagaaataataatttctctataaatcaacttctgtaatccgcattgatatcaatgtatccatgtgtcaggtcacagccccacgcagtagcttctgcatctccggcttttaagtcagcaatggctgtcactttttcctgtgaaagaatctctgttgccttttcttcgctataatctgttgctgttccattagcaatgatctgaagctttcctgcacagctctcgaagaaaagatctacctgctccggatcaaactgcgctccggaatatcccattgcacaaaggattcttccccagtttgcatcgtgtcctgcgattgcagcctttgtaagattcgagcatacaacagattttgcaagaacttttgcctgctcttttgtctgtgctccgacaacctttacttcaaaaagtgctgttgcaccttctccgtctcccgccattgccttcgcaagtgtctcatttacataatgaagagcctctttgaacgcatcgaattccggtgtgccttctttgatcttctcatttccggccattccattcgcgagaagaagtgctgtatcatttgttgaagtatctccgtcaacagagatcatgttataagtatcctcaacatcactgctcattgccgcctgaagtgcttttttggaaatttttgcatccgttgtaataaatgcaagcattgtacacatattcggatgaatcattccggaacctttcgccattcctccgatcgttacttctgtatctcctgccataaatgtaaccgcaacttcttttttcttcgtatcagttgtcatgatcgcttttgcagcttctgttccacttgccagatcagctttctttcccttggcaagttctgtaattccggctttgatcttatcgattgggatctgcattccgataactcctgtagaacctacaagaacacctttctcatcgattccaagaacttttcctgcctcttttgctgtctcttcacagtatttcataccttcctctccggtacacgcatttgcaattccggagtttacaataactgcctgtgatttctgtttgctctctacaatctgtctgtcccacttcaccggagctgcctttactacattcgttgtaaatgttccggcgactttacacggtttctcactgtaaatgatcgccatatctgtacgtccctggtatttgattcctgctgctgttgctgctgcttcaaatccttttgctgcggtaactccgccttcgataatcttcatatgatctgcttccttcctactgttcattaaatgctgtaatattttcttcatttaaaataaaatcataataattcacatcaagtcgttccgtccatccgattgtattccaaaatgcatttcctacattattctgtgcaaatgcgatcaggcagactttattaattttctcttcctgaagagctttcatgctatgcacgaccatgtcttttccgattccatgtcttcggtatgcctcattcacacatacatgatagagacttccttgtcttccatcatgaccacagagaatacttccgacgatttttccttctttcactgcgacaaaactcgttgtcggattccgtcgcagaaaacgttcgacaccttctttcgaatcatcgatactgcgaattccgaatccccggatcttcttccacaatttatatacttcatcataatcctctattgtcattacacgtatcatacataccacctttatcgttactgttcacacgatgtgcgaccagcaaccctttatctcactgttgtcctcactattatgtgatttagcaactttgttgcttctatatttatatatcttatgggaacatcggaacaagttcaagtccttcactctccggaagaccaaacagcagattcatattctgaaccgcctgtcctgcggcaccttttacaaggttatcaatagctcccatcataatgatccgtcctgttctttcatcgatcttaaatccaatgtctacatagttgcttccttctacccatttggtctccggacactgatctttctccagaacacgaacaaatttctcatctgcataatatttatcataaattgcttttacttcttcgtatgtaacttttttcgtaagctttgcatactctgtcgcaagaattccacgattcattggaactaaatgcggtgtaaagttcaatacaactttctctcctgctgcatatccgagctgttcttcaatctccggtgtatggcgatgtgtagctactccatatgctttgatattttcattcacttcacagtaaagattcggaagctttgctcctcttcctgctcctgaagttccagacttcgcatcgatgatcagagtgctcatatcgatcagtccttcctttgcaagcggatatgctgtcaggatagaacatgttgtataacatcccggattggccacgatacgtgcatcctttactttgtctcggttaatctcgcacaatccatagactgcttcatcaatatactgcggtgctttgtgttcgattttataccactcttcgtaaaccttcacatctttcagacggaaatctgcactgagatcaatgatctttgtctttgaaaggatttcttcattgatcagagatgcacacagtccctgcggggttgctgtgaagatcacatctacctgctctgcaagttcatccatgttatcatccatgcattttgcatctacaatctgaaacatgtttctatatacatctgcatatttctgatctacataacttctggatccgtaccagacaacctctgcatctttatgtcccatcaatattcttacgagctcgccgcctgcataaccggttgctccaataattccgaccttaatcatcgttctcaagtcctttcttttaccatttccatgggagccaatagaagttccctgggaattgcatatttactgtactgtggtaacgtgttaccgcaatcatttctccttataatataccactttaatcgggatgtaaagtatttcctgaaattgaatgtataaaaatacactttccctgctttacttgcataataatacatctttcatgtataatatgcaagcgttttttcaaaaaagtttgtagatagtattttcctactatataaagatatataaaaaggcgatgatattggcctaaatatttttttgactttcttcttatttcattcttttcatcatatcttgtatattttttcttatagcctattgttttatgcattctttttgtttattatgtgtgtctttatgcattttattcatttttttaaaataatacttgtataattataaaatgtggtgtatagtatgttttagcttgttaaagcagaaatctttagaactcaagaaactgagaaaacagaaatttataaaatacattcaggaggcaataaaatgagtaaagaaaaagttgtattagcatattcaggtggtcttgatactacagcaattatcccgtggctgaaagaaacatttaactatgacgttatctgctgttgcatcgattgtggacagggagaagaactggacgaactggatgaaagagcaaaactttccggagcttctaaattatatattgaaaatatcattgatgaattctgtgatgacttcatcgttccttgtgtaaaggccggagctgtttatgagaacaaataccttctcggaacttccatggctcgtccggcaatcgctaagaaactggttgagattgcacgtaaagcaggcgctgttgctatctgccatggtgcaacaggaaaaggaaatgaccagatccgtttcgagcttggtatcaaagctcttgctccggacattaagatcatcgctccatggcgtatgacagatgtatggacaatgcagtcccgtgaagacgagattgattactgtaaagctcatggaattgatcttccatttgacgcaaagcacagctacagccgtgaccgtaacctgtggcacatcagccatgaaggacttgaacttgagaatccggcaaatgagccaaactacgatgatcttctcgtactgagcacaacaccagagaaagctccggataaagatgaatacgttacaatgacatttgaagcaggtgttcctaagagcgtaaacggaaaagagatgaaagtttctgaaatcatcacagagctgaaccgtctcggtggaaaacatggaatcggaatcatcgatatcgttgaaaaccgtgttgtcggaatgaaatcccgtggtgtttatgagactcctggtggaacaattcttatggctgcgcatgatcagctcgaagaactcgttcttgaccgtgctacatatgaagttaagaaagatcttggaaataaatttgctcagatcgtatacgaaggaaaatggtatacaccacttcgtgaagcaatccaggcatttgttgatgttacacagcagtatgtaacaggagaagttaagttccgtctctataaaggaaatatcatccgtgccggagagacatctccatactcactgtacagcgaatcccttgcaagcttcacaacaggagatctgtatgatcaccatgacgctgacggattcatcaacctgttcggacttcctctgaaagttcgtgctatgaaaatgcaggaagtagaatcacagaagaagtaagaggaatttgttgaacttggattcatgcaattaaatcgaatactttctttagaatgatacgcaaagacagtactactattgccataggcaccggcccgctctacctcatccctttgaaagtatgtaacataaaagccaaaacagttaccgtgtgtggtgcctgttttggcttttattaacatactgaacaaagtgtattcggaacgctcctgccttacatgtgcctatggcaacagtagtactgtccttgctcacataactcaaaataaagatttctgttccaatcggagtgaatccagaaaacaaatacgagcatcaaaacgtaaagtgaaaaagaaacgttatcaactacgattatgtttcagaaattatctctcaccccaaagttcgtccgcttttgttttccactctttggcgtaatgttcgcattttccgcaaaggtgttctacagtttccggggactggaggtctgttgattttgcgccggtttcgtgtaccatctgctgcagtttttctggattttcgagcattgggcacgggcgcagatgattgttgttaaatggctgattgttatggtaagccataaacagtggctggcgtaatgcatcaagcacgctcacttctttaatgtttgcacttgaataatggataaatacgcatggctctgcatctccatttgcattaatatggaagtaatttcttccgccggcaatacatcctcctacaaactctccatcattctggaaatcgaatgcaaagagctgttttccacctgtcaatccacggatctcacggatgcggtgatacatgtattctctctgctcttttgttggaagcagatccagtgctgcatcatttccaaccggcatataatggaaataccatgcataacgacatcctttttcaatgatcatatcaaggaatttgtcggatgttactgtgtcaatgttagcgcgtgtatagcagattgatgttccaaagatcaatccgtatgttttcaaaagatccattgcatgcataactttctgataaacgccttttccacggcggccgtcgttgacttcctcatatccttccagacttatggacaatgacagattaccaacacgctgcatctcctggcagaactcttcatctacaagtgttccgtttgtaaatgcgtggaatacgcagtcgttgtgtttctcgcacaaacggatgacatctttctttctcacgagaggctctccgcctgtcagcatataaagataaattccaagttcttttccctgtgtgatcacacgatccatatcttcaaaagaaaggttcagaagatgtccgtactctgctgcccagcatccggtacatttcagattacatgcgctggttggatccatcagaatcagccatggaatgttacactgatatttttcacgtgactcgtgcattaactttgttccataaagcattgcatcaaatccaagattcaatgctgttgtcttaaggacatgcggatccacttcatcaagaagtctgttcagatactgaacccatttgttgtccggatcctgaatcatctttcttgcagcttcataagaccctggctggaaacgatcttttgcaaaattttctgtaagatctacaagcttaagaagtgctttcgttctatcatctgtcttgttcatatatttaagtactttatctgctgccaaactaaatgctgctctttctgcctgaaattttaatcctgccatttttttcaccttttccttacttttcaa

SEQ ID NO: 31 - DNA, 8913 bp, unidentified
  source 1..8913: mol_type = unassigned DNA
tcaaagctcctgcggcatctgccatgcttcgatatcggtatgcagcagatggtgagaacgttcggacagcggctttccgagatactctttgtaaagcgcctgcacatcggggttttcatgcgagaaacgaaggagcatcttgtgatcaagtctccacaggacatttccgcgcgcctcggcgcactcctcgccgtcgtgaatcggctggccgccgcctgcgcagccgccggggcaggccatgacctcaacgaagtcatactgcacgtggccggaggcaatcgcctccatgagcttcctggtgttgccgagtccactgaccaccgccgtgcggaccgtgcctgcaccgggaacgtcgaaattcgcttccttccagccctgcatgccgcgcacagcggtaaaggcatcggggtccggattttcaccggtcacaagatagtacgcgctgcgaagcgccgcgtccatgacgccgccggtcgcgccgaagatcaccgccgcgcccgtaccggagccgagcggcgaatcgaagctgccctcctccaaggccgccgggtcgatcatcgagcagcggagcatccgcacgagctcgcgcgtggtgatgaccacgtcgacatccgcgtcgccgcaggcatctttcatcgtgggaagcgccgcctccgcctttttggacgtgcacggcatgacagagatgacacggagatttttgggatcgatgccgattttttcggcaaaatagctcttagccaccgcaccgaacatctgctgcggcgatttcgcggtagagaggttctttgcaaactgcggaaactgcccctttacgaaccgcacccagccgggacagcaggaggtaaacatcggccaggaatatgcatccttatgcgtaaagcgctcgatgaactcgctgccctcttccatgatggtgaggtcggcgctgaaattggtgtcgaatacataatcaaagcccagctcccgcagcgcggaggccagaacgcccggcgcagcctgttcgggtgagagaccaaaatattctgtccacgccgcgcggacggcaggtgcaacctgtacaacggtcgtgagggtgggatcggcgagcatgcggtagacgtggtcggtatcgtcgcgttcctccaatgcaccgaccggacagtgggtcacacactggccgcaataggtgcagagggactgggaaaggctgtccgcctttgccgtaccgacggtcgtccgggagccggtgccgaccagatcccagatatgcacgccctgcaccttatcgcacacctgcacgcagcgcatgcacttgacgcagcggttttcaaagcgcaaaatgggcgcggagtagtcgaccggcgccggacgcagctttttctgatagggcgcgccgagcagattatagtcgttggcgagcttctgcagcttgcagttgccgctgcgcgtacacttgacgcagtttacctcgtgctggctgagaagaagctggagattcacgcgccgcgtcatgcgcaccttctgagaattcgtgtggacgaccataccctcgtgaacctcattgtcgcacgcggcaacaagcgtatcctgtccctcgacctcgaccatgcagatgcggcaggcgccgatctcgttgaggtccttgagatagcagagcgttggaatgtcaatattggccgcgcgtgccgcttccagaatgctggtcccctccggcacgcagacgggtttgccgttaatgatcaagcttaccatcgttcgatcctccctcccttgaagatgccgtagccgaagtggtcgcagcgcaggcagcggccgctttccgcgcaggcctcctcatgcgtcatgccgcattcgatgtcttcaaaatcgcatttacgctgggctgcctcgcgctctttggtgttgacgcgcccgcgcgcgggacagacgtccagatgcggcgctggaatttccacatcggtgcgaatttcatggtggaagccgagctgttcatcgatgttggctgccgcgaccttgcccgccgcaattgcacggatggcggtagcagggccggtcacgcagtcgccgccggcaaagacgttttccatgttgtcgatctggctggagctttcagccataaacgttccccttttgatggggataccggcctgctcaaagcccgcgatctccacgccctgcccgatggcgacgacgatgatgtcagccggaatgcgttcttcgggctggtctgccgcgtccgggcggggtctgccggacttgtcggcaaggccgatgatctgcggctgcacccagagggcggcagcctcgcccgcttcgtttgcctcgatgcgcaccggcgcagaaagctcgcggatctccgcaccctcggcaattgcgccctgcacctcgtcgggaagcgcagtcatgtccgcaattctgcggcgatagacgcaggtgacgctggcagcgcccagacgcacggagcttcttgtcacgtccatcgccacgttgccgccgccgatgaccacgacgcgcttgctggcgaagtccggcatgatgtcgtcgccgatggcgcgcagcatttcgacggcagacatgacgtttttgctgtcctcgccgggaatgccggttttcttgtccgtatgcgcgccgatggcgacatacaggcagtcgtaatccttgtgcagctgttcaaaggagatgtcttttccgaccgtcacttcggtatgtacctccacgccggtggacagaatggaggcaatttccgcgtccagcttttcgcgcgggaagcggtaggccgggatgccgtagcggagcataccgccgagccgcttcttttcttcaaaaatcgtcacgctgtggcccataaggcgcagataatacgcgcaggaaagcccgctcgggccgccgccgatgatggcgacgcgtttgccggtcgcctccccgcaggcaggattcgggacattgcccgcatgatcgactgcatagcgcttgaggccccggatattgatgggcgcgtcgaccatgttgcggcggcagcgcgcctcgcacgggtgctcgcagatgtacgcgcaggcggtcggcatggggttatccttgcggatcaggcgcaccgcgtcggcgtaccgtccctcgcgcaccagcgcgacatagcccggcacgtcaacgcccgcaggacagagcgacacgcagggcacggggttctgaagcgaggcgaggcaccggtggtgctgcacatggttcacatagtcgtcccggaagccctcaaagccgctcaggaccagctgcgctgcgtcgcgtccgatggcgcagtcagcagaggcgacgatggcccgcgccgttttttcgatggtgtcgatggtcagcatggtgcccgttccgtcgagcacctgccccatcagcgcggcaagctggccgagtccaatgcggcagggcacgcatttgccgcacgactgcgcgtggcacagctgcaaaaatgtcagcgacatatcgatcggacacaggcccggaggactggacgcgatcctgcgttccatgtccttgtagaggcggtcgacgaccgtctgggccttgcttgcggttttgatatccaatctgctcaaggctggctcactccttctgcttttctgatctttttattctattttttgatataaatagcattttttaatccaaaagaatcatagcatatccaccggataccggtcaatacttatcgataaattcttatcaaaccgttcattcttcttttgcggaccgtctattcgtaatttgatatgtcccatttcaaaagccggaggcagccctaatacgcgccggagcagcggcgttgttttgcgccgctgctcgttttgtttattcagcctgtacgttttgctcggtatagatctttgtgtcatccttatgaactgtgttcagtttgggctccgccgtcttctgcccaggaataaaaatgggtcgagtgcgtatccgacgccagcggtgctgggtcgaggcggaagccggagatcccaagcgcctcttccgggcgaacccagggttttccctgtatggcgctcgtttcctcatgtgtcagaagcccccggtagatcgtcagtgcccgccggtaatagccgtcgcggatgcaggtctcctcctcgccgtcattcagcaggtgcaggatcagcggcagcatctgtgctgcgtaggcaacagacgcagagtgtgcgaccgcgcccggaatatttgcaacacagtaatgcacaatgccgtctacaatgtaccgcggatcttcatgcgtggtcgcgcggctggtctcgatcgcgcccggctcgtcgttggaaatatccacgatcactgagcccttttccatgagggaaagcatgtttcgggtgatgaggaactctttgttctccttctgccatttgacacagttgagaacgatatccgttttcggcaattcctccgcaatatgcgcccgtgagcagcgcctaacgcggacgcggccattatactgtgctgagagcgcacggagcctgtgcatatttctggccatgaccgtacagttggcgccgagcgcctgtaagacctgcagagcgcctctgccgacttttccgcttccgagaatcagcgcatggatgcccggctcccccgcaaagccgccgacatattttccctttccgccgtggatggtcagcagcgattccagcccgaacagcgccccctgcttccccgctgcctcacagttcggggagccatatcgatgggaatcctccgccgtaaatgcaatgcagccgcttttcatcagcgcgtcgacctcctccggatttgccgccggatgcaggcagccgagaagcagctgccctgtccggatcagcggccattcctccggcgtaaactccttgaccttggcgaccatatcgcatactttgaacagctcctgcacagagtctgtcagaagcgcccccgcagattcatacgcttcatccgaaaaaccggctcgttctccgcagccgcgctgtgcataaacggtgtgtcctgcgctcgtgatggtctccacctctttcggcgtacagatcactcgattttcgcccttcttcgtctcacgcaaaattcccaaaatcatatgctgctcctcctttcatcaaattcttttcctgtcgtgctgtgtttttctatctttatcatacaagaaaagtgacggattcgcaacactaataatacaaagtctcattttaatttatgcatcaggccgtcgctcgcgtatcacaataaaaaagcgcaggatccgggcgattctccgctcaaatcctgcacctttcgggtttctgttccgtgcttacttttcgtgcccggccttctggcacgccggacaaacgccttcaaaaatcattctgtgccgcgtgatccgatacccggattccgctgcgatcgttttgtccggcgttgggtcgtatgaaaacggggcatcacagactgcgccgcagcccgtgcagatcaggtgatagtgaaagtctgtcctgccgtcataccgatccgctcccggaacctttacatgcgtgatctgcccctcctcagaaaggatattcagattccgataaaccgttccgcggctgattctcgggtcttttgcacggatctccagatagatctgatccgcgctcggatggtcatggtgttcctgtaccgcttccagaacaattttacgctgccgtgtgtttcggtactgcatcttgcttccgcctgccctcatatcattcaatttcatcgtctgccatgaaaaatccggactttccgcccttatccatgagcagatatatgaattgtaccgcaaaatatatcggctgtcaacattccagtaattgcggtttttggcagcagatttcctatcgttttcccctcttgtcaaacgaaactgaatcagatatacttaaaatagaggagagaaaccgaagttccggaacaaatcctgcaacggagcctctgttttcctgtctataaacagagcgacaaacgaaaggagattacactatgaaaaaggatcgccaacttgtaattctgcttgccgccctgctggttctgatttttttatccagctgtgccgcgggcaaaaacacgtccatgacccctgcggccactgattttgcctacgccgaggactattcctaaagcaaaaaaggctgccgccgaggctgctgcaaaggagcaggaaccatgatcaggcggagcaagactactgttttttataaatcgcttgctatcaggactcggtatctattataatataaccaccacaggaaacccatatgaaagcagctttgccccgcctgcacccgccgccattccgacgtgaatatgcaaggaggtattgtctatgagtacacaagccatccgttccagagagaatcctaatctcgaactcattgcattccatggtcattttgcaacccggcattcccataacagtcattaccttgacatcacacggctgaagcacgaatacagtctggcgcacgacactgcgcttgcgctcgcgaaccattacatctacgaaaagtcgatcgacaccatcatctgcatggatggcagcgaggtcatcggcgcgttcctggcccgacagctgacgcagaaaattttgttctctgtcaacaataacaagagcatctgtgtcgtcacaccggaatacgactccaacggccagcttctgttccgcgaaaatctggttcccatgatccatggcagaaacatgcttttattgatctcgacagtcaattccggaaaaactgcgcggcgcgcccttgattgtatccaatattatggcggcaaaacgcagggcattgcggcggttttcagcgcgatcccagagctggacggcatcccggtattaagtctgttcacgcctgccgatatcccgggctatgaaacctatccaaccggcgagtgccggatgtgcaaagccgggcagcgaattgacgcactggcgaacagctatggtctttccaccttccgatgatccttcagacgggcagcgcacccggccttcgtgtccgggtgcgctgtttatatgatcagaaaacatcttttgcgaaaccgctgacgaaaccgtttgtcagcccttgtcggcggcaagggtctggtcaatgagtttctgcagcgtctccgcctgctttttttccgtgatggcgcctacgatggggtcacccacgatgttgccgttgcggtccaccacataggtggtgggataggcgaagatgttggttgtgaattttccggcctcgccgtcggaagcgaaatacacgttctgataggttgcgcccttcttggccagcacatccttcgcctccgagattgccgtttcgtcgccgtcaagcgtaaacgtattgacgccgatgagcgtgccgcccttctctgcgagctctttgttcagtgcgtccagctcggcaagctcacccacgcagggattgcaggtggtgaaccagaaattcaccacggtgacagcgttgccggagaacagctcatcgctcttcaccggattcccatccaagtctttgccctcaaatgcggggaacttctgcatgctgccgtcgtcgggcggattggtcatatcgctgcctgcgggcacgctcatatcgccgtccacggattcctgcatgatctcggggtacttgttttccagctcggtcagcttgttttcgatattgctgatctccgtggccgattccttcagcatcttatactcttcgtcggtgaactggtctttggctctctcgatggtatccagcaggaaatcaccatagtttttgccgtcctccaccatggccatgcccttgtcggcctccatgaaaaccttttcccagagcgcagtgttctgcgacaggatcgtgttctcctgttccatcagctttttgtgcagggcaagtgcctcctcggcgtttttcggctcgccggtcatggcagagctgtctccgctcatatctgccattttgtcgttgtcctttgtgccgcaggccgccaaagacagcaccagcagggccgccagcagcagcgcagtaaactttttaaacttcattttgattcctccgtattgatttttgttgtattttctttcccgttgccaaagccgcagcggaagcacacggcgtttgtgggacaggcgcggatgcacatcccgcagcggatgcattcgggatggtttggcgtcttcgtcacgtccacgtccatcttgcaggctttggcgcattttccgcaggagacgcacttgttcttgtccaccttcatctggaacagcgagaccttgttaaaaagcgcatagaatgcgcccagcgggcacagccacttgcagaagggacggtagaacagcacgctcagtacgatcaccgccagcaggatgccgaatttccatgtaaacaggctgcccagtgccgcccggatgccggaattggcaagggacagcgggatagccccctccagcacgccctgggggcagaggtatttgcagaagaatgggtctcccatgcccacatcgttcacaaggaacgccggcagcaggaataccatcaccagcaaaacggcatatttcagatatcgcaggggcttgagctttcttgtggagagtttcttggtggggatcttgtgcagcagctcctgaaaccagccgaagggacagaggaagccgcagataaagcgtccaagcaggactcccagcagaataagaaaccccgtgatatagtaggaaaagctgaacttcgatgagcccaccactgcctgaaacgccccgatggggcaggccccggacgccgccgggcaggagtagcagttgagtcccggcacgcagacggtcttccccgcgccctgatacagtccgcccttgagaaagttcggcagatgcaggttggtcagcagcgtcgctcccgcctggatccagccccggaagcgggacatggtctgtgaaacgcctgaaaactttttacccaa

SEQ ID NO: 32 - DNA, 29473 bp, unidentified
  source 1..29473: mol_type = unassigned DNA
tgatcgtcaccttccgatagcggaactctgatgccaattctacacgcaccgggatgtctgccatatcttccagtacatactgtgcagccatgccaacatgccatgcagaaccgcaggctacaatgtaaatctgctcgaagctcttgatctcatcctcagtgatttccacactggacaggtcgatctttccatccttgataacagagttcagagtatcctgcacagctttcggctgctcatggatctctttcatcatgaaatgctcgaacccagccttttctgcggcttctgcatcccatttgatctccgtggtctgcttctcgatctcgtctccattcaggtcatagaagtgagcttctcccggagtcagctttgcaaattccagattgccaatataatagacattccgggtgtacttcagaattgcaggaacatccgatgccacatagatctcgccgtctgcaataccaatgatcatcgggctgtccttacgagccccccagatctcacccggatagtcacggaacatcagctcaagggcataggaaccacggacacgaaccatcgttttagcaatggcatcaatgggacccaggttatattttttttaatagtagtccaccagcttgatgaccacctcggtatccgtctgactgtaaaaagtatagccgtgcttcaacagcttttctttcagctcagtatagttttcgatgatgccgttatgtacaccaactacttccgcttccactgctccggaaccggaacgactgcaattaccagaaacgtgcggatgcgcattggtctggctcggttcaccgtgcgttgcccagcgagtatgaccaataccgtaggttcctttcagagcattgccagcatctgttttctcgatcaggttggacagacggccttttgcgcggcctgtcggtttcctgtaaaaccaacgattccacacattgtttattcctcccggtattttctcttatactttccctctattacggaaaatgactccggattcatctccaagagtcatcttcgactttatgccttgtatcccttttcgcaaatcacattgactacttcgtccacatacttctggcacgtgtcatggtcaggagcttctaccattacacgcacaacaggttccgtgccggactcgcgcaccagaatacgaccggtatcacccaaagcctcggccactgccttgactgcttcctgcaccgccgggtcgttctgtgcggcctttttatcggtgacgcggacattttccagcacctgcgggtagatcttcagcggctcagtcagcttgctcatgggtagttttttggccagcatgacctccatcatcttcaggctggtcaggataccatcaccggtgctggcgtacttgctgaagataatatgaccgctctgctcaccgccaatacggcagccattcttagccatgtactcatagacgtacttatcgcccacagcagttttagcgtagccgatgccctgctcatcaaaagccttgtacaggccaaagttggacatgaccgtggtgaccacggtgttgttcatcagttcgccgtgttccttcatgtagcagccatagatgtacaggatatggtcgccggtgatcgcattacccttttcatccacacacaggcagcggtcagcgtcaccatcgaaggcaaaaccgacatccagaccgttctctaccacgaacttctgcagaccctcaatatgagtagagccagcgttgttgttgatgttcaagccgttcggcttgttgttgatgacataggtatccgcacccagagcatcaaaaacagacttagcgatgttccagcttgcaccgttggcgcagtccagaccaaccttcacacccttgaaggagtagatgcccaggctgatcaggtagcccatatagcggttacggcctgccacatagtccacggtgcagccgatatgctcacggtgggcaaagggcagctccggccagtccttatcaaagacatggagcttgccgtcgatgtagtcctccaccagcagcagagtctcctcgggcattttctcgccgtagcagtcgatcagcttgattccgttatcatagtaggggttgtggcttgcagagatcatgataccgcagtcaaagtcatccacccgggcgatgtaagccacagacggagtggtggtgacatggagcagataagcatccgcaccagaggcggtcagaccggccaccagactgtattcgaacatataggagctgcggcgggtgtccttgccgatgacgatgcgagcaggctcgttgttgccattgcgctcgcgtagtgcattgtagtaccagccgaggaagcgacccaccttgtaggcatggtcagcggtcagatcaataccagcttcaccacggaagccatcagttccaaaatactttcccatttttgatcacctcatttctaaagagtcttttttaatatgtatttagttcttttcaatcagaatgctgttatctatatcagagaatattttagtagcatatctttttttgcaatacaagtaaaaaattagacccaaaccgctccaaatgattattattataacttctggaaaagaaagcgtacaatttgttcccggtactatataaagactagccatgagccctgacaaaaacacagcaaggccaccaaccattttataatgctttacttcatacggtctcttcagtgccctgtatttttttcgcatcattaaaaaagaaactgagacaatacagtatgctacacaacacgaaaaattacctgcatccacaaaccatgttagaatcgctttaccaaaaaaggctgatataatggaaatcaatccaataaatgaaattgaataaattggaacaccagtctttttacttgtcacaccaaaaaaggaaggcagcatatttgacgcagacaaagaactcaatgcgcgactcccacctatcaggaacgaattccaacttgtgagaattccacacatccctccaacaataacgatttttgccatgtttacgctattgaacgctttcgccatggcatctgctgtcaccaatcccgtatgctccatggaatataggatttccgtcttgctcaaaatgaatccgacgctaaaaaccacaagtacatagaaagctactgcaagtacgattgacatcatcattagctttcctattttcttcatcgggatctttatttcttccgcaatctgcggaatgacatcaaatccaaacagaaagaatggtgtcaagatagaaattttcgcaatgccttcaatagcttctctttcggttgagcctagaaaaagctgatcgtccagattttgtacatttcctgaaaaaacagcaccaacgattaaaaggacgccaacacctgctattgccagtgtcattattttttgaaatctagcagcagtctttgtaccaacaagattcataactgtaaccgctagagccataacgactgataccaatgtccaactgatgtaaatgtccgctcccaaaagcgtatacattcttcctatggagaaattcggaaaaatatactgaagaacagtaggaaatgagaccacctcaaaacacacaaccgaaatatagctcaaaatgatagcccatgtgcacacaaatgatgctttttctccaagagccaagtagccgaatacctttattccgccattttggggaattgatgttgtcaactcagcataacagagtcctacaaaatatatcatgaggccgccaataagaaagccgattgcagttccgattattcctccggttacgatccattgtccagaaagaacaacccatccccagcctatcattgcgccaaatgcaaagactagaacatcgccggtgttaagtaattgcctttcgttctctttgatttgcttgctcatttttctcccaatttatttgcttcttttgcaaccgttttcaaccgctcaaatccgtcaaatcggataacgatgtctgctccagtatcattttttactgcgacggatgcgttgattttcttgatcacatctatcatttcatcttcagttgcagtgtcaaacgtaattaccaaaagatactgatgtttctttactacatcaccaacattcagcattccgtcaatatttaaattgatgttctctaacttcttaatttcgtctagtcccgtaatttcagaaatcgttcctccatccttgctccaaagaatataggtacacccgcatctctcaggcagttttctctctggcgcaggcagatcaaaatgattgtgtttaactcctgtagcaatgtcaaccagccacgcataagtattaaatccacagacattcttatgatttaaggccatcatatcaccagacatccggtatcccgtttccagcacataaaaatgcccatcatcgtctagcatcatttcgatccacgccaaaccttctttgcatcctgctttattgaaggcagttgtaatgtatggatcgatttcctttaaatacaaatccagtttatttgtttctgttgttgtgaccgaataacagttgcttggatatccctcctgttcaaacataattccgaagtttaccaaagatgcttttccatctgccagcgcataccaagcagtgtactcatgtcctttcagcattctttcaactatcaccgtgtcgcttgctgaataagaccttgcatactcacacgctgcaagcacttcttccttcgaattgcagtagctcatgcctctatttgcgctttgatcaatcgccttgactacaacaggatactgaatctcgctcaattccttttcggtcggagttttgctgagataatagtccttcgctaccggcacaccacagctgatgcaaaggtctttaaactgccgcttatcaatcgtataatgccatgattcaggcgtgcagtagcaaggaagattcaaccgtttgcacaattccatgcagacagaaatattaaaggtgcttatgccattcataatggcagcaaccccttcttctctacatttttcttccagaacatcaatgtccgccgtactgatcatccaatactcatctgccaaaagcttcagcggtgctttttccacactaagattatctgtcacgatcgtgtaaatcccacgtctttttgcctctagaagaagttctttcgtaccacgtccggtcgtgccaagcattaacagtttcatataaaacacactccttttataccctgcttgttgattttccgagctatatactatgctttctgtcccagaataacatcacagatgcgatccacatcttcaagcgccaaatctgcatacaacggcagggtcagcacacgcaatgccaaatgctgcgcaacaggcgttttttcagttccggcggtcggataattccgatagcactcaaagctgttggtcagcggatagaaatattttctggccgtaatgccctgctcagacagcatctcaaaaatctcgttgcgggtgaacttatacccatcaaacacgaccgggaaatacgcatagttgctctctacattttcctgaatcgcactgagtttaataccttctacgccggaaaggtgctcacggtaacgctctacgaccttcttacgtttggcaatttcctcgtccaaatgccgcagattgcagatgcccatagctgcctgaaattcgttcatcttggcattgccacccacaaagcaaaccgactcaggtccatggatgccaaagttcttctggtcgttcagcagctgaacccaactatcgtccttaaagcagactgcaccgccctcgatagtgttgaacaccttagtagcatggaagctgaacatggatgcatcgccaaagcaggcggtagacacgcccttatacttcacagcaaaggcgtgagccgcatcatagatcaccttcagaccgtatttttttgcgattcgatcaatttcctcaacatcgcaaatgtttccatacacatgaaccggaacgatggctaccgtgcggtcagtgataagaccctcaatcttcgtcacatccatggtatagtctctatcgttcacatcacagaacaccgggacaagcccattgcgaacaatcgcatgggtggtagaagcaaaggtaaacggcgtagtgatcacctcgccaccctccggtaggttcagggcagcaatggcattttccagagccagatgaccgttggtataaagagccacatggggtacactcaaatactcctccagctctgcctgcaactgcttatgttttacgcccatattggtcagccagtggctttcccaaataggacggatttcttctatgtactcatccagatttggcatagacgagcgtgtcactaagatattatcagacatatactttcactcctcttttatactcatggttttcttaaccatttcagcaattcttttcatatcttcttttccgtatcgttggtcaattggaatcggcagaatatcagctgcgtaatggtattccaaactatccactgagcattctttcagcacattcggccacaaagtcggaatatagattttttctttttgcaagtcctttcggatttcagagccattctgaatcaaaagcgggtacataaatgcaccataaacacttttcaaattcagctcatttatatcccgaaattctgcatccaagaaatcgaagttttcctgccgtctctttgccacgatatcatagttgattccatgcagaagattttctgtcaggcgggacattcgctttaccggttctgtagcaaacagcttattgttcaatacgtattcactataaaattcatttgcgctgcgttcatatcgtcccagcaaaaagtgcattcgttcgaaagactcatcttgcggaagctcacgatccagctttgcatccgtatacagaaacgccccatccgcaacaccaaaatatttccggcaagtataaagcacgtccagtccatctacgggcatttggaaataactttgtgcattgtcaactatgacacgatcatatcgctgcttccagttattcaaatactcgttactaagctgaccatagaagtttacaatatagagccattcgtttgcgccaatctccttcgtgaaaaccggttcaaatgcctcattaatatggtagaattcatattcgacattgatttttttgcagagattgggcacagaatcgcaaagaaaatacggcagatataacttccgaatcatcttcgcttcgcaaaggtattccagcgctcctctttcgcaattcaaggcgattgctttttcgtggagtattgcgcctgtataagtgtcaagctctatatacccgccaatttctttcatagcttcactccgtcgttaattgaacatcgatgtgcttttctatatgggataaaatattttcagcggttgcaacatcaggaaatttcataaagataattccaagacatttcgctgcattgtcaaaccgttccacacggtctccgggctttttgtagagatgtatttcttgcagatattttttcaattcatcactaaatacgatctgcttatatattccgtcagttgtactgtgtaaattatgcgttgcataacagccctcaggtttatgtaatgtagtcagcactggttgccccattgccgcttggactgccattttaactaaatctgcgccaaagatctttcccaataagtctggtatcatatttccgccagctctcggtccaatgtcgataggccatactcgattgttcttatcaataactaattcaacattgaccgagccaaattgaattcccagcttgtccatcatgctttgcagcgtttgttgaacaagttctacatcgccttcctccagaattaacggataacttttcccgacaggaaccaatggatttacccgggaatctctatggcaattaagaagtccccatataaccacttttccgtttaaaacaaaaatatcgccaccgataagatacggatgttttttttcaatgtattcttcaataattacccggtgggcacgagaaaacgaaaaagcaaattccaatgcatcgttcacattatcccagctatgcagtacggtagctccttttgagccagaagaatctaccggcttgatgataaccggcaaccgaaatcgagaagtatctgccatcgcatcctcaatagtttgatatcccatagatactggcgcattaaatccattgtcttgcaaaaatgcacgaaaacgatctttattgcagaggatatctaccgcgtaataagggtttgttggcagttttaatttttcacccacataagctgctgtgggtgcagcggggtcagatgcataggccaaaacgccattaactttttccttctgcgctacctcaagtactgcatccttatctgtagtacttacaagatagaacttatctgcgacatactgcccggggttatccgtcaggaaatcgcacagaacagtgtagtaaccgagcctttttgcagtttcaatagctactacttgctgcgcagaaccacctaataaaaggatttttttcatttttatcgcctttactttcttgcaatttttttcaagacagggcgaatcatgcccatcagatattcataggattccagatgcaaggcagccgatgctccaatgtaaattaccgcacccatcggaatctgaatcagtaacgtgacagcatttgacaggtgaagcaggccaacaagattcacgcagcatcccataaagattgctatagcaatgctcggcagaatatccttcaactgatcccaatatcgataattcaaaagtttccgattgggccatgagttgatgatttggcttgtaacactgctgacaagcaagctataagccattgccataacgccaaaccacatagtagaaagcagcaacgtcataccaacaatcttcttcgcaatttcaagcttcaaaaacaaatcgctacgccccattgctttgattgcattcaggtttgctgtgtggattggatagaacatataagtaatgcagaaaatgcgtaaaaacgggacgcatggtagccatttatccgtcaagaccaaccgaacaatcggctctgcacagaatgccaagcccatcatcaacggagccataatataggtgctggtttttatagcccggcgggtcatggactttactcgactagcgtcatcttgcacgcctgccatcgttggcagaagaacgctgtcaatggacgtattgatattgtttgcaatcacacttgggaacttatcgccttggttgtagtatgccaaatccgcagacgaatacaatttacctataatcaggctgcgaatattcgtgtagatggtatccagcaatgatgaagccagcattttccagccaaaggaaagcagtccttttagtctttcccaagagaacatcttctttggacgccatttaaccgtcagccacaatatcaaggtatcaatggctgtattggatagttgctgggccacaatagcccacacaccaaaacccgcgtaagccaaaccaatgcccagaaacgcagaaaaaatcgttccgcctagcgttgcgtaaaaaaaccgcttgaacagcatattacgcgacacataggattgctgaataccttttacaccagaaattacaatggtcaagctaataacacggattattggagtcagagacaaatcattgtagaagttggcaatcaccggcgccgccataaacatgatggcgtacaaaaccaagcaaaccacaaaattgaaatagaacactgacgagaaatccagatcatcagcatcctttttctgaattagtgcggtacctaagccactatcaacaaacacttgcatgatggtggtaaagaccgtaatcaaagcaatttgaccgtagtcttctggtgcaagaatgcgggcaagtacaatagatacgataaaggttacaagttgggcaccgcagcgttccgcaaagcgccagaggaagttccctattacttttttatttgacatatactaatcgatttttcctttaatctttcgatttattttatttatagcgattttcgcaaccatagaaaggcaatcatcctgtttagtaatcacttcccatgcatggctccacgacgcccctttccgatggtataagcaatcaattacaacctctgcagccattgcggcacgtctttttttcagtgaaacctcgataccatattccttgcggaatgccttttcaagttcttgataagccatccagttttgatacccttttctagctccaatattcctcgatgaccatgaatttcctcctactttgcgtacaaacctatatgcagaatatgtctgaggaagtcgatatatggaaccatgtgccaataaatataaatagatttttatatctccctgaatatctactgcattgaagctctccggatagctctctccctgatttctaaaaatattccgacaaacgagacttgcaagttggctaggaagttctttttcttcaaagtctttcaatgtataacgttcttctttttcgtaatatccaaaagtttttatattctgaatattttcatcttcatcaacaactatatatttatggacacagccgatatcttgcggatgttgctccagccaatcaacctgaaattgcagcttattagaatctatccaataatcatctccctcacagaaagcaatatacttccctttcgcacgagaatactgaaacacttgggtcacatttatgcccttactgaattgattttctgtttgtaaaattggcttgattatatctggatatttttccgcataggttttgataatatcaggtgtagaatccgttgatgcgtcatcatgaactagtatttcaaaggaaaaaactgttttttgcatcaaaaaactctctagcgcatgcgcaatatacttttcgtggttataagtattgcaaattatgctaacgcatatattatcctgcatttcggtttcctcttatctatcatcgctatttaaagacattattcatccatatgtcgacttcacaacaccgatcttgtataatttagctccggaaaatccgttgcctgctgctcaccgcggagaggtagcatacttgagcagcacagccatgtggctgaacacatggctgctgtggagaatcagtactttctccacaccatcttattaacgacgtttacatagccctgaatgatgcgaaccaccttcatggacacggtttcatccacatagtcggggcagggcttacccagaacgcccttctgcttcatctcaatcgccatgtcggtggcgttgagcagctcccgggtggtaatgccagccagaataaagtcaccagcttccagtgcctcgggacgctcggtggaggtgcggatgcacacagcggcgatgggatgaccaatagacagatagaagctgctctcctcgggcagggtgccggagtcggagacgattgccagagcgttcatttgcagcttgttatagtcgttgaagcccagcggctcattgacgcgaacacgagggtccagctggaagccactctgttccagacggtgcttgctgcggggatggcaggaatacaggatgggcatatcgtacttctccgccagtgcattgatggcggtgaacaggctcaggaagttcttttcagagtcgatgttctcctcacggtgggcagacagcagaatgtacttgtccttctccagtcccagacgctccagcacgtcgcttttctggatcttctccagattcatgtgcaggacttccgccatgggagagccggtctggtaggtgcgttccttgggcagtccggtgtccgccagatacttccgggcaaactcggaatagcacatattcacgtcagaaatcacatccacgatgcggcgattagtctcctcaggcaggcactcatccttgcagcggttgccggcctccatgtgaaacagaggaatgtgcagccgcttcgcagagatggcagacaggcaggagttggtatcgcccagcaccagatagccctccggctgcaattcgctgagcagctcatagctacgccccagaatgttaccgcaggtcacacccagattgtcacccaccacgggcaccagaatgtccggaccatactccccgaaggtgtttttcagctcgaaatcctcccagaacacggtggagaggtttctgtcccagttttgattgtaatagaccacgcagcagtcaaaatattcccggcagcgcttgatgacagctgccagacgaataatctccggacgggtgccgcagccaatcatgaccttggtgcgcccatcatttttccaattaaaattgtgttccataaaaatctcctaacgtcaaccagtaccttctcttacaccggctcgaagaatgtgtccgggtgattcgggttaaagatctcgttgcaggtcatcaccgtcaccagattctctgtctccgacaggttgatgatattgtgcgtccaaccgggaatcatgtggacggcctcgatcttctccccggaaacttcaaactccactgtttctccggtgttgatgtttcgctcctgaatcaaaccgtgcccagccactacaatgaacagctcccacttggagttgtgccagtgctgtcccttggtgatgcccggacggctgatgttgatgctcacctgcccgcaatcggcggtgtgtaccagctcggtgaaagagccacggttgtccacgttcatcttcaaagcatacttgaatttatcggtgggcagataggtcaagtacagggagtacagctttttggcaaaggagccatccggcattttcggcatcatgagggtactcggctgtgccttgaactcttgcagcaaatccacgatttctcccaatgtgaccttgtgggtcacggggacacagcagtaacgaccgtctgcattcagaacggtttccacaccgtcaaactcacagtgctgctccttgccttccagcaggtcgaacatcccttctaccaggtcatcgatgtacagcacttccaactcggtactgcggtcgttgacagtgaatggctcgtcattggcgactgcccagcagaaggtactgacggcactgttgtacttggggcggctgtgtcccatcaggttcacgaaacggtaaaccgcaaccttagccccggtctcctgagcatactggaagaacagctcctcgcccgcctttttgctgcggccgtactcgctgttgccgaagcggcctgccagcgtcgcctgaatggaggaggacagcatgatggtggccttgttgccatactttttcaggcagttcagcaggtcggatgcgaagccgaagttgcccttcatgaagtcttccgggttttccgggcgattcacgcctgccagattgaacacgaagtctgctttctggcagtattcgtccagctccttcggggtggagttcagatcatactcgaagatttcttcaatattcaacgccgggcgggtcttatttttcccgtcccggatgtttttcaggttgttgcacagggcggttcccaccatgcccttggcacctgtgactagaatgttcattctctcacctctttaatgtactgcggtgcagtccggaatatctgcgccatccggcacagttgcgttattgcagatggtgcagttgctgccgatgcgggcaaagttgcccacagtcgcaccagtgcgaatgacgctgttggtgtaaatcagggcgtagtcccctaccgctgcatcacagtggatttccgttccggcattcagcagaacaccgttgccaacggacgtaccattctggacacaggcattttgcagcaccacgcagccacagcccagctttgcgtatggactcatgtaggcgctgggcgcaacgatattgggaaaagcaaagccaagggctttcgccttctcatacacctgtgctcggaaccgattgttgccgatacccaccaccagcaagccgtactcctttcgcagctccggcaaatcagtaagcccgccaaccaccggaatgccgcagatctcagtgcctacaggttgtccatcgtccacaaaggcacaatcgtattgaagcatcgcctgctccgccaccatgcgcccaaagccgccggcaccaatcagcagtaacttttctttagacattcgggatgcccttcagtgcattctggacgtactcggtggtcagaatcttcttcacagtgccttccacgtccagacgctcggtgttgtggctggtgtaggactcgtctgccatggtatgtacttcgcccttgaccacgaacttgtcgtagttcaggtcacggttgtcagcagcaacccggaagtaatgacccatatcctcgctgcgcagacgctcctcacgggtcatcagggtctcgaacagcttctcgccgtgacgagtgccgatgatgttcgtaccggtatcgccgaacagctgctggacggcctttgccaaatcgccgatggtggaagcatcagacttctggatgaacaaatcaccgggatttgcatgttggaaagcgaacaagaccagatccacagcctcgtccagattcatcaggaagcgggtcatgttgggatcggtgatggtgatgggattgccagccttaatctggtcgatgaacagagggatgacagagccacggctgcacataacgttgccgtaacgagtgcagcagatggtagtgccaccacgctcagcagctacacgggcattggcgtagatgacgtgctccatcatggccttggagatacccatagcgttgatggggtaagcagccttgtcggtggacaggcagacaacacgcttgacgccagcgtcaatagcggcgtgcaacacattatcagtaccgatgatgttggtctggacggcctgcatggggaagaactcgcaggaaggaacctgtttcaaagcggcagcgtggaagatgtagtcaacaccgggcattgcgtcacggatggactgcgggttgcggacatcaccgatgtaaaacttgaccttcttggcattctccggatgcttggcctgaagctcatggcgcatgtcatcctgcttcttttcgtcacgggagaagatacggatctccttcaggtcggaatccaagaagtgcttcagaacggtagagccaaaagaaccagtaccaccagtgatcataagggttgcgttatcaaatgcagacatttttgttttcctcctgttatttcaacaaatagtgtttatacttgaagaacagctttcgtctgttctcttcgactaattctcttcaactcatttttcatgttcaaaaacacatcagcagtttcatgatacacatccatatagattcgatggatctatatatttaatcgttagacttgaagtcgagtcaaatcactaataaaattcagttcattgacttctgagcttattttcaatcctaccaaattatgatatcttttctactactgtgcagttctttagcattgcatgttacactttccaaaacaacttatatggcacaatatccagcgggtctggaattaatgtaaactttatgaaatatacaattgccaggctgtatagaatcatcctaaccatcattcttgatttttggtctaatctcattatgttattgggtatcaaaatcaagatgaaaacttggaagtattgcgccatgcgtgtcaacactgtgcctgcgccaaaaagctgtaagacaattccgacataaatcattcgcatcgccaaaccactatccgaaaaatcagtagccattgcactggagcgtgaatcgtcttctgtcatttcagagtaacttttatgtgtttttttataataaatccaaacatatattgttagcacaacactcatgatgtatatgagcaaatttccacccaacgatgttcttgattcctgtacacttttcagataggtgttaatgaacccatagaattggctcttaagcagtaacaatgccatggaaccgccaatatagaataccgatgatttaacagaaaaatggattttaattataaagtaagcagcaacaaaaatatatgcagacttatgaatttgtgctgcaataataacaatcaaaaagaacttcaagaagtttttgattccaggtttctctgcatatgggatagcatataagcatattgcaacgcctataaccgtcctaacagccgacatgtcaaaagtcaaaaaagtaaagcatatataaaggattacagatgtcgtataatcttgagagtatctcttaataaatctgtaatatgaataatacacaaatccataaacgcagaccatgaatgtttgaaacgatgccttgaagatgtgcgtaaacgccatcatcaaaaactcgtatccccactccatccatgtagtatcgtaattatcccatgtctgatatttcatggaatcatacacacgtttatatcccgcaatatccttacccacacttggagcctttaacgcagttagaagaaacagacacagaatagatattattagaattgcattttttcttttttccaggtttcttatcccacaacaagcaaccggtagaattaaaaccatgccgataagggcaaaatatatatccatttattaacctctaccatcattttctgagtgcattgatttataaagatctatatactcgagaaacctatcttccataatatactctttcgccttgcttctaaacgcctccgagctcagcctcatgttttcacatatttttctaatttcactcatcattttattgacatcatccacaggaacaaccctgccaaccttttcatttaacatctccggacttccacctgtatcaaaagtcacaaccggagttccacacgcaatagcttccatattgactgttggatagttttcctctcttgtcggcattgcaaacacatccgctgcgctataaatctcggcaagttctttttgattttgtgttcgatgaattgaaataatattttgcggcagattcttgtcaatctcatcatctgtaccgacaaggacaatttgatattgctcacctaatttttccgccatttcaacaaaacagtccagtcccttacgatacccccatgcaaaagaaactcccaaaacaatgtgtgtttctgccggtatcccatagcgttctctaaaattgctcggagttggcttaaaaacgtccaaatcgattccgttatttattacttcaattggatactctttcaaatacgattcctttgccagttccgccaaccactttgacggtgttacaattgtcatattcccaatgccggtaaaccattttttcttcagcttccacattcttttcgtattatcgtaaaacgaggcaggatattccttatactgtgggcaattatgacaaccagtcttccacttgtcgcaccttactatagtaaagtacgggcattgcccagtgaatgaccagcaatcatgcaatgtccatactgtcgggacattatgtttttttatatatgaaaagagcatcggtaaattgatatatgaatcgtgcaaattatgaaaatgaatgatatcgggcttaaattcatctatcttcttcaaaagcttatacgtctcgaaccatgcgaagcaaccattaaaacctgtaattcgagcaagagcgacatttactcggcgactattgaatgttccgattcggtaatagccgcaatcctcacccgcatcacgatttgttgtggtgataggcgatgcgcacatcacctcgtgtccctgcgctcttgctacatcggcaatccccatcatgatttttccggtgctacctttcgctccaccattgatctgcacaatacgcatcactcgtactcctcactgattatcactaaagaacttatatcctctacgcctcatgattgcctttgagagattgaacagcggcttcggaagccactcacgcagccatgtccggaattcaagcatccattcatctttagctcgcatatcctctcggtcacctttataaataggattctcatcgaaatacttgcgtgccttcgtcagcacctttcccttacgaatcacgtcaagaatagggaattccccgcgtcggctatctgcgcaacgggcattcagctgtcgtgccatattcgtcaacgcaacctcatactgccaggcattcagcgttttcgtcagcgttttttccataaaatccttacgccagatgcctgcatacagactgacaatgtagtcacctgcataattgtccagcagaaaaatatccggttcgagttcctcagcttttctgtttctcaggctcttcatggtcataacaaacaggcgcagataatcaatctgatgcttttccatgatctgaatatcttcgttaattgcctgagtcgaaatcctttccgtcaggaaatagtcatccaaggtaaagagaacatactctgtcttaatcagcggcatcactgctctcagacgttccgttatttccgtgccttcgcctgctgccaccactgttacattttcaaaagtacgatcagtgggtttatcggttactaaaaacgtctccacgtttcggtctgcccaattctgattcaaaagcaaaacatgtgcatcccacaaatccgaaaacttgtcgcacgtcgaaataataattgaaaagttattctccatcaccatgtatcctctgccacttatttcatatgttggattgcctttgcaaccacattttctgaggtcttgcagctagcctgcagattatgatgctctcttgtcatcacaatcgcctgttcgtagtatttcttttgaatttcctgattagaaatcagctgtgtaatcgaatccaccaatttagctttatccgtacaaaccattgccgcatccgttgactgcatatactcaatgatgccgctttctagcgagccatatgttagaatggatgcaccactcgccaatgcgtccgctgccttcgtagagagtgaataccgtgaaaggttgatgtccttttcctcaaatccctctacaataacagttatgtcgctttctgccatgcgcttttgaacctgcgtgtacggcacagaacccatatatttgacattttgattgtccttgaatacagaatagacctgctcgtccttttcgttggaataaacctccagcatatattctggattgattttcccaagggcgtaaccaatatcgttcagggagttgttgcgtcccataccgatatttccgaagtaagtaataaccgggcaatctttgttaattacgctgaacggtttacgctgaaccgtagaagtcaaataaaccgtttcgccgtccagtccaaattccgaattatacttatcccgaatcttgtcgctgatgtaaattgcgctgcccggccatgccagaaccttatcaatcaattttttataagtcgatttataaaggtgatagatgggattcagcgttttctccacattgaaatagtagtcatcgccaatgcaggagacaatcgggacgttatacctcttggcgacatacattgcaatctgcgggataaaatagtcatccgaaaaagccagaaacacacattccggtttgaagttgtcgagccaattatttagcttctctgtgcaccaaaacctctttcgccagaggattcctctgagcaaatgcgtaaggggcgtatgctttccaccaaacttgtaggcggcttctgcttttgcatcgccgagttccaaatcattgtcaagccactccgtgtcaagctcatcatagtggtagattacgccggtatcgactttcttccccatccaccgctgcaacacacggtgatccgtaacctgaaaaagcgtctcgcaatgccccttgcacggcttctttgtattggagaatatctgtgcaagattttctttctcccaatagtgaaagtacgcatcaaaagcgcgtgacgttgattttgtgttatatggaactgttcctacgatcagcactctcggatgcatgtcatttctcctttgaccatttatcgaatatttaatactttcttgagtacaacattttgattgagcaggcggataaccactgcacatagccctattgtcagggcaaagtttccggcagccagtaaatacccttcaatactgctaaattggattacagcactgcttttgaagatattgagaagcaggccgtgcatcatgtaaatttccatgctttgttttcctgcccaaaggaaaacatcccttactttttctttccggttaatacaaatctcagcacaacattttgactcatcatcactattgccatcacagtaagtgctaccgtaatcacatagttgaccagaaccatgctcagccctgtcggactgtatagaattggtgcttcgtccagcttgattaagctgagtagcagatagtgagtgaggtacacttccagtgagtgctctccgacccacgcaagggtacccccccccgatttttcggagaagatccccttgcagagtccacatactgcaatacacccagccaacgatgttgccgcacgtaagataatcgcaaagccgccatccgacatctcataaagcggaaatctaagaataacgaacagccacattacaaaacagatagcaactacgctatcaataatctttttgccagtctcagattccttcatcctatcatcaaactgaccatacaaaaatcctgcatagtagaaaggcatataatagagcgtcaatttgattgcaaagaacgaaagtcctaaaatcacgccaattccaaccagcagaaccattcctgccaagtagcaccccagaagtacaatctgtttcttcagcagattttctttgctcgcccgctctgcaacgaaagacgccacgccgaaaatcatgctaatcgtccaaatcgttgcgaggaaccaataacctgaatccatattccacaagagatgcttaacatttaagaaaccatcctgtccgaagatgatgcctctaactaaaaagctccatacagcccagggcagcatataggcaaccgttctgcgctttacatatttccacagtccattgccgtcagagattgggcggctatactttgtcacatagccgctaatcaagatgaacaacggcatctgcagggaccagataatattaaaaaggaaactgctctgcgaattggcagtacatcccgtcatcgtatgccccaaaacaaccagaagcatcgctatgccacgcatgatatccacgaactgatttcggttttctgtcttagcctgcatcccttaataccctctcaaacataaacttccgcagccagttgggagccagcgccgacccgctgcggattacgcaacttttaatgtactgaccatttccaataaagccttgctgtttcataaatttgaacagtcttgcctgcgtcttggcgtatttccaaccggcccgccgtttatacatatccgagccagctcgcatgtgaagcagcggctcctgaatgttgtagccctgatatccggccatcagcatccttagccaaaggtaatagtcctccagtaagtagaaatcttgataggagccagctgcttcgactgcggacttcttatacatcacgcaaggatggttaaatgggcagcgtttttttgcaaactccacaatttcggcgttggtctccggcggtactcgcttcgaatcgacaatgttaggttctgttgtaaattcttctacgatgccggagcaaatacttacttcgggacgcatattaaacaccgctatctgtttttcacagcgatcaaaatacgcaatatcgtcgctgtccatccgcgcaaccagttcgtttttgcaatgtttgattcccttgttcaacgcattgccaagtccaccgttccttgcaagacgaacaacattcaaagccgaacccatctcctgttgttttgccgcaattactgcatctaaagcgtcattcaaagggccatcgcaaaccagtacaaagtcatctgttggaactgtctgtgcctgaatactttcaatggcctgttttaaatactctggcgactccttaaaataaaccgacatcaaaacactataattttgcatccttacaccatctgtatgttactttcacattcagttgcttcttgagacaccactttgctctcacgcaacaacacgatactctccttccggaactccgggtcgttttttccatccacaacgcccttacgtcccaaaacgacctgaatacttttccaaatgacctttaggtcaaatttcagaccgacgttttggacgtattcccggtcatagtagactttgtcgtacacatccaccgtgtcacggccgttgatttgtgcccaaccagtaatgcccggcgttacctgatacaccccgtaccagcggcgcagaaaacgaatctcacgttccgtatacaccagtggacgaggaccaatcaggctcatttcaccacgaaccacgtttgccagctgcggcaactcatcaatactggtatcccgcagaaagcgtcccagtcgggaaatgtacgtctccggactttccagatcaccagtcgccacattcttcggtgcagagctcttcatcgtccggaacttgatgatattaaagcaatgtgcgcctctgcctacccgcttttgtaaaaagaaaattggttcgtccggtgcgctgatcttctgtgcaacgctcaccaccaaaaacaaaggggaaagtacaatcagcgccagcgccgccagaatgcggtcaattacagaccttaccgcaaggtatcgtttctgcttctgggtcaaatgaacataaaacggtccaaaatcaacgtggtaattcaattcttccatattttcctcacactatcatcctgcttttgcaggttctaccttttcttttaatttgagatatgatttttgagatttcggatttctggtttcccaccgcatcctgattccatccagcttggcaatgcgctcttctgtcagcacagcaccgcttttatcgggatttagccgtgcgtaccgctgccgcttgacccatttcccgagggcgtatccacccggcgaaacataatcaacaggtactttcaggtcgccgtgggcttcaaaatagcgctttgcttcctgatatccttcgttccactggcggtcattgcggttgccccagtacatccctattctgttgagccgttcgacctgctcgtctgtcagctttcctttcgggtacgcccattgctggcttgcgacccattgccccagccgttcaccagtcgctgtcacataggaacgtgggatattcaggttgccgttttcctcatagtaggctgcagccaatgcataagccttttcccacttggcatcgaaaatgttccacaccatgccgatctcatccagttgtgcgatgcgttcttctttcaagcgtccattcagcttctgctgcctggtcttgatgatccactgtcccagtgggtagccgtccgggtctacatatttgccgggcaccatcaggtttccgtaggtgtcgtggtatttctttgcgacctcaaatccatgctgccacgcaatttctttccggttgccccagaccatcccgatgctgtccagccgtgcgatctgctgctcagtcaagttgccttggatctgcccctcgcgcacccggcgctgagtcaccagccacaccccaaggctcagaccgccgggtgtggtgtacattttggggatattcaaatctccgtgctccgcgtaatagatgcttgcctcggagaaatagtgctcccagccggaagaaaggcttgcctgcagctgctcgaacagcacccggcagtcgtgcacctgctcgatgacctcgaaccgctcggtgacgatcttgtcaccctcaccgttggcgtaaagccggtgaaccgcctcctgcatctcactttgcagaccggatatactggtcaagccctcgaaattgttgaccacatccaagatcagcggggctgcggtgtccccagcggtcagggcacgtccgatctgttgcttatagataatgggcgaaatcgttggtcggaatagaatgacccccgaaatcccctccacatggacgccctcgttgagcatatcgatgcagaacagcagcttcagccggttggtcgtatccgtcttgaagtctgtaaacgccttgtcggtattcgggtcatcggagtaggcttcgtacaccaccacgtccgggttgacccctgcgaaccactccggcacgtgggacaccatctcgtccatgtgctccttgttggcgcagaacacgatgtacttgccggacttattcgtgatatgatgggcaaagaccctatccagaccatccgcttgttccaaagcgcggcgcagggcgtccagatatttctgattcacatcctgaatacccggtgcccgcaggttatccacccgtgcctgatactttgcaagtgctttctggtactggtaaaccgtggtcacatatttcggggcaggcaaaatacccctgacgactgcttcgccaagggtcatgttgctcgcaacacggctatcgaaaagttcttcggccatgtcgcggttattatccagatatcggatgtttgttgccgtcagccccagaagctttgcatccgggcataactttaataaagccaccgtgctttcgccccaacattcagcaccggcacggtggaattcatcgagtataatataggcaggcttctgcgctgctatttcgtccagctgcgcctgcgtgcagcacatcagtttggcataggtataaaagtgaacgtttgccaacggaaaatccgggtcgttccttttcaggctctccagctgggtcttaaagatatattcactgggagaaagccagattacgaccttctctgggttgtcctcgatcagcttgaacgcaatgtagctctttccggtgccggtgggatgaacaatggcagccttgccgtactgctccatcatccggactgccgcatgatatgctttctcgttgtgctcaaacagacataatgccaccttgttcaccccttcccgcataaaggggtatcctccacagtgataatggaggaatgaaaaagaaaacatgcgtaactacgtcatatttagtgcgttcctgcccctcatggacacctgatgggagaaaattcggttcatctcccggcgctttcgtgtcagatcagagtgcacatagcgctgcaaggtgatgttggcgttagcgtgtcctaacaattcgctgagggtctttacatcgcatcccgcctgcagacaggtcgttgcaaaggtatggcgcagcgcgtgcggacgtacctgccggacagttgcctgtttcagatatgatttgatgctttttcggtagcagcggggctcggtgggcttggactcgttgccggacagaaaccatgcagcattgctgacacatccgcgcagctttttcagcataataagcagctgctttgggattggaatttcccggcgggaggtgcgggttttaggcgtttggatgacaacctttgtatgcccattttcacaggaaattcggcagaccgtccggttgattttcagcgttccgagtttcaggtcgaaatcgccccactgtaagccgcagatctcgccaatacgcagccccaattccacccctaataataagccaattttgcggggcgttgggtcctcctgtacatactgataaagccgctgctgctctgccggggagagaggcacagaaattttgtcgatggcttttggcagcgctacttctagctccatcggacggatcaggcgcaagtgcgcggcatatttgcagatacggcgcagcatcgagaggcattcccgggcagaggagttccccagcggcttgtgtgcggcatctaccggcgcaatgatctgctgcatagcctgttccagaaagctttcctcaagggatgcgactggcactttactcaaaaccggaagaagatatttgtgcagcgtgtacgagtaatgcgcataggtggattcttttactgcattccgctgggagtgcagccatacctcagccagtgcttcaaaggccaggtcggttctctttagattgtagaagcctgcctctgctttcttttgaatcagcacacgtttgacctcagcatagaccgtgccatagacgtagccccactggattttcccctccggtgtacgcgctttgatgtagcggccttcccaccggccatccttgcgtttgtgaatgttttctccccgtcgtgccatttctgtttcctcctgcgtcttggacacccttctgaccacttattctgtccaccttcgttttttgctggatttttcatgcagaactgggcaatgtgcaacaaacttttagcttctgcgagtttttttctaaggtcaggtgggatgcatttgtaaggatttctattgattcccagatataaccatgataaaataagagaagaattcaaacaacgatgtcgaaaaatcggtatcctccattatcactgtggaggataccccttcccgcataaaggggtatcctccattatcactatggaggatacttttttattaaatatattctttgccattacgcggctgcacattctctgtatcataaaatacttttgcatcatacgcagatgcgtatgcatagctgcacggatttctgtaacatcatagtgaggtgaactttatccatgactgtaaacgatgccgttgccaaacgctttgaacaactctacgaccagcgggggatattctccaacgagttagcgatccacgccgttgtatatttccaaattgatttattgtttcactcatagatatatttttattctacaaaatgcacctcttgcgaacacaaaaaacgcgtgttatactgaaaccatcaaaaaacattggaggtgtcccctatgccccgtcccaaaggaagcaagaacaagaccaagaccgtaaaagcaaccgttgactttgctgcacagattgctgaaaagcagtctgcaaaggaagccgctactgctgaaatcgaatccatcactgcgaacatcgatgcgctgaaaactgacctgaaagccaagaaatctgagctgaaatctatcgacaaggaaatcgccagaatcgaagtcaaaaaggtcaaggctgaaaccaaagcagcggaatccgcaaagaaagccgaagcagaggacgtgctgaaaaagctgctggcaagcggcgtgagcgcagacgatatcctcgcaaagctgaagtgatttaaaaattctaacgcagtcgttgatggaaacatctacgtcgcaagcagtgcaacttggtaccaacttgcgatttttgaatcggatttttcaaaatccaaattcaaaatgcttgttgggctgtgcccaaaccccttgtgttctgcatccggtggatgcaggctgcgcatttttgcaaaacgcttttttgatctgagtgccgatgcctgtggtatcggcactttttgcacagatggattccgggaagcagaaaatagtgctatgcagcacatccgggattgtgctatacttgatttacataaatctgtttgccctaaaaagttggaggtgttcatggctacacgaaccatttgttttcccatatccggctacccctattgcaaagaacagccggtgacattcacgtggataaaaggtagcaagcggcagaatatccgtgccgtccatgatgccgtccatacaacagacccggatgtttcaattctggaagtcagctctgcatccgttcagccggagggtgaggctgtttcttctctgcggcttctgctgcgtttggattctgttgcgcaggatgtgcccatcagcacggtttttgaagctgccaaggtatttgagcatggtgggccattcgctgaccttctgacctgtgcgccatccaaagtccataaggacactcgactgcgaaccaatggaaagttgctgcgctactctctggaaggaagtgagtatccgatagagccgcacccggattcattttttgagtggctctactgccgtgcgttgaagcagtttccggaaaaggctgcgcagctgagcagatataatgccttttctgatattgctgccgcggcggattctaaaaagtattatggcgattcctcgcgggcggctgcaatctatgtaggacttgcaacggcaggaaaacttccgtgcatcgattcctatgaatcattcattgcggaagtttacacggagccaaagcccttgcccaaatctggaaagtctgagactgcttcaaaaaagacacccgaggtttctgcaccagcaaaggagattccggcagacgaatcgtcgcagtccgataatgcaaatattccggacggtgcgcagatggaacagatccttgagctgcccaaagcgacctgtctgctcctctctttggcaaaaaatgctggtctttctgcaaataattccagtgagctggcgtataagggaaaggaattttttcttgacgcttatcagaaagcactaaaaaacaaaacgctccgaaccaatgttcataagaacaagttcacttttccgatggaagatcatgacagcggatttcatgcggtcggagtactgacccgttcacctgcttgggaatacggatggaagttcaactatctgcccgagaatacatccggcgcagaaaagcccgaagtcaaagcaaaaatccagaagcctttgaccgcattggagcatctggaacgctgtgggtataaaatcgttcagcaggtcgtgccggaaaaacttccaccgattgctgttcagcggatggcatggaaaacaggcgaggctctttgcgacccggtggtggtggatttcctgcagtttatccgaacacatatgcagagcgacggttctttttcgttccgtatcccaaagggtgcgtccaaaaaatcgtttgccacactttcagagattgctcagacgtgggacaaaatggggctttttgcagccattgtgatttatccgcagaatatcgtctatgaacttgcgcaaaacgaaaccgtccggcattttttgagtggaaagtggctggagctttttgtagaacatcaggttcagcagatcctgaaccgctatcaagaggagcagggcgcagaagtttcggtttgctccaatgtggttctttcagaaacagcatccgtagggagcacgcatgagctggatgtcgtgttctccatcaatggaaaatttttctgggtagaagccaaatcatccagtcgaagcattgattatggaaaatatgcttctctgtgcgaaaagctgaacgtgacaccagaaagcttgcttttggtcaacagcgatttgtccgtggaagagtgcgaaggtgtttcttatttctggaattaccgtgttgcaaactgtgcaacgatcacgcaggaactggaaagcatgatcgctaaacaaattgaaagcaccggaaatgctgttgcgagtacagactgagaaataagcaaaaatgatatgtacccccaatactggacacccagtagatcggaagagcggttcagcaggaatgccga

SEQ ID NO: 33 - DNA, 39898 bp, unidentified
  source 1..39898: mol_type = unassigned DNA
gaaaactacgagtggacagatatgtacgaagatttcgctaaaactgccgaggaagaaggctttacagagcttgcacacaagttccgccttgttgccgcaatcgaaaagcaccacgaagaaagataccgtgcattactccgcaatgttgaagctgcagaagttttcaaaaggagcgaaatcaaggtttgggaatgccgtaactgcggtcacattgttgtaggcaaagaagctcccgaggtttgccccgtctgcaaccacccacagagctattttgaaatccacgcagaaaactactaattctgatttaatcaaatatataaaggaaactccaccgcatatcacggtggagttttgtgtttagtatcaaattaaattcaaaaaacttactcttcttcgggatatttcatgccccagcttttgcggatgtcggtcatgattttcataacatcctttgtgtagtcaaggtgcataagagccgtgtcgccctctatcgccttttccatatcttcaacctcataaagcaaagcgtcctttgtatgacctgccgagattgtttcacaatggccgtcagccgtgtatgtaatctttgcctccatgcctctggggtattcaaagatttcaacataacccttgtcaaacgagattgtgccacgctttggctgttttgcgtgaagcgaaagaatgacagttgccatttcctcctctttattctttaaaagaatactcgcttgttcgtcaacgcctgtttcggcatatttaacctgcgacaacacatcgtttgggcatgagctcataaacatacgaacaaacgaaagcgcatacacgccgatgtcaagcattgcaccgcctgcaagattgcggttgaaaaatcggttgttcatattgtactctttgtaactgccgaaattcatctgaataagcctaagctcgccaaggtcacctgaatttaccttttcaagaagtgccttgtaaatcggcatatggaaaattgtcattgcctctgcaagcacaacatggtttttctctgcaagagagattgcctcgtcaagttcatctgaattaagcgttatcgacttttcgcacaaaacatgctttcctgccgcaagagccttgcgaagatattttatatgcgtgttgtgcggtgtggaaatgtaaattatgtcaacattttcgtctttaaacagctcgtcaatattgttgtaaaccttttcaatgccgtacttttcggcaaacgcaaccgccttttcatgggtacggtttgcaacggaataaagtttctgtcctctgcttttgagtgcggctgcaagctcatttgcgataactccgcaaccgagtgttgcccagttgtagtttttcataaaaacacctccgtacatttttcgagaaaagtttaacacacggaaatgcgtctgtcaacggttttagatagcttttctcgtatctgctccgtactttttcataatcttgcgaagttcgttattttcgctttttgaaagactaaaatacataaatccgtgcttaactgtttcatcaccgtcacacgcaggcatatatgtattacagcctattcttattgatgcattttcggaaaaaccacaagacggtgaatcaaaatatgcggatttgccctcaaacattttcttcacggtttcggcatcttcggcagacatctttgtgtcaaccttgtcgcagtactcaacatcaaaatacacggtaggctcacacgcatagaaactgattttcggcacggcaaatactgcggcggcaacgcataaaacaattgcaaccacaattacagcaatctttttcttcataacattcactccttttcgcttatccctttaaaaatatattatattaagcttgtatcataattgtatcattataatttaataggcatatacaacaattttaaaatcatttatttgtaggttaaaaaatttttcgtcaatgcttacaagagagcaattttacttttgttgaaaaggcacaaattgcatacaaattcaaagccttgcttattgagaaaaatcggtctgaaaatatgcagaaaagcagtttttaccatattataaaggcataaaaagaagaattttgacgaggtagttattgtaactaaaattgtgagcaaagtaaactttatgtttataaggtattttgcttgtttatttcgggcaacaggattacaataattgtggaaaacggaaaaggatagtatcgtttacaacggttatgtgattgaagaggttagaaattaatggagaaagtcaaaaaaatgctctcacttgcgtttgcaagtctgtttagaagaaacaaaggtcagaataccgtaaaagaaaagcgacagcgctcacaccagataaatatgctggaaggtccgctcggaaaaaaaattcttcttttcacacttccgcttgcaggatccagtattcttcaacagcttttcaactcaaccgatgttgcggtggtcggcagattttcaagcagtcaggcacttgccgcagtcggaagcaacgctccgctcatcaatatgcttgtgctgttattcacgggactttcggtcggcgcaaatgttttgattgcacgatatatcggtcaaaatgaccgtaaaaaagtttcggaagctgttcacacggtaataacactttcacttatatgcggatttcttcttctgatactcggtcagattatcgcagcaccgctgttaaggctgatgaacacaccggatgatgtaattgaccttgcggcaacatacctgagaatttactttatgggcatgccgtttgtaatgctctacaactttggttcggcaattttgagaagtgtcggcgacacaagccgtccgctctactgtcttgtaatttcaggtattgtaaatgttcttttgaacctcttctttgtaatcgtctgcgatatgagcgttgcaggagtcggcattgcaacagtaattgccgacggcataagcgccggacttgttatgatgttcctcatcagaaacgaagacgagtcaatcagagtcaatccaaaaaaactttcattcaagaaagaacatctcattatgattttgaaaatcggtgctcctgcaggtattcagggtatggttttctcaatttcaaatgtattcattcagacagccataaacggcttcggttcacaggcggttgcaggctcatcggctgaactcaactttgagtacattacatactatatagtatgtgcgttcagccagacagccgttacattcacaagtcagaactacggcgcacttcagtttgacagatgcaaaaaggtgtttaggctttgtatgcttttcagctgtattttcacaggctgtgtgagcgttatattcatgctcggaagcggatttttcatcaccttcttcacaacagaccccaccgttatcaagtacgcaatcatcagaatggcgattgttatgctccttgagcttatgacaggttcatacgaaatcagcggcggtgcgctcagaggaatcggacattcactcctccctgcaatcctcacaatcttcggttctgttgtgttcagaatcatctggctcttcacggtattcaaggcataccatacctacgatatgctccttatggtttaccccgtttcatggcttatcacaggcacatccgttttgattgcctacttcatcatcagaaaaagagaattcaaaaaggtaagcaccgcttttgaaatttaaaatcaaataggttttatggctgacatcggcattggtgtcagctttttttgtttagaagatgctctaaaattaaaaaataataaaaagcaattatttcatactttttgtgcggaataattgtttttttgctgtgttttatgttataatccaattataaacacacggaggtgcgacaatgactaaacggactgttgccaacaattttttatactacattttttgcggattcagcggtgcggttacttcgctgatagtatggctgtttctaaaacttatgggtttgggaatcggtcttgtgtgggatacaattccgtcaaattttgatttcaaattttatccgattattgtctgtacggcgggcggaattattctcggaatatggcaaaagctgacaaatgccgttcccgatgaacttgacgaggttatgaaaaaggtaaaaaaagataaattttacccgtacaacaaggtgcttttgctctgcatttcggcacttttgccccttgttttcggcggaagtctcggtcccgaggcaggcttgacaggcgttatcgtcggactttgctactgggcaggaagtcatatgaaagacgctaaaagtaaaattcccgaactaatgcaaatcggtataagcgcaaccctgagtgcggtattctacgcaccgcttttcggtcttgcatcggtcaatgaagaaaggcttgacagcgaagaaaagcctaccgatatccgttcaacaaagcttatttcaaacatcattgccgtactttttgcggcgggaactctgtttttgcttaactcgattttcggcggaagtatgggacttccacgactcgggggttataacattacaaattttgagcgtttgtggggaattcctctcgcacttttgggtgctatatgcggttttctgtttatcatatcttcaaagattttcggaaaatttttcgcactcattcagggtaaactcggcattattatcagcacaactctcggcggaattatcctcggtgttatgggtacatacctccccctcacaatgttttcgggcgaagaaagcattaccgttgtcaaggaaagctttgccgaatttgcaccgtggattctcattatcagcggtgtgcttaaacttgttctcacaaacatctgcataaagtcgggttggaaaggcggtcacttcttccccgtcatcttctgcggagtgagcatcggctacggtgttgcaatgctcggcggacttgacacggcattttgtgcggcagtcgtaacggcaggacttctcggtgtcacaatgaaaaaaccgcttgccgtaacaatgctccttttgctctgttttgacgcaagagttattccgtggattttgctcgccgcattcctcggaagcattattccgactaaaattttcggcagtaataaaaagaaagctaagtgagcatataaaaaactgctttgcgaaccaccgtttcctttggaacgcattgaagaaatgaccgctcttatgggtgacgacggttcaattaaataaagccaagaaatccgtgttgtaaccatgcaacacggatttttatataaagaacaacctccccgtaagctgaaatgctttgcagggaggttgtattattcttatatggaattttattttacttgcggataattattgcattgccgttgcaatgaacctttccgtttgaaaccgcaactgtttcaccgctgatttcgtttttatagtcgccgtcgggaaggtcaacttttacatctgctgactttgatttaaggctgaaaatgccgacttttttgctcttgttgttgtcacgctcaagaattgcaatatcgttttcatcgtctgcatcggccttgaaataatcgtcatcatcaagaacggttttcttgattgtatagagctttgcaaaaaggttgctcaaatcaatgcctgtgttgcgtgggaaaacatccttgtcaaaaaggcttggagtttcgtcacaaccaaactcctgacctgcatagatgagagttgaacccttcaagaaatacagaaaagctgtgtaattttcaaggtcgctcctgttctttacataatggcagattcgtggctgatcgtggttttcaaggcaacgcattttatcgtaattctgcggataaattgcctcctgataattgaacatatccatataatttgaaagtgtggtttcgcccttcaaatatttgtcgaaaacctcacggatatcgtagtcatattccatatcaaaagcatcaaaaagctcatagtcgcttgcggtataaattccgctcttgcgagagaacacgttgaaagagctgtgtacactttcggcaagccaaatgcagtcgggatttacctttgcaacagcctctctcgcctgtttccaaaattcaacgggaacgaatgatgcaacatcgcaacggaagccgtcaacaatcttcgcccacataacgagtgaatcaatctgatactgccataattctttgttagaataatcaaggtcgattatgtcgctccaatcaccgactttgttgccaaaattgccgtccgactttctgtagaaaaattcgggatgttcaaccgaaagatttgagtcgggcgaagtgtggttatagacaacatcaatgatgcacttcatgccctttgcgtgaattttttcaacaaggctcttgaaatcgtccattgtgccgtattcgggatttgttgtgcgatagtccttgtttgcataaggacagccgagagagccttttttgttcttgacgccaatcggatgaatcggcataaaccaaatgatgtcagtaccgagtgactttattcggtcaagatcctcggcaacggcattaaatgtgccgtcatttgtgtggttacggacataaaccgaataaataaccttgtttctcaagctgatttcagtattttttgccatttaaaacatctccttatgtatttttccacggtctgtttttaccgttccaacctcgttctgcccagtaatttttatcggcttcattccagccgcttttctgaatcattctcataataaagaaaaagccttttgtttttaaccctgccttaactttgccgttatttttctttaccttattggcaattgaggtagtctttttgtcaattttctttttgagttcatcggtgacgcctgaataatttgttgcacgaacattgacaccgtaacgataagtttttggaacgccccaaaagaacatactgtcggcgatatccttgttggcagattttgtacccgaacctgcggctgtcgaaattacaaccgcctgctttgtgaacattttctgttcgggacggtgaaccatccaacgataaccgtaatgatcaagaaatgctttcattgagcctgtgcaatgataaacatacacgggcgttgtgaagatgagtacatcagccttgtccatagcctcggtaatctttttcagtcgctcataatgcggacaaagtgtttcggattttagaaaacactgcgtacaacctacgcaaaaatcgccgaaatctctcggaagaaaaaactccgtaacctcgccgcctaatttatcggcaacctgcttgccaatatgataggttgagcctttatggttctgaccgtttattactgcaattttcattttatgtcaccaaattcatcaatttcaagtcaattttagcacaacaaagcaatattgtccatatgatttttatgccttttaagagcatttttatgcggattttttattttaaaaaaacagctccctgaaaacagggagctgtgataagtacaaatagatttgtcaaacgaatcagaagtcgatttctgtatcgtagtagcaagccttgagaagtttttccatttcttcctgatttggctggcgtgggttagaacctgtgcaagcatcggcaattgcgttcttggcaacttcggggagcttttcgaggaattctttttcgtcgataatgctctcgtcagccttaacaccgcccggaccgtagttcttaatgccctgcggaatgttgagctgatcgttcattgaacggagttcagcgatgagtgcgtcaacaagttcttctgttgtttcgcccttgaggttgatgaacttagcaatcttagcataacgctcagctgcaacaggatcttttgagttatacttgataaccttaggaagatacatagcgtttgcacagccgtgaataatgtgaccgcctgtgaaagccgcacctgtcttgtgagccattgagtgaacgataccgagcagagcatttgagaatgccatacctgcaaggcactgtgcatcgtgcattttatcacggcaatccatgtcgccctcataagacttcttgaggttgtcgtgaatcatctcaattgcatggagtgcaagcggatctgtgtactcacagttgagagttgaaacataagcttcaattgcgtgagtcatagcgtccatacctgtgtgagcagtaagtttagccggcattgtttcggcaagtgcaggatcaacgatagcaacatcaggtgtgatattaaagtcagcaagcggatatttgataccctttgcatagtctgtgataactgagaaagccgtaacttctgttgcagtacccgatgttgacgggatagcgcagaatttagcctttgtacgaagtgtcgggaaactgaacggagtgatgatttcctcaaaggttgtgttgggatactcatagaatacccacatagcctttgctgcatcaatcggagaaccgccgcccattgcaacaatccagtcgggttcaaattcacgcataacagcggcgcccttcataactgtttcaacagatgggtcaggctctacgccctcgataagcttaacctccatacctgcttctttaagatagtcaacagccttgtcaagaaaaccgaaacgcttcattgaaccgccgccgacaactacaacagcctttttgccagataaatttttaagacttgagagagcatcctcaccatgatagagatctctcggtaaagtaaatctgtacattttaattacctcctgaaaggatattttgtcaacttctccttgactaccgtaattataacaccgaagatttataaagtaaataccttttttgaaaataatgtgtgtttattttgtgaaaatttcactatagttctttattggaatttatattgagaaatatgctcagttacagcccgtaaatgttgtcatcgcccttggcatatttcttaacagcctccataaaaagctttgcagcaggatttgaaatattctttccccatgccataacataggctatgcttgtgtccgcatcatcaataaggtatgaatcggtgtattcgttagaagtgtatgcggcaaccgaggttggtatgacagacacgccgattcccgatgacgatgacacatatatggaaacaagatcgtcaaatgaattactgattttaggagtaatatgaaatgtacggaacaagtccataatttccatatacacaatcggtgcaaccgattccgaaagtaccagaatactttcgtcagccaattcggaaagcttaacgctttttcttccgctgaattttgaatttttcgctgttacaacggacaaagtttcattatgtgtaatgattgattcaatacctgagctttcgggaaccatatctctcggcataaagcagaagtcgtattcaccgcctgtgattgcaagtgtgcggtcagcctcgtcaagctgtcgcacatcaattgtaattcccggatatttttccgcaaagtcggcaatacattttgtcgggaacgaaagcgaggtaacatcacagccgagcgtaattttaccctgacctccgtcatgcatctgcttgataacggtttttgctttctttaaagtttcaacaatttcaatcgcatagggcaaaagcgccttgccctcgcttgttatgataacatcacggtgagagcgtgtaaaaagctgaaccccaaactccttttcaaggtcgcttacatatctgctgacggttgactgagaaacatagttccgccttgccgcctctgaaaaattgagcgtttgagccacagttataaagcaattgagctgatttatatccataataacctccgttttgacaatttcccacagtattttgtcggtttttttcaatattatgcaaaactgtaaatttaagactgccaaatcgtcatttttgcataatcaacggtattgaataatttttccatatttggtacaattcaagtatagcataataatatgcaaaatgtaaataacttattttaaaacaaggagcttaacgaatgaagaaaatagttgtaaccggtatgggtgcggtaacacctgtcggcatcggtgttgaaaactactggaatagtatcacagcaggagcatctggcattgacacaattaagacttttgatccgtctgaactcgctgttcagattgccggcgaagtaaaggactttaatccgtccgactatcttccaaaggatttaatcagaaaaacagatccgtttatgcagtacgcttatattgcggctgaggaagccatgaaacagagcggaatcgagattgaacccgaaagaacgggtattgttatgggtactgcaatggcaggtattgcaacaatcgcatatactcaggaggcacttacaggcgcatcacacaaaaaggtaggtcctcgttttattcccaaaattctcggaaacattgccgccgcaaatatcgcaatcgactacaatattcagggaccgagctttacggtaagcacagcttgttcgtcaggcggtgacgcaatcaacacagcttgtatgtgtatgcagagcggcaaggctgatattatgctcgcagtaggagcagagtccgttctctgtcctcttgtaatttattcgcttgccaacgcaaaagctctttcaagaagaaacgattcgccaagcactgcaagccgtccgtttgatgttacccgtgacggttttgtaataggtgaaggcggcggtgcgctcgttcttgaaacagaggaacacgctcttgcaagaggtgcgaagatttatgcagaaatcagaggttgcggcaacacggatgacgcttaccatgtaactgctccgcaccccgaaggacgaggtgcaaccgcttgtatgaaacaggcaattgcagaggcaggaatcaatccttccgacatcggctacatcaatgcccacggtactgcaacaaacaagggtgacacagttgaaacatcttcaatcaagaaggttttcggcagcactctcccctatgtaagctcaacaaagggcgcaacaggtcatatgatgggcgcaggcggtattacagaaacaattacctgtgtcaaggctattgaaacaggcacagttccgcctacaatcaatctcaatgaggttgatcccgaatgtgccggcattgactttgttgcaaataccgcaaagaaagccgaaatcaactttgccatgtcaaacgcattcggattcggcggtcagaactcaagtattatcgtaggcaaatacggcaaataatctgccgacaaaacaacatacaagcaacacacatatgtgtgtataaaataatgtacacccatacataataggacagggggatattatgaatttaacatatgattcacagatgttcagagaaacatttgaaagtgaatttacatggcttaacggctttatgagaaatgtaagacgcttttcggataagcctgccgcaattgatcctcagagcggcagaacatggagctacaaagaacttaatgccgatgcaaacagatttgcaaacgctatgaaaaaagacggcgtcaagaaaaacgacatcgtgtttatgcagctttacaactcaccgcagtttttgtttggttacattgcaccgcagaagctcggtgcaatctcaaatcccgctaactttaacctatcaccgggcgaaaccgctgaaattatgggacacaacaagccaacagtttatgtttacgacgaagacattatgcaaacagccgtacaggctcttgaaatctgcgagcataagccaaaattgattctctgcgttaataattccaaaaaggaagtaactcttcccgaaggacacattttctttgacgattacatcaaggacagcagttacgaaaatccgcctgttgactatgcaccgcatatttatgacgaggttttaagacttcagacctcaggtacaacaggcactccaaagggcgttccgcttaacgcaatcaacgaagttctttcggctcacgatgtaattatgcactttccgctctcacccgttgacattacgatgaatatgacgccgtggtttcaccgtggcggtattcattcgggcggtcctacacctaccctttatgcaggtgcgtgtcttgtgattatgagaacattcaacccgagaagctgcatggactttatcgaaaaatacggcattacatttatcacaggtgttccgtcaactcttgagatgcttgcaaaccgtcaggaaaaacatcagaaaaacctttcttcgctcaagggcattattaccatgggcagtccgcttgaaaaagccgcttgcattcgctatcaggagcttctctcccccaacatttttaacggctacggcacaacggaatctttctggaatacatttcttcgtccgtatgaccttcctgaaatggcaggttctgcaggcagatcatgcacagatgatgaggtaagacttgtaaatgtttatgacgacagaaaagcagagcccgatgacacagtcccctgcgataacaaaacagagggagaaatcatcatcaaatgtccgaacaaaactacctactgctatgtaaataacgaaaaggctacaaaagacaagttctacaagggttggatgtacacaggcgacatcggcacttggaacagcgagcagtttgttacaattgcaggcagaaaagatgatatgattatcagcaaaggcgaaaatatttatcctgcaagaattgaggaaattctcaactcacacccgaaggttcaggaatgtatcgtaacaggtgttcccgattcaacaagaggcgagtgcgttgcggcatatgtaatcaaggccgacgaaagtcttacggttgccgagcttatcaatttctgcgacagctcaccgaatatttcaaaatatcaggctccgagatactaccgttttgtcaacgatcttccgcaaaccgctacaggcaagaaacagcattttgtaataaaaaaacaggcagcagaggaccttaaaaacggtttgttgcttaaaaaataattacggattttccgtatatatgtaatggagaaaatatgaccgaaaaattatacaaatcaaaggtttcatactatgaaacagactgtatgaacattgttcatcactcaaattacatcagatattttgaagatgcaagaattcagtatatgcacgacatcggttgtgatgttgccgaaatgcaatcaaaaggattatatattccaaatgttgacgcatatgcccgttacaaaaagccgcttaaattcggcgatgagtattccgttgaagtaagccttgtattttttacgggttcaagaatgatttttgactataaactcttcaacaataaaaacggagaactttctgcaacaggcagaacaacacactgctttgcaactcccgagctaaagccgataagcataaagcattcaaatcccgattattacaatcgacttcgtgacaacactgtcgatacggaagatgttacaataaaaaggtaataatttcataaacaagcaaaaagtgcgtaccgaaattcggtacgcacttttttgatataggaaaataggaaaatatcagtcgtcaaagtttggagtctgaattgcatcgtaacctgtttctcccgtacggattttaaccgcctgtttaagatagtaggtaaatattttaccgtcacccgggttgcccgtaaaggctgtttttctgattgcctcaattgtttttctctcccattcttcggaagaaacaacaatttcaaacttgattttcggcaaaacctgaacatcaaccttctgtcctcttacatactccgacataccacgctgaattccgcagccgacaacctgatacgctgtaattccgtttacgccgatatccgtgagagcctttttgacatctacaaacatttcttcacgaacaacggcctctatttttataagctgaatatcgttattgttttccatactttaaaacctccgttagttgtcaagaccgttaaatgacggataagcagcttcaccgtgctgtgaaacatcaagtcccataagctcatctctgaggtcaaccctgattttgcctgtaagaagtcttgtgatgccgtagcagatgagtgttccgacaaccgcaattacaattgtgatgccgatacctgccgcctgagcaccgaactgtgcaaactcaccgtacacaagaccgttacctgcactgctgttgattgccgtacatgagaacacacctgtgagaagtccgccccagataccgcctgtaccgtgacagctgaatgcgtcaagcgcatcgtcaaagccgaattttttcttgccgtatgaaatcataatatagcaaacggggcttgttgtcaaaccgataataactgccgcccacatcggaacaaagccggcaccgggtgtgatacctacaagacctgcaaccatacccgtgcttgcaccaataagcgtaggctttttgttcttgataatatcgcagagcatccacgagagcattgcggctgcggctgaaacacccgttgtcataaatgcgtgagccgcaagaccgtcggcggcaagtgcagaacccgcattaaagccgaaccaaccgaacataaggagcgacgcaccgagtacaactgtcgggatattgtgaatcctgtaaattgaatgttcataatcgtgacgcttgccgaggagtatgcaaagtacaagtgccgaaacacccgaactgatatgtacaacatcgccgcctgcaaagtcgagagcaccgataccgtctgcacctaaaagtcctccctgtccccacaccatgtgagcgagcggataataaacgataagcgaccagaaaattgtgaaaacgaaaattgacttaaacttcattctgcctgcaaccgcacccgtaataagagcaggggtgattacggcaaacatcatctggaacgctgagaataccatattcggaattgacgcaccatccgtgtagccctccgtgagtgaaacaccctcaagaccgagccaacggaaatcaccgataaaagcatttcccgaaggagcaaacgaaagcgaataaccgaaaagcacccacataacaattccgacaccgataataaaaattgatgtcatcattgtatttacaacatttttctttcgtacaagaccgccgtagaacattgcaagacccggagtcattacaaatacgaaagccgcacaaagcagcacaaagcctatatttcctgaatccatttttaacctccacataaaccgtttttgccgaagcaaaaaaataaagctcacaatgtttttatccgattttgcaagtttttaaaaatttgttgcaaaatcagaagaaaccaaagtgaacttccttgtcctttttatattcagttttccgaaaacttcgtaagacctttgccttactgtcttgaattataaagccttattaaccgattgtcaatactttttgaatattttttaaagttttttgctgttttttaaattacagtttacaataacaggtcaaaaatctaagctacggcacaaatttaatttttgcaagtttatttaattttcttgcaaattatttttttgattacagcatattctttgtagcgtttgtagcggagaacctcgttcgccaatcggtttggttacaaaaccaaaccgactcaatataaattatttgtttaagataattatgatataaaaatacaattgcgatttattcatttcgtgttagcacacgaaatgattggcgaacacagttcgccgctacattaaattgtgcaaacagctactatactacgctcgagcataatatgttttttatattgcaaaccatattcccgaccgcaattttccattttcaattttcaatttttcatttaatgaacctatctatacgaatcaggtacggcggctcgccgtactggcggataatatcgtccctacaaaataaaaactacggtcaacataatcctgtcaaccgtagttaaaatcaagatattttattttgcaaaatcggacgctctgctttcacggataatattaaccttaatctgtccgggatattcaagctcttcttcgatttttttacagatatctcttgcaagcggaatcatacgctcatcattgacaatttcaggcttaaccataactctaacctcacggcctgcctgaattgcaaaggtacgctcaacaccgtcaaaagaagacgcaacctcttcaagcttctggagtcgcttaatgtagttttcaacattttctcttcttgcacccggtcttgcggctgaaatagcgtctgccgcctgtacaagacaggcaacaattgttctcgcctcaacatcaccgtggtgagcgtgaatagcgtgaataacagcgtcgctttccttatactttttggcaagatcgacaccaatctgaatatgtgttccctcaacctcatggtcaatggatttaccgatatcgtgcaaaagacccgcacgcttagcaattgtaggatcaagaccaagctcgctcgccatcatacctgcaatgtatgaaacctcaagagagtgatcaagtacattctgaccgtagcttgtacggtaacgaagtctgccgagaagcttgacaagctccggatgaatgttatgaacacctgcgtcaagcacggctctctcacctgtacgcttgatttcggattcaacctctcttcttgccttttcaaccatctcctcaattcttgcgggatggattctgccgtctgcaataagcttttcaagtgcaattcttgcaatttctcttcttacaggctcaaagcatgagagcgtgatagcctccggcgtatcatcaataataagatcaacacccgtaagagtttcgatggctctgatgttacggccttccctaccgataattctgcccttcatctcgtcattgggcagaggaacaaccgaaattgttgcctctgaaacctgctcagctgcaagtcgctgaattgcaagcgaaataatgtttcttgccttgtcgtctgcttcctctttaagctgttcggtgtattccataatcttaaccgacttctcgtgagcaagctcattttcaagctgtgaaagcaaatagcttttagcctgttctgccgtgtagcccgaaattttttcaagcatttcaaactggctctttttcagagtttcaacttcttcgagttttgcatctgcatcacgaagctttttgttgaccttttcttccttgcgttccatattgtcaagctttttgtcaagagtttcttccttttgctggattcttctctcctgacgctgaacttccttgcgtcgatcggaaatttctttctcgctctcgtttctgaaacgatgaacctcgtctttaccctcaaggactacttcttttttccttgcttcggctgttttgattgcatcagccacaatcttctttgcctcctcctcagcacttccgatttctttctcggcagtgtttttgcggatggcaattccaaggaaaatacctgcacctgcgccgataacaactgcggcgacaatgcagataatacttatccacaatggcaatctggacacctccttagtttgattttttaatatttcacagttcccaatcaattagactttaaaggtgccgttaaaaagatattcaattttcatttttactttgtaaatatttttaatacattatatatacgcaaccgcaaaacaccgtacaggttgcacagagcgtttcaaaaggcgaaacgccataaaaattataaaaaatatctatatataacggctcttttaaagagtctgattaaaaaagtcgcaaaagtcaaaaactgtacttttgccaaaatccgcatcagcggactatacaattttataataaaataaccaaattgtcaagaataagcacgggaattttgcagataattattacggaaataaaaaagattacagctttttgacggttacagcttaaatttgccttaaaaaagcaagatgtgaccgtgttttttaccgtatttgtaaaaaagtcaaaaatttttcgttaaatttttgtcaagctattgaagaaatgaaaaaaatgtaatataatagaagcaccttagaattttaggaggaatttttttatgtcagtaaaagttgcaattaacggtttcggccgtatcggtcgtcttgctttcagacagatgttcggtgctgagggttacgaagtagtagctatcaacgatcttacagatcctgctatgctcgcaaaccttctcaagtacgatacagcacagggcggctactgcggtaagatcggtgaaaaccttcacacagttgaggccggcgaaggctcaatcatcgttgacggcaaagagatcacaatctacgctaagccaaacgctgctgagcttccttggggcgaactcggtgttgatgtagttctcgagtgcacaggtttctatacatcaaaggcaaagagccaggctcacattgatgccggcgctaagaaggttgttatttctgctcctgcaggcaacgacctcaagacaatcgtttacagcgtaaacgaaaagactcttacagctgacgatacaatcatttcagctgcttcatgtacaacaaactgcctcgctcctatggctgacacacttaacaagtatgcagaaatccagagcggtatcatgtcaacaatccacgcttacacaggcgatcagatgattcttgacggtcctcacagaaagggcgacaagagaagagcaagagcaggtgctgctaacatcgttcctaactcaacaggtgctgcaaaggctatcggtcttgtaattcctgagctcaacggtaagctcatcggttctgcacagcgtgttcctgttccgacaggttcaacaacaattcttacagctgttgttaagggttctgatgtaacagttgaaggtatcaacgctgctatgaaggctgctgcttctgagtcattcggttacaacgaagatccgatcgtttcttcagatgtaatcggtatgagattcggttcactcttcgattctacacagacaatggtatcaaagattgctgatgatctttatgaggttcaggttgtttcttggtacgacaacgagaactcatacacaagccagatggtaagaacaattaagtatttcgctgagcttggctaatctgaatttacagattattctttgggctgtcctttttggacagccctttttgttttccttttcggaagatatttattcttatttttctttattcgtaaaattatgctttaaaatgtaacatttagtcgcagtttataaaatatacacgaaaaattagttttaaattttttgaatttgcttgaaattgacatataattttggtattatataagtgtgagcaaacaatcaacaaacaacagatattaaacaaggagcaattcttatgaattacagctttaacgaggcaagaccggctcttgaagtttttcacaccggcgattcagtgcgtgcgtatgattttttgggcgcacacctcgtgaaccgtaacgacaaaaacggagtagtgttccgtgtgtgggcgccaaccgcaaggagcgtttcggttgcaggcgattttaataattggaacaacgaggcaaactatatgtataacatcggttacggtgtgtgggaagtgtttgtcgagggtgtaaaacagttttgtacatacaaatactgcattgaaagcgaatacggcgacaggcttatgaaagctgatccgtatgcttttcatgctcaaacccgccccggtcaggcctctgttgtatatgatatagaaagctattcgtggaatgacagcgaatggtttaataaacgcaaagaaaacaacatttcatcgtcaccgatgaatatttatgaaatacatgcaggctcatggagaaaatatcctgacggcaacttttttaactatcaaaagcttgccgatgagcttatcccctacctaaaggagatgcattacacccatgttcagcttatgccgattatggagtatccctatgacggcagctggggttttcagacaaccggctactatgcaccgacttcacgctatggcacaccgtctgattttatggcttttgttgacaagcttcacggtgaaggcattggtgtgattcttgactgggttccgtcaaattttccgacggacgatttcggacttgcaaggtttgacggttcgcctctttatgaaagcaacgatccaaaaacaagcaagcgtgactcatggggaacctgccttttcaactacgcaagattcgaggttacaagttttcttgtttcatgcgcaatgttctggctcgacaaatatcatattgacggcttgagaatcggcgcactctcctctatgctctaccttgattacggtaaaaccgagggtgaatgggaaccgaacaaattcggcggaaaagaaaatcttgacgctgttgattttgtaaaaagactcaacacggctgttcatatgtaccaccccgatgttatgatgtttgccgaggaaaacacatcgtggccaaagcttactcataaaatagaggacggcggtcttggtttcgacttcaagtggaacatgggctggatgaacgatatgctgcactatatgtcactcaattcgatgtggcggccgtttaatcatgacagtcttactttcagcttttattatgctttttcagaaaaatttcttctgccgatttcacacgacgaagtttctcacggcaaaggctcactcataaagcagatgcccggaaagtatgacgagcagtttgcaggcgtgagagcattcataacatatatgtacgctcatccgggcaagaaactcgtgttcatgggaactgaaatcggacagtttgacgagtggaatcacgaagaggcaattcaatgggatttgcttgaatttgaaaagcataaaaagctcagaacattttttaaagagcttaacaaattttatcttgactgcaagccactctacgaacttgacacggtctggaaaggctttgactggattcaccatgacgattacacaaacagtgttattgcattcaagcgcaccgacaaaaacggtgatgaaattgtttcggtatgtaattttcagcccatcaggcgtgacgaatactgcatcggtgttcctaaatacggtctttatgacgaggttttcaactctgatgaagagcgtttcggcggaagcggtgttgtgaacggtaataatatcaaaaccgaggtaatgaaaattcacggttttgatcagggactttcactcactctcccccctctcagcgtaatctatctgaggtgtgcaaaagaacttaaacccgatgaagctcagaaagaaaattgatattttcagtcacaagactgtaattaataagtttaataaagataataaaataaatatcggaggtattttaagatgtttccaaaaaaggaagtagtggctatgctgcttgccggcggtcaaggctctcgtcttggcgtgcttaccaaaaagcttgcaaagcctgccgtaccgtttggcggcaaatatcgtattattgatttcccgttatctaactgtgtaaattcaggcattgacgctgtaggtattctcacacagtaccagcctcttgttcttaacgaatacataggaaacggacagccgtgggatcttgacagtatgcactcgggtgtaaactgtctcagcccttatcaggctgttgacggtgcagattggtattcgggaacagccaatgcaatttatcagaatatcaactacattgagcgttataatcctgaatatgtggtcatcctttcgggcgaccatatctataaaatggactacaacaagatgcttgaatatcataaggaaaagaatgccgcttgtacaattgcggtaattgatgtttcgcttgaagaagcctcaagattcggtattctcaacacaaatgaggacggctcaatctacgaatttgaagaaaagcctgctcatccgaaaagcactaatgcttctatgggcatctatattttcagctggaaggaacttaaaaagtatcttacggaggatgaattcaaagagggttcaagccacgatttcggtaaggatgtactccctgccatgcttgacgcaggtgagcgtatgtttgcatatccttttgaaggctattggaaggatgtgggaacaatcgacagcctttgggaggctaatatggatcttctcgatccaaaggttactttagacctcaaggatatctactcaagaaacccgatgatgcctccgcactatgtttcaaacgaggcgtcaatccaaaattcactcgttgccgacggatgcaatgtttacggcaaccttgagttctcaattctctttgcaggtgttacaatcggtaaaaatgctacgattaattcttcaatcatcatgcccggtgcggtaattgaggacggtgccgaggttcagtttgctatcattgccgaaaacaccgttgtaggcaaaaatgcaaaagtcggacaaaaccccgaagaaacggaaaatattgacgactggggaattactgttgtcggtgcaaataccgttatcaaagaaaacacagttatcaaagcaaaaaccatgatagacagcgacacggaggtggacggcaatgagaagtaataatgtactcggtttcatctttgcggcaacacttgacgacaaaatccccgagcttgcatcttcaagaacaactgcaagcgttccgatcggcggaaaatacagaattatcgactttgacctttcaaatatgtcaaactcaggtatcagcaatgtaggcatagttgcaaaaagcaactttcagtcacttatggatcatgtgggttcgggcagtgcatatgacctttcaaagagaaggagcaatctttcaattctcccaccatatgacggcaaggctttttcaagctttgttgaaacaatctacaatatgcacggctacattgagcattgccgtgaggagtatgtgcttatttcacagggcaatgtaattactaacattgattacacagatgtttttgactttcactcaaagaagaaggcagacattacacttatatataagaatcatgcaattccgcagggctatgacagaccgattacccttgatgtagataatgacggcaaggtaaatcagatttttgtaaagcccggtgttgttgacaaaggggtattcaaccacgcatacggctctattctcatcaagaaagaccttcttatgagtgaaatccgaaacgccatcagcgttaatcagcttgatgtaaagcgacttcttcagagcagtctgggcaaatacagtatttatgcttatgaaaataagggttactgtgcggcaatcagctcaatcaacgattactttgagttcaatatggatcttatgaaaaaagaagtaagggatgagcttttcaatccgcaaagacctatctatacaaaggtaagagatgacgctccgtcacgctacggacttacaagcaatgtgaaaaattcaatcattgcacagggttgtgttatcaacggtgaggttgagaactgcgttatttcaaagggcgtttatgtcggcgaaggcgcaaagctttctaactgtattgtaatgcaggacacaaaaataggttgcaataccaacctcaactatgttatcatagataaggatgttaccatcaaggatggtcgatcacttatgggatatgattcgtaccccatttatattgctaaaaaatctgttgtataaagttgtttaaacaggaggtaatcttacaatgagaattttatactgtgcttcagaggctaatcctttctgcggcagcggcggacttgctgatgtagcaggaagtcttccgcacacactttgcagaaaaggtcaggattgcagaattgttgttccgctttacggcacaattccgcaggaacttaaaaactccatgaacttcatcacaaactttaccgtgccggttgcatggcgtcatcagtattgcggtttgttctgggcaagatggaatgactgtacatactattttattgataacgaatattatttcaagagaggcactctctacggtcattatgacgacgctgaaagattcgctttcttctcccgtgcaattcttgaaatgcttccttacattgatttccatcccgacatcattcattgtaatgactggcagacggctcttgttcctgtttactactatctgttctattcacacagaccatggtactataacattaagagtctgttcactattcacaacattcagtatcagggtgaatacggctgggaagttaacacagagtgcgtcggcattcctgcatcagaaacaaagattcttgaaatgaacggcaaactcaatatgatgaagggtgctatcgaaacagctacccgtgtttcaactgtttctccaagctatgcggctgaaattaaagacccgtggttcagttggggacttcatgacgaactcaatcttcgtcactacaagctttgcggtatcaagaacggtattgacacagaaagctacaatcccgaaacagactatcagctttatcgcaactattcaaaggacgatatgagcggcaagggcgaatgtaagcgtgctttgcaggagcgtttgtgtcttgaacagcgctgggatgttccgctggtcggtatggtaacaagacttgttgcacacaagggacttgaccttgtaagaatgggccttgaggagcttatggacacagaaaatatgcagtttgtaattctcggttcaggtgacaaggagtacgaggactacttcaactatatgcaggcgaagtatccgggcagactttgcttctgtcacggctttgttcccgaacttgcaagaaagatttactcaggcgcagatattttccttatgccttctgctcaggagccttgcggtcttgcacagatgattgcactccgttacggcacaattcctgttgttcgtgaggttggcggtcttaaagactctgttttcgacagtgccgacaactacggtaatggatttacattcaaaaactatgaatgtgcagatatgcagcttgccgtaagacgagcattgtggggcattcaggacgatcagggttggcatcagcttatgtggcgtgctatgatgagcgacaacagttgggagcgttcggctcaggactacatcaatctctacaacgataccctcaagtgggcttaatcgtgcagtcaaattttataacaaaaattcagtcggaaagcagatttcaaatttgctttccgacttttgatttatttgaaatagcaatcttgtaggggcggatattatccgccagcacggcgagccgccgttcccaattcgagcagatagtttgatagaaaaacaattccaatgcccgaattaggtgaatttatgtttacaaaaaattatttttcacaaaaacaaaaaaggttggaaactactgcggggagcagtcgatttccaaccttaaaattttgcattagtttttcatcaggttctctttattgcgtgcggaacacgaattttacctgcaagcttaccaagagcaaacacaagaataatctcgggaatgcacttaacggcaacactgatgaatcttgctgtaagataaactgtgtacggtgttgaaccgccgccgtagagtgtgtaaagccaaaaagctatgaggaatgtttcaacgcagagcatatttgtaaaccatgcaagaacaactctgagcggagttacattgttcttataaagaaacataccgtagataaaacctgtaataaagccgttgattgtaaagccggggaaatatgcgcctgtcggggcaatgataaatgaaagaatatctcccaaagcgccgacaattgcggcagggatcggtccgaacattacgcctgttacggctacgggaaggaacgctgcactgagctttacattgtttccgaaaaacggaagtgtgctgtttgcaaaaaatccaagaacaatacggagtgcaagcagcattgcaattgccgcaagagcgtagatactcttcatttcaagcaaagagctttgaatttttttgagttgtgacatattttttacctcctgaatctctgttgttgcttcaggaagaaaaaagcggacagattgctctgcccgctgaattatatgtcccaaagtaacagcgggatgcgaaatctgtaccgcaggataaacctttcgttcttgcggcaactccccgtccgcaaaacacttcacgcacaaatttctactctgtgatagatgcctttcgacaccgtatactattatacgcctgaatttgctgtttgtcaaccaaaaaattaatttcgggtttactgaaccgttgcttttttcttctttgtaagaagggcatcgaggctgtggataagtcttgaaagcggcttgtagattatgaaaacaactaccgaaatgatgagtcccttaatgatgttgaatggacctacgcaatacaggcagaatgtaaatgtgccgtcaattgcagggaaaattgcctgtcccattttgataatttctgtaagcggcataaatgacgagtagagcggaacaagcacgaatgtgttgagaaccacaccgattgccgccattgcaaccgtacccgtaagcattccgacaatcgcaccgactcttgtttttttgtacttgtagatgaaacctgccggcagaataaacgaacagccgatgaggaagtttgcaagctcccctactccgcctgtgcttgtgcctttgataaggaacttaacgagaatttttacaaattcaattactacaccggcaatcggccccatgctgaatgttccgacaagaacgggaacttcggaaaaatcgaactcatagaatgaaggtgcgatgaatccgagaggaaattcaaagaacataagaaccgccgaaagtgccgcaagcattgcggttacggcaagctttgttgtctttgccgtgttgtctgaattgattgtttttgcttttgattttgtcattacgaccactcctgaaaaattatttcgagttgtcgggaaaagaaaaatcccgctacaaatgtaacgggattgcgtaccaaaataaaacagacgaaccgcctgttctgccgcatcttctcgtatccggactataaccgtcggtgtctgaatttcacagactcggcaggctttcacctgttcgtggactttaaccaccggtggagaatttcactccgccccgaagacaactgttgattatattatatgccgattttcggatttgtcaatatctcttcagtgttttgagatattttttcgtttcatcgtcaattctgaagctttcaacgcatttccgaatcattttattaaaggttgcattatcaagcgaatttgactttatgtaccgcatagtctgttctctgcactttgcaagtgccgttgcaacaagccatgcccttgccatactcacataataatgcggatttttcgcactgtcacaacattcaagcacagtgtctatgtactcatcttcaagataatagtcgagcatcagcacaagacctgcacgaattatccacggattgtcgcttttggtgtattcacaaacatgaggaaaaaattcggatttatactttttcgtctgctttaaatttgcacaaaagccgtcgcaaaccgcccagctgtctatacgctgtacaaaatcatcgctatacatcaaaaattcttcatagctttcggttttgagcaaaccgattacaatgcctcgcattgttttttcctcataagaattatcggttgtctgctccaaaaaactgcgtccgttgcccttagaaatttccttgccgagctttcgcataacaggcattcttactccgataaaaaagtccttgtcattgtcgggaatcaatgaggaatgaaagcttctgtacttttcatcggcatatgaacgaagttcccctacaaaatcatcatagtcatttttagtccaattatctcttataagctccataatgcaccattatttttacttattatttcttttgctatcataaatttcacacggtgagttcaggtcaagatatgcaatatcgtggtgtggcactctgtcctcaaccggcggaagctgcatataatcaccgaaaaccattttgagatactcgtcataaccagacatacacggcatttttatgccctcaaatgtgacataatcaacgcccgaataaatgtgtttgggatactcaattttcatccaatgagggcctgaacagagctccgttacacacttgtttttatcaagcctgtacttaatcatatgcttttcagcagttctccaaatcttttctcggagcttttttcctctgaaaattgaaagcaaagccttactgcctgctcccacaattccgccgtgcttttcgggaacaacctgagccaaaaacagcgaataaagcattgtccacacatactgcattttgcgtgcaaaacggctgtcgggacaaacatcaagcggaaagacatcaagcacaagtccgtgcggaatatcaacctcggtctgatttgttttgaccatagtgtaatttgtgtcggttacggtcataaaaatattgcccgtgaacatatcgctgtcggttttgagaagtcgaaatcttccgtctgcgccctgttcatgccaaagcttgtacagcttttcgtagtcctctcgtggcagcataacatcaacatcatcatcccacggaacgaatccgccgtttctgagcgcaccgattaacgcaccaccgatgagatagaatgtgagattgttcttttcgcaaaagtccctgaaatacacgagcatatcaagctgtttaagctgtaattcacgcaaaagttctggggtaagttctactttttcagtcataagtatctccgtaaatatcaaatacgggcggagattatccgcccaaaagttatttgtatgaatgaccgggaagtgtgttttccctgatttttctttttaccttttcaatgtgttctttcgcaccgctgtttttgattttcttccgccatgacggaatctgaatcaaaccaacaattgtgcctattccgtaggcaacatggagcaacgggaaaatgaacggcaaaaacacaaactgaggctgaacatttttcattgtgcaacatccgacagcgtttacaatatcaaacattccgtaaattatcaaaagaatgtacaaaaaaagcggaagtccgagaaatgcaagcacggaacagccgagaagtgccattacaaaaagaaacggtgcaaagtgaaagtatgaaagacaaccgggacattccgagagtgtaagtcctatccaccgtccgtttgaatacttctgccttatcattccgtgaaggtcgtttcgtgaatgctgatacgaaataatatcggggcaacaacacatcttgtagcccgccattctaatgcggtagtgaaattcattatcctcggttctgccgagattttcgttaaatccgccgaccttggcaataacctctctgcggtaagccgcgtgaaaaaggctgtcaagatattccttttgcgcaagcggccgtctgtacgaagcaaccgaactgccgaacagagaatcctcagccgcaagcagggtaagcttccagcttgaaacatttgaagtgatattcggtctgccgccgcctacaacattttcaccctgctttatgttataaacatttcgtgaaacaaagtttctcggaattcttgcgtgagcgtcaactcttatgataacatcgccctttgcagtcatcagagcggcattccatgaggttgcctgattacgctttacgcattgaacaacggacacattccaaaagccgtagtcggtatcacggaacttttccattttctctttagtatcatcggttgacatactgtcaacaaataccacctcaattttatcatgcggatagtcctgaagtgcaatatccctgaaaagtccgctcaaagcattcgattcgttataggctatcatacaaagtgaaactaacatataatatctctgctcccttcaagctcgaacaaccattttgcagacattgcagaggttgtcagaaaataaggtacggcataaaatgccggaacaacaaaaaagcacaaagccgcccagccgataaaaccgataaacagctttattgtggagatgaagttctttattgaaaaagccatcattctcggaagataaattccgagcggcagatgttcgttaaaaccgtaagccaaaaatgtataatgaacaaaaataatgtaacacaccacaacaaccgcagtgctgacgataaacgccaaaacaagcaatacagccacaaccgccgtgagtgagggtgaattttcaattattttatccgaaaccgcactaagataattgaacacattgagcagaccgcttatgataaaaaacaagccgactgaaattacatcaagaataacagacttaaaaaataatttcggctttttataatagtaaaaaacatcaagaggactgcactctctgcccctgactacattacacacacttctgtaaactccgtttatgagcggcagacacacaacaacaaaagcaaaaaatacaagcccgaaaatcattgtaagcatctgctgagtctgattcggattttttacaccataaagtcctgccacagacattgcaaggctgaacgcaaacagccctgtcaaaaatgcaagcacagcgaccattatctctgagataattaccgaccgattcccctcaagaaccttttttgcctgttttctaacagttttttccgtattcattagcattcccttttcatctgaatttgttcatagcgaaacgcattattctccgtcagtaaacattctgtacattgcctcaaggcaaatctgagcgtgtttaaagaagttctccttatccatactttcgtctgcattgtgcatacgaacatcgtcatttttgaatgcaggaccgaatgcaacaccgttacctccgagcattcttgcgtatgttccgccgcctgttgaataaagctcagccttttcacctgttacgcttacataagcgtcagagagaagctttacaagcttgctgtccttatcggcataaagcggttcttcgtgattgagaacagtaaccttgaggtcgctgatttttgcaacctttttgaactgtttgagaactctgtttccgctcacggtaacgggataacggatatcaaacacagcctttgcggtctgtccctcaatattcacgctgctgaggtttacggtgagcgagcccgaaacagcgtcgctcattttaagaccgagtgatctgccgtttgtttccttgttaattgcgtagtcaataaatgaacagattgaacctgtttcctttgttgtgtaaacatttgagataaggtcaacaagtgccgctgcggcattgtagcccttgtccggttcacacgcatgagccgctttgccacgactgattatcataagaccgtcaatagtgtaattaaattcaaaatcaccgtcacttgcgtctgcaaggcgcatgagagtctgctcgtcatagtctgatgaatcaagcattacatacgctctgtcgggaactgcattaactgctctgcctgcatggaactggctgagtgttgttgcattatttaaaagtgtgctgacttcaagctgaagaatacccttttcggcaaagcagatgccgtagtcgctgtcgggagtgaatgccatgtcgggaagtggatttttcttgaaataattttccatatcctccatacccgtttcttcacccgtgccgtaaatagcacgcagagtgttcacgccctttacaccgctgtccttgattgctttcaaacaatagagagtaacaagagccgcacccttgtcgtctgcaattcctctgccgtaaagtctgccgtccttttcggtaagcgcatacggcggaacgctccagctgtttcccgcaggaacaacatcaaggtgagtaagcacaccgcaaagctttccgctgtcgccaagggttatatgaccgctcttgtcggttgttctctcccctgtcagtccgaaatcttctgctcttttaagaataaaattcaaggcattatcgcactcgtcattcttttcaccgtcaaccgattcaaaagaaagaagtgtgttaagatcctttaaaagttcgtctttgaagtcaagtattttgtttccaaacataataaatacctccgtacttaaatgctgattatatctttatcagttcttattttttctttttttaactgttttaacggtcacaataaccgcacagtagattaaaaatgctccgaatgcgcaaaggctgattttgacacctgttgaaaatccgggtgtttcgtaggtgaacacaatgtcacacttttccccctttggaatcttaacagccataaagccgtagtcaaccttttcaacatctgccgccttgccgtttacagttgcggtaaaaccatcgctgtaaggaacgctgaaaaacaacaggttatcgtcaccctttttattattgtaaacagccttaaagccgttatctgtatattcaaatgaagtacaactgttcaaggctctgaggttacaaacctttttgtaatctgaattactgtaatcaaacttttccgtaatgctgtcgtaatcctccggatgtttgccgtacaaaagcttgtacttttcatcgctgtagcccgtaatatcggaatacttcttcataaggtcacggggaagaaccattgcgtagagcaaagcctcggacttgtgtgcgttcgtcacaaggtcaaattcttcttcggcaatgaacttatcaaaggtgtatcccataggaatgtagtattcgttgcggtaaatatcaaaacggttctgcgttctgagatatttccaacccggcattcttgtgttgccgttttcgtcaacgaatgaattcagacttcccgattttccgtcgccacggtaatcaaaaagatacttacaactcagaaacgggcgaagtccgtatacatcaaggtcaggtcttgacgcaacatcccttgtaattccgaatgcatcgtaaaactgcattatagatgttgaaacagaactctgaaagcagttaatgctctgaatctgccagaacattgccgtgttgtcaacacattcgtaaaaatcactgcgaacattgtcaatatcggcaattgtgatgccgtcacgcctgtttatgatatcttctttgatggcatttgtactgctgcttgagaaatagcctgtagcgattataaaatatgaggtgaaaagcgaaacgctcaggatacctacagtgagcataaccgtaaatctctttttgtttcgtctgaattttttgatgatgagaacgaacgcaagcagacttaacaaagccataagaacatagagccaatagcgttcaaatgttgcctgagtgccgataaccgtattttgaatatcgccgctctcctcatccgtatagctcacaggcataagacctatcagcagagttgcgcctaccgtaattcctgccgaccaacgaatcgccctgttccaatcggtttttctgttttcaaacgccttgattgttgcaagaacaagcataagcacgcccatatagaaccatcttgcgtagtaaattgagctgttcataagctggaacatactgttcaaaacaggcacacacgcaaacaccgcaagcacggcaagaagctttttgagccagctttttcggcaaacctgaaaatatgcgataactcccgtcattccgacaagcggcaaccatgccgcaacagacgcccatctgcaatttgagccgggcgtgaacacagggaacgcaggcatatctgcggggaaaaacaggcttaaaattatcagccagtatttttgcggttgactgtagacaagcgaatcccagccgttcggaagctcggcaagccttgggtttcccattaagccgagcactgacggcagcagtatgaatgccgttgcaaggaatcctatgataacctcaagcgcaagcaagagaaaatttttaactttaaatttgtaggctttggtaagtgtaatcataagaaaatagatgattacgaacagcacctgtcccacaaagaagtagtagttcacaacacaggcggagaataccgcaagtgagaacactattctttttccgtcatagatgaatgcgtcaagtgccgcaagcaacagcggaaacattatcatcggttcatgaaagtggaaaaagaacacattgtagattgaaaatcccgaaaatgcatacagcaatccgcctacaagagcgaaattcctgtcagccacatatcttttcaaatagagatatgcggaaagtgacgcacagccaaattttaaaatcagcaacggtccgataagatacggtacagcctcactcgggaacggaattgtcagccaaaagaacggactgccaagaagataaaagctgaagcttgagagcatatccgttccgaggtcaacattgtgcatccaacccatatcaccgtttcttacggcgtcatgcacaagctgataaaacggaatttcctgaacattgaaatcaccgtaataatagaaaacaccgccccccattatgataaacgggagaaaaagtgctgttgcagttataattgatataagaaacacacgcaaaccgaatagtttttgtgttggatatttttgcaaaattctgctcggcataaaaccctccaaggagcaaaaagtctgaaaaaatctttttttcgataatttctttacttttaaattatgaatagtataatcagtaatataaatgtccttcaccgtcatttattcaaaagacacctacatattcaattcggagcaacgctctgctttgcttgcagagaacagaggacactcgcatttagattacattataacataatgcgatacaaattgcactaatttttagcaaaaaacaggagaaactacctatgaatatttcacatttttacgcaatgctttcaagaatgaggtacatcaaccgttggggacttatgaataacacacgctgtgaaaacctcagcgaacacagtcttgatgttgcagtgattgcacattgccttgttttgattcacaacaagcgtttcgacggtaatctcaatgccgaaagagccgcattgctcgcactttttcacgatgcaaccgaaatcataacgggcgatatgccgactcccgtaaaatacttcaaccccgaaatcaaaaatgcctataaggagattgaaacaacggcaggcaacaggcttgtgtcgatgcttccggatgattttaaggacgatatggataaaatcatcaaaatgaacggtgcaggtgacgatgaacttaaaaaatatgtaaaagcggcggacaagttttccgcactcataaaatgtattgaagaaataaaaatgggcaacagcgagttttcaaaggcaaaagaggcaaccgaaaattcaattcacaacatgaatatgcccgaaaacgaggtgtttgaaaaagagttccttccgtccttctatttgtcacttgatgaacaggattgacagttaccgacaaaaaaatcaatattttcagtcagatttttcgctaaaactttacgaaaaggcagattttaattctaatttagcattaaaagaaattctcatatggtataataaactatacttatgtattgtgtgctttttacccgattggaggagtaatatgccaaattacgaaaaaagcagtcagaaaagcgattttattgacataagctcaaataagcaggtcaaaaaattatacaacaaaaaaggcagactcaaaaggatcctttgtcttgtgttttcgataattttcctgttgggcggcggcggaatgctctactactattcatttcttgacactctcaacttcaaagagcttgatgacacaaacaacaacaacacggcagctaccaactcatcggttgcaccgcttgagggcgacgcaacaaatctttcgctttcagagggtgaacttctgcagaactccaaggagcttaatgttatgctctttggcgaagacaattcaaacggcgataaacacggcagaagtgatacaatgatcatgatgaccattgataacaaccacaaaaagcttaaactgacatcattccagcgtgacacctatgtttatatccccggttacggatatgacaagctcaacgcatcttataactacggcggagcaaagctttcaattcagacaattgaggcaaacttcggcatcaaggttgaccgttatgcggttgttgactttgacagctttaagaagattatcgacaccctcggcggtattgatatggaagttactcaggacgaaattgactatatcaactatcagatgtacaagaacaatcaggctgacacaagaacaactatcacagacgcaccgggtactgttcatctcaacggtcaggaagctctttggtatgctcgaaacagaggtcttaaaaagggcgaggacggcaacgaaatcggtcttgacggtgacgactgggacagaacctcaagacagagaaagcttcttgaaactttgttcacaagtatgaaaagtgcagacctcggtcagattgtttcaattgtaagctctgtcggtccccttgtaacaacaaacctcaagaaggacgaaatcacagcacttgtttctcacgctctcacatatctttcctatgatgtagaacagtattatgttcctgaagaaggtctttggtactatgatgataaaaccgaaacatggaacggtgcaatcacatcaacaatcaaaatttcagaccttgaagaacagagaaagaagtttgcaagcttcgtttttgaagaattgttcacaggcggtacttcttcaaaagaaacaacctccgcatcaaattgaatattgaacaaaatgcagacagccaattatcggctgtctgttttttacggcgagccgccgttccctattcgtgaagacaggttaattaaatgaaaaattgaaaatgtaaaatggaaaattgcggtcgtgaagacagtttgtttaaatacaaaacatattatgcccgagcgtagcatttgcagttttttctacaaaccgagccgtaagggcggatattatccgcctgctctaatgaatttttttgttcaataaatatgttttgatatgatgaaaattccgctgtaatataacaaccgcattgcgcataaaacaaaaatgcatcagaaccttacttggaatctgatgcattttatttgtttgattattattctattttcgtataataaatactcaaaaacagctgataaaattctgcctcgctgacattgaattctgcgtactttgaacccattgtaacctgaccggggactgaaaccatatcaattccgttcataccgccaagcacagcctgctgagcaagatatgacacctttgacgggttaagatttgtacatgaatacggagcggacgcattgaacaaatcgattggcgtggttaaatcttcctttgtctgctgaagaaccgtattcataaaagactgaatgtaaaccttctgtctttgcatacgcatattgtttgaatcggtcttgcttgtatcacgggttctgacaaagctttcagcctgctgtccgacaaggtgatagctttctccctcaacaaactccccgattgtttcgggtgacacaacatcaactccgccaacgctgtcgttgagagcagaaatgccgtcaaggtcaagcgaaaagtatgtattaatcggaatgttatagaacagcctctgaactgaatttaccgtattttcacagcttgattccttaccgtcaccgtatgaatacgaaagacaaatctgctgtttttccgtgccggcatatgcaccgcctgctgaatacattgtgacatcaaccatcgaatctctcgaaatgttgaagagcgttattttaccgtttgaagtgtcgattgacacaagcataagcacatccgcctgaccgccgctcgccttgactttgctgttattattttcgtcaaggttgcgcttgtcaacaccgatacacagaacattcgtcaccttttcgttgaactgatatgtttcaccgttgtatacgacatacttaccgttttcctcggtttcaatgccctgtggggcggtaacatgaatatccgtattaaacagctcgtttccgccctgataaatcaaatacgcaaccgtgcctacggtgagtataattaaaccaagtaatgtgcagccgattgacaaaagcacctttttccaggttttcatctttcgatgctttgaatggtgatgatgcgactttgatctatgctttttatagtgatttgtggtgttactcttcacgacaatgctgtcggaatcaacaccgtacacatctgtatatacttttttctttttctttattaacttgctgtccttgaaaatataaccttctatatccaaccttgaaggattgcttacatgctccttactgttcttttctcttttcgattcaagaatttccggtgtattcggatcaagcttgttttctatattttcagttgttgcctcagccgaactttcattttgtcggttcatctttcttcagcactccctgcacaagatatcttccgtcaccgctgtttaagcatgtgcttaaaacaagaattttatcatcggtagtaagctccgtatttctcttgttcacagaaacagaatgtgggtttttaatcatattgagataatccgaaaatacattatcatcggaaaaatcaaacgaattcataatgtgtcggttatcatattcaaaagctgacacaatttcgtatgtaagctttctgtcgggagtgtaaacatagatgtacctgttcttgttaaagaaatcggcatcataaaagcgatggagcgttgcaaacattgagccgtttgccatattatgaccgtaaagcacagtaactctgtcggaataatcacgcttgttgcacatctgcgaatagatactgcccgaaaagctgtaattcttataaatatcgtggtcaagatataagttatcgtcaagatgactttgcaaaacaggataatttacatttgtattcggaatgtaaatccacgaataaatgtcgctgttctgctgttgaagcgacttgaaatcaatcggattttcgatctttttcacattgattgacggtgaagtcacttctgttgcagaggttgtaccgttttcaatgcctgacgcatacgagcctgcgatgttatcaagactttttcgttcgttattttcatttaagtttttaacgactatgtacgcaagtgtgccgataattgcagccacaagcaaaataatcaaagctataagaaatttgtttctttttctgctcatatcaaaaactcccaatcggttatattgtatcatttttgtgtcagtatgtcaattaatcattgcctgttagtaaaattttattacaatttacaaactactgcatctgcaatacaaaacctgattattcaaacatctaatgaataaaaaagagacttccttatgagaagtctcttgatttttagttaaggttggattatttgctctttacaagcttaaatacagccgcaccgcaagccgcaagagaaagaactaaaattgcatacggtacaacatcgcttgcgcctgtctttggtgaagttgttgaatcatctttctttgccgtagctgtagcaacaggacctgttgtgccgccgctgcttgccttacggtaataaggagtacaaacaatgtcacctgaaataataatattcatattaggatctgtatacttgctgtcggttctgaaaggaccgcccgaaatttcccagtgatcaaaaacataaccgtcataaggaagcggctcaataaatacatgctgttcgcccttttcgtcaatacctgttgtgaacttataatcaccgtcaccgccctctgtcggaataatttcaaccttatatttgaatgtactcggttccggacttgcggcagcaaatgcgggaactgccgacaataacatcatca

SEQ ID NO: 34 - DNA, 8009 bp, unidentified
  source 1..8009: mol_type = unassigned DNA
tcatttcaaataatttttactgatcgtattaagcacttcctgcgctttttcaacttcctccgcctcttgtcctaaaattcctttttcaatttttactgccagttcagcctcttttattgcatcctcatattttcccagcaatattccctggcaccaggcatcaatcagcaggcattctgcataccagacactcttttttccatatatctctttcactctttccgtgatctgtgcccacatatccatgtgcagatctatgtctcttcctgctgttttcatatagcaaatcataagatttttttttatatacaattcatgttccaatcgatgtgaattactttttaatatgattttttcacacttctccagaattgttatcgcttgttcatatttttccatctgtatataacaagccgccagattattttgagttttacacatctggacaatattttcttcttgtttgtgctgaagttgaattatctcgctaataattttttctgccttttcataatttttcagtccatattcacaaaaagcaatcccttctagtccttgcagggaactaaaatcttttttgcgttctttttcagatgcacaaatcagaattttatgaaatattttttccgcttcttcataaaattgctgatttgacaatgccaacgccattagaatatttatatctgcctctaattttttcttttcttcccccgatgcatattgtttaatttcttgtatggcctccctatatgctggccagacaaccttatccatattttcttttgtcgctacacatgcatttatcaacgcagccgcatataaacgtagccgcctcacctgatctccctgttgtttctgctttttatatagagtaaaagtaatatcaaacttttctttttttctaaaatgcttttcaaacggagcatcatattccggctggaatggaatttgttttttagggttatactccaaaaacagaccgatataatctctcagattgggttcatacctttgaatttggtttaccataaacgttggcatgataaaaaccagacgaatcacattttttaacagttcccgggaaatatttaaacttttcaccacatttacagaatcaaaatacgttggaaaattataaatgcagatacatttctcctgctcattttcagaatttcctatttttctgagatactcaacgatcccctcttttaaatccatataatctacacattgtaaacaataactggtatgcatatactcacatatctgcatgccaatttccttatagttacattcaataacaacgattcctatacttgcatttttcatataaatgtcaaaaattttattctgttctttaaactgttctttcagatcaggcatttattctacctttttccctcaaaaaatctaccaataccggatgcactccacaccaacgttctccgttatattcaattactgcaagtgtttttaataattcgcttaaaatctcatctgtattttccggatgtggatcattataaatttcaatcaatcgctcaaattgttccggtgacgtaataaatctttcatacgtgcttttcagccgcatagctgcaactgttgcatcttccatggaaatctgctgtggttcggtttttgaaagttcaagtattgcacaatttgtaagcatggaaaaaagatccctgattgctcctcctgattttaatatcatatatttgagtgcatcttccgcaacaagtttctctttcatccgcttgtatacaatttcttttaaaactgcaattccttcttcattttccgaccgatcactattattcactttgatcatgctatacaatacatctttgtcaaaatcatcattgatcattccaaactctgcagtataggccatataaataggaaaagagaagatcattttcaaatgtagcgccagcaaagtttttctgtgttctacaaacaaatgtcttgcatccgcaatatcaagtttatccagatcttccacaacgataagaagttccttttgctgcttctctttaagctgatcattcatatcctccagtgtttcattcatcaaactgatcaggtaactgattttcggttctatcgatttacgaatcgtcttttttgtttcggttcctgttttaaaaatgccctttccatacaccgatatttttttcaaaaatccaagtccgacctctcctccggcttctgcctctgcaaattcattttttgtaaattcaatggatatttcatttttccaatactgtgtcattttatctaaaatttctggctttactttaacagcctgagaggttgaaaggtattctataatctggctcataactgcaaaaatcacatcaatatactgtattccaatcagttccacttcctgcgcaatcgaaaaattgatgatttcatactgatctttcaattcttctgaaatctttaccatttccgtggattttccactgcctttatgccccattaacaatatttttgtatatggattaatcccatatttcaaagtgttaataatctcacttctggcattgatcacgctccggatagaacttgtatccacataaaagtcttcaaaattttccttatttaatggaaaagaattaaaaactgatatcatttcctctaaccgttctgcttttttcatcttttgaatcctccatgcacccaaatacatttcctgctctcctatcacatctttttattttcttttgtgatagatatctaaattttagtatacgaaaaaaggtgccctatttcaagacacctttttccatccatattctattcgtattctattatttctccagccccggccactcctggtccttctccgaaagtgtcagcggtgtcccatctgccatacaatatccttccgccgacggcgttccgtgatactcacctgtcacatccggccaccggatgccgatcactgggtcattccatgccagaccgccctcgtcgttcgggtgccagaagtcattgactttatagcagaactctgcctcatcggacaggaccagaaagccatgcgcaaagccttccggaatcagaaactgctttttgttttcctcggaaagttccactccgtaccattttccataggttgcggaatcttcgcgaagatccactgccacatcaaatacgcttccgcgcacggcgcgcacgagtttgcactgcggatagttgatctgaaaatgcagtccgcgcagtacacccttgacggacatcgattggttatcctgcacaaactggatatcgaatccggcttctttcatttccctctcattgtatgtctccatgaaatatccacgggcatccccgtgtacggccggtgtaatcacacacagcccttcgataccgccgacatttttttccactgttatctgtcccactgttttttcctctttcatgctgatttataactattcagaaccccctcagaatagttacgctgattttaatatttcactctgccctctgcgactgcttttaaatgctctccatacggactctttccgtagcgtgcggccgagtccatcagtttttcttttgtgatccactgattgatatatgcaatttcttccggtgcggaaatggtcacaccctgccggtgctcaatcatctgcacaaatgccgccgcatccagcaggctgtccatcgttccggtatccagccatgcaaagccacggccgagcagctgtacatttaggtttttctgctgcagatacatgtcgtttaacgtcgtaatctccagttcgccgcgagcagatggctttacctgttttgccatcgcgctcacgcctgccggatagaaatacagtccggtcacggcatagttgctcttaggctgtgccggtttttcttcgatggatacggcttttccgttcgcatcgaaatccacgaccccgaaacgctccggatcgttgacataatagccaaagacggttgcctgtccttctttagcgtcctttgcagcatttcgcagaatttttccaaatccgtttccgtagaaaatgttgtcgccgagtaccatggcgcaggcatcctctccgataaattcctctccaagcaaaaatgcctgtgcgagtccatccggagacggctgcactttgtaggacagatgaagcccgaactgatttccatcccccaaaagtgcttcaaatctcggggtatcttcctgcgtggaaataactaaaatatcacggatgcctgccagcatcagtgtagacagcggataataaatcatcggtttgtcatataccggaagcaattgtttactggttaccatagtcagcggatacagccgtgtacctgcgccgcctgccaatataattcccttcatcttaaagttccccctgtcgctttaattcctgcagataccgccccagtgcgtcctgccaggttggaagcggtgtaaatccattttctttcagtttctttttttccagtctgctgttaaacggacgcgctgcctttgacagaccgtattccgcggttgtcacgggctgcacttcggtagaaagccctgcctgccgataaatttcttttgtgaaatcgtaccaggatatataaccaccctcgtttgttacgtggtaataaccatatttttcggtttccatcatgtcaacaagcagtcttgccagatcgtaagtataggtcggtgtgccgatctggtcatttaccacgcgcacctgcgggtgattttttgctacctgcaacatggttttgataaaattctttccgtttaatccaaatacccaggcgatacgaacgataaaatacttttccagtgtctgtgccactgccagctcgccccccagtttactctgtccgtatacattgagcggtgcatactctttgcagtccggctcccacggagtctcgccctgtccgtcaaacacatagtctgtgctgatatagaccatcttggcatctgctttttttgccgcgtccgcaatatgtttcgttccatctacgttgatggctctgacttttgcctgattttcttcgtcctctgctgcatccacagcggtccatgccgcacagtgcacgatggcatccggctgtacttgcatgattgtctgttccactgctgccgcatcggtgatgtccagcggcacatacgatgcacaggattccagtgtcggtgcaatatccgaaccgactgcctgatgtccgcgctttatcagttcgtttaccacgtcatgtcccagctgtccggcaacgcctgtcacgaatactttcatatttataagcctttctttccgtacatttctttgtaataattctggtattccccgtttacgatgttctcccaccattccttatgatccagataccactggatggtcaggcggataccatctttaaacatcgtctccggcagccagcccagctcgttgtggatcttggtcggatcgatggcatagcgcatatcgtgtccttttctgtcctgcacatgctcgatcagactctccggcttgccaagatattcacagatgagttttacgatatcaatatttttcatctcattgtgtccgccgatgttgtagacttctccgacggttccgttgcgcaggatcagatcaatcgccttacagtgatcctcgacatacagccagtcgcgcacattgagtccctctccgtataccggaagcggcttatctgccagcgcatttgcaatcataagcggaatgagtttttccggaaactgatacggaccgtagttgttggaacagcggctgatcgtcaccggcaggccgtacgttctgtgatatgccataacaagcagatccgcagatgccttggaagtgctgtaaggactggaggtgtggatcggtgtatcctcatggaagaacagatccggacggtccagtggcagatctccgtacacctcatccgtggatacctgatgataccgtgaaataccatacttcctgcatgcgtccatcagcacggaagtaccgataatattggtctgcaaaaagacttccggattctcaatggagcggtccacatgggactccgctgcaaaattgacgatcacatccggtttttcttcctcaaaaagggtatatactcccggacggtcgcagatatcgagttttacgaaacgaaaattcggctgatccatcaccggtgcaagcgtggacagattgcccgcataggtcagggaatccagacaaacaatgcgatcctgcggatgttcctttaacatatagaaaataaagttgctgccgatgaaaccggcaccgcctgttacaataatggtcatgagtgtttcctcctgtgtgcgtttacgattcctgtatttgtttccattataaaaggtgacgctaggtcaccttcaagtcttttttatagatttttctaattattttctgcacaggaagattccggcatcttttgtgatatgaaatccatctgccacgcgggcagaaacaaattcccgaaactctttgtactggttcaaaagcagctggttctggtttccgtgacaggaaagaatataggaaatcagcggttccgcttctgctatttcaatcgcatcctcgtatcttcgcatctgaatttccgggaaatacggtgctaacaggttttctccgttttcaagcccgaaccgctcatacagcacctccgctgataaaacgatttctttatggaactgctgcaccagatcggtaatttcccacatatgctgctttccgtaggtactgcatagaaaccgtcccccattttttaagactctccgacattctgcaagcacctgtgggatatcttcacagtaaaacagcacatgatccgcgatcacaagatcaaatatttcctcctcgtaaggaattttttcgcagtcaaattttttataggaaaagcggctgtcctctcccagtgcacgccgggcatcctttagcattccttctgatttgtccgagagaacgacccaaagatccgcaggcagctgttctctgttttcggtccataatgctccatttccacagccgagctccagaatccgcatccccggctgcagattacactgctgcataatccacggaaaccacccctgcggattgacggaatactccctgtgcaggcgaatccgggcggaaatatttgccgcattctggtactggtttttcaggcttcgttccactgccgtcaaatgaatcaaatccagcatactgttccagtcaatcgcctgttccgtctggatggcttctatggtgcggtcaattgcctcatccatcgcctgcatttcgtccattttctgccgcagcagcttcttctgtatccgcatggattcgagaagatactgctggtctgccgcagcaagtgtcatctcccggatatcttccagcgaaaatcccagatattttaataaaaggatctgctggagttttgccagatcggcatccgtatacagccgcgcccctgcggcagtccgcgcacttggttttaaaatattctgtttatcataataccggatcgcgcgaagtgtcacatgtgctttttttgcaaattgtccggatgtgtaatacgcatcctttttcatctacagttctttcacctcatcccgcatttcttctgtcatattctgtacataggtcgtctgggaagaaatttcttccgtgtttgcggcaatcgttgacaccttctgcgtcatggtattcatgctttctaccagatctttgattgaatccatgctctgtgtaatctttgggataattcgccagaaatgccggtgccagtatcacggaaattttccttcccgatgcaaggtcttcaaagaaacggtccgtatcatcataatagtctctcgcttcatgtgggcagacatcaaaacattccccgcatacaatacatttgtccgggtctaccgttacataaccttcctgtgttgcaatatttgccgtaagtacaggacagctgcgcacgcatttgttgcatccggtgcataaatcagttgtgtaaatcagttccat

SEQ ID NO: 35 - DNA, 18291 bp, unidentified
  source 1..18291: mol_type = unassigned DNA
gctctcgcatcctgtcccacagtggcccttgggcttattcttttcatcggtctctctcagcgacaagtggtatcttatcacgggaaaagtgaattgtcaatgttttttgtgttttttatttttttcgcacaattcagataattcacttttctttttacttacagtatcatgctgctcatatgttgtcctttatttcgcccaatacaaaacagcagccttcaaaaactctgcacatcctgacacttcttcatcataaataacgcagtgtacgtgtactcactcctgtcatttctgccacttcctgaatactgtattccatctttctacctcctgccggattttagtatacaagttgacgccgtgtcaaagtcaatacattttcccgcctatttgagaaagaatttcaccagattcatcttcccttttgtaaatggaggataacagaccggaagattccagtcagccggtttataaaatacacttttttcatgagtaaatgtatcaaaactatactttccgtgatattgtcccattccggatgctccgactcccccaaacggaagatctggattgatcagatgactgatcgtatcattgacacacacaccgcccgaagacacccgttccaaaacgaacttttctgcagatctttttttcgtaaacagatacagcgcaagtggttttgctcttttattcacaaaacgtactgcatcttccagcttgtggtatgacagaaccggcaatatcggaccgaacagttcttcctgcatagacgccgcattctgatcctttccgagatccagaatggccggctcgatataacgttgcagtgtatctgcctctcctccgcagaacaaatatttcgcatcctgctccagtattttctgcagacgttccatatgccgttcatttacaatcctgccgaaatctggattcttttttatttcttttccatatagatgagaaaatgctgttttcatctctgttaagaactgctgttttctgctctcatccacaagcacataatccggcgccacacaggtctgtcccgcattcatgagttttccccacgcaattcttcttgctgcctcttttatatttgcagttttttcgataataaccggactttttccacctaattccaatgtcaccggcgtcagattttctgctgccgctttcataacgatccttccgacacgttcactccctgtaaaaaagatataatcaaatttctgagaaagtaattcctgattgacctccactccaccttccacacaggcaatatattcttctttaaatgtagagtgtacgatctgatacattgcttctgaaacatgtggggtaagttctgatggtttgagtactgcacagtttcctgccgcaatcgctccaaccagaggctctgccaacaactgtaccggataattatatggtcccagaataagcacacttccataaggttctttttgaatcttacttttgcccggaaataaatacagcggtgttctcacacgttttggagccgaccatttctgaagattttgaatcgtatatcgaatatcagcaagtacaaatccaatctctgtggcgtaagattcaaatgcagattttccaagatctttctttaatgcctcccccaaaaccgtttcattttttcgcattgcatctgccaacagttgtaactggcagatacgaaatgcaagatcccgagtccgtccggtttcaaaaaattgtttttgtgcctctgttaactttgaaaacattctatttttctccatatctttttacacattagctcctttcttcggatgttcatatttctcaattataacactgccgtatcgccttctcaattcatctttgattccttttcgcacgatcggcaattttatttttgacaatttctttcatttcagtcgggatatgatataatcattttgcgaaatgttgttcaaaaaaatgatacagaaagaaggaccatatatttatgaaaacaaattcaaagaaatggttgaaacgcctgggaatcttcctcggaactctgatactgatcgtagtcggctatgttgtttatgtattttccagttactatcgtctggaagacaagcaaaaactgacgatcaccggaaaatctacagaaaaggcaaaaaccaaaaaaagttaccgcatcacatctggaaatatcggtttcggcgcatacagtgacgactattctttctttatggacggtggaaaagaaagccgtgcccgttccaaagatgccgtcattgaaaacgtcagcagctatgcagaagctgtagctcaattaaacccggattttatgctgttccaggaagtggatattgacggaacaagaagttatcatgtggatgaacgcaaattattgctttcacagacactttcaaccgataacacctcacgaaactacacatttgctcagaactatgacagcccttatctgttctatccgattctggaaccacacggaaagaacaaatccggtatgcttacagtttctaacatgaagatcacggaatccatcagacgctctttaccgatcgaagatggatttatgaaactgctggatctggatcgctgttatagcgtcaaccggattccgacagaaaacggaaaggaacttgtcctgtacaatctgcatctttccgcttatacatctgatccgagcaccgcggacaatcagctgcggatgctgtttgaggatatgaaagaagaatatgacgctggaaattatattgttgcgggcggtgatttcaacaaagatctgcttggaaattctgctgagatttttggtcacaaggaattagaagacaactgggcaaagccgatatccgaagaactgattcctgatttcatgcagttgatcgcaccgtttgatgagaaaaatccggtaccatcctgccgaaatgcagatcagccttacagcgaatctgattttgttgtaacagtagatggttttctggtatctgataatgtgactgtagaagatgcactggttctggataccggttttaaatggagtgatcataatccggtttatatggattttattttagagtaaaaaaagtacaggctgatgttttgcaaagaacaccagcctgtatttctattcataatgtgtttttacatactcatccatcgcatctgcgatcattttcgaatacttcaccgcctctaccacggtctttgcaccggtcactacatctccggatgcgaaaatccccggcatggtggtctctccatttgcatctgtcttgagcaatccccgatcatctacctgcagctctttatcccggttcacgatccgatcctgcggtccctgagaaatcgaaataatgatactgtcagccggaacaagcctggcagtctcttcttttttcaccagttttccatcttcggtccattccacatcacagataatggctccttcatccccgatttcaatggccgtctgcagatattcgaactctactccgtccagttttgcatactccacctcttttggggatgccgccggaatttctgtgatggaatagacggttacatgccgggagcctttacgaattgccgttcttgccacatccattgccgcattccccgcaccgatgacaagtacccgttctcccagatcatagacatccggattgttcagataattgattccgtagtgcacatttccaaatgtttctcccggtatatgcagctgatacggtctccaagttcctgttccgataaatacggcatgatatccgtctcttaaaagatcttccacacctgtggaaccacccagcgcaaaattgggcctaaataagatacccagctctttcatttttacataatagcggtctaaaatggactttggcagacgaaattcaggaattccataacgcatgattcctccgatcttctcttttacctcaaaaatcgtcactttatatcctctgcacgccatcaaaatagcgattgtgattcctgccggacccgcgccgacaactgcgatccgtttgccgtttttcggaagctgctccagcttcatccggtcaaagcaggtatctgaaatataattttcaatcgaagaaatatgcaccggttctccttttatgcctttcacacaatgcccttcacactgtttttcgtggtcacagaccagagaacagatgacagacagcggattgttggcaaacaccatttctgccgcctccggcatctctccttgcagcagcatctggatcatcacaggaatcggggtatggatcggacacccttcctgacatctcggttttttacagtttaaacatctttttgcttcatcaatgacatgcagtcccattgttattacaactccttactttacgatctgttatccggatagatgatttgtatttttatgcacaataacaatttatcacacaaaaaaagaaagtcaacaatcgttattttgttgactttcctgttattttattcacttattgaagatcttataatctgcatttaaaatcttcatatccgaacgatttcacgatctcacattctccactttcgcgttcccacacaatatccggaagacgcattccattgaatgtattattttttacagtcgtatagatcgccatatctccaaatgtgagtctgtctcctactttcagcggctgatcaaaagaataacttccgatcacatctcctgccagacaggtcggaccgccaagcagatacgtatattctttttccttcgcctctccagaatcaaacagaggcgggcgatacggcatctcgatcacatccggcatatgacacgctgcagagacatccagtaccgcaatatcattatgtacaatatcttccactgttgtgatcaaatggcccgcatttaacgccaccgcttctcccggttccagatagacctgtacattgtaggtgtcctgaatcctgcgcacacaggagatcagaagctctctgtcataatccactcttgtaatatgatgaccgccgccaaaattcacccattttaactgtttcatccacttgccgaacttttcttccactgctttcaacgtgatttccagagcatctgcattctgctcacagagtgtgtgaaaatgcagtccctctacgtaagatggcagtgtttccggaaattcggataccagaatcccaagacgggagcccggtgcacaaggatcataaatcgcatgctctccctgcgtggaacattccggatttacacggatccccacactttttccggcttttgcagcacgttctccgaaacactcaagctgtgaaaacgaattaaacacgagatgttcgcagctttccagcacctcttcaaattcatcttcccgatatgccggagaaaaaatatgattttctttgcccatacattctttcccgagctttgcttcatacaagccgctggcagtcgttccatccagatactctccgatgagaggataacaggaatacatagaaaatgctttctgtgccagcaggatcttacatccgctctgctgtcggatttcctgtaaaatctgcagattctttttcatttctgactccatgatgacatagcatggagtccttaattcttctcttttcatttctgatgtccgtttcttaatctaccatctgagggttttctaccactttccatggaagtccaaactcattgagggcatccataaacggatccggatcaaactcttcgatattgtaaacaccgtctttgtcccatgtctttgtcatgagcatcatagcaccgatcattgccggaacacctgtagtataggcaacggcctgtgatcccacttctttatagcactcttcatgatcgcatacattgtaaatatagatcgtcttctcttttccgtctttctttcctgtaaaaatacatccaatatttgtctttccttttgttctcggtccaagagatgccggatccggaagaacagctttcaaaaactgaagcggtacgatttcttttccttcgtacataatcggctcaatggatgtcattcctacattttccagacatttcagatgtgtcagatagctctgtccaaatgtcataaagaaacggattcttttgattcccggaatattcagtgccagagattcgatttcttcatggtgcagaagatacatatctttcattcccacttccggaaaatcgtattctctcttgatctccatcggctctgtctctacccagtgtccgtcttcccagtaagaaccttttgcagaaacctcgcggatgttgatctccggattgaagttcgttgcaaacggatagccgtgatctcctccattgcagtccagaatatcgatataattaatctcgtcaaaataatgtttcagcgcatatgcagaaaatactcctgttactccgggatcaaatccacttcccaacaacgctgtaattcctgctttttcaaatttctcacggtatgcccactgccatttatattcgaattttgcagtatcttccggctcataatttgcagtgtctacataatccactcctgtcgcaaggcaggcatccataattgtaagatcctgatatggaagtgccagattcagtactacgtccggtttttccctttcgatcagtgcaatcagttcttctgggttatctgcatccacctgtgcagttgtaatcgttccgttgtaggaagcctgcagtttttctttcaatgcctcacattttgaaaccgtacggctggcaatacagatcgcatcaaacactttactgttctgacaacatttgtgtacagctacacttgcaactccgccacatccaacaatcaatacttttcccatttttttatctccttctttcttgttttttcttctattaaacttgcagtgcaagtaaaaattctctgataatctttccggctactgctgtggaaactccacttggatcataaaccgggctcagttcattcacatcacatccgaccacgttgactccctgtgctgtctggatcacagcattcatcagttccacaaatgtgacaccgcccgcctccggagttcctgttcccggaaatacagacggatccagcacatccagatccagtgtgatgtataccggttttccctgcagtttctcaattacttctgccagtccgtcaagattgaacttatgcatcttcacatgcccttctcttgcccagcgaaactcttctctgtcaccggatcggattccaaactgatagatcctgtcatctcccaaaagctcccaacatcttctcagtacacaggcatgagaatattgaacgcccagataatcttctcttaaatctgcatgtgcatcaaagtggatgatatgcagatccggatatttctctgctgctgcacggacacttcccagtgtcaccagatgctctccgccgatcataaacgggattttcccgctgcttaaaataatctcggtacaatcctgaatctcagccagcactttttccgtatctccgatcggcagctccagatctccactgtcaaaaatcttataatctgtcagatcttttccctgatacggactgtaagtttccagtccataagactcattgcgaattgcctgacttccaaatcttgcccccggacggtaggaagtcgtggaatcaaaaggtgcaccgaacaacacgatctctgattcattatactccgcatcacatccgatgaacgtcattacatttttattcaacatcttttacaagctcctccacatacgccggtaatgcaaagactccgtggtgcactctcggcagataatattttgtatgaatcccccgcagattccaggaaactccatccaggtcattgagcggatggtatttcttagacgcaaatccgaacagccagtgccctgacggataggacggaatatgggcctgataaatcttactgatcgggaaggattctataattctcttgtgcattctctgacactgaaatgcctcttctgtataaaacggactttcatgctggttgatcatgatcccgtcttcatgcagggcattgtaacaattgccgtaaaattcctttgtaaacaatccctccgcaggaccaaacggatttggagaatcaatcaggatcagatcatacacattggatctggaacgcacaaaccgcagtccatcttcattatagattgtcacgcgatcgtcatccaggctgcttgcaatctgcggaaaatatttccgacagacttcaaccagaagaggatctacttctacgacgtctatcttctgaatggtattatattttgcaagctcccgcacacatccgccatcacctccgccgatgaccagcacattctctaccttcggatgtactgccataggaacatgcgccatcatctcatggtagataaattcatctttttctgtcagcatcagatctccgtccgctacgagaatcttaccaaattcttttgattcgagaacatcgattcgctgaaactcgctctgcgcactgaacagctgcttgtccacacggatggacagtttcacattgtccgtgtgttcatctgaaaaccacatttccatcacttttatcccccttatatcagaacatttaaatattcgattgccgcatcttcaggtcccgtcatggaacaccccttttctttggcatagagaatatactcgattacatcttttgtgatcttctctcccggtgccagaatcggaattccaggcggataacacattacgaactcactgcagattctgccttctgactcccggatcggcactgcctctttttccgcatagaaagaatcctgcggactcatgatgacctctggttcaatatattcctggctgagcatacccgtcttgtctttctgatatctgcgctttacttctgccagtgcacttaccagacgctcaatctcctggatccggtctccgatagacagatatgccagaatattcccgatatctccaaattcgatctgaatatcatactcatcccgcagaatatcatagacctcgattcccgcaagaccaatttccagcgtatggatggacagcttcgttgtatcaaaatcataaatactgtctccattgatcagctcttttgaaaatgcataatatcctccgatccgattgatctcttctcttgcataatccgccagcgccgccactcttgcaaaagattccttgccgcgcaacaccagatttcttctggaaatatccagactggacagtaaaagataggaaccgctggtggtctgcgtcaggttgatgatctgtctcacataacccgcatgcatagacggacctacaagcaaaaaggaactctgtgtgagacttccgcctgatttgtgcatactcacagatgccatatctgcccctgcctccattgctgaaaccggcagattctctccaaaataaaaatgtgttccatgggcttcatctaccagaaccttcatgccgtgagcgtgtgctttttttacgatagaacgtaaatcagaacaaattccgtaatacgtcggattgttcacaaatacagctaccgcatccggatgcttctgaatcgccagttctacctgagacactttcataccaagtgaaattcccagactgtgctccacatccggattgacatagatcggaatcgctccgcataacaccaatgcgttgatcacactgcggtgtacatttctcggtaatatgatcttatcccccttcttacagcaggaaagtaccatcgcctgcaccgaggatgtcgttccccctaccatcagaaatgcatgacttgcatgaaatgcctctgctgccagctgttctgcatctttgataacagaaaccggatgacacagattgtccagcggtttcatggaattgacatcaatactgacacagcgttctcccagtaattccaccagttctttatttcctcttccgtgcttatgtcccggaacatcaaacggtacgatccgcatccgccggaaccgctctaatgcttcatagatcggagcattctcctgtgataaattcttcatctttctttcacctcgcccttttttgtcaattcccctttacttctgaatgtttgtgatataaaaaaagcgcagaaaaacgtacgttacatctacattctttcttgcgcttgctatgcttctttatataatgccaatctcctgcttaagtacaggagctttgtcttttcttctaagtataagcactacagatataaaggttttcgagtctatatagcaaatattttacttttaatactcttattgaccgtttcacaagttgatgtgctgtttacgcaccggttataaagtaaccaacttataaaatttaagcttttaacttaatcaataatgcagcttctgctgcgttaaatatttgcatggaactctcaatatccgttcgttctccatacgaatctattatacgtgcataggtttcgaattgcaagaactttttcctgagatttctttcaatcagatgagtgcctgttactgttcacaccaatccccgcctatccatgcgcaatcgtcgtgcttgcgcacaaactaaatgaaggagatgcatttaacatctcctcttctctgtgataaaacaatctctcttttataagtttccccgcatacgataggttctttgactctgtatcgtatgatgttctccgcgcttcccgcttcgaatctcgtgtttttcatgatgctttccaagcccattttgaagcagtgtcttattctctgacttcagcacttcctgcggatattctcttgcatcatcaactgcaaaccaaaagcgcatcctctgtgctgcaaaccagctcgacaaccgcggggtatttaatttttcctctgctgaatgttcattgttataaatctgatactctgaacatacccagacaaatatcactgtcgtaattgccaaaatacatgttccaatcaatgcttccgtcataaccgtacactccttcctcttactttatagtataattgtagctctttttaattcaaaattcaatgttttcagatatatttatcttttaaattttatttttctcgctttacaaacaaaataactaattgtaattataaccatcattactgttattacaatcaaaatatcgggacgtacccaaaatgtaatctttcccgcaagaaatacacttgtcggaccgtccgatcctcctgtaatactgaccgtctcattggcgatctctgtatggatttcggcaaattccgactttatacgatattcctgatacatcagatatccggacagagttcccgataaaagggtcaaaataattaaaacagaacctatccagccaattttgaactctcttttaactgcattttcccgcaaaatttcttctgcgatttttttgtctctccctgatgcgcaaccgcctcttcttccgaaactccgttttcgatcatatccgaaattatttcttcataatatgcaagatacttctcccgttcatccttttttaattttctcagactgtatcgaagattcttgataaactgttccttcttcatttctcatcctcctctgcaatataatccaatatttttaacaactgtgctctgtctttgtcaaaatttttcagatactgtcttccctcttctgttagatgaaaatatttccgcaatcgattattgtactgtgtggtataggattttacttttccacccatctccaatcttcgcaaaataggatacaaagtggattctgaaatttcaatcagatcagaaacatcttttataatctggtatccgtaggaatcttcctttctcaatactgctaaaacacataattccaacaatccttttcttaactgtgcatccataaaacacctccctatacatgatactatatattgcatagtatataatgtcaatgccccgattttgattaacctctacattaacaaagtaccttcctttttgatgcaaatcaccttgacttcatcgaagcatttgctataatttgcttatagaattcctctgctgatgggggaaataactatgggaaaacgaacattatctgtaaagaatctgatgaaacttctctggaagatggaagatgcattatttatctcagtacccgcggggagaatgcagaggaagttccaaaagaactggtaatatttttgaaatttgtaaaggcagacctgaaagaaagtcaggaagatttccacgatatctatgttaagcagttgcagaattctatccgacatattaaggaaagccgtgaaatggaggaacgtttcatgattttagaagagatgttgagagatgagcgtgcggccggacgcagagaagagcgtcaatctatattacgcagttttttagaagattttggatctataccaccagaacttgaaaagaaactctttgaggaatcagatgcaactgttctgaaaaactggttaaaaattgcagctacatcaaaaagtatcgaagaatttatacaaaaaatccagtaattctttactggactgtcaagttatcttatgcttttgggtattatagcgggacatcccccatattcaaaagcatgtcacaacgcaatctatgcctgatcaggcagtacttatcaaaaaagatgcagaggaattctattgttttttaacaacaaagtgtacaagcactcttttcagaatgcccgtacacttttctttttacaacccttttgtaatctctctcgctacatacacaccactcgctgatgcatgggacagagaatgtgtcactccacttccgtcaccgatcacgtacagacctttgtacatggtctccagatgttcatccagttctacttccatattatagaacttgacttccacaccgtaaagcaaagtatcatcattggctgtacccggagcgatcttatccagtgcgtagatcatctcgataattccatccaggattcgtttcggaagcacaaggcttaagtctcccggctctgccgcaagtgtcggtctgacaaatccatcctcaattctgtcatgggtgcttcgtcttccacggatcaggtcaccgaatctctgcacgatcacaccgccgcccagcatattggacagtctggcaatactctctccgtatccgttgctgtctttaaacggctctgagaaatgctttgccacaagcagtgcaaagtttgtattttctgtctgcttttctgtatcttcgtagctgtgtccgtttacagttacgattccgtttgtattttcatttactacgattccgtatggattcatgcagaatgtacggactttatcctcaaatttttctgtacggtatacaatcttgctttcatacagttcatctgtcaaatgggagaacactgctgccggcagttctacgcggacaccaagatctacacggttggattttgtcgggatcttcatgtcgcgacagacttcttccatccatttacttccgcttcttcctactgaaacaatacacttctcgcattcatcacggtcttctccatgtgtcacgatatagccgttttctgtcttctccagcttgtccacatagtaattgaaacggaattctactttatcttttaattctgcgtacagattttccaggactacatagttgatatctgttcccagatgacggacagatgcttccaacaactttaatttattctgcagacacagctttttgaacttgcttcctgcagtggaatacatcttggttccttttccaccgtattccacattgatctcatccacatagcgcatcagatcaatggcagtgtcttttccgatatactcgtacaatgttccgccaaaatcgtttgtaatattatattttccatccgaaaaagctccggcgcctccaaatccattcatgatggcacaggtcttgcagttgatacagctttttaccttcactccgtcaatcggacattttcttttctccagaggatttcccgcttccagaaccgcaattttcagctgcggtgcatctttcaccagctcatatgccgcaaagattcctcccggacctgctccaataatgatcacgtcatactgactcatatgtttctcctttcgttacggtcattttactctcactgtttctattatagccaaccatcacgaaaaaagaaactgttttccggattcttatgaaatccttccgttttccatctgatataccttttccgccacagccatggtcgattctctgtgggatactaaaataacagtcttgtctttccccatttttttcagagatcttaagataatactttcattcagagaatccagattgctggtcggctcatccagaagcaaaagcggtgcatcgtgcagaaatgctcttgccacgccgatcctctgtttttctcctccggaaagggtatctcccaactctccgaccagcgtatcgtatccatttggaaggctttctataaattcatgcagagatgctttttttgctgcctctacgatttcttctctggaagcccccggctttgcgatcgcaatgttgttggcgattgaatcgtggaacagacacgtctcctgtgtcacatagctttccatatcacgcagctcgtttgtattgataccggacagttttctgtctcccattcggatcactccgctgtctacatcataaaaacgcatcagcagctttaacagcgttgattttccggaaccgctttttccatggattccaatccgactgcctttcggaatcgagatcgaatagtcttttaaaatctgttcttcttcataagcaaaatcaatgttttcacaattgatatctgcaaattctgcggttgcctgaccagatacttcttcaatctgcggttcttcttccagaagggataacacacgttctccgcttgccagtgtctgcatcagattgttcgacagactggacagagcaacaaccggtccgaaagaactcatcatcaggatcgtacagagcagtactgcgtcaaatccgatttcaccctgctgatgtagccacgttgtaaggaacagcattccaaaagagaaaatcaggatcaggacatttgttcctcctctttgtgttccttccagtttcttcatttctttctgtttcgcatccagttccacacttttgcgttccatctgctcttcccgtttttctccgcatccatactggatcgtctcatccagtccacgaagactatccagaacgaagctgttcagatccccgaaacgggtacgaaattccattcctttttctgaacctcgtctggaattccacatgggcatcagaactccgatcgcaagatatcccccaagggcgaacagaccgatcagcacatgatatcggaaaaagaaaatttccatgatcagggatgtcaggaatgcgattgcgatcggcgaaatcgtgtgtgcataaaatacttccagaagctcaatatctgttgtaatgattgagatcagatttcctttgtctcttccgtccagttttgcaggacagagctttctcaaaaccgcaaatactttgtgacggatcagtgccagcagcttaaacgcaatataatgattgcatgcctgctctccatagtgcagaattccacgcagtactgcgatcactgcaaggcagacaaacaatgtcgtcagagaagctccctgccatattcccataatctgcaggattccaactcctgccagtacggtgagaaagatcgcacaaagatatcctgtgacacctagcagaatcgccgctgccataacgtgcatcaggggacggatcagtccgatcagttttcccataatctgtattccacttcttcgcttcatgctcttccctcccttacctgacacaattcctgctgtttctgatacatatttgcatagcttcctgcttttttcataagttctccatgtgtgccgctctctgtaatctgaccgttttccaacatataaatctgatcagatgccaccacatttgcaagccggtgagagatgaacagaatcgttttcgtctttgccagctcccggatcacttccatgatctgatcctcactttccacatcaatattggatgccgcctcatcaaaaatatacatcggcgtatcatgaagaagtgctctggcgatggcaagacgctgtctttgtccgccggaaaaattacttccctgttcttccagcatcgtattcaatccattttgtgcctgcaaaaactcatacagatttacctgtctgagcgctgcttccatctgctctctcgacacagacggatctgccattttcaggttttcttctaccgttcccttgagcagataactgttatgtctcaccagagtaatcttatccatcagactggactctttgatttcctgaatcggcacattattgatctggatctgccccgaaaatgtacggttcttccctgtcaaaagtgccgcaatggtactttttccacaaccggacagccccaccagagagacaaattttccggatggtatggtcagtgaaatatcctgtaatacctttcgctccggctcataggaaaattccacatgctgcagtgtgacgtccatttgttcgccctcaatctcgtgctctccccgttttggctcttccatatccagaatcttaaaaatcttgtcacttgccgacattccgttcatggcaatgtggaagaaagaacccagcaaacgcagtggaatgaaaaattcagatgcaagcagaataatcgtaaacgcccctgcgagtgatacatttcctgccagatactctttgacagtcacaatcattccaattgctgccccgccatatgctacaatatccatcacactgacagaattaagctgcatagtgagcactttcatcgtgatcttacgaaaccgctctgattcgtcgtccatttctttggctttttgctcatctgcctgataaatctttaaggttgtgagtccttgcaggttctctaagaaactgtcaccaagttctgtatagattccccagtatttgctcagcagtttctttgcgaatttctgtactgccacgatcgacatcggaatcagcggtacacatacaagaagcacaatacatgccttgatgctgatcggtgacaataccgcaaacaatgtgatcggtgcaagcagactgtagaacagctgcggaagatatctcccataataaatctccagctgctcgactccttccgcagacacctgaaccacctcggaagtagataccttttctttataggccgctcccaaacgcagcagcttctcataaatctgctttcttaaaaccgtctttacatccgcacttgcccgataagaggcatatgcagctcctttttcgcacagaaaacgcgcacagattgccaggatcacaattcctgccgtttgcagcatcacctgctgatccaatgttttttcaaacagctgctggatcatatttcctgccgcaaacactgctgcgatctgaaacagcagtgcgatccactgccagaaaatattagctccgatatattttcccgagcccttcaacagcttgagtagtctcgtcttaatcatatgtttctttccttcccattctctttttttcttttgcagaagtgatcacgtgccggattgccatgattggatgataaaataacattctcggtccggcaaaccgcatcacatttcgaatttcttctctcatctgcggcttgtaacaatgtaccctgcagttactgcagaatgtctttgtctccataaacggacatttatccacacgcattgcggcatagtctctgagtttttcacactcctcgcacagtccatgatgtttttccacagttttatgttttttccggcaataaaggtggatcatcagatccacgatctgcttttctttttcccgtttgttctgcacttgctgactcttttttatatctttcatttaagccgcctcaattctgatcgtcttgatttttgtaaagaaatatacatatttaaaaaggatcagcagaagaataaaaatacgccccggcagattgctcatcataaaaaatgcacacatcagcattgcggatgccggaagcagaatacacagctttgtctttaatgtcatggcacgctcctttacaaagctgtccagatgatttttgtaaagcttcgtccccataaaccacttgtgaaatctttccgatcctcttgcaaaacaaaaagatgccaccagcaagaatggagttgtcggcaaaatcggcaggatcactcccactgctccgattccaagacataaaaacgctgctgccagccataacattttcaatgggttttttctcat

SEQ ID NO: 36 - DNA, 7686 bp, unidentified
  source 1..7686: mol_type = unassigned DNA
tcagtcattatttattctgcggattaccttacagggatttcccactgccaggcagttcggggggatatcctttgacacgacgctgcccgcgccgattacactgttatcgccaatggttactcccggcaggacaatgacgcctgtacaaatccagacattgtctccaatggtaaccggatgggtatattccagtccttcgatccgctgttttacgtccatggcatgttcttcggttatgatactgacgcccggcgcaataaaaacattatttccgatggtgatttttccgctgtccatgagcctgccattgacattcaggaaaaaattatctcccactgatgtattatatccgtatgtgcagaaaaggggctgctccacgacgcagttttctcccacatggcccagcagttcccgtatggcggcctgccgtgcttcacggtcaaggggatgtatattattatagtcatgcagcttttttacagtcacatcacggtctgccgccagttcaggatctcccggctggtaaagcatttccgcatgtgatttttctttttctgtcatagatttactccttccggttttcagatttatagtatttccttttcctcttcgtccgtttccttaaattccacacaggcagtgaataaatctgcctttatttcaatataaaagtttccctggcaggcctcggtaaagcttctcgctatggacagccccaggccgctgccgccgtcggtacggctgctgtcccctctggtaaaccgggccgtatagtcgattgtctcggaaagctcttcggcagaggtattcgtcacactggcagtcagaaggccttttttttcttccagggaaacatagactctggagccttccagcgaatactgcagggcattctggatcagattctggaaaacacggtacatccgctgtccgtccgcacggataaaatgctctccttcgggaatgcgggttcttacgatcacattggaatttttaatatcttcttccatatccgccagagtctgccgcagcagcttggcaaaatcaattgtttccgggttgacagggagttcgccggacgcggctttgctcacttcaaacacatcctgtaccatggttttcagcctctgggatttgctttccaatatggaaatatagtcttttacatgatccggtagctcttcctcttctttcagcagttccacatagctgataatggacgtcagaggcgtcttgatgtcatgggaaacattggcaatcagctccaccttcatacgttcgctgcggacctgttcatcaatcgcttccttcattccctcccgtacttcgttcatgcaggttaccgcatcatgaagatcggaatctgccggtaagttcaggggggcttccatatccccttccctgacggcatagatctggtctaccaaatcacccatatccctggcatcccgccgaagagaacgaatataaacggtctgcgccgccgctgcggccaatattgccaaggctgccgccgaccacaggatgacgccgttaaaggcaccaaaagatacccctttcccccataaaaacataactgtaaggagaagcgctgtcataataacggatatgacaggcagtttgcggaatcttcttaccagccgcttctggaacggatattccatttctttactggaaagattgcggcggattttcacgaacaggctgtttttccataccttactgttcaggcgggcatcgttaaccacaagccagataagccagaatacacagaggatcagcgggcgtaattccatcagtgataactgataataaatatcatgaaacaggtttccataattaagattttgggcttcagatgccgccatatcataagtcacaattaaggtggtatctaaaatcccggatactttggaattaactataggcaccaaataataaaccagaaccccaacaggaacaagcacagccaaaatcttgacttcataccataacctgcctgtaaaacgagccagtccgttccttacatccctgatatccttacggaagatgaaagcgatactcaaaaacagaaccgcagcgataaaactccgtaaaatccaagtgagtgaatttctggtatcctgcatggtttttactatttggtataacctgtttccaccggtataataggtatacccctgcccgtatacagcaacggtatactgtttggggtcctctgcagcggcaatggtaatcctggcatccttatatttatcgtccacggcgaaattttcataaccgggcacgaaccagcttccattatccgtatagataccattcccgtaaatatccagttctctgccgtccttttgaatatacaccttactgccgtcaaaataaagaaggaaattatatccttcgggaagaagatgttcttccccgttcagctgcagatctcctgcattactgtacagttctttatcatcataggtaattgtatacaaaagatttttacagtctttcagcatctcatgggcttcatcggccgcccttctgttttcttccttctgatcctgggatgacgttccggcaactgctgcatttgaactctccgcttctgcagaatcggtcgattcggaaccttccgaattctgtacagaccagtcggaggtattttccgcaacgacatcgttccaggctgattgttcgtcagacgcctctgccgccacactgtcggaagctccttccgaagatgttaccgtcacataggaagccgacgtcttaccctgatctccctggattccgaccaccgctatattaccgtcccctccgtatccaaaggattccaccccataataactgctgtaggaaatcccccttgtacggctgtcgttattccaggaaaaatccactttccctcctgaagccatggaaaggaaatcctccagataaccttccatatagaactggaaggcggaggtattctgataatccggctgaaatgcatccttcatatcctctgttgttatacctcctgcaatcatggcaataatgtgcagaagatttcccagaaaaagggtgagccccagaaaaaaggctgtaaagcctatccatcttttactttttttccattttgtatccaattccccataccacctttaaatattctggctctttcggattcaactcgattttttcacggattctccggatatgtaccataactgtattttccggggcataagcctcttcatcccatacacgccggtatatttcctcagcaggaaacactcttcccagattacgcatgaaaagctccataattttcgtctcggttgccgttagttttaccgcttccccgtccgcatacagaattctttcatcggtacggaatgtaagccggccgtttgtcagttcttccgtctgttccgaggcatggatgtctcccagcctggtatacctgcgaagctggcttttcacccgggccgccagctcctggggattataaggctttgtcacgtagtcatccgcacccatggacaaacccagtattttgtccgagtcttcactcttggcgcttaacacgataatgggcagatttcttttttcacgtatccgcattactgccgacaagccatccaggcggggcatcatcacatctatgatgagcagctgtacctgatttcccgccaggatatccagcgcttccattccatcataggcccgcaaaaccctgtagtcttctttttccaacagaatggcaatggccttcacaatctctctgtcatcatccactaccaatatacattcattcatatccggccagttcctcctttgagcttgtattcagtgtaattcagatgtcttacgaacttacggcgggaattcttacaaatatcttacattccaggattatccgcagccattttgtatcaaaataccgtctgttttcagtttactacagaacacctcgcggctcaatcaaaaaaagacagggtattctggtaattcaaaccaggataccctgtcactatgaaacatatcaataaaaagccctgttttacgatagaaacggacgcttaatcctcgtagccgttaggattctgagactgccatttccaggaatcggcacacatttccttaataccgtattctgccttccagccgagctccgcctccgctttgcccgcgtcagaatagcaggttgcgatatcaccggggcggcggtctctgattacataaggaatcttaacaccggtagcttcctcaaagttctttacgatgtccagaacgctgtagccctttccggttcccagattgtaaatgttcaggccggaattgtcttcgattttcttcagcgccttcacatggccttttgccagatccaccacatggatataatcccttacaccggttccgtcaggcgtatcataatcatttccgaatacattcagctctttcagctttccaaccgcaacctgagtaatataaggcatcaggttattagggataccattgggattttctcctatcgttccgctcttatgggcaccgatagggttgaaataacgaagcagtaccacattccattccggatccgctttctggatatcggaaagaatctgctccagcatggattttgtccagccataagggttcgtgcactgtcccttcggacattcctcagtgatgggaataaaggccggatccccgtaaacagtggcggaggatgagaatattatattctttacaccggctttacgcattacatccactaaagtcagggttcccgctatattattttcatagtactcccacggcttggcaactgattcgcctactgccttcagtcctgcaaaatgaatacaggaatcaattttttctttcttaaatacttcattcagggcatctctgtccagaatatccgccttataaaaaggtacatgctttcctgtaatcgcttctacacgctgtaaagatttttcgctggagttactgaggttgtctaaaacaactacctcataccctgcattctgcagttccactaccgtatggctgccgatataaccggcaccgcctgttactaaaattgccatggctgctcctatctgcgactaaaatcgctgttatcaggaaggggaaaaagttccttcaccctttccgcctgtccgccgtaaacacggcatctaatcattctaaaattaccataaaacctcaggataaacaccatctgctttcagctttgcaatggattccataacaaagggcttatcctctttataagttactccgaaccatttgtccttggaagaaagaacctcaacagtggctttgccctgctgcaaaagcttatctacttcaataggaaggaagcactccgacttcatgggattcttcggcacttcgttcgcaaagaagttattgacagcactctccagttcatccaggatacttgcggaaaagccccacatattcatggaaacaggagtgtccagcggaaggggaacccaggtggctccgtcatcttccgtataagcagcgccgtctgccgtttttacgatcttggtacgttcggcaatcgtcttcaggaatccgttttcatcagtcacacagcagcctcttgctacggaaccattgtctgtaagggtgtttcccagttcatagcctaccattgcgtaacggtatttttcgtcgtcctgatgcgtggtaagaaaatcgtataatgtctggaaagcgcttcttccgtaataatcatctgcattaatcactgcaaaaggtccgttcaccacacccttgcagcagagaatcgcatgtgctgttccccagggcttcactctgccgtccggaatgctgaagccttccggaaccttggtaagctcctggaatacatattccacttcgatatgcttgctgactctgtcgcctacgcattcccggaaatccttttcattttctttcttgataatgaaaacgaccttcttaaatcctgccctgacagcatcaaacatggagaaatcaataattttatgtccctgttcgtccacagggtcaatctgtttcaatccgccgtaacggcttcccattcctgctgccagaattaccaataccggtttgtccatatcctgctctccttctgcgtgctttaacacgcggcaaaaggcagtgaagcttgcgtccatcctgtgaagttgttggatcattttgtaaagtctgcaggcctgcttcactttaccctttcattttatccgggaaccagtacattccgcaactcttatttgttaggaagagctgtcaaaatgttaactcggtttcccttgtttttattatcctgccggcctgccgcaaacgcattctgggattgcagcgattgggggccggcgctataagttattatatcataagcacaaaagggaatcaaattcccaaaaatggctttttttgtcacgtttaattcgtaagacttgcatcgccgtcagccttgtgtccctgcggctcttggcccgccctgttatgtgccgtcgcaggctgccgcactgcaaggttcctgggcgggcacgctctcgctcggataactacgcagcggtactaaggttgcaaagaacgcaacctaaggaccggcgtatttatacggccctttcaggaatccttgcagtgcggcagcctgcgacggcacataacaggacgggccaagagccgcagggacacaaggctgacgacaatgcaagtccggaaagttatgagataaataattaaataattaattaatcagccggtgaccatatggcggaggatggggattttttcgaggaggagggtgaggaggagggctggtgtgatcaggagcagggttttgaggaggttggtccagatggagaaggtggggaaaaggagggccaggcgggggaccagcatccagccgaagatccagtggagatagtagattccaagggttcttttggcaacggcggtaattgctttttgggggatggggcgggggatggtgaggtctttgcagattaggaaaatgcctgctgcgaggaatacaaccgggaggtggcggtagccttgtacgaggaggattccgtcccaggcggggttctggctggtataggtctttacggcccacattcctgaaaggcctaaaagggatgacaggaggccgaggaggcgctgtctggtgaggctgccgcaaagggtcggggctgtgtgaagccaggctccgaacaggaaaaagccgagcatgttggcgtaggtgccgaatggattgagtatttccaatccttccagggaatatacgccaagcagaccatgggcgcagagggcgtcgagcagcatctgcagtccggtgaggccgttggtcatcagaatgccgtaggcggcgaaaaacagaatgatttttcttccatgggtgtgatcataggcgattcggaacaggggaaatagtatgtaaacggctaaaagtgcttcgatgaaccacaggtgtccggttcctatgccttccaggctgccgaaggcgaacaggtacaggaggatctggtttttaccgaaattggccactggtacctggcacagggcgcctatggaaaagaggtaaatcagtttccagagcacgagcactatgtagataagaagggttttgcggatgtgttttgacaggttcaggggcctggtaaaaagcagggctccgtttaccatgaaaaacat

SEQ ID NO: 37 - DNA, 9439 bp, unidentified
  source 1..9439: mol_type = unassigned DNA
ctacttttcttctatcttgatcttttccaggattttatttgctccgatcagaaccaggatcacatttcccggcagtggtgtctgcggatcaaaagagagatccattttttcaccctgcatgactccgactaccgtgatcccgtacttcttacgcacatccagctctgcaagactttttccttcccatctgcgtggtacggctatctccacgatgctgtagtcattggaaagctcgatccagtccacaaattcatttgctaccatgcttttggcaatccggctgcccatctcgatctcaggatatacgacagaatccgctcctactttttccaggatcgttccctgaagtttatctttcgcctttgcaacaaccagtggaatccccatctctttgcaaagaagtgttgccataatattggcttcaggatgctctgaaactgccacaacagccccgtccagatttcttgctcccagagcctgcagagcatccttatccgttacgtctgccttcattgcataagaaaccttatctgaaatttcctggatcttctcataagaatcatcgactaccatgacatcgcaccccattttttccaatgacaatgccacgcttcttccaaaacttcccaaaccaagtactgcaaattgcttattcatatctttccccttatccaatcataattcttccttccgggagagaacggaaatgtgtcgttctctccgcccttccggcaaatacaagtgccatcgtcaccggtccgatccgtccgatatacatcaggatcatcagcacgacatgactcgccctgcacagagacggtgtcaggtcggctgtcaaccctacggttgccatcgctgaagtcacctcgtacatcagattcaggaaatcctgtcccggttctaagatcgtaagcaccgtcactcctgacatccagaagaaaaaggtaaccagtgagatcgtaatgcctgaccgtaccaccgtttcatcgatcttacggttaaaacattccgtatcctttctgccccgcagtaccgagatcactgtgagaaccagcatggctgccgtagtcgtcttgataccgcctgccgttcctgtcggagatccgccaataaacattaacagacatccaaggagccttgaacccggccgcagtgcagactgagagaccgctgcaaatcccgcggttcttgtcgtcaccgactggaacagagatgccatcagcttcttcgtaactgaaaattctcccatggttgccgggttggaatattccagtaaaaagaataataccgttccaaataagatcagagacccggtcatgaccagcaccactttgctctgcagttccagccttgtaaacagccattttaacggtcttgttccccgttcccggactgctttttttatatttccaagaatatcataccacaccggaaatcccagtcctgatacgacgatcagaagaatcgttgtaaaattaatcaaaggtgaacccgcatacccgatcaggctgttgcttcccagcagatccactcccgcattacagaatgcagacactgaatggaagattccgtatccgacgccttttaccacaccataatcctgtacaaaccggatggaataaaagacggcaccgatcgcctccaccgtaaacgtccctttcagaacccggataataaacttcaccatcccggacatcgtatccagtccgtaagactgactgatcatctgccttcccctgaaactgatctttttcctaagcaacagaaaaaatgccgatgtacaggcgatcacgcccagtcctccgatctgaataagcaccagcatgatccctttgccgatcagtgtaaactgcgttgccggtacaaccgtcaccagtccggtcacacagacgcacgtaaccgcagtgaacagagcatccagaaacgaaattggctgccggtttgaaaatggcagccataacaaaagcccgcccgcaaggataatccccataaatccgagtgcaacgatctgcatcgtactgagccggagctttcgtgccgcccacccttcttcatctatatgaatttttctcatttctttcagatacactccttatcataataaaactctctatcatactagcacgttggacagggacaggcaagcaaagaagaaaaaggcgtgtgaaaaaacattcgtttcttcacacgctcctgttcaggtttttattcatccgtagattcaatctcacctgtaaatcctgcatcccggatcatcttcatcgtgtcgtcaattccctgaccacctgctgtcagataacctgatgcaaaaatagaatcaacaaccttgaataattccggctcaatccctttaaaataaacttctcttcccgcagcacaacggatatctgacttcgggatcatcagtcttgccaggcagagtaccttcatgcaatattccggtgtcagtcctgaaatatcgcggtctgcaagtcttgttccgggaatcggaagaaggaaattgatcggaacggactcaggggaaatcgctttcagatccatcagcatatctactacatccgctttgctctctcccataccgataatcccaccgctgcagatctcaaatcccagcccctgcaacattttaatattattgacccgctggtcatatgtgtgcgtggaacagatctcaggatagaaagaacggctgctgttcagattatggttgatccgatccaatcctgcttctttcagcatcttcgcctgcttttcggtcaggaatccgatggaacagcagatctgcgtattctttttcttcataatacgaatgcgttctgccaggtcctcaatctctgcatccgtaaacttgattccgctcagaccaatgcagtgccttgcaaggttcttttcatccaccagatcattatctccgtataatttctcatccgatacccggcggtacttctcgatcggtgcatgcgattcacaggactgggcacagtaggcacagttctgtgaacagtttccgctacgcacatttgtcagcaactgtacgctgacctttttccctttatattttgttctcaatgcatacgcacaggaaatcaggtcttccatctcttctttcggaagatcaaggatctttacagcttcctctctgctcaaggaacgctcctcgtcccagtctgctaataatgtatggatcatggatgtatctggcattgtttactgtaccttctttcatttagtatgatgtgagcggtgaaaagtctcaactgtaagattcacagattgcctcgtactgcacgctcccactggtattctagtataaaagtacagttttatattgtcaactatttcttgtatttagtttacatttatcttaaagatttttcactgcagtttccagttgtgtcagagccttttccagcgtctttcttgggcatgccacattgatcctctggaatccgcttcctgactctccgaacatttttccaccgtcgagccataatcctgcccggttttccacaaaatctttcaggttttcctctgcaattcccaatccccgaaaatccatccacaccaggtaagtaccctccgtcctggtcactttgatctgcggaatatgctcttccatccattcatgcaggaatgtgatattctctcccacatactttttcatttcctgataccattcttctccctgtgcataggctgcgatcaccgcctcgatccccggtgcggaaatctgactgtaaccggctgctgtgatctgctttgcaaatgcctcccggagtgcttcattcgggatcaggatattggatgcctgtaaccctgcgatattaaatgtctttccaggagatgtgcagataactgtaaagtctttgtattccggcttcagatctgcaaaaacctggtgctttccttcaaatacgaaatctgcatggatctcatcgctgaccacgatcactccatgcttcttgcagatatctcccagcttttccagttcttcccgtgtccatacacggctgactggattgtgcggactgcacaggaggaacagtcgaatcctcttttcaacgatctgccgttcaaaatcttcaaaatcaatcttataacttccattctcatcctgatacagtacattatttgcaacttctctgtcattggactcgattacttcccggaacggataataaaccggttcctgaatcagcacatagtctcccggttctgtatatgccttcactgccattgcaagtgcaaagacaactcccggtgtcttgagcagccattccggttcgatcttccagccgtgacgacgttccatccaggatcgtactgcatcaaaatatgtttcatctgtctctgtatagccatatacaccatgctctgcctgacgcagcagtgcatcctgaatataggaacttgtcttaaaatccatatctgcaacccatagcggaaggatatctgcactccttcctctctgcaccgcaaaatcatatttcaggcaacgtgttccctttcggtccacgccctgttcaaaattcagatttctttcactcatgttcttctcactttctgcctcttaccttgctgttctttcgtcagctttccctgttatgctttttgtcactctttcctgcaatttgtcgttcttttctgctcctgcaattcatcacatcactctgccagtgcctgttccagatctgcgatcagatcttctgcattttcaattcccactgacattctcagaaagtcttccgtgatccccagccgttctcttgtctcaaccggcacatccccatgcgtctgaagcatcggatacgtgatcagggactctactccgcccaggctttccgcataggagatcagctttacactctcaagaagttttctcgcacgcttttctgaatctactttaaatgagatcatacttccacagccgcttgcctgcttctggttgatctcgtaccccggatgttccggaagtcccgtataataaactgctttcacttccgggcggtctttcagccacagtgcaatcttctttgcattttcctgctgacgctccagtcgaacagacaaagtcttgattccacgcagtaccaggaaactgtcaaatggcggcagacaacatcccaccgtcttgtatgtataccgaagcttttcagaaagtcctttccctttgatacatacaaagcctgcaaggacatcattatgtcctcccagaaattttgtaccgctgtggacaaccagatctgcccccagagtcagcggtttctgaaaatatggtgtcagaaatgtattatctgcaatgatcaataacccatattcatctgcaatttctctcattgccgcaaaatctgtcaccttcatcgttgggttactcggagtttcaatataaagtgcttttgtttcttttctgatacttttacgcaccagttctatatctgaagtatctatataggaaaaggtcacgcctcttttttcaccgatactctcaaacattctcaccgttccgccatacaggtcttctgtgcagaggatatgagatccttcttcaaataattccagacataatccaatcgctgccattccacttgtgcaggcaatgctgtcatccgcttcttccaatgtcgacatcacactttcaagctcatgccttgtcggattgctctcacgggtgtagtcgtatccggtacttcttccaattcccggatgtgcaaatgttgccgtctgaaaaatcggaacagagactgccccgtaaggatgtccctccacaaggcctccgtttccgtgaatacatcgtgtctcaaatttatattcttctgccattttcactgcctccatcgtcctgcaggaacttcctctgcctgcttatttgtttcaccatcttcatcagatgtaatacattccctctacggaatcctgatacccctcaaatgcttccacgagatctttcagtgtaatatcttcaaggatttcccggttcttctcattgatcctgtctatgatcaaatgctggatcgcctcctgatctccccggagacctgacatatcgccttcttcgtcttcaagatagtaactgccttccagtgcttccacaatctccgccaccgtgatcagttccggcgctttttccaggaaataaccgccctgtgaccccttgatacttttcacaatatgtgctttacggagtcccgaaaatacatgctccaggtactgtgccgaaatatcatttctctgtgcgatacttccaagtgaaacctgctcagttcttgaatttacggcaagatcgatcaatgcacgcagtccatatctgctttttttcgataatttcattttttgccctctttcactcaattttgttgctcttaagataaacggcgggagtataactcccgccggatcatttctcagtttatgccttcatttttactgaattgccttaaatgcctcatccagatcctgaatgatatcatcaatattttcagtaccgatagaaagacggatcgtatttggtttgattccctgatccagaagctcttcctctgtgcactggctgtgagttgttgttgccggatggataacaagtgacttcacgtcagctacattggcaagcagtgagaacagctccagattatcgataaactcctgagcctttgctgcatctcccctgatctcgaatgtgaagattgatccaccgccatttgggaaatatttcttgtaaagttcctgctgcttcggatccggatctacagatggatgatggactttctctacctgtggatgattgttcagatactctacaactttcagtgcattctctacatgacgctctacacgaagggaaagtgtctcaagtccctgcaggaagatgaatgagctgatcggtgaaattgtagctcctgtatctcttaagaggattgctctgatctttgtaacaaatgcagccggtccgcaggcctttgtgaagctgattccatggtagctcggattaggctctgtcagtgacgggaattttcctgaagcctcccagtcaaattttccaccttcaacgatcactccaccaatggttgttccgtgtcccccgatgaactttgtagcggagtgaacaacgatatctgcaccgtactcgatcggtcttacaagataaggtgttgcaaatgtattatctacaacaagcgggattttatgcttatgtgcgatatttgcaagagcttcaatatcaactacatcagagttcgggtttccaagagtctcgatgtaaactgcttttgtattttcctgaattgcattctcaacttcttccagattgaagatgtctacgaatgttgttgtgattccgtagttcggaagtgtatgctcaagaaggttgaaagatcctccgtaaatgttctttgcagatacgatatgatctccctgctgagccaggttctcgattgtatatgtgatagctgctgctcctgatgcaactgcaagtgctgctgaaccaccttccagtgctgcaattctcttttcaaatacatcctctgtcgggtttgtcagacgtccgtaaatatttcctgcatctttcagtccaaaacggtctgctgcatgctggctgttacggaatacataagaggatgtctgatagatcggtaccgctcttgcatcagttaccggatccggctgctcctgtcctacgtgaagctgtaatgtttcaaatttgaattttctgtcttttctctctaattttgccattggtctgttctccttttatctttttattttgtctgttataaggtttcttctataataaatattctgtaacaatcttcgtatcacttactctgtgaagagtggtgtagagtagtatctgtctccgctgtccggcagcagggctacgatggtcttacctttgttctccggtctctttgcaagtgcgattgctcctgaaagagctgctcctgaagaaatacctacgaggattccttcatgctttgccagaagtttcgctgttgcaaatccttcttcgttatctgctttatatacttcatcgtaaacctttgtattcagtacatccggtacaaatcctgctccgattccctggatcttatgtgctccggcttttccttcggaaagaaccggtgaagatgcaggctcaagtgctacaattttcacatccgggttctgagacttcagatattcaccaacacctgtcagtgttccacctgttccgactcctgcgataaagatgtctacctttccgtctgtatcgttccagatctccggtccggttgtctctctgtgcatcttcggatttgccgggtttacgaactgtcccgggataaagctgttcgggatttcctttgcaagctcatccgcttttgcgatcgctcccttcattccttttgctccttctgtcagaacgatctctgctccgtatgctttcaggatatttcttctctcaacgctcatcgtctcaggcatggtaaggatgattctgtatccttttgccgctgcgatcgatgcaagaccgattcctgtatttcctgatgttggctcaatgatcactgaaccttcttttaaaagtcctttttcttctgcgtcttcaatcatggcttttgctacacgatcctttacgcttccagccggattgagatactcaagcttaacaagaatcgtagcttccagtcccagctctttttcaaggttcaccggctcaacgagcggtgtatttccgatcagtcctaaagttcctttataaatagccgccataatatatatcctctctttctttttcctacttggttggtatgttttatgagttgcattatacactgcgaatacctatctgtcaactatgttttatatgtttttttaaaccatttttatcgtacaccggtttcaccatacagagaatctgccaccgaaaacttctcacacatacttctgcacttaaaaagcagccgttcctgctcggaaacgactgcttctttcttcaccctaccttcaggcgaaacttctgtatctctttttcactggatactttctcgatgattccaccgagacttctcagtttttcttcaaatctctcatatccacgctggatataaacaatatcatccacgatcgtaataccgtctgttgcaagtccggcaatacataacgctgcccctgcacgaagatcgggtgcactgactctggctgctgaaaacttctccacgccctcgatcgtagcagaattaccttccaccttgatattcgctcccatacgtgcaagctcatcaagatacttaaagcgattctcaaaaatactctctgtgatcgtacttgttccacttgcaagtgcaagtactacaccgatctgcggctgcatatctgtaggataccccggatatggaagtgtcttcacctgcgtactcttcagcctgccctttgccactacacggactgcatcgtcaaactcttc

SEQ ID NO: 38 - DNA, 7561 bp, unidentified
  source 1..7561: mol_type = unassigned DNA
ggcatctgccgcacctcgctcgccgtatcggcacttagaattatgcgatattgcctcaggaagtcttgcgcaaaaaccggaaacagaatataatgtatctgtattattatgttattctgagggcaaagcccgaacgataaaaggagaatatgaaaaaatgagtaagtttaattttattgaaaccgaaatccccggcgttgttgtgatcgaaccgaccgtgtttggcgatgaccgcggttattttatggagacttatcagatcgacgatttcgccgccgccgggattgacaagccctttgtacaggataaccagagccgctccaccaagggcgtgctgcgcggcctgcatttccagaagaaccatacccagggcaagctggtgcgtgtgaccatgggcgaagtgtacgacgttgccgtggactgccgccccaacagcaaaacctttggcaagtgggtgggtgtgaccctttccgccgagaacaaaaagatgttctatatcccggaaggctttgcccatggctttctggtgctgtctgatgtggcggaattctgctataagtgtaccgacgtatatgatccgaccgcagagggcggcatcccctatgatgacccgaccgtcaacgttcagtggccggactgcggctgcgagcataagaccagcgccaaggacaaagagcacacgccctttgccgagcagaagtttgaatactttgaaaaatactgattcaggggaaccgatgtgcagaatttaaaaaactcgtttgcaagtttctggaaataccgctacctgctgcaaaacctcatcacgcgggattttaagctcaagtaccgccgcagcgtgctgggcgttgcctggagcgtgctcaacccgctgctgacctgccttgtcatgtgggctgtgttcggcgcgctgttcaaccagcgcggggatggcattgaggatttcccgctgtttttgatcattggccagttgatgttcaacttcttccgtgaatccaccagcatggcgatggaaagcgtgctgaaaaacggcccgctgctgcgcaaggtctatatccccaagtacatttttccactggaaaaatgctgctttgcgctggtcaacttctttttcagcctggtggcgctcttctttgtagcgctggttacctggtcccatatttcgctgcgcacggtgctgctggcggtgtatcccattgttatgctgttcgttttcagcctgggcgttgggctgatcctgtccacgatgtatgtctttgtgcgtgatatcatgcacatctgggaggtcttctgcaccctgctggtatacggcagtgccattttctatgatcccagtcagatggcatcctggatgcaggctgtcatcaacctgaaccccatctactggtacatcacggcggtgcgttcctgcgtgatgtggggcaccggcctgaccctgaacatggtgctgattcctttcctgtgttctgcgctcagtctggggatcggtgtgtatgtattcaaaaagaaccaggacaaatttgtcctgtatatgtaagggggctgcaagatgagcgaacaaaagcaacagcccattatttccatcgaccatgtttcgatgcgttttaacctggcaaaagaaaagcacgaaagcctgaaagaatattttgtggcccttttgcacggcggtgtgcgatttgatgaattcttcgccctttcggatgttagctttgacattatgccgggggatttttacggcttgatcggcctgaacggctccggcaaaagtacgctgctgaaagtgatttccggcgtctacaagcccagcgccggtaaagtgacggtgaacggcaccattgcgccgctgatcgaactgggtgccggttttgacatggatttgaccgcgcgggaaaacatctacctgaacggcacggtcctgggctatacccccaagtatattgattccaagtttgacgatattgtggagttcagtgagctgcaggaatttttggatgtgccgctgaaaaactattcctccggcatggtggcgcgcctggcctttgccgtggcaaccatgaccaagccggatatcctgattgcggatgagatcctttcggttggtgatttcctgttccaggaaaagtgtgagaagcgcatggcggagctgctttccggcggcacgaccgtgattctggtcagccattccattgagcagattgagcgcatgtgcaataaggtggcctggctggaccacggccacctgcgccgccttggccccaccaaagaagtgacggcggaataccgcaagtttgaaaagaaggacgccatgaaggcggacaaagtggagggataaggcgcatggcacaggacacgaaccagaaccgcccggcggatgtggcccaggcggacagtgtgggcggcatggccaaacgcctgctgaaccccgcccatttgtcagaccttgcccgccgcagcgccgccaccctgaaagagcagggtgccgagcagctgtggcgcgatgtgaccttccgcgtggggctggcgttccaccatgattcctggcagcaccgggcagacctgcccctgcgccgggagctgaaagcccagcgcgccgagtacgcagacggcaagccgggaccggtggtaagcgttgtagtgccactgtacaacacgccggaaaagttctttggccagatgctggccagcgtgcaaaagcagacctacccccactggcagctggtgctggtggatgcttcggacgcagcccatgccgcgttcagcacccatgccagcaaggccgcggcaaaggatccgcgcatcctgtataagaaagtggaaaacggcggcattgcggccaacaccacggcaggctttgcgctggcaacagggacgtatatcgccctgctggaccatgacgatgtgctgtaccccaacgcgctgtatgagagcgtgaaaaccctgcaaagccagggagccgagctggtgtacagcgatgagatcgtgctttcggcggatttgaaacagctgggcggctaccactttaagccggactttgcgccggactatctgcgcggggtcaacttcatcacccatctggcggtgttctcccgcgcattgctggaccgtgccggtgcatatgaatccagtgagtacgatggtgcacaggaccatgacctgatgctgcgcctgaccgaacagaccacgcgggataaaattgcccatatcaaaaaggtgctctatatctggcgcggccatgcgggttccaccgcggcgggcatggaggcgaagccctatgccctggcggccggtgtgcgcgcgattgatgcccagctccagcggctgaacctgcccggcaaagccatgcaggtggaggacgcgcccggcgcgtttcaggtgcggtacgagctgaccggccacccgctggtcagcgttatgatccccaacaaagaccatattgacgatttggaccgctgcctgaaaagcctgtatgccaacgcaggctatgataactttgaagtcctggtcattgaaaataactctgaacagcaggaaacattcgcctactacaaaaccatgccggagcgttaccccaacagccgggtggtgacctatgtggggccgtttaacttttctgccgtcaacaaccttggtgcgcgctttgccaagggcgagcatctgctgctgctgaacaacgatatcgaggtactcagccatgattttctgcgggagctgctgagctattcccagcggccggatgtgggtgctgtgggcgcaaagctctattacccggatgataccatccagcatgcgggcgtgattatgggcatcaacggcagtgcaggccacagccacaagagctacccgcgcaaggctgtgggcgatttgtaccgccttgtcaccacgcaggactatatggccgtgacgggtgcctgcctgatgaccaaaacggagctgtaccgcgcggcgggcggcctggacgaagctaagttcgccgtggcttataacgatgtggattactgcctgaagctgtggcagaagggcctgctgaatgtgtataccccccgtgccgaagcctaccattacgagagcaagagccgcggtctggacaccaccccggaaaacgccgcccgctatgcccgcgaaaaggcaaacttttacacgaagtatcacgaatatattgatcattatgacccgtactataacccgcatttcaacaacctgtttgaaaactttgggctgaaataaggcggggcagaggataaaacaatggtaaataagtttgatacccagtttttgatcgaaggcaggaacttggacgaggatgacatccgcgccgggatcatggccagcgccgagggcgactgcctgatcgtggtaggggatgaggaagtggtgaaagtgcattaccacactgatactccctggaaggtgctggaatacgccgccagccagggcgatttgcacaagatcattgtagaaaacatggagcgccaggcaaacgggctggatgggtaaagtatatcaggatttttatgtttggtgaacggcatgcagtatcatacaagagtgccaaaccgtttgcagggatatgattacagccaaaatggtgcatatttcataaccttctgtacgcagggcagagtgcatttattttggaaagaacccacccgattgcggcagaattcccaggccgtaggagcgcacattgcgcgcccgtcaccttgcccggaactctctgcgatagggaatgtggttgaacaggctattttgcaaatccctgataaatatccgacggtgcatctggaaaaatacgcggtcatgcccaaccatgtgcatttgctgcttttgatccagggcgacgggcgcgcaatgcgcgcccctacggtttccaacatcgtccaacaatgaaagagctgcgtaaccaaacacctccatcaccccatctggcaaaaatccttccatgaccacgttatccgtacccagacagattatgaaaccatctggctgtacatcgattccaacccccaaacatggcagacggactgcctgaacccgaaccggaacaaaccccaacaatctgacacccgaaaggacgtaacgttatgaaccagcaggccaagcgcatcaaagaactatttggctatgcccgtaccttgacgaaggaacagggcattggcaccatgtgcgtgcgcgcggcgggctttttcaaacggcgctttttcggcaagcgggcgcggtactggccgtccaacatggcgctggaagcccagcgcagcgaccccgcggcggaaaccttccccatcatttctattttaacgccgttgtacaatacgccgcaaaactttttaacagaatttctcgatagtgtggaaaaccagaccgcccacaactggcagctctgcctggcggatgcttcggacgatgcccacacctatgtgggggagctggtgcaaaagcacgtggcggccaacccgcgcattcgctatgtgaaaattgaaaacaagggcattgcggccaacaccaacgcggcggcccggctggcacagggggaatatctggctctggcagaccatgatgacatcctggccccgcacgctatctactgcatgggcaaagaactgcaaaaaacgggggccgatttcgcctacagcgatgaagcccttttccgcaaaagccccaaaaccgcccatgtggcccactttaagccggactatgcgccggaatacctgatggcctgcaactacatctgccacctggccgtgttccgcaaaagtctgtttgatgccatcggcggggagcgcccggagtgtgacggcgcacaggatcatgatctgttcctgcggctgatcgacgccatgcaggcgaaagacgccaacgccgcaccgctgcatatcccgcaggtgctgtattactggcgggttcatgcggcgtccacctccggcggcaccgaggccaagccctatgtggtaaaagctgcgcagaaagccgtggcggaccacctggcggcaaccggccgcagcggcaggggagaggagggcatcttccccggtacctgccatgtgcagtgggaactgccggagccggaaccgctggtgtccatcctgatccccaacaaggaccatgtggacgacctggaaaaatgtctgttcagcctgtactccaaaacgcggtacgaagcgtttgaagtgatcgtcatcgaaaataactccaccgaccccgccacaaaagcttattatgaaaagctgccggaccgctatgccaactgccgcgtggtggcttacagcggcgggttcaatttcagccgcatcaataactttggccgcaagtttgccaacggcaagttcttactgctgctcaacaacgatattgaaatcatcagcggaaactggctgacccagatggtggccgaagccagccagcccggcgtggcggcctgcggcgccatgctgtattacccggacgataccatccagcacgcgggcattatcaccggtttgggtgggtatgcgggccacagccacaagtaccacaagcgcggcggtagcgggtacatgttccgcttggccaccgtgcaggattattccgcctgcactgcggcctgcctgctggtgtgcacatcggcttatgatgccgttggcgggttggatgaagcctttactgttgcattcaacgatgtggatttctgcctgcgcctgcgggaaaaaggctggcgtattgtgtggaccccctatgcggagctgtaccaccacgaaagcaaatcccgcggttcggacgaggaagaccccgccaaaaaggcccgctttgccaaggagcaggcccgcctgtatgaggtacacggtaagcagaatatcctgcatgacccctattacaacccgaacctgagcctggattatgaggatttccgcgaaagcggggatctgcgcaatctgaaaaacgtgaccctgtgacccctgccggaaaagcagggaaaaatctgtgcagtttttttgctgttacggcttgccacgctatgccggatatgctataatctaaatgttaccgcggcccggctttgggtgtatgccctgcatcagggagccttgattgccttttgctgcgccgtaggcaaatattataaagcgaggtattactactatgagccagaagtctgctatcgaaaaacagcccatcattgcaaaagccgccatccatgagggtgacaccggttctccggaagttcaggttgcgctgctgaccgcacgcatcaaccacctgactgagcacctgaagaccaacaagaacgacaaccacagccgtcgtggtctgttcaagatggtcggccgccgccgtaacctgctggcctatctgcagaagaaggacatcaaccgttaccgtgctctgatcgctgaactgggtctgcgcaagtaattcgcaaaacgggcagggcgctgtatgtgcgccctgcccattttctatttcagcaggtgttccggtattcatttttattatgctctgccgctggcctgtaataatattgaataaagttagggcaatatcgcataattctaagtgccgatacggcgagcgaggtgcggcagatgcc

SEQ ID NO: 39 - DNA, 27859 bp, unidentified
  source 1..27859: mol_type = unassigned DNA
tacggcgaccgcccagcgccgtcccacggcgcgcgaactgggcgaactgcaggacagcgtgtggcgccgtctcgacatcctgcgcacgaccgaccggggattcgccgcctgcacaccggagcgcgaagcattcgacggaatcgcgaacgccgcccgcacatctgcgcccaaggaaatcgcaagcgtcgccgacgccgtccggtcgtccgggaccgacgaaaccgaggggatcgtccgcgtccgtctgctccgggccgactcggcgatgaaagcccgcttccgccgttacgtgcacgacagccccctgatccggctcgaagggttcgatcccgacacgacgccctatccgcccgcccccgaaggcacgccgccgcccgacggactgagcatggacgccgaatacgccttctaccctgcggagaccgactgcgtacggcttacgatccgctaccgaggcgattcgaccgtctatttcgggacggactacaccgtttgcaggttccaaaacggccggtgggaaacactgccgggcgccgacgcatggaactccctgctgatcggcatcggccgcccgcaatttcccgtccccggcgacgcccggcagacgaaagagtacgcctacggcttcacggcccggctcgcgccgcgcgtctatccgtccgtatacgcccgttaccgcatctgcaaaaacgtttacatggaaaatccgcaccgcaactacctgctcaccgccgattttacggtgacgcccttcgtcccgttcacccgctttccggagcagacgggcgacaacaactgacaaatcatgcaaatactcctctcctgcgccaaaacgatggccgaaagcacctccctgccgataccccgcaccacttcgcccctttacggcgcgcaggccggggagttggccggacagctggcgacgctctccaccgaagagctggcgaaaatcctgcgcgtaaaccatcggatcgccgcgacgaaccggctccgctacagccgcttccacgacgatgcggagagggcgctgccggcgctggcggcctacacgggcatcgtgttcaaacggatcgctccggcggatttcacggccggggatttcgaatatgcgcaggcgcacctcaacatcacctcgttcctttacggactgctccgcccgctggacgcgatccgcacctaccggctcgaaggcgacgccgtactgcccggccacggcgagcagacggttttcgaatattggcaggacaaactgacggacgcctttctggagaagatcaaggccgacgacggcatactggtcaatctggccagcagtgagatgaagcggctgttcgactggaagcgcatctgccgcgaagtgcgggtcgtcacccccgaattccgcatccgcgaagacgaccggctgaaaaccgtcgtggtctatacgaaaatgtgccgcggcgaaatgacccgtcatatcctcaaaaaccgcatcggcgatccgcagcagctgaaagcgttcgagtgggagggtttccggctgaatccgacgctcagcaaagccgacgactgggtgtttacgatgtaaggagtccggatattattcggcgcagaccggcgcctgtttcgtttcgagcagggctttcagaataccctcctcgtcatagccgcagagggcatagagctgagccggagttccgtgttcgacccactcgtcgccgatgcccagcgaacgcaccgaaacgtccagcccgcgtgcattgaaaaatgccgcgacggcttcgccgacgcctccgcgcagggcgccgtcctcgaccgtcaccacgcggcggaacttcgcacccacttcgaggagcagttcctcgtcgagaggtttggcgaagcgcaggtcgtaatgggctgcgctcaccccttcttcggcggcgcgtgcggcggcgcgtgcggcggcgttgccgaccgtcccgacggtcaccagcgccacatccgctccgtcgcggagcttgcgtccccggcccacgggcagggtttcgaaccgcgcaccgcgccacatccggccttcgccgcagccgcggggatagcggatcatgaagggatggccgtactgcagtcccgtatacatcatgccgcgcagttccagctcgtccatcggcgcggcgatcgccagtgtcggcacgcagccgaaggccgccatgtcgaagactccgtgatgcgtcacgccgtcctcgccgaccagaccgccccggtcgagacacatcaccaccggaaggtcctgaatggcgacgtcgtggatcacattgtcgtaagcccgctgcatgaaggtcgaatagatattgcagaagggcaccatgcccgcggcggcgagtcccgccgagaaagtcacggcatgcccctcggcgatgcccacgtcgaaacagcgcgacggcatggcctgcatcagcagattcatcgagcagcccgacggcatggcgggcgtgacgcccacgacgcggctgtcgcgttcggcaagttcgacgagcgtctcgccgaacacgtcctgatagcgcgacgccgaacccggcgacgaaatccgctcgcccgtatcgggattgaaccgccccggcgcatgccagacgggctggttgtgctcggcgggcaggtagcccttgccctttacggtcatgacgtgcagcagtttgggtccttcgatatcgcgcagcgcgcgaagcgtccgcaccaattccttgaggttgtggccgtccacgggtccgaaatagcggaaattgagactttcgaacagattgctcttgttgagcagcccctgcttgacggcgttgcccgccttctggcagagacgcagcaggcgcggcgtatgcgaaaggatgccccacaaccgttgcttgaagcggttgtagtggaccgaagtcgaaatcttgagcaggtagtttttcagcgcgcccgtggcctgatcgatcgccatgttgttgtcgttcagaatcaccagcaggttggtgcgcttgctggccccggcgttgttcagcccttcgaaggccagcccgccggtcatcgaaccgtcgccgatgaccgccacgacccgatacttctcgccccgcagttcggccgccttggccatgccgaaggccgccgagatcgacaccgaggcgtgtcccccgccgaaagcgtcgtattcgctctcggacatgcgcgggaagccgctgatgccccccagccggcgcttggttttgaacgcttcgcggcggcccgtgatgatcttgtgggcataggtctggtgccccacgtcccacacgatcttatcggcgggcgtgtcgaagacataatgcagggcggcggccagctccacggcccccagactcgacgcgaggtgtccgggatttaccgaacattcgtcgacgatatagcgtcgcaactcgtcgcagtaagcgcgcaactcctccgcggagagccttttgaggtcctccggcgaatcgatatgtagaagcagtctgtattcttccggcgtcatggcgagacaaagataatgcaagcagggcacaaaagcaagcccgtccgccttttggccggacgcagcctttccggaacggcgtcgaaaagcgtgcgcaccggacaccgcgccgaatttgttcggacacggtccggagggcgtctattttctgtaaagatagtcattgatgccggtttttttcgaaaaaatttctatcttcgcgttacggtaaatccattgcaacatgaaatacaagagaatactcctcaaactgagcggcgaatcgctgcaaggttcgcagaaatacggactctcgcccgaagtgctccagtcctacgccgaacagatcaaggcggtcgccgggacgggcgtccagatcggcatcgtcatcggcggcggcaacatcttccgcggactcaccggcgccaagaagggcttcgaccgcgtgaagggcgaccagatgggcatgctggccacgatcatcaactcgctggcgctgcagtcggcactggaggacaacggcgtgaaggccaaggtactgacttcgatccgcatggaacccatcggcgaatactactccaaggcccgtgccatcgagtacctcgaagcgggctatgtggtgattatcggcggcggcacgtcgaatccctatttcacgaccgactcggcgtcggcgctgcgcggcatcgagatcgaagccgacgtgatgctcaaaggcacccgcgtggacggcgtttacacggccgaccccgaaaaggacccgacggccgtgaagttcgaccggatcacgttcgaggaggtgctcgaccgcaggctgaaagtcatggacctcacggcgttcaccctttgccgcgagaacggactcggcatcatcgtcttcgacatggacacgccgggcaatctgggcaaagtacttgcaggcgaacagatcggaacgctcgtaaccgggctttcataggagcttccggccggcactccggactccgtgcgacaaagtgcccgacaaaccaaaacaacgaaaaaacatggcgacaaaaaagagtaacagacaattatggatcatgctggcgctgatcgtcgcgatcgtcgccgtcatcctgctgctgccttcatgcggcggcaacagcagcaaaaaggcaggcgacgtcgaatcgacgacgctcgtgaaggccggcgacaaagcccccgacttcacggtcgagatgttcggcggcggcaaaaccgacctcgccgaactgaaaggcaaggtcgtcctgctgaacttctgggccacgtggtgtccgccctgccggcaggagctggcgcgcgtgcagagcgacgtgatcgaccgtttcgcaggccgcgatttcgtattcctgcccatctcgcgcggcgaaacgcaccagaccgtggcggcgttccgcgaaaagaccggctactccttcccgatgggtctcgacccctcgcagaccgtctacgaccgttatgcgtcgaactacattccgcgtaatttcgtcatcgaccgcaacggcaaggtcgtgctggcgtcggtagggtacgaccccgaagagttcgacgaaatgatcaaaaccatcgaaaaaacactcgaataactatggataccaaaacgattctcaacgaagcctccggccgtatgcagaaggctatcgaccacctcgaagaggaacttctgaacgtgcgcgcgggcaaagcctcgcccaacgccctgaacggcatcatggtagattacttcggctcgcaggtgcccgtatcgggcgcggccagcgtcacggttcccgacgccaagacgatcctgatccagccgtgggacaagaacatgctccggccgctggaaaaagccatcatcgactcgaacatcggcctgaccccctcgaacaacggcgagcagatacgcctgacgattccgcccctgaccgaagagcgccgcaaggagctggtgaagcagatccgcggcgaagccgaaacagcccgcatcagcctgcgcaacgcccgccgcgacgccgtcgaggcattcaagaaggcccagaaggagggcatgcccgaagacgaatcgaaagacggcgaaacccagtcgcagaagctgctggagaagttctccaagctgctcgacgaagcgctccagagaaaggagaaggagatcatgaccgtctgaaacggtttcatccgcatgaaaatccggcccgattcgtatattggccggattttttcatatatttgcccctcctaaacattccgtcccgatgaaaaagccattccgcaagatttcggtcctgatcgtattgttttcgctgttcggcatacagaacgcagcatcgcagggctacgtcaaactcaacgcgctctatgcgctggtcggcgtcgtaaacccctctgtggaattcgccatatcccccaaatcgaccctgcagaccgacatcgtggtctcgccgtggaagtcgatcaaccaaaagcatatgaccttcgccatcttcatgggcgaataccgccgctacttcaaggagcacaaccggggctggtatctgggcgccaatatcggcatgatggctttcgacatgtctaaaccctatatcgaaggctggaagctgaaattcgaagaccgctactgcaaaggttacggcatgatgatcggcctgtgcgtgggttacgaacaccagttcggggagcggtggctgctcgacgccttcttcggatgggcatggatggacagccactacaacggatacagtttcgacggcaaggtagacatgtatccccaccgcccggtgcagccggagaaccccgatccgttcaacggctcgtcggagtggtatcccaacaagctcggcgtctcgatcggctaccggatcttcatgcccaagcgcctgcgcaccgacagctcctgctgcagatagacggcacggattgcgggagacggccgcaaacgacggacaaccataaacgccctgctcctcaaagagcaggacgtttcgtcttgccggatgtgtccgaacaggttacgggccggcaaaacagccctgcgacactccgaaagaaaacgccggtttcgaaacgtccgactccgcaggttctgcccgttcttccgctaattcgaccgactccgcaagttccactgcctctgcgaggaggggctgcggaatctgcggagctgccggttttgccgactctgtccgttccgccgcacggcatgatccggacggcgcactacatgcgcaaaaaaaacggaagcggggtgaaaataccccgcttccgcgttctgacgatgcgcggcctgcgccgcagtcatcgggaattacttaaccttcgggccggcagctacgagcttcttgccttcctcgttgcccgtgaacttcacgaagttctttacgaagcggtttgcgaggtcctcggccttcacgtcccaatccttggcgttcttgtaggtgtcgcgcggatcgaggatcttgggatccacgccgggcagagccgtcgggatcttgaagtcgaagatgggcagcgtcttggtctcggccttgtcgatcgaaccgtcgaggatggcgtcgatgataccgcgcgtatccttgatcgagatacgtttgccggtgccgttccaacccgtgttcacgaggtaagccttggcgcccgacttctgcatcttcttcaccagctcctcaccgtacttggtggggtgcagcgaaaggaacgctgcgccgaagcaggccgagaaggtcggagtcggctcggtgatgccgcgctcggtacctgccagcttggcggtgaatccggagaggaagtagtacttggtctgctcggcgttcaggatcgaaaccgggggcagcacgccgaatgcgtcggccgagaggaagatcaccttcttggcggccggagccttcgatacgggcttcacgatgttttcgatgtggaagatcgggtacgatacgcgggtattctccgtaaccgacttgtcggagaagtcgatcttgcccttcttgtctaccgtcacgttctccagcagcgcgttgcggcggatggcgttccagatgtcgggctcgttctcctgcgagaggttgataaccttggcgtagcagccgccctcgaagttgaatacgccgtcgtcgtcccagccgtgctcgtcgtcgccgatcagctcacgcttcgggtcggtcgaaagcgtggtcttgccggttcccgacagaccgaagaagatagccgtctcgcctttggcgttggtgttggccgagcagtgcatcgaagccatgcccttgagcggaagcaggtagttcatgtaggagaacatgcccttcttcatctcgccgccgtaccacgtgttgatgatgacctgcatcttctcggtgaggttgaagacgacggccgtctccgagttcagaccgagtttcttgtagttcttgaccttggccttcgatgcgttgagcacgacgaaatcgggctcgccgtaattctccagttcggcgtcggtcggacggatgaacatgttcttaacgaagtgcgcctgccaagccacctccatgatgaagcggatcttcagacgcgagttctcgttggcgccgcagaaagtatcgacgacgtaaagcttcttgcccgacagctcctgcgaagcgatcttcttcagctctttccaagccgccttggttacgggcttgttgtcgttcttatactcgtcggaagtccaccagatcgtatctttcgtggtctcgtccattacgaagaacttgtctttgggcgaacggccggtgtaaacgccggtcatcacgttcacggcgcccatttcggtctcctgacccttttcgaagccgcggaggcccttcttggtctcctcgcggaagagttcgtcgtacgacggattgtacacgatctcggtcacacccgtgatcccgtactttttcaaatccattttgttcatagcaatcgttatttttaataaaacatcaaatccaagatttaacctaaccgtcgaaatccgcgcatgcggactttaaccgcacaaaggtagaaaaacttttacacttgtgaaaaaattaacagtgaaaaacacaaaaaaagaacattattttttccggcacccgtatatgattcatttataacttcgtatctcctccgcccgaagccgcgcacagctcaggaactgcggacataccgcaaacatgctgccgcgatttccggttgtgccggacgaatccggcagcctccgaaaaacgcggagcgcaccggctttcggcctgtttcggaaaaatcggaaaataatgtgccgccgtctccgtttttttcttaactttggtaaccatggccggactctatttccacatacccttctgcaagcgcgtctgcgcctactgcgacttttacaaaagcgccgacctgcggcgcatggacgacctgctggcggccatgcaccgcgaactggacgaccggcgcggctatccgggcggcgaagcggtgacgacccgctatttcggcggcggaacgccgtcgctctgcacgcccgaagcgatcaggggactgctggaccacgccgcacgactcttcgactgctccggcgccgaagagacgacgctcgaagccaatcccgacgacctgacggccgagtacctcgacgggctgctcgaagcgggcatcgaccgcctttcgatcggcgtacagtcgttcgacgacgactgcctgaagctgatgaaccgccgccacacggccgcgcaggcggccgaagcggtccgcgctgcgcagcgcgccggattcggcaacatcaccctcgatctgatcttcggcgtgccgggtttcggcggcgatacgctgcgccgctcgctcgatacggccctttcgctcggcgtacagcatatttcggcataccatttgaccgtcgaacccgatacggctttcggacggcgcgccgcgcggggcgaattccgggccgtggacgagcagatcagcgaaacggagttcctcacggtccaccacacgctgaccggagcgggattcgaacactacgaagtctcgaatttcgcccttccgggcttccgcgcccgccacaacgcggcgtactggcacggcgcgaagtacctcggcatcggtcctgcggcgcactcgttcgacggcgaggagcggcactggaacgtaggttcggtggagcggtacatcgcgggcgatccggcggaacgcgaactcctcacgaacagggaccgtttcaacgagtacgtcatgacggcgctccgaaccgccgaaggaatcgacacgcgggaggtcgcggcccgtttcggcacgaaacggctggagcggatgcgcgaagaggcggccccctatctgcaaagcggcgcgctccgcgacgcaggcggacggctggcggttcccccggagcggtttctgatctcggacgccgtgatcgaggcccttttcgaaacataacgacgcgcgcaaccaagtgaaactgaaatgttaagttattcttaaatttttttactaactaccctttcgagattgttaatataaatataagtattacctttgcaccggttttcaaccgattcgacaagtaaattacaaacaagcatcacaaatatgagcaatgcaaaactaacccccgattacctgttcgaggtaagttgggaggtctgcaacaaaatcggcggcatccatacggtagtctcgaccaaagcgcaaacggccatccggaaattcaacgagcgctatatcctcatcggacccgacctgcagcacgaaggcgtaaaccccgaattcgaggaggatcccaacctgctgaagacatggcgtcaggggctttacgccgaaggcatccgcatccgcgtgggacactggaaaatcaagggcgaaccgacggcgatactggtggacttcacctcgctgattccccgcaaggacgaaatactcaagaaactctgggaggcctaccacgtcgattcgatttcgggtcagtgggactacatcgagcccgtgctcttcggctacgccgcaggcgcggtgatcgcctcctatgtcgagaacttctgcaccgcgaccgacaagatcgccgcccatttccacgaatggatgaccgcggcgggcggtctctacctgcgccgccatgcgccttatgtggcgacactcttcaccacgcacgccacggtcatgggccgctgcatcgcgggcaaccacctgccgctctacaccgacctgaccaagttcaatgccgacgagctggcacgccagttcaacgtcgtggccaaacactcgatcgagaaggccgccgctgcctaccacgacgcattcgtcacggtcagcgacatcacggccaacgagtgcaaattcctgctgggccgcgagcctgactgcatcacgcccaacggcttcgaaaacgacttcgtctggaccggcgaggagtacgacgcgaagcgcgccgaagcccgcaaaacgatgatctcggtggccgaagcgtgtctgggcgaaaagttcgccgaggagccgctgatcgtcggcaccagcggacgctacgaattccgcaacaagggcatcgacgtattcatcgaatcgctcaagaaactggccgcatcgccccggctcaaacgtcaggtgctggcctatatcaccgtgcccgccgccaaccgcggtccgcgcgcggacctgcaggcgcatctggccgacccgtcgaaacccatcgacggcgggcagtacaaatacacgacccactacctcgaataccagagcagcgacccgatcgttaacgccctcaacggcagcattctgaccacgcccgattcgaaggtgaaggtgatcttcgttccgacctacctcaacaaggccgacggcatcttcggcaaggattactacgaactgctggtcggcatggacatgaccgtattcccctcctactacgaaccgtggggatacacgccgctcgaatcggtggccttctccgtgccgacgatcaccacgacgctggccggattcggtctctgggcggccaaacagcgcgagcatgcgggcgtggagatcgttctgcgcgacgactacaacgatcaggaggtcgaagagaagatcgccgagtcgctgctgcacttcagcctgctggacgacaagcacgtgaacgagatgcgcgtgtcggcctacgaaatctccgaaacggcgctctgggaacacctcttcgccgcctacgagcaggcttactccgaggctgtcgaaagttcggtcatccgcaccaaccgcgccgtgctggacgagggcggaaaccgcaacgagcagatcaacttcgtgcgccagcagcttttcgccgagaagcccaactggaaccgcatgatggtggacaagaccctgcccaaacggctgcacgccctcgaagagctgtcgcgcaacctctggtggtgctggaatcccggcacgcgcgacctgttcgaaagcatcgaccatgcgttgtgggccgagtgcgaacgcaatccgatcgcattcctcgacaaaatgagcgtggagcgcatgaaggagcttgaacaggatacgaatttcctcagccagctcgacgccgtatatgcacagttccgcgactacatgaacgagaaacccgatccgaaggcgacctcgatctcctacttctcgatggagtacggcctgcattcgtcgctcaagatttactccggcggtctgggcattctggccggcgactacctcaaggaggcgtcggacaagaacgttccgatggcggccgtgggcctgctgtaccgttacggctacttcacgcagcggctctcgtcgcagggcgcgcaggaggcgacctacgaagcgcagaacttctacaagctgccgatctcgcccgtgcgcgacgaagccggcaactggatgacggtcaccatcgccttccccggacgtacgctctgggcacgcgtctggaaatgtcaggtgggacgcacggacctctacctactcgacgcggacttcgaggccaacctcgaagaggaccggcagattacgcaccacctctacggcggcgactgggagaaccggctcaagcaggagatcctgctcggcatcggcggtatccgcgcgctgcgcaagctgggcatcaaacacgacgtattccactgcaacgagggacacgccgcattcatcggcatcgagcgcatccgcgatctggtgacccacaagaagctctccttctcggaggcgctggaggtgatccgctcgtcgtcgctcttcacgacccatacgccggttcccgcaggccacgacgcattccccgaatcgatgatccgccagtacatgtcgcactatcccgacgtgctgggaatcacgtgggaacagtatatcaacctcggcaagaccaaccccaacgaccccaacgagaagttctcgatgtcggtgctggcctgcaacctctcgcaggaggtcaacggcgtttcgtggctccacggcgaggtctcgaaggagatcctgggcaacatgtggccgggctacttcaagaacgagctgcacatcggctacgtcaccaacggcgtgcacttcccgacgtggatcgcctcgtcgctgcgccgcctctacgcccgttacttcggcgacggattcgaaggccacgtctatgacatcccggcctggcagaaggtccacgacatccccgacgcggagctgtgggaggagcgcatgaagctcaagaacaagctcatcaagcatatccgccggcgttacagcgacccccggcaggtgcgcctcgactcgccgcgccagatgcttcaggtcatcgagggcatcaagcccgacgtgctgaccatcggtttcgcacgccgcttcgccacctacaagcgcgcctacctgctgttcacgaacctcgaccgtctggcggcgatcgtcaacaacaaggagcgtcccgtgcagttcatcttcgcgggcaaggcgcaccccaacgacaagccgggtcaggacctcatcaaacgcatcgtcgaggtggccgccatgccgcagttcgtaggcaagatcctcttcctgcagaattacgacatggagctggcccgccgcatggtgcagggcgtggacgtgtggctcaacaccccgacccgtccgctcgaagcgtcgggtacgtcgggcgagaagtgcgtcatgaacggcgtgctccagttctcggtactcgacggatggtgggtcgaaggctacaaggagggtgcgggatggatgctgcccatggaacgcacgttcgccgatcagggctatcaggacgagcttgacgccgagatgatttacaacaccatcgaagagcagatcgtgccgaaatactacgaccgcggcagcgacggcattcctcaccagtgggtggattcggtcaaaaagtgcgtcgccgacatcgcgtcgaacttcacgaccaaccgcatgctgggggattacgaggaacggttctacaacaagctcgcggcccgcaagcgcgaaatcgtcgaaggcggctacaagctggcccgcgagatcgcggcgtggaagcgcaaggtttcggccgcatgggacaaggtccgcgtgatcgacgtccagcgcgtgaggatcgacgacgaggcgatcttcgtcggcgagaagtaccacttcgaagtgacggtggacatcgccaacctccggcctgaggatatcggcgtcgagatggtcatcgcccagcagatcgtcggcggcggcaaggtgaacgtaacccgcaccatcgggctgaaacacaccaaaaccgacggcagccgcgtgacctatgcgctggattacgttcccggcgaggccggcacgttcgatgtggcgctgcgtctctatccctacaatccccacctgccgcaccgcatggattttgcattggtaaagtgggcttagcaaatttggcgtgaataatgttaaaaaaggtattaatttactgttatcgggtattatttatctgaaaattttaatatctttataggacgaactgcatttttaagaaagatatgtcagcacttactttcgacaaaagcgaattgggcaatctggagtactccctccagcgcgaaatgctctcgacggaccgtatcggcggctacatgagtacgacgatcgtctgctgcaacacccgccgctatcacggactgatggtggctcccatcgatgacagcggccggacctacgtcctgctctcgtcgctcgacgagaccgtggtgcagcacgaccagacgttcaatctggcgctgcaccgtttcaagggggtatacgagccgcgcgggcacaagtatatcaccgatttcgagtatacgccgacgccgacgatcacctaccgcgtgggcggcgtaatactcaaaaaggagatgctctggatccacaagcggacgcagctgatgatccgctacacgctcgtggacgcccactccgagacccggctgcggctgaggccgttcctcgccttccgcgacaagcatgcgctgacgcacgccaacatggaggccgacggacactcctaccccgccgtaaacggcgtgaagtgtcgtctctacaactcgttcccgtggctctatctccagacgagcaaacccggcacggagttcgtgcccgcgcccgactggtattacggattcgaataccagcaggagctggcccgcggatacgaagggtacgaagacctgctcacgacgggctatttcgaagcggagctcaagaagggcgagagcatcatcttctcggcgtcgctcgacgaaatgggctcgaccaagaccatcgaagaggttttcgccgcatccatcgcgcggcgtacgcataagatcgacttcatcagctgcctcgaacactcggcgcggcagttcctgatccgccgtccgggcgatcggaccgaagtggtgtcgggatatccgtggcacggggtttcgggccgccagaccttcatctcgctgccgggcatcacgctcgaacagggacacaaggaggactgcatcgacgcgctggacgcgctggatacgctggtgcgggagatgcgcgacggcatgttcaccggcagcgcctcggccgaagtcgcggcggacgctcccctctggtttttctggaccctccagcagctcgaacgcgaggtgggggccaaggagatatgggcgagctacggcccggccatgaaagacatactggagagctaccggcagggaataggcggccgcgtggcgctgcacgacaacgggctgatatgggcttcatcggaagaggtgcccctgacgtggatgaattcgacgatcgacggacgccccgtgaccccgcgcaacggctatcaggtcgaagtgaacgccttgtggtacaacgccgtatgctatacgctcgaactggccggcaaatacggggacaagacggacaaggccttcgtcaaggagtgggtcccgcttccggcacgcacgcaggagtcgttcatcgaactgttccgcctgccggagggttatctggccgacttcgtggacggcagcggtcccgacaaatcgacgcgccccaacatgatcgtcgcctgcggactgaattacaagatgctcgacgagacgatgcaactggaggtgatccgcacggtgcgccagcacctgctcaccccgaagggactgcggacgctgtcgccccaaaacccgctttacaggggttcgcaggagggcatgcccgccgaacgcgacttcgccgccaaaaacggctcggtatggccgtggctgctgcccttctacatcaaggcctgcttcgacatcgacggcgacgcattcctgccgcaggccgaggaggcgctggaaaacttcgacgaggacatccagcgttacggcatcggctcgatctgcgagctgtacgacgccgacccgccctacgcttcgcgcggagccatttcgcaggcgtggagcgtcggagccgcactggacatccaccgcatgatccgcgagcggagcaaaggggattcccaagggcccaaagccgcgaagaaaggcggtagaacgaacggtccgaaagagaaaaagccggcgaagacgaagcctgcggcgaaaagcgccgggaagacggtaaaggccgccgccaaaagtccggccgcggcgaaggcccccaaggccgcggcgaaaaaggcggcgccgaaagcagcggcaggaaaagccgcaaagaaataaaggcaacaaaatgaaaagaattaagatatgagagttttaatgttcggttgggagttcccgccccacatcgcgggcggtcttggaacggcgtgctacggcatgacgcgcggtctggcgcgcaacgacgtagacgtcacgttcgtggttccccacgcttacggcgatgaagatcagcgtttcacgcacgtaatgaacgccagcgacgtggaggctctctatggttcgaccgggagcggagccgacgacattctcgaaaaaatgtcgttcatccacatcgactcgaacatggtgccctacatctcccccgaagagtacgaggtctaccacgaacgctatgtaaaatcgggtcagcaggtctggtccacgaccgacgcatggaaacagcgttacaccttttcgggaaagtacggcgccaacctcatggaggaggtggcccgttacgccgtggtggccgcgcaggtcgccaaggacctcgaagggcagttcgacgtgatccacgcccacgactggctcacctactacgccggcatcgccgccaagcgcgtgtcgggcaagccgctcgtcgtgcacatgcacgccacggaatacgaccgcagcggcgagaacgtcaatacgcaggtctacgccatcgaacgtgcgggcatgcacgccgcggaccgcgtgatcgccgtttcgaaccttacccgcaacatcgtcatcaaccgctacggcgttccggccgaaaaggtcgtgacggtgcacaacgccgtgcgcttcgccggcggcccctgcaaaatgcccgaacgcggcgtgaaggacaagatcgtcaccttcctcggacgcatcacctaccagaaaggtcccgactacttcgtcgaggcggccgccaaagtgctcaagcgcgtacccgacgtacgcttcgtgatggccggttcgggcgacatgatgaaccacgtcatccgccgcgtggcgcggctgggcatcgccgaccgcttccacttcacggggttcctgcgcggcgaggacgtacacaagatgttccagctgtcggacgtatacgtcatgccgtcggtctcggaacctttcggcatctcgcccctcgaagcgatgcgctcgaacgtgccggtgatcatctccaaacagagcggcgtggccgaagtgctcgacttcgccgtgaaggtcgattactgggacgtggacgcgctggccgacgccatctacggcctcatccaatacccggccctgtcgggcatgtttgcgtcgaaaggactcgaagaggtcaccaacctcaagtggaacgacgccgcggcgaagatcaaagccgtatacgaagcggtcattgaagagaacaaaaaacaataaaaatacagataccctatgaaaaccgtctgcttatattttcaggtacaccagccttggcgactgaagaagtaccgcttcttcaacatgggcaaggaccacaactacctagacgacctcctgaaccgctcgatcatgcagaaagtcgcccggcagtgttacctgcccatgaacgccctgctgctgaagttgatcaaggagaacaagggtaaattccgctgttcgttctcgatcacgggcatcgccgtcgagcagttccgcgccttcgcgcctgaggtgctcgactcgttcaaggagctggccgccacgggatgcgtcgagtttctggccgaaacctactcccattcgctggcgtcgctggcgtcgaaggaggatttcaccgaacaggtgaagctccatacggcgatgatcaagaaggaattcggcgtgaagcccaccgccttccgcaacaccgagctgatctactccgacgagatcggcgccatggtcgccgacatgggcttccgcacgatgctggccgaaggcgccaagcacgtgctgggctggaaatcgcccaactacgtctatgccaacgccatcaatcagaaactgcgcctgctgctgcgcaactacaagctctcggacgacattgcgttccgtttctcgaaccgcagctgggacgaatggccgctgacggcggacaaatacgtcaaatggctctcttcggacgaaacgccgggcgaggtcatcaacctcttcatggactacgagacgttcggggagcatcagacggcggatacgggaatcttcgaattcatgcgggcgctccccaaagcgatcctcgccaagaagaacgacatggagttcgccaccgtaagcgaggccgccaagaagtaccagccggtatccgtactccactgtccgcacgtaatgtcgtgggccgacgaggagcgcgacgtgacggcgtggctcggcaacgagttgcagaatgaggctttctcgaaactctacgcccagaaagagaaggtcgccgccctgaaaagccccgatttcgactatgtatggagtttcatgcagacctcggaccacttctactacatggcgaccaaatggctctcggacggcgacgtacactcctacttcaacccgtacgactcggcatacgacgccttcatcaactacatgaacgtcctttcggacttcatcatcgagctggatcaagcggtggccgccaaagccgccaaggcaaaataaggctgaaaccgccgcaacacgggggaggaagcgccggagaggctttgtcggggcgcggcgtctaatacgcccgcgcacgaaacgcccgcgaaatcccgcccgaaatcagcaccgacgacgcggcgctgtccgtattgcagaaaaacggattcaggggcctttcacgccctccggggatacgatgagggacgcggaaggctggcgcatgaaacgcagccctacagccccgcaaacacgcccgtaaagcccgcatggctctgcggcgcgacggaacggcggaccgaaaaaaacgcccaaaatgccggaaaacgccggggaacatgggaagaacatccgggaaatgccggaaataggctcaaatcaaatcaaatcagccgcagtattgactgcggctgatttttcatataagtcgggacaaaggcacccgatccggcaacagcctatcgtatccggtccgacggattgcagcaacggtcggaacgataaaaaagcggcagaccgcgcctcttcggtctgccgcaagcaggaatgttacttaaaagtgggagttgttaaccaaaaaactttgggatgtgccgttcctgctttagggatttgatttcccgcgctcccggcaccgtcccgaaggacggcgccggattctgcggaaaagggggattctttttagttggctttctgcttaaccttgatatcaagattgtgaacgcgggccgtgccgtaatcataggatacggtaactttcaccttgaccgtcttctcgcctacgaattcgctgtcggcattacccttgaccgtaatcgtaccggtggttgcgaaatcggccccagtatcaattcggtcaacgagaacctccggattcatcacctcgtacttgacagcgactccgagaaccgcattctcatcggcagccgcagcctcgaacacgttgttgccgttgatattcgccagctggaggagatcgcccacagtcagggaagcatcgtcagcgctcgcggagatcgtagtagcggcattcttacgcaggctgatcgtcttatccttgatcgggtcgggaatctcgacattaagctcctgctcgtcaagaacataagaatcgagcatcagttttacgctgagcgccatgttcaggcccttgtactcagtaccccacgtcagggtcttggcgtcggcgtctaccgaagcgcctttgtacatttcggcgtctaccgagaagacaacctttccgatttcattgcccttggaatctttgggtgcaacccaagtgttgtcgaggttaagtccagcgggcacataagccgtcgtcgtaagctttgcgttcagacgcaccggattcgcatagttgtcgccctgtaccagctcgcctgcaaagccttcgaaattaaccgtaacggcaaccgttacatcgagaccccagtcggcagtaagtttagccgtgagttcgtagctcttctcctttgctccggtgccgagcttgatagcgatgttctttgcatcgtcggtcgcctgcacgagttcggttccatcttccgcttcatcggcagtagcctcgaaggtagcggcatagatcgcatctacgaacgtctgcttgtcggcgaagtacttcggagcccaatccttattccagagtttctcggcatacgtctcgatcaccgtgtattcgctcgttcccgccaagtaatccaccgttacggtctccggagccatcgtgatctcaggcataccctcgataacgacgggcagagtaatcgtaatatcggtgttctcatagttgtaacgtgctttgaccgtgtaagaaccgctcgtcattgcactgttgccggctacgacaagttccagatgctgctctgcacgatcgtcagcaggagagctagtaaggataatgtcagcgacatcgaacggcagttcgtcggtcatttcggtctcgccgtcgaagatctggatatcctcgaaggatccagccttcagtgcgttgtaaatcacgtggccgatctgcggcttcgtgggatcgggattcagcaggtaatccacagcctcgtaatcgtcgccggcactaaccgttgcatagttccacgttaccgtctgcggctcggaaacgatgacgtcggtgttgtccttgatgatggtgaactgcgatttggcgttcttaaccacgcggcaggtgtattcgcccgatacgaggtcgaacgagaacggttccgaggtaatcacgtcgtcgatcagagccggaacacccttgccctttttgatcgccgccgtggttgccgtaagcgtatagctgtccttgttatcttcgggatctaccgtcgctacggcggcgtcttcaggaacaacggtcttgagaacgggaacatcctcgccccagattgcggcaagctcctgcggtttgccgtctttcatgtagtaaatcttcacatcatggaagaactcaacgacggtttcctcgtcgttatatttcagaccgccgtcgccctcgaattccgggaactgggtatcgtcgtcaactaccagttcgaggtttccgtcctctttcatacgaccggcaaccagatcggcattgatcgcgccgcctgcattatactgcgtaccgataaaggcactggtgaaatcgctgcccaaatcctcgcccgaaatggcatcttcgggcgtagctccggcgacaccggtgcctgcgagtttcacattcagcgcaatggccagcgttttgccgtttccgtactcgtactgagtcttggcgacaacggtaaacttaccggtcacgacgtcctgatcgatcacgtctacaacctcgaacgacgcagcgctgcgcgtcttgatctcctccgttacgaacgatacgttctccttggtcatcttgactgccagagccgcaggcgaaaccatgaaagtagcttcgatcgcggcctcgttgccgccttcgtcgctgcccagatagaacttgtagtcctcaccttcaccgtcaaccatcgcgatatagggaagtccctcgatggaaatgacattgttcgatacctcttcgagcgaagtcggaacgtaaaccagcgactggatgcggccggcgaggtctgcgatagcgctccagagattgcggagctgcgtgtcgtaattgtcgaaacgatccttcagatcggcttctttcaggtagattgcgctgccgtcggggttgaacagtttgctgtttacaccctcctcgatcatcgcctcgatagcctctttcagagttacgttggcatcggtcagctccttgaggatcgtatcggtgatggtcttgcccatttcggctttgaccgtctcgtcattcatgtactcagccatgtacgaagcgaagttgtcgccgaggaccttcttgatggcatcggtgaccgtagccgtctccgaagatacggaattggcgacagcggtaaggatctggttgatctgagtcgccgacagctgatcggcaccggtgatgtaacctttaccctcgacgaaatccttcatctgctgctcggtaacgtacttgccgtcgaccagagcctgctggatgatcttctgcatttcggcctgcagtttacccatggtctcgtccgaagcgatcatcgtctcgaaaatcttcttgacatcgtcggcagtcagctgattcttggtagcctcttcgatcagtttctgaacgtcagccttggtctgatatccctgagccttaataagtttcaacacctcatcgctagtcagccaatctttcagatccgacttcttggcatagtctgccagccttttgtcaagctctgtctggagaccgctgttggtaacgaaagacgagaaatctatcccgtttaatttgtcggtaacagctttgagggctgaagcgtcggccttcaactcgacttgacccttcaagtcgttgatctgacccttcaggtcgtcgatgtcgtcgtcgtagtctttacaaccgacaccggctaacattgttccggttaagaacaaaatacatgttaagttatatattgatatttatgatgttacaacctcgcataacgactcggtttacatggaggtttacaagccggcgccggttttcgggtctttgcgggctggatcgggaatttgccagacccgtttgttggcgctgatgattctgtccgtgtcgaactccttgaggtaagtttcgatttccgccgggttgcgccccatgttctgggcgatcaggggcagcggcacgtcggcgtgataaagacgtgacgcataggtgtgacgggccgaatagaaggtgagtttccgcgacaggccgatgcgcttcgccgcacgctgcaacccttggtttatcacgttgttggcataggttatgcgttcgaaccggcgttgggggtcgtcgtcgaagtagatcggaaaaacgaagtcgtctccggcgccgcccttcgccgtgcgggcgaacggcttcatatagggccacgccacccgctgttcgaccagaatgcggatcggatgcagggttttggcgcgaacgaaattgatttcataaaaagcgaccgtctccttatgcgcttcggcataccgggggccgtaggccgcacaatcccggtcgtacttctcccggtccggaatctccacgcatacgaggtccttccacctcaggcgggccagatcgaccagcgccagcccctgaaaaatataggagcagatgaacatcgaaagcgcgaactgctcggcgtcgtacgacgcctgccgctcctcgccccggcatccgtggcatggcgcgcgccagcagcgtcttttcatcgtccggggatcgggtctcttccgggtcttataataatatgtatcgaggtagtaacggatcaggctgtcgaattcgtcggtttcgagcgcccgtttggcggtccgcacgtcgagcctgcggctcagacggaagcggtcgaacggattggcgtccagcagtccgttctggcaggcgtagttcatcagcgctttcagggcgctgaaaaaccgtttgatgctcgtatcggcataatgcgcatggaggtactcctcgaactcgccgagccatgcgccgtccacgtcgaacagctcgacggtccggtgctgcgagaaccgttcgacgatatggagcagcgtctggtagccggtggccgtgttgtgtttctggagggtgtccctgaaataagcgatacgctcttcgaaaaggtcgtacagggttttccgggacggaggtttacgcaccgaggcttcgaatatgcgctgcacggagtagggcaccccctgccgctcgaaatccagcactttgtttttcagcgccgtcagttcggaaccgatgatggcgttcatgttcggggccagcggatgccgttcgcgcacctcctgcttcgcggcgttccaccatttcgccggacaggagagtcccgtgcttttgtatcggcgtttgctgttgtagcagacccttatcatgacggggtgttcgccgctggcgagggtcttcgatttgtaaaggaccgccgtgacggtcgccttggggattttcatgtttttccggtttacgctatggtttacaaaataagcgtcgaacagctgagaaacggccgctcgaaattcatgttatatcgacgaacaccgggctgcacccccgtacttttcggatggagacaacaaaaaaccctctccgggagagggtttcgtgccgtatctgcggctcagcctttgcgtttgtagcgcgaggggctggtgccggtgtgctgtttgaagtatttgccgaagaacgactgggtcgaaaagttgaggtggtaggcgatctcctgaatactcatgccggagtatttgagcagcgccttggcttccagaatcaccgattcgtcgatccagcgcgcggcggttttgccgctcacctccttgaccacggacgagaggtatttcggcgtgatattgagctgcttggcgtagaagctgacgttgcgttcgcgtttgttgtactgttggagcagcgacatgaattcatcgaagagcacttcgcagcggccttgtttgatctcgccgggctgctcgcgctggttgatctcggtgatgatgtagaacgccgtggtgaaaagcgtccggatgatttcgtggcggtaacgctccttgtcgctgcgcagcatggttttgatgagctggaagagctggcgtatctggtccacgtcctgcggcgtgacctccagtacgggagccttgccgaagcgcatgtagaccggcagcgacgtcgagaggtcgatctggatctcattgacgaacgatttggagaacgccagaaaataagccgcggcgttcgacgaacatttcaccgtgcggatgatgctgtctggattgaaaaagacgatggtgttgggcttgacgttgtagttctgcatgtcgatcgacacggtggcttcgcccgtcatcatgatgatggccgagaaaccgtcgatcgaagccgggtagtcggacgtcgtgttgttctgcgcgtcgagtgtggtgattaccagatcgtccgacagatagaagacgtcgctcatctcctttttgatgcgtgagatcgaaactttccgcaaattctcacgtcctccttcccgcgtcgtccgtgtcgctttgatattatccgccatatcgtcgtggtttttcggacaaatgtaacaattttcgtccgaaattgcaataggccggaggaaaaatagcgaagtacgcaggccggcggcggcggaaacgaccgtcttgaaacgcctttcaaacgcctgaaacggcgctactctccgcgggggcacatgatgcggagacctccggcgatgcactcgatatgcagcgggaattcggcccctttctgcccgtcgacgtccgtcggttcgttgaccgtcgatacgatgtcgagcgaacgcacctgaaggtggcggacgatcttcggattgccccgcagcagatagcggcccatggccagcgtcgaacggaggaagttcttcttttcgagcatgatgcagtcgaacagaccgtccttgatcgacgaacggcgcgcgaggcggaatccgccggccgtctcgccgttgaagacgagcaccatcagcgagttgaaatcgaaagcctgtccgtcggccaccactttgagcggcacggcgtgcatcgcgcgcagctccttgacgccctcgatcagataggccagtttgccgatcttgtgcttgcgctggtcgggcgtgcgctgcgaggtggtcgtgaagatgccgaagctgaagatattgacgaaatagagtccgttgacgcatccgcagtccacgcggtccaccgcgccggaggcgatctgccgcgccgcttcgagcggatggcgcgacatgcccagcgcacccgcgaagtcgttggccgtaccggcgggaatcactccgagcgggatgtccagccccttgtttttcatggcgttgaccacgtagttgaccgtgccgtcgccgccggccacgaccatcaggtcgatctgttcgttgccgtcgaacggattggcgcagaagtcgatcagctgcggtttgatatcgtagccgtaagcccggaataccgtgcagacggcttcggtgcagcgttcgattttgcatttcccggattgggtgttgtagagaaaaacagcgcttttcatagggatcgttattgcatgatcatcgcctccatggcgggtgaaatatactcttcgtagccgtcggtcccgtcggcgaggatgaaataggccttcacgtccggcatcgtcctgacggccttcagcgcatcgtcggcccccatggccagaaacatggttcccagcgcgtcggcttcggcgcaggtcggcgcggcgacggtcacggagagcagacgcgacacggcgctgcgccccgtacgcgggtcgatggtgtgggccaccttgttgccgtcggcatcgaggtagaagcggcggtagttgcccgaagtggccagaccgccgtcggtcaggcggatgcgtttctgcacgtattcgccgtcggacatgttgccgtcgaacggggtttcgatgccgatgcgccacggaccgccctgccggttgacccctttgcagcggacttcgccgccgatgtcgacgatgtaattgcgggcgccgaacgattcgaccagccgggcgagcagatcgaccgtgtagcctttggcgatcgaattgaagtcgagctgtacgcggggatcggccttcaccagccggccctcctcgacacggaccttttcgcggccgacgaatgcgaggatcgaatcgacgtcgggatgccgttcggcctgcctgccggcaaacccccacgcttcgaccagcggtttgaccgtcacgtcgtagcggccgccgctcagggcgccgatactgtcggccagatgcaggttgaaggcgatatggcggtctacgctgtccgtctcgttgcggttgagccggctcagcagcgagcccggatcgaagatcgacatagacgccttggcttcgcggtcgagttccatcacggcggcgtagagctcctgcggggagacgccctgcacgtcggccgtaatatgcagtgttgtgccgagcatcacgccgtccacggcggtataggaggaggcgcccccgcatccccagagggcggccgcggacaccgcaatccagactttccgaatcagcttttctgtcataacgtgctcttgtcagccgcaaaaatagcattttccgggagattcgggaaatttccgccgaaaagattgctccgcggcgtgcggcgcaagcgtaacggccgttgcggccgatgcgtttgccacaccggcctgagcgccggacgaatgtttccgggatcggatc

SEQ ID NO: 40 - DNA, 25667 bp, unidentified
  source 1..25667: mol_type = unassigned DNA
gtgctgacggtattggagggactgcgagtcctgcaaatagatacgattttgaaaacgattctgatcgttggtgtgactgcgcttggggcagcacttgcatatgcgttgcatactgattatggtgcgattggcgtattggcaatctgtgcggcgtatggattccggaatcaaaaaaaggaactgcagatggcagttccctgtattgtattatcggtattaaacatgtcagaattatgtgcgcttgcggatgctggcattgtgcacttctataatgggaagcgtggcttaaaactaaaatgggtattttacatattctatccgctgcatttgctgattcttgcaggcatctgcgtgctgctttttaaatagaaaatattatgcataattgttatacatcagaccactgtaaacagactgcgtataggttgcggtctgtttttcttttgcgttcggatatgtcacgatcaggcggtcgatgtaagcgagcggatctaaggtcagacgattcactgtctttccgatatctgcccgaaggctggaattttctccaaacagtgtatttaatgtatcgtacgaaatgccgtttgcctgtgcaacatcaaactgcatgcgatgatcctcgccaatggtaatgccgatggaggcaagctgttcctcatgacgtgtgacaataccagagatatcgtgatagaggttgcggcttccaatagaggttggttcgccctcctcggagagggtaactaactgattgtatgcatcagtgaaatttgtcatttgatcgacaagcaggcttttgtccggtgtgaactgcacatttactggtgtatctgtgaccttatgaaaatcaaattccgcaacttgattgatcgagatatgattggaggttgaggaatgcaccagatcgttgatgtaaaatcgcgcattttccggataggtctgtatctgattgagtccgaaagtatcaactacttcggcaccctgttttttatcaaatgtaaaatataaggaagaaacggtctctggcgtacctgtatccgcagaagcgagcataagtgcactcgtatttccttcctttataatagaagcgcgtacatcaatatgcctgcggttgatctgatcggcaagctgttcctgcaaagacaggtttgtatcagcaccggaaacagacaatgtaaatgggagattgccatgtatcgtctgcatggagaagctgtagctgcccggtgcaagtgccgtgccgtcggaatcaaggtaagtgccgacatttacctgctcgttggcaagctggtcgatctgcagagtcatatgatccgggagttcgccagacgcatgtgcacggaaagaaccagataccgcatctggattatctgtgaagatctgcttctttgtgtaaagctcactgtctggattcgccaattggtcggtgatgtcacgcagggttagcgcctgttccttgatatcaatcatatgctcctgtctcgattccgagagggaaaccagatagagcggggatgactgattgtatttggaaatactgttgtaaaccgctttgagttcggaagccttgtgcgtgcgtgtgcgacgcttcggtacaagatcatggtttaaataattgtacacttgtgatatattcatataagaaggcctcctttcccaatataatggttttgttataattaaatatattataaatatcgtaaaaattcaactttttccttgactttatatgcaggttttgttattctaaagcttgcgatggaagaggtcctttttttttgcacgaaaaaagaggattctaagatgtcatctgtgaaaaaataaatatggaggtggacagttgtgcgtgtaaaaattacattggcatgtcaggattgtaaacagcgtaattacaatatgacaaaggataagaaaacgcatccagacagaatggaaacaaagaagtattgtaagttctgtaagaagcacacgatgcacaaggaaacaaagtaatcggaggagtagtctatgtcaaaaaaagaagagacttcttcaccttccttgaagagaagctggtttcaggagctgaaagcagagttcggcaagatcacttggccgacaaaggacaagctcgtgagacagtctgcggctgtaatcgtgatttccgtaattctcggatttatcattgcaggtgtggattacctgttacagatcggtttaacttatattgttggttaggtaggtgaatgtatgtcagaactattcgaaaacgaagctgcaacatctggaacaccagaaagcggaattccgaccgatggtgaggcaagatggtatgtagctcatacctactcaggttatgagaacaaggtgaaaaatgatatcgagaagactgttgaaaacagaaagcttcaagagcaaatccttgaggtaaccgtaccggttcaggaggtaattgagacaacaaagacaggcgcgaaaaagacagttcagagaaagttgtttccgggttatgttctggttcatatgtatatgaacgatgttacatggtatgtagttcgtaacacacggggtgttacaggatttgtaggtccggaatccaagccggttcctttgacagagcgcgagatgcgtgcgatgggtatcgtgactgaggcaccagtggttcacattgatgtggaagttggcgatcagatcaaggttattaccggagcttgggaaggcaatgttgctgttgttaaggcaattaacgagagcaagagaaccgtaaccattgacgttgacattttcggacgtgctacatctgttgagattggatttggagatatccagaagatgtaagaggtttaggaggtagctataatggctaagaaagtagaaggatatattaaattacagattcctgcaggaaaggcaacacctgcaccacctgttggtcctgcacttggacagcacggtgtaaacattgtacagttcacaaaggagtttaacgcaagaactgctgatcagggcgatatgatcatccctgttgttatcacagtttatgcagataagagtttcagctttgtaactaagactccaccggcagcagtactgcttaagaaggcgtgcggccttaagtcagcatctgcagcaccgaacaagacaaaggttgcaaagatttctaaggctaaggttcaggagatcgctgagctgaagatgccagacctgaatgcagcaagccttgaggctgctatgagcatgatcgctggtacagctcgttctatgggaatcgaagttgaggactaataagaaataatcgtaggagggtcgctcccgcaaaaactacaggaggtttatttgaatgaaaacaggtaagagatattcagaagctgcaaagcttattgaaaagacaaaaacatatgacttagaagaggctgttgcactcgttaagaaaacagctagcgcaaagtttgatgagacaatcgaagctcacttccgtttgggcgtagatggtcgtcatgcagaccagcaggttcgtggtgcagttgttcttcctcacggaacaggtaagactgtaaaggttctcgtatttgctaagggtaacaaggtagacgaggctcttgcagcaggcgctgattacgcaggtggagatgagcttgtaccaaagatccagaacgaaggctggttggattttgatgttgttgttgctacaccagatatgatgggtgttgttggacgtcttggacgtgtccttggaccaaagggcttgatgccaaatccaaaggctggtacagttactatggacgtaacaaaggcaatcaacgatattaaggctggtaagattgagtacagacttgataagtcaaacattatccacgtgccaattggaaaggcttctttcacagaggagcagttaacagacaacttccagactttaatagatgcagttgttaaggctaagcctgcagcagcaaagggacagtacattaagagcttagtagtagcttctacaatgggtcctggcgtaaagctgaacgttacaaagtactaagatttagccgtaacagagaaaagagtgtgaatggattccgacacggagtgcatgtgcactctttttttcttgcttttcagacgcaataatagtaaaattaaagtacttgagacatcgagaaagtaatttataccaagggggtacagacaatggaaaaggaacagattgtaacgaaacttacggaagtgattcatgatgtgttaccggaattggatgaggtagatatgcatgcaaatatggtaaacgaatatggcgtgaattccgtatctttgattcgcctgctcgtagcagcagaaagcaagtttgatatttcatttaccgattatgagcttgcactcagcgattacgattcgttcagcgatattgcagcagtgatagcggaaaaattagcatagattgggaggaacagtaaaatggcagatatgaaaaaattaccagtaacatatccaatgattacatcttggcagtggcatgcaacactgttttccattctctcagatgatgagaatgcaaagaaatggattttcagcaactacattcagcttcgttgctacaacattcaggagatcttcacaggcgatgatatgcttctcgcagatatgatgccaggaagcagcgcattgaagcagtgtccatacctgatgttctcacttcttacgaaagagcagattcagagctattgtggaaacatcattgatttcattatcaagactatcgacctgaatggatatgtatatggcgtatttgatgaggcaaagattttgtgtgatgcagaggtagattacaagttccctcatgagttattcatctatggatacaaccgtgacgaggaagtattctatgtaggagacttcacattccaggatcattattcatataacacagtcagcttctctgatctggagcgtggctatgaagttatcacagagcaggatgaccatgtatttaaggatgatcacaagggtggccgtggattgtatgttgttatgaagaacactgagcatccaatctatgaagtggatatcgagctgattaagcagacaatcagtgagtacctgaattctcaggatacaaaggatcatttccgtatgcttcgtaaccgttttgatgatacaacatttggtatcaaggtttatgacaaggtgcttgcacagatcgagaagcagctgcatgcagaggagccagatttcgatatccgtgcattgcatgtaatgtatgaccataaggttttgatgttagagcgtattaagtatctgatgaatcacggattcctgaaatacaatgaggatacgatcaatgagtaccagacggttgttcgtaatatgctgaccgctcgtaacctgcttgtccgtatttctatcacaggtgagattgagtcttcagtcagattcaagacatacctcgatgcagcaaaggagaaggaaatcagcattctcttccgtattcttgcagaactggaagataaataatatgacaaagattcatgtatcggttgtaaaagtaaatcgtgaatacttagaacaacattttgatgaattggttgaacgcttatacccggaacgaaagtcccgggtattggcttttcgtaggcgggaaccagcatatacatcgatcgtagcaggtttattgttgcagacacttgtagaagaaaagcttggtatctccccacaggcattggtgcttgaaaaaaacgagaatggaaagccaacggtacagggacatccagcgttttatttcaatctctcccatgcgggtgattatgtcgtgctggcgcacggtgatgtgcccctgggggtcgatatcgagcagatccgggaaaaggataatctgcgtgttgccagacgttgctttaccgagcgggagtatgcttatgtatccggacaaaaagaggtggtatctcaggagacggcaggtgcgcctggtgaggtggcggagaaattggggttcgagccggatgacagtttgtgtgcagagcggttcttctatctatggacgatgaaagaggcatatctgaagcttacaggcgatggaatcagtgtgccgctcaattcctttgaaatcgatccggtgcagaaaaccgtcattggtacatcgtaccggtattttatgcttcggatggatgattattggatttctgtgtgtgcggagggggattgtaccgtggaatacaggctggattcctgcatccgtttttgagatggtcggttatgccgatcttatggagacatccaggtttgtacgtttggacttttgaggattttgaaatttgaaatttgaattcaattttgttaagaaatcgcttgacatttagttgaaactacgatagaatatcatctgttgtgagacacaacacagatgcggtcgtagctcagctggatagagcacttggctacggaccaaggtgtcgggagttcgaatcttctcggccgcatatcttaaagctttccaatttattgggaagctttttttttcgtataaataaggcagataagacgagagagtcgatctttaattttatagttaatatgcgagccatcaaaatgtaaataaggatgcaacatatcaacgaattctcaagcagaccattggagcacatcagcacttaacgaggaaagtgacaattcgtagaattgatactttgcgagtttagtgtctgctatgtgcggaagtgagcgggagcgcgtctgcgtagaattacgttgtatgttgcctccgtaaaacatattaaatggctcgcaaactaaaataaaaagacgatcgaacctcgaccgtcttataagctgggctaccaggattcgaacctggaaaatgctggagtcagagtccagtgccttaccatttggcgatagcccatcattatgaagtttggagactcttttgtgtctcacaagatggtattatattacatgtcttttgaaattgcaagccttttttgaaaaaaatttacaaaaagttgaaacatactacaattccgcctacttgtcaggaattggataaataattgtttgacaaacggaaacaaatactatatgattgcttacgttgaacgctaggagaaaacaaagatttttgtaaatcgattgcgtagtgaacaaccatttgaaaggaagtaagtatgagtagcgtaatatatgtggttccgtgggccatttgtgatacagaaagcatatatgtgaagaaagtcaagggcgacgatgtacaggtgccagagaagggcagtgagtttaattcatggtgcattcgaaacgtgattgcaagtccggatcgcagaacaaaggatacgtatgcgattgtggatgtattcaatggctataaggaaaagatgaatgagaagggcatgtctgtgttctcacttaccaattcacaggatgtattggaaaatctgggcttccagaaagcagatgatacagaggcatcatttataaagaataaagttttgaagttgaataaggacaagaaaaaatagaccacgcatgtttgtggtctattttttagaaagtaggaaaaaatgatagaaattggaaaatggaatgatctgaaagtcattcgctcgaaagactttggtatataccttggtgaagaggacagctcgacggcagagacggtgctgcttccgagaaaacaggtgccggagggtgtgaaagccggtgcatccctgcgcgtctttatttaccgtgattcacaggaccgaatcattgcgacaacgaatacaccattgatcacagtcggtgaggtaaagaagctgcaggtaaagagcgtgacaagcttaggtgcatttatggactgcgggctggaacgtgacgtgctgcttccatttaaagaacagacggcgaaggtggaggctgggaagtcctatctggtgcggatgtatgtggataaatccggacgtctggcagtgtcaatgaagataggaaaagaattgcagccaatcgaaggctacgaagaaggacaggatttcgttggaaccgtgtatgagttcaagaaggattttggtgcatttgtggcaattgacgacaaatatccgggactcatctatacaagtgaattgtatgcgccagtgcgggtcggcgatgaagtacatggcagaatcgtaaagatccgtccggatggaaaggcagatctcgcgttgcggaagcttgcgtatgcgcagatggaagaggacagtgagatggtatatgccgttataaagagttataagggcgttttgccgtttacagataaggcagataaggatataatcaagaaggagttcggactcagtaaaaacgcgtttaagcgcgcctgtggacgtctcttaaaagagggaaagatccgcattacggagaagacaatcgaactcgttgattagataacatttataggaggcgcatatgtgcgaagcacatattcaggatgcgccgacgacatgccgccgaacgaatgtgagggggcaacaccacaaaggaggtacttatattatgaagacagtgattcagacaccaaaggcaccagccgcaatcggaccatattcacaggcgattgcagttggagatatgatttatacatcaggtatgattccaatcattccagaaacgggcgagcttgagacaggcgatgttaaggcacaggcgaagcaggcaatcggaaacctgattgcgttgttgaatgaggcaggcagcgatgcggagcatgtggtaaagacgacggtatttattaaagatatgaatgattttgcggcagtgaatgaagtatatgcaacgttctttgagaaagactgtccggcacgttcgtgtgtggaggttgcaagacttccaaaggatgtgaagattgaaatcgaagcaatcgcaatcaaaaaataatataataagtatattgaacagtaaaaacaagtgaaaacgctcgattatgttattttctgcttgcataattacatatgagtggtaaaataaagggcagataatacgcatgagggaaaggaagtaataaatcatgagcaaaaatattgattggtcttcactcggctttggctatgtgcagacagacaagcgtttcgtatcaaactataagaacggtgcatgggatgatggtgtactgaccgaggatgcaacagttaatctgagtgagtgtgccggagttcttcagtatgcacagacatgttttgaaggtttgaaggcatatacaacagagaagggacagatcgtgattttccgtcctgacttaaatgcatcccgtatggcagattcctgcaagcgtctggagatgcctgtatatccggaggataagtgggttgatgcagtcgtaaagacagtagaggcgaatattgactgggtaccaccatatggttccggtgcaaccctgtacatccgtccatatatgttcggcagcaacccggttatcggtgtaaagccagcggatgagtatcagttccgtgtattctgtacaccagttggtccttacttcaagggcggtgcaaagccaatcgtaatccgtgtcagtgattatgaccgtgcagcacctcatggaacaggtcatatcaaggctggattgaactacgctatgagcttatatccaatcgtagatgcacataatcagggcttcgctgagaatatgtatctggatgctgcaacacgtacaaaggtagaggagacaggtggagcaaacttcatcttcgttacaaaggatggcacattggtaacaccaaagtcagacagtatccttccttctatcacacgtcgttcattgatggtagttgcggagaagtaccttggcatgaaggtggagcacagagaggtttacttcgatgaggttaaggatttcgcagagtgtggtctgtgtggtacagctgcagttatctctccagttggaaagattaacgaccacggcaaggaaatctgcttcccaagtggaatggaagagatgggaccatatacaaagaagctgtatgacgctctgacaggtatccagatgggacgtatcgaggcaccagaaggctggattaaggtaatcaaataatttatgaataaaaaaatattaaccatcacaattccctgctataattcgcaggactatatgaagaagtgcgtggatcacgcattgcttggtggcgaactggtagaaatactgattgtggatgatggatctacagacgacaccgcgaagatcgcagatgcctatgcggagaaatatccgacgatcgtaaaggcaattcataaagaaaatggtgggcatggcgatgcggtgaataccggtatcgctcatgcaaccggagtctatttcaaggtcgttgacagtgatgactggcttgataaagaagcctataagcaggtgttgaaggtcttgaagaagcttgtggaagatgagaaggatttagatgtcctgctctccaactatatctatgataaggtggaacgccggaagaagcgtgtcatgcgttatcatggtgctttgccggagaaacggatcataagctgggaagacagccggattcggttcaacaagtttcagtatgtattgatgcattcggtgatttaccggacacagctgctgaaggactgcggactgcaacttccgaagcatacattttatgtggataatctctatatctttgaaccgatgatccatgtgaagaagctgatgtacttaaatgtcgacttgtatcactattatattggcagagaaggacagtcggtcaatgaaaagacgatgatgaagcggatcgatcagcagatgcttgtcaatcggacgctgatccagtttttcagtgagaaccgaaaagaactccctccacagatgtaccgtttcctgttccagtacttagatatgatgatgtgtgttgcatcgagtatctgtgttgtatcgaaggacaaggagctgtataagaagaaaaaagagctgtggaagtatctgaaggatacggatgcagaattatacaaggagcttcgaacaacgttgtttggaatcacattcaatctgcacggaccaacgggcagatggtttgcaagaaccggatatcgtctgttccagaagttgtttggatttaattagacaaataaaaaaattccgaagtttgtttatatcagacttcggaattttttatttatcattgtttctttctgccccaagggattacatagacaatcggatagaggattgctgccagcgcaaatgcaccgatgacatcccatacggaatgctgcttcaaaaacatggtagataagatgatcaggatgccgatgattgttgcgattaccttgatccatgttttatctttcatgcccttgctcctgtacagggcaacgagacaaccaagtgtgttaaatacgtgcagacttgggaatacgttcgtgcttgtgtctgtcttatacagcatcttgacgagttttgcacacaggttattgttgtaggagatatcctgccgcagatccagaccattgtgccagatggtgcagatgatcaggaaaatcgtcatgccgctgaacagatacgcacagcattgataatattctttcttggaatagaaaaattcatagccgacaatcgccgggacgaacaaaaaccacataaaatacggaataataaaatattcacagaacggaatcttgtagtcgattggcatcgatacaagatgaaaatccgtagttactgtcttttccagccacataaaccatggcatgtagaaaacgatgtagagtagtgtccatatgtggttatattttctgatgaattttcctgccttcataagggggtgtgaaaacctttctttttcttttgtgtcacaaatctgtttgccgacaggagttagtatatcatgcttcctcagaatgtgcaatcgcagcgccaacaaatcctaagaataatggatgagctttgttaggacgactcttaaactctggatgcgcctgtgttccgataaaccaagggtgatctggaagctcgatcatttctacgatatgaccatctggagataaaccagacaggagcatgccgtgatcggtcagaacctttctataatcgttgtttacctcataacgatgtctgtgacgttcgttgatgtggtccgtaccatataactggtatgcttttgaactcttatcaagtacacaaggataagaaccaagtcttagtgttccgcctaagtctgtgacaccattctggtcaggcatgatatggatgacctgatggctggaactagggttgaactcggagctgttcgcatccggatagccgacaacatttcttacgaattccacgatggtaagctgcataccaagacataagccaaggtatggaatcttgttctcccgtgcataggtaattgcctcgatcataccctcgataccacggtcgccgaaaccacctggaactaagataccggatacatctcctaagatctctgcaacattttcctttgttacaagttcggaatctacccacttgatctcaacatccgcacgatgtgcgacaccggcatgcttcagggattctacaacagagatgtaagcgtcgtgcaggctgacatattttccaactaaagcgacacgtaccttcttttgcggatgcttccagttgtccaccatggtgatccagtcgtcaagatctggctttggacatgggatatggaggcatttgcaggccgcatcggcaagcttctcgtgctccatagcaagtaccacttcatataatacatccacgtccagattctggatgacacattcgctaggaacgttacagaagctggcaatcttatctttaattgctttgtctaacggaaggtcggaacggcaaaccaagatatctggctggataccaagtgactgacaagtttttacacttgcctgtgtcggctttgtcttcagttcgccggatgattttaagtaaggaatcagtgtgacgtggatcatgatgcaattctcatgtccgacatccaactgaaactgacgaatggcttccatgtacggctggctctcgatatcgccgacagtaccgccaacttcgatgatcgcaatctcatcgtcttttgcatctggattgcgatagaaacgatctttgatttcatttgtaatatgagggatgatctgaaccgtatgaccgccgaaatcgccacggcgctccttgttcaggatgctccagtaaacctttcctgttgtcacgttagaacccttgttcagactctcatcgataaaacgctcgtagtgtccaagatccagatcggtttctgcaccgtcatctgttacaaatacttcgccatgctgaatcggattcatggttcctggatccatattgacatatggatcaaatttctggctgatcactttgtatccgcgcgctttcaacagacgtccaagtgatgccgcggtaattcctttaccgagaccggatacaacgccgccagtgacaaaaatgtactttactgccatagctcattcctctttccgtttgatttttatattatcattctttttgctttagaaaaattcaaaaatcattataaacgaaaaggaaaacgaagtcaattacaaatggttagaataaaacataagctgaaagacgcggttatcctttttattctgccggaacaaatatttgccggattttcccattttgcggtaggatttcacgtcctgatacttcgttacaatgttcaaaaactgttgtttctcctctggcacatggtagattcgttcaaaggcttttgcctgtctggagatgtgaccgccatttgtacggctctgcttcaggcggcggaagaatttggaacagccggaaggagctgctgcaccaagcgtatttcctgcatgctggcggtacttataatgagcggcgctgtcgtagtaaacttcgccgaaacaggacgcaactagatagagccaccagtcgtgcatgtagatatcctgtggcatactgattcggatataagacataagtgcctgattaaatacaatgcttgcaccgcgggcgatgttctcaatcaatgcgttccgaaagtccggaatcagttctttgcctgcggtctgcatagattctgaaagtggatttaatgcgtcgtcagtattccatgcatcacaacagtagagaagtggtgtggtaaatgtacggatctgggaatcattcttctttttcttttgggattttgatttgcgcatctgttcaagcttctggcaggcgatggaaagcttgtcttcgtcccacacatcgtcctgatcggagagggcatagaaatccacatccgggtcagataattcgaacagacgaaagaaagaagcgaccacgccgcagttttcgccacataggtaacaaatgttatcgtggagtgcggcataggcgcgcaggatatccacggtgccatcggaagaaccgtcgtcgcggacgaagagcttcacggcaacatttttctgattcaagatactgtctaattgttctttcaagtaagtttcgccattgtaagtagatagcagaacctgaactgtatacattaatagtctccttttataaatgcaatgtcgtagaccgttaatcggtcaactctgtataaatcgtagtcataagcttgtgtacaagcgaaatatcaaaatatttcctgcagtttgtctggttttcttcaccaagtgcctgtgcaagtgccggatcattgagaattttattgatttttgctgcatatgcgtctgcgtccttcgttggaagcaggtaatgcttgctgcgtgtatgtggctctgaggcaagcagatcgcggtttccgcggatatccgaagcgatgattggaagtccggcagccatcgcctgcatgacagcgacggataatccctcctgaaagcttgtaaataaaaacaaatccgcgcagtgatacagatccagcacatccgtatgatagcccgcgaaaaatacacggtcaccaacctgcagtttctgcgctagttcctttaacgatggttcgagaatgcctttgccacagatcgcaaggattgcatcatcacggttggacttggcaaatgcgcggatcgaagtctctacgttcttacgtggaatcaattccgcaaccgtcagtataatcttcttgtcggacggcagaccgaatcgtctgcatacatccgctttgtcaacacagatggaagcaatcgtatccgtatccacgccaacgcctggtacataatggacatttgggtgatgaaaccgtcgtttcgccgcctgataatcctcctgatttaaggtaatcagacaatctgttacatgggacagccatttttcaacattgtaataaagcagataattcttgatacccgcaccacggaagaagtgaaaaccgtggacaaagtagattacttttgtgccatctttacggaatttcttcgcggcaagccgaccgacgacaccgccaaatggtgtttgtgtatgcacgatctggcaagggtggttccgcatatagcgtttcagaatccggatggacttaaacgctttcccaagctctgtgatcttccgcggaatcggcagatcgatgatctcgatatcctgtgcagcaagctcacttgcgaacgcatggatgcgttccaccgtgcttgaatttccttcttgaaaattcgcggcaacggagatcgtgtagcccatatcctgtaagatgcggatattatctttattaaaatggtcgatcattgatgcggaattcgcaatcaataaggcatgtttttccatatactaatgtcctgtttgtgttcttataatctcattgtagtcgtatgggaaaatccgtgatacagatttccgtaatcaatataaattatactacaaaatgtaattcaatacaattcaatacaatgcaagacatcggaataatgtgcacagtgtgcgtcgtggaaataatgtataaaataactgcgagcaatataaaaaaatatgctatacttttagattggatcaagaaatgaaattacaatagttatgttatacaaggagaaatactatgaaatttgcacatattgcagatgttcatctggggacgagaagagaaacaccgtatctgtatgacggatttttaaattttattgactacatggaactgcatccggtggatatgatctttattaccggagatctgtttgatcatgtgccaacgaaggaagatatcatgtttgttgatacgcagctggcacgtctgccgaagaccgatatcctgtatgtcacgggagagtgcgattatcttgccagggacagtgttctttggaactatgaatttgtatcacggacgtatctgctcaattgcgaggatattcataaccatgtgccggatggggagcgtgcggagcgcaattcctatgcggaaggtatcgcggatagtctgcattttgcaaaatacaatgtcgatgtctacggaatctgccagtatagcgcgcagaatgaacgaaatgatttcgacagtgtatatgccagaaatctccgggcagtcaatatctttcttggacatggaggaagtgcaagggtttgtccgtttgatgtggaagattttggaggaaagaattttgggtatatcgggcttggacataagcatcagtatctggcatttgagaagcagcatgtatattgtccgggaagtttggagccgatcaatgaggacgaaactggagaacatgggtttatctatggatatatcgacaagcagttgacgagtgtgaaatttgttccaatcgcgatgcgcagatttgaggagaagaaggaagaaaaaccggagtttgattatgagctgttgcaggaattaaacagggagaatgcatttggtaaatgtctgcagacgtttgaccagaagcagacggagcaggcacagatggcaaagaagaaatatgcggacggcatgttggcaagcttgcaggagctgacgggaaaacaggcattatccacatacacaccgacacaggttgcagaggcgtgggcggagcagcagtcgcagttaaaggcgggactgcaatccttgcagcaggaaattgctgcaaatgagcaggaacaggcggaactcgaggaaaagcttctggcgtgcccggatcagacggggacgacgaatgtgctgcatgaggatattggaaaattgcagtttgatctgtcaaaattagagtttgaggatcagcaggtggacaagaaatacagccggagacggcttgggtttgtcctgtggattgatacgccgcttgcaatcgtattgtctctgcttgtcacggtaggcatgatcgatgtattttttatgcaggcatgggaagcgtggttccggttggtaacaagtctgatcggatttgaaattgcatttacgattataggtttttgcgtgtataatatgacaaagatgctgcggaagaagttgtttggcacagagattcctgtggagacacatgcgcggctgcaaagtcagattcgtttgttggagagtaagattcacgatctgcaattggaagaaagttcaagatttttagatcagaaaaactacgacgagaacagccggaggatgaaagaggtacagaagcagtaccagcagctgttgaaaaaatcagaggtgatcttgtctgtgctggatgtgaatgctgacaatatggtgaaagaataaaagtataaacagatatggaattacagaaattatacagcaaggtgcggcaggcggtggacgcttaccagatgatcgaggatggcgataagattgcaatcggtatctctggcggaaaggacagtctgacactcttgtatgcactggctggaatgcgaaaattttatccgaagaaatatgatgtcgtagcgatcacggttgacactggcgtaggaaatatggatttttctaaggtgaaagaactgtgcgagtcgttaaatgttccatatgagatcattccgacgcagatatttccgatcttgatggagcggcaggagaagcggatgtgtccgctctgtgcgaagttgcggaagggcgcatttaatgaggccgcacttcgattgggatgtaataagattacatatgcgcatcataaagacgatgtcgtggagacatttctgatgtcacaggtattagaaggacgggtacatacattttcgccagtgacgcatctggatggtacagagcttgatctgatccggccgcttgtgtatgtgaccgaggcggaggtgcgtgggtttatgcggcggtatcagcttcctgtggtgaagaatctgtgccctgtggatggtgcgacgaagcgggaggcagccaagcagatgttagcacatatggaggaagaattcccgaaggcgaaaagccggatgttcgcggcaatccagcgcgatcatattgatggctggtaaaattatgcctgcttctatggaaatttgaattgatttttcggggcatctgtgctatcatgtcagatgttggattgatttccaattttatcggtgcgtggctcagcttggtagagcgctgcgttcgggacgcagaggtcgtgggttcgaatcccgtcgcaccgatttttttgtacccttttttagtaggaaaggaggatccggcatgaaattattacttgcagaagatgaagtggatatgtccgaggcgttggtcgacattctcacctatcacaagtatacggtggatgccgtgtttgatggggaagaagcactcgattacgcaacaatcggcgaatacgatggaatcatattggatatcatgatgccgaagatgagtggcctggaagtgctgcagaagctgcggagccgcggtgaccggacaccggtgttactgcttacggcaaaggcagaggtcgaagaccggattgcggggctggatatgggagccgacgattatcttccgaagccatttgcgatgggcgagctgcttgcgcgcatccgggcaatgctccggcgcaaggaagaatttactccggagatcgtgaaatgtggagacctgtcgcttaacatgcatacctatgaacttagtggaaatggacagtcgtttgtgttaccgaagctcgaatatcagttgatggaagtctttatgcttaatcagggcatttatatgtcgacagaaagcctgttagagaaagtatggggctttgacacggacgccgaggttggcaccgtctgggtgtatatttcgtatctgcggaagcggctgcaggcgttaaaggttcatgtggagattcaggcaaaacgaggaatcggataccggcttgtagaggtggagtaaattggttaagacgttacagaagaagttcataatcacagcgatgatcgcgatcacggtactgcttgttgtgacgcttggtgcggtcaacgtgttcaatatcagccggcttcgaaatgagatgaataacacgcttaccatgctggtcgaaaatgatggaatgcggccgggagataatgcaggcaatccgcagcttgaaacatcgaccgatggaatgcaggagccaccggtggcaaatgggttagatcagaaccagatggaagtgccagatggggtgacagtaccggaggctgggacgacagataatcagccagaaccaccggaagcgaaggatgataaacgtccgaatctcttcaatccggagatcagcgaggatatggcgatggcggcgaggtatttccttgtgcggtttgacatggatgggaagatcgtctatacggatgtaaataacatttcctctgtggatgaggagactgccaatgcatatgcaagtgaagtctatgcatctggaaagacctctggaaagaaggaagagtttcggtacagagtacaggcatcaaaggatggacgtggcacgaatattgtatttctaaatgtcagcagtgaccggcaatctatgctggcggtgctgcttatatccagcctgatatttgtcgttggctggggcttgatgttactcttggtaattgcactttccaagcgtgcgatccgaccaatcgcagagaatctggagaaacagaagcaatttgtcacagatgccggacatgagatcaagacaccgcttgcgattattcttgcgaatacagaggcgatggaactgcataacggtgagagcaaatggagcaagaatattcgcaaacagaccgaacgcctgtcggggctgatgaagaatctgcttacgttggcgcggatggaagaaggaacggcaccggttgtaatgaccgatctggatatgagcaagctcacaaaagaggtggcagattcgttcgtggaatctgcgaaactgaaacagattgagcttcagacgaagattgcttcagatatcaaattgcatgcaaaccgcgaggagatgacacagctgctcacgatcctgctggacaatgcgattaagtattctatcgagcaggcggacattgtgcttacgcttgccaagcgtggtaaggaagtaacgcttagctgtgaaaatacatgcgagaagctgccggatgtagaagcagaccggctcttcgatcgtttctaccgctcggacgcagcacgtacgcagaagagtggcggctatggcatcggactttctgttgcccgagccatcgtacaaaatcacaaaggaaaaatttctgctgagtacaaggatggaaatcggattgtattcaaagtagaattataataagaaagagaggatctggatggatcctcttttttatgcaattttttctttctaaggtaaatttaaggttgcccccgtatactcatgatcagagcaggaaatcctgcaacgatacgacataagatcgggaggtgagactatgaattacagacacgaactaaaacatgagataacctatggcgatatgctttgcttgcgtggacgcctgaacgctgtcgcccatgcagatgcgcatggcgatcatggaaaataccacattcgcagcctgtactttgacaatctgtacgataaagcgtttatggagaaaatcaatggcgtgaactgcagggagaaataccgcctgcgctattatgatggcgatacatccgtgatccatctggagaagaaatcgaagatcaacggactatcctgcaaacagagtgcgcaggtgacggcggagcaggtgacgcagattctgcgtggtgatgttgcatggctgcaggagtcggaagaaccactgctgcgggaattttatacgaagcttgtgaatcagggcctgcggccgaagacaatcgtcgattacacgcgggaagcatttacctatgcacccggaaatgtgcgggtgacgatggactacgatatacgaaccggcatgtatggattggatttcctggatgcagaatgtgtcacgcttccgattatcgagaatcaccggattctggaagtgaaatgggatgcatacctgccggattgtatccgcagtgcagtccagcttggaaatcagggcacacagagcttctcgaaatacgcggcgtgccgggcgtatgaatatgcaggttagaaacagcagataaaataagaatgacaggaagaaaaaggaggaaccctatgggatttggagatgtttttaagtcaagttttttggagaatatagcgagcgtgagtattctggatatggtgattgcgctggtgcttgcatttggaatcggtatgtttattttctttgtttataagaagacatactccggtgtcatgtatgcgccgggatttggtgtgacgctggttgcgctcacgatgatcacaactgtcgtgatcttggcggtaacctcgaacgtggtgttgtcacttggtatggtcggtgcactttccatcgtgcgtttccgtgcggcaatcaaagatccgcttgatatcgcatttttgttctggtcaatcgcagtcggtatcgtgcttgcggcaggtatgcttccacttgcactgatcggaagtattttcattggtgtgatgcttcttgtgtttgtcaaccggaaatcacatgtacatccatacattctgatcgtgcagtgcgacggacacgacagcgaggtgaaggtgcgcgagttcatggagaagcaggtgaaaaaatgcgtagtcaaaagcaaggttgcacagccgggacatgtggagctgaatctggaggtacgcatgaaggatgacaatgcggacttcgtaaatattctgtccgagatggacggcgtgagcggtgcatcgcttgtcagtttcaacggagagtatttgtaggcaacgcatgaaagaaagaactaggaggtgatgcgatgtcaactggcaaacatatagacaagatttgctgcatcattctgatatttacgattctgatcatggtcgtgttctgcaatgcggaaagtctgggcgtgaataagcttccaatcacgatgggatatgagaagaagctgtttgatacatcgaaggtgcatacgatcaatattgtgatggacgattgggattcctttgtcgatggctgtgaggacgaggaatatgtgtcctgtgcggttgtaattgacaacgaagcctataaaaatgttgcgatccgcgcaaagggaaatacatccctaagctcagttgccgcgtatggcaatgaccggtacagcttcaagattgagtttgaccattacgacagcggcaaaagctatcatgggctggacaaattatcactcaacaatatcattcaggataatacatacatgaaggattatctgtgttaccagatgatggggtatatgggcgtggatgcaccgctttgcagctatgtctggatcaccgtcaatggagaagcgtggggcttgtatctcgcagtagaaggcgtggaagacagtttcttggagcgaaactatggcacttcctatggagaactttataagccggatagtcagtcgatgggcggcggccgtggaaatggtgcggatatctcggagtcggaactggcagaacaattctttggtgaagatacagcaagtgatagtgatgcgatcgcagatggaaaatccacaggtggacaggacatgcaaccgccggatggagattcttcagaaggacgggatatacagaaaccagatggagattccgcgggtggacaggatatgcagccaccggatggagctttcacaggtggacaggatatgcagccgccggatggagattccacaggtggtcaggatatgcagagaccggatggagattcttcggatggacagaagatggaaccaccgacaggtacggagtcggacggtcagaaaatgcagaaaccagatggtgatatgggcgataagcaaggcggaccgggtggcggtatgggaagcgacgatgtgtcgctcatctattcggatgatgaatatagcagctatagtaatatcttcgataacgccaagacagatattacagacgaggataaagaccgtctgattgcttcattgaagtctttgaacgagaattcagatatcgaagatgtggtaaatgtggatgaggtgattcggtattttgtcgtacacaatttcgtctgcaacttcgacagctataccggttcgatgatccataattactatctgtacgaagaagatggacagctttccatgattccgtgggattacaatctcgcctttggcggattctctgcgggtggcggaggcagtgattcggcaacacagatggtgaactatccgattgatacaccggtctccggtggaacgatagattcccgtccgatgcttgcgtggatctttgcagatgagagctacacggaactgtatcacacgtattttgatacatttatctccgagtattttgaaagcggatatttcgagaatctgattacagagacggagaacctgattgcttcttatgtggagcaggatccgacgaaattctgtacttacgaagagttcgaaacaggcgtggatacgttgaaatcattctgtctgcttcgggcagagagcatccgcggacagttagatggcacgattccatctacaagtgatgggcagcaggaagattattccgcactcgtcgatgcttcttccatttcccttacggatatgggaagcatgggacacggcggcggtacaccgggcgatggtgaccgaccggatatgtcggatgagaacagtggacagatgccgggtaacggtgagcgaccggatatgccggatggtgatggcggacagatgccggaaaatggtgacaggccggatggcagtgttggaacaccgccacggatagattaatcttagaagtctcatcaataatcaaacttataatagaaaagttcagaatgtaaataaaagtaacaatttaagtgaatcaaccggaaaaactgtgaatgaaaagaccagtcgtttccggttgatttttttaagtttctattgtatgtttgacataatttgaaggcaggaatctcataatacagaagaaagagagtgaagcaatgaatatatttgatgttgtaggacctgtgatggtcggaccatcgagctcccataccgcaggtgctgtaaaaataggatatatcagccggaagctgctgggcgaacagccggtctccgcacggattttattatatggaagctttctgacaaccggaaaaggacatggtacgcggaaggcgcttgtggctgggctgcttgggatgcagccggacgatgcgcggattccgcaggcgcttacgcttgccgaagaacggggcatgcagattgaattcggagaggcacagttaaaggaagcacacccgaacacggcacagctttatctgcagggacaggagggcagaagcctggaaatcatcggacagtcgctgggcggctcccggattaatattgccgagattgatggaatcgagacgaatttctccggtgattatccaacacttgtcgtacacaatcaggatcagccgggacacgtggcggaggtaacgtcgatgctttcacataaaggcgtgaacattgcgtacatgcagttgtaccgctccagccgtggcggagaggcggttatggtcgtggaatgcgatcaggagattccgaaggagggcattgactggctgaagaaagtcgagggcgtgaagaaggtcacgtatctcggacacgatacggaagctatggataagggaggaactgcaagatgataacgtatcattcaattcaggatatattggaattgtgcgagaaagaacagatgacgtttgcgcaggtaatcgaacgtgcggatatggaagaacgcgccgtgacgcaggaagcttcctatgcgaagatgcagagcatgtatgaggcgatgcgtcatgcggatgcaacctacgatgcaaagcttacgtcagcatccggtctggttggcggcgatggcgagaaacttcgcgcatataacgaggcagggaagaatctctgtggtgacttcttaggtctggtgatggagaaggcaatcaagatggcggagggaaatgcgtgcatgcgaaggatcgttgcggcaccgaccgccggttcgtgcggcgtgatcccggcggtgttcctgacggcgcaggagaagcttgcatgcacagaagaacagatggtggcggcgatgtacatttccgcaggggtaggtgccgtcattgcggaaaatgcttcgattgccggcgcgtctggcggttgtcaggcagaaattggttctgcatctgcgatggccgcagcagggctatgcttcctacagggtggcacgaatgcgatgatcgcaaatgcagccgcgctggcgctgaaaaacatgctcggacttgcgtgtgatccggtctgtggactggtggaagtaccttgtgtgaaacggaatgttgcaggagctgtcaatgcagtaagcgc

SEQ ID NO: 41 - DNA, 22492 bp, unidentified
  source 1..22492: mol_type = unassigned DNA
ggatagccgaccaagagcgtggtgcgcagcgccagatcggggatggcttcgcgcaggcgtccgatcagcgcataggcgtcggctttggtgtggcgccgctgcatggccgaaagctgggcgtcggagatgtgctggaacggaatgtcgaggtacttgcagattttgggttccgaggccatgacttcgatcacctcgtcggggaatgccgtgggataggcgtagtgcaggcgtatccactcgatgcctccgatgcggcagagccggcgaagcagttcggccagcatccgccggccgtagaggtcgagtccgtagtaggtcgtatcctgcgcgatcacgatcagctccttcacgccgccggccgcgagtttgcgggcctcctcttcgagcctctccatcgggacggagacatgtcctccgcggatgagcggaatggcgcagtagccgcatttccagttgcagccctcggagattttcaggtaggcgtaatgcttcggcgtggtcaggtgccgctcggtctccagcgtcgggtcttcggccgcgcccagcgcccggacgatgccgtcccacgtgcgggcgccgaagaattcgtccacttcgggcagttcggcccgcagctcgtcggcatagcgttccgagagacagccgacgacgaacagccgttcgatctttccggcgtttttggccgcggccgcccgcaggatcatgtcgatcgactcctgcttggcgtcgccgatgaagccgcaggtgttgatcacgacgaccttggcgtcggtgcggtcgctgtcgaagagcaccgcgtaacccgccgcggcgagccgggccatcaggtgctcgctgtccacggtgtttttcgaacagcccagcgttatgacgttgatttttttcatgcgtttcgtatttcctccgcaaaggtatggattattcccggatttatcgcaaaaacagcggcgcactttcggtgcgccgctgctgcagggagtcggtggggtactaccacatcacatggatgccgtaggcttcgatgccgttgccgagcgaggtcgaagcgacgtcgacatagccccagaagcgcgagtcggccagcatgaagatcgtataggccgggcctttcacgatttcgcggacctgaatcgcctcgttcgtattcgcggctgcggactgcagcgcgccgagcaggtcgtttttcacggtgccgatcatcagcaggttctgcttcttgtagtgcagtccgctcagtacgccgttcttgccgccgaaagcgttgatctggtcggcattttcgaaacgcgccgtgttgaagctgatggcgaacgatacgttggtcgtgcccgtgacgttgccgtcctcgtccttgtcggtgcgggtgccgttgagtgtcggtgcgaaaccggtgacgtagcatcccgaaccggagggagtgcccttgacctcggtcgtgggaccgttgaaatagagcatgctgccctgataggagctcttgttggcgatacggttgaatgcgaacgccgtccaacgcttggtgttgagggccgtctgcatcgttttgggcaggttggcgccgtcggcgcggtccagcaccgtcagccacgacttgccgcggccttcgagcgtattgaccatgtagttgtcgatggcggcgtaatccgcatcgctgccggccagcgctccgtcggtcagacgcgatacgaactggatttcggctttgaacttgtccgaagggggagcgatcgtctctcccgacttgtactcgtccagaccgttgtcgcagcccgtgaagaccggggcggcaagggcgagcgccagaaaaatggataaatatctcttcgtgtttttcatctctgtacttttttagctgtttgatacgcgcttaattcttcagtacggccgtgcctgcgatggggtagtggtccgaaatgacattgagccggtcgcccttgacgactttgtagtcgctgcagctccatttgccctgcgggaagctgatgaagtagtccaacttgctgtaaccgccgaacgtgccgtcgttgttgcagagccgggtgcccgtcttctcatactcgcggattgcgctggagctgggaccgcagttcatatcgcccatgatcagcacggggatgttttcggcaacggccggagcgatcgcgtgttcgatgacctctttggcctgacccaagcaggtctcgtcgccgccgaaagcgtcgaggtgggtgcagacgatgcgcaccttcaccccttcgggtttggagtcggtcggaaccagaatgtctgcccagcccgccgaacgctggtcggcgccggtgtacatgcccagcagtaccgaagccgaattgacgatcgggtatttcgacagaatgccgttgccgtaggcgccgttgtccttgttgtaggagaagacgaagaacgggaacatgccgagcgactgtgcgcattcggtcagcttctcgaccgaactcatgcgtccggtcgcggtttcgaactcgttgaagcagacgatgtcggggttttcagccttgatcttttccatggcctcggcgatttcgaaatagactgcattggagttgtcgtcgtattcgaacgacttgatgttccactccatgcacttcagcttgacgtcctgtgcctgtgccgacgcggccgggagcatcatgcagagcagtgcgcctgctccgaggatatatttgttgattttcataatcgtttctgttcttaaatatggtttaataacccttgttctgcttcaggtagaccgtgccggtgaatgcccgctgcggaatggggaacaccttgttgtaagtcggattgaaggtgcggcccggataaacttccacctcttcggcaacgatctggccgttgaccttcttcgaaatgacgctgtacagcggcttggcgtaggtcgtcgtggcgatgccccagcggactacgtcgatatggcggctgggctggaactcgaaggccagctcgcagcggcgctcgttcatcagctgggccttggtggcctgactgttctgcggcagacctgcgcggtcgcggatctggttgagcagctgcttggcctcggcgtcgccctcgcctttggtccagatcagggcttcggccttcatcagcatcacgtcggcatagcgcagcaggcagcagttgagcgagttccagagtttgtcgcgcagcgcggacacctctttgcccttgcagtcggcgccttcccacggggagatgaacttgcggcagatcagacctgccgatacgtggccggtcgtgtagtccgagacgcttccgtcggtgttgtaaccgccgaaggtgatgtcacggcctacgaatttgacgtgctggcccggatagaggatcgttacgtcgcggcgctggtcgccctcttcgaacgcatcccacaaattcttgctaggcgtgaaatacccccacgtgttgtagaggccccagccagcgttgacgaaagttacgccgtggtagcgggcgccgttggtatagtcgccttccagcgagaagatgtactccttggagtggttctgctccttgcgccagaggttggcgtacgagttgagcttgttcgacggatcgatgtagagttcgcgtttgtccgaaccggtaagcgccatgatcttgttgcacatctccagtacgatgtcgtagtatttcgcgtcgtactgcgctgcatagagggctgcgcgggctgcgtatccccaagctgcggccttgtgcggaagtccgatctgcgaggcgtcgagctgcgaaaggtagggaagcatctcgcctgccgtgcgcatgtcggagatgatctggtcgtagttctgcagtacgtgcgccgggcgcggggagtcgatttcggcggcgggagtcgtgtcgaggataatcggaataccgccgttggtgtcgtcgccgtaatagggaaccatccagagcatcgagaaaccgcggaagaaataggcggtgcctacagcctggtttttgtatccctggtccagcttcatgtcggggaccatcttgatgatgttgttggccttggcgacattctggtacatcacctcccaaacacgcgagacgtcgttgtcgttggacggcgacatgcggaattcgcggatttcatcgaccgacggacgggcgcggccgatcagtatgttgtcgctggcgcattcgagccacatatggccgcggccgcagatctcctcgctccaatagggcgagacgaagtggtaaagggcgtagatagcttggtctacatcctctttggtcttccaagtagcgtctttgccgtaaggctccctgtcgaggaaatcggaacaacccgaaaggcagaaagcgcttatggccagacagaggctgaatatggtttttttcatggtcgtagttgttagaagttgatgtttacaccgaagttaaagaagcgcgacgtgggatagataccgctgtcgagaccgtagttgcctacttcggggtcggtgccggagtagccggtgatggtggccacgttgtcgatgctcagatagacgcggaccgaacccttctccatgccgatgtggcggctgatatgcttgggcagcgtgtaacccagcgtgatgttcttcagacgcaggtagtcgcccttttcgaggaagatgtccgaaaccttgaggtagttgccgttcatgtcgtcactgaggccgagtcgcggatatttgctggtcatgggtttgaaatcccatgtgttgtaaacatcggttgttaggttacccaagtcttgacgaccgttcattcccaactgtttcgtgccgttgtagacataattgcctgcgacgccctgaaacataaaactgaagtcaaaacctttccaatcgagcgatcctccaaaagagtaggtttgtttcggagtataggagcgggataatacgcggtcgttgtcgttgattacgccgtcgccgttggtgtcgatgaaacgcaggtcgccgaccttggcatcgggctgcagcatcttgacctcgccggtgtcgggatccttactgatatgacggtcgatctcgtcctgcgagcggaagataccgtccgtgcggtagatatagtaagagtaccatgggtgtcctgctcctgaagcaaaaagctgaatgccgttgaatgtggggtatttgtgcattacaatgggctgggggccgtagtcctctacataacctttgttggtcgagaaagtgccccagacattgtagttgaacttgccttgtgcggcgctgttccgataggatacggagaactcccatcccttgttgattacgtggcccatattacccagcggcgcattctctacacccatctgcggcggaatcgtgaggtaatcgacgaggtccttcgtttccttgttgtaataatcgacgctgacttcgagcgtgttgtggagcattgtcaggtccagaccggcactggtctggacggtggtctcccagcgtgcgtccgtattggggatggtcgccagataggttccgtaatgggtcgtgccgccgataagcgaaccgtccgggtagatggagagcggaatgctggtcgggttgggcaggttgtagaggtctacgttgccgaccttaccccagcctgcacggaatttcacgaggtcgaagaccttgttgagacctgcattctggaagaatttctccgaggagagtttccacgatcccgaaatggccgggaaccagtcgtagttctttgctgcgggcagtttcgacgatgcgtcgcggcggatgctgccggtgaggaaatagcggtcgtcgaacgaatagccgagacgggcaaggaacgagaccatcgagtagtctactatatcttcgttcgggttcttggtccatgagcctgcggcgccccataccagattgtggtcttcgttggagccgtagccctgcgtgcggaagtcgcggaaatgtagtttcttgtagtcggtggtgaaacccgccatggcgctgatgtggtggcgtccgaagacttgcgcgtaggtagccgtcgtttcccaaagatagtggaagttgttgtagttgaactgctcgcggctcgaagtgctcgatccgcccggcacgtcgatgacgggcgagaattcgtcctcctcgcgcatgtcgaggtcggccgtgaactccgatttcagggtcagcgacgtgatcggcttgatttccagcgaggtggtcgagaatatcttggtgcgcgggtagcggcggtgcatggtttcgagctgggcgacgggattcacgatgttgggaccctcgacgccgctggccatgtcggccgacgaagcgataccgccccatttcggtttgccgtcgtttccgtagacgatgttgccgtttgcgtcgcggtcataaaccgatgcggaagcgggaaaccacatggcgccgtagatggggcccgtgtgcgaggtactgatgttgccctgtccgttggagtattcgaagtttacgcgctccgacaatttcagccatttgaccggcttgaattccgtatggagtttcgcacccagcgcttggctccatgtgttgagcagggtgccttcctttttgtcgtaggttaccgagaggatcgacgagagcgtctcgctgccgccggtaatcgacacggcatagtgctgcgtcagacccgtgcggaagatttcgtcgagccagtcggtgcgggtgacgttggcgcctgcatagacctgcgggttggccagattgggcagcgagctgcccggcgagttctcgacggccttgccccagacgtcgcagaactgctgcgcgttgagcatcgtcgggaggttcatggagcgttcgaagccgaccgatacgttgacgttgacgcgggctttacctgcctgcgcctgacgtgtggtgatcagaattacaccgctcgaacctaccgaagcaccgtaaatggcggccgaggcggcatctttcaggatggtgatcgtctcgatatcttcggccatgtagggagcgccggggacaccgtccacaacgaccagcacgccgtcgcccgaagtcgggccgatattgtcgcggctgtatgcggcgctcttgtccgtgccgtcgtcgttgcccttcgagccgcgaccgcggacggtgaacgacgctttctgcagcgggtcgcccgactgctggatcgtaacgcccggcatgcggccctgcaggagggttccgagatcggcggcgcggctgcgggccgcatcgtccactttgacggtggagacggccatcgagaggtcctctttacgctgcgagccgtaaccgatggcaacgacttcgccgatcatcgtggcgtcttcttccatcgtgacgttgatttccgtgcggttcatgacggccagcgactgcggtttgtagccgatgaacgaaaagtcgatcacgccgtccggtttcacggaaatctggtagcggccgtcggcatcggtggtgacgccgttggtcgtgcccttttctatgaccgaagcgccgatgagcggagtctggctgctgtcggtcagctgtccggacaccgtgacccgatcctgcgcatgggccggaagaatgagtatgctcagcagcagactcatcagaagaaagcggacgaagcccctgttcttctccgaagttgtcaaattcattttcatagagttaaggttaatattaatagtaattgtgtagagaggctcggtaattctcggttttggcagatatttatttaaatattttaaaaataggcgcggttttggtgtcgatttgcagtatgtgcaaaatcgatattcaaaattatgtatctgtaaattgttggtgggcgtggtttgcgtatttgaatcctcaaattgcgtataattgactgccgcgccggaaaaaaccggacgatacatatatacaaaaaagctccggactctgttggggagtccggagcgcggatgtctgtgcttttaatatataggtgtcgttccgatatggccgtccgcctattgtgcggaatcgccggcggcccgtcagctttggccggagccgtcgccgaagagcgccttgacgaactctttgcggtcgaatatgcgcagttggtcgatgccttctccgatgccgatgtaacggaccgggatgtggaactggtcgctgatgccgattaccacgccgcctttggccgtgccgtcgagtttggtgatggtgagcgaagtgacctgcgttgcctgcgtgaactgccgggcctgctcgaaagcgttctgtccggtcgagccgtccagcacgagcatcacctcgtgcggcgcgccggggatcaccttgcccatgacgttgcggattttggtcagctcgttcatcaggttgatcttgttgtggagacggcccgccgtgtcgatcagcaccacgtcggcgccgttggccttggccgaggtcagcgtgtcgaacgccaccgatgccgggtcggaacccatctcctgacggatcatcgtggctcccgcacggtcggcccagaccttgagctggtcgatggcggcggcgcggaacgtgtcggcggcgccgatccagaccttttgtccggctttggtgagctgggccgcgagtttgccgatggtcgtggtctttccggcgccgttgacgcccacgaccatcaccacgtaaggttcgccctctttggcgtcgagtccgaaatgcttttcggagccgtgcgactcctccatcagcgcggttacctcttcgcgcagaatggactgcagctcggaggtgcccatatacttgtcgcgcgccacgcgctcttcgatgccccggatgattttgacggtggtttccacgcctacgtccgacgagataagcacctcttccaagtcgtccagtacgtcggcatcgaccgtcgaacggcctgcaacggcgcgggcgagcttcgagaaaagtcccgtcttggtcttttccagcccggcgttaagctcttcctgctgctgtttgcgctcttcggaagcctgcgcggcggagttgtcctgcttctttttgaaaatatcgaaaaatgccatgtctaatatctctatatccgtacaaagataataagaatgtttggaaaaaaatgttatatttgcactatatacattttcaacgatgatgaaaaaaacgattctgctgcttgtggcagcgctttgcggcgtattgacggccgcggctcaggacctgatcgtcaagaccgatgcgacgaaggtcgaggccaaagtaaccgaaataacacccgatgcagtacggtataagcgtttctccaatcccgacggaccgacctatgtgctgcctgtcgccgatatcgactacattcagtatgccaacggcgaaaaggagcgcttccgggctgccgaaactgtgcctgcgacgccgctgacccctgcgacgccggtcggtgaggctccggtcgcagcggctcccgctgcgcaggcgcctgtacagcaggctgcgccggtgcagtatgtcgccaaagagtatcagatcggcgagttctacgaccagaacggcgtcaagggcgtggtctgcatgctgacggaggaccgccggcacggactgattatttcgctcgatgaaatatacctgccgtggagcgaattccggaagcccgacctgcgggttgcgggcgccgacgaccggatcgacggcatgggaaatatggagaaggtagccgcctatatcgccgaaaacaaccttgcgtgggatgattttccggctttcaagtggtgccgcgacaagggcgagggctggtacctgccggccatcgacgaactgctgaccatcggacacaactacaacggcggcacgcgcatacattccaaccgtcaggcccgcaaccgtttcaacgacgcgctcaaggataacggcggcaagcgcatggaccgtctggtctactatttctcctcgaccgagaaggacgagaaggaagcctatacgacccatacgggcatcgaacctccctatgtgatcgagattcccaagtacaacaaattcctcgtgcgggcggtgcggaagttttagctttcgtcaattaaagaaaaggagtatcctcgatgggtactccttttttgctttaccggcaatcagatgctttcgatcagggcgctcagtttacggacgatgacttcccaactgtaattctgttcgacataagccggtcctttttcgcttatttcgcgtcgcagccgctcatccgtaaagagtttgtgaagctggcggcagaagtccctgcgtcctttgtagtaaagtgccgcgccgctttgctggcaatggtccttcagcacttcgctggctccgtttaccaatacgggaacgcggttttgcatggcttcgagcagcagcagggagagactttcgaaacgcgatggattgatcatcagagttgcgtgccggataatcgcgcttttttcttcttcggaaacgaatcccgtcaaaatgatattcggatcgtcgggatatttgatttccggagacagactcccgaccaaaaccagtttcgactgctgcttgtatgtccggttgtaagtctgaaaatcgggcagcaatgtgtttatcttgccggttgtgacccgtccgagataaagcgcatatttatccggaagattgaatttcgctttgacatgctcccacgctgcggcgggcgcgagttctatgccggtgcctacgatgctgctcggcgccaatcgcggcccgaaaatgcgcaggcatagcctgcgttcggcttcggtgttgaacgcaatatggcgaacctgcgtgaacaaccgggtgtaaatggccgggaaaagccatttttccgggtgtgccatcggaatcagtatgcttttttggggaacctgcagccctgcgaaaatggtctgtgcatggaaatagcacatgggaatgaatgccgcataatcgtcccgatgttcttcgatgtagcgcagcaggtcgggggcgtaggagaccgtcgaatgctggtaggcggtttccttgtcgaagccgagattccagatcgggtgaattgccgcaaggagacgcaacacgccggcttgcgacaaccaatagcggagtctgcggacaggtttggatttctgaagcagccggcggctttccctgccgttgaagccgggatgcggtacaaaccgccggatggttattccgctttcatggctttcgcctgcaggatattggtccgaggggttgttgaagtccttgagcgtcgtggtcaatacctcgacgtcatatttatcccgcagtctttctgcaagcatccggcaatgcacttccgatccgccgttgatgccggctccgtagcgcacgttgataaatgctattttttttcatgggtttacatttcgttgaaaaggctgagccattggttgccgatattttccagatcgtatctgcgggaagcttccagcgcgcgcgtccgcatacgttcctgaagttccgtgtccgcaagcgccgcattcagcagcgcggcgtatttgcgcaggctgtaggagggaaccatgattccgcacgctccgtcgcaggtgatttccctaattccggcataggagtcgaacgataccggaatgacgccgtattgctggccttccatcagactcatgggcagcccttcgaaattagaggtcaggcacatgaatgtcgccctgcggtagaatggcgttacatcggcatgatagccggcgaattcggcccgctgcaaccgtagtcttacggctaatttgcgcaggttctcgtcttcctcgccgcatccgaccagaatcagcttccagtctggattcctgcgttcgacggttttccatattttcagcaggcgatcgacccgtttgtgagctctgtggaagcgtcctacgtacaggacgatcttttctttgggcgatacgggggcggccgccgcaggcaggagcggattgagtatggctccgtatttcgatgcgggagcgtcgcttccgggatggcctgaagccttgagcgcctgcatgaagtcctctttgtattggtcgcagaggagcagcatgcgatccagatggggcatcatgccggcgtacattttctctgtccggtgcaggcgtttgcgggtaatgcggtcgagcggccggcgcaggaacagaaattccagccggcgcagaaatgtcggattggggatttccgtggatttgagttcgcgccatgcgtactcttcccagaagggaatgttgtgcagacagaaaatcatccggcaccgggtcctgcgtttgatctctgcgaacggaatggcatctatgccttggacgatgatgcaatctacgctctcctcttggagagaccggcaaaggaaatcgacgttcgccggttttttcggatcgggtccggccggcagctccctgaattgaaatattgcccgctcttcatcacataataattcgcggttcaacttctcgatatacagaattatgcggtaaccctgtttgtgaaagaaggaggcgagattgtgcgttaccgtttccgctccgccgtatggataaagccaattgaagaaagcgatggtttgcagttgcattgtcgtgtatttttgaccaaagttactcttttcgccctgaaatagcaaacggacatccgaatttgtgcttttcttcggagagtataaatacaaagggcaccctgtcggatgccctttgtatttaagatcgctcttaaaatacttatttcttctcctcgaagaattctttgacttggtcgttggggatgatgccttccttgaacatgtaagcaccggttttgtccgacttgaccatcttgatgcacttcgtaaagttcttacccgtgccggttttcagtgttgcgactactttctttgccatagagcttcaaaactatttaatttcacggtgaacggtgacctttttcagaaacgggttgtatttcttgcgctccagacggtcgggggtgttcttcttgttttttgtcgtgatgtaacgggacattcccggaactccgctctctttctgttcggtgcattcgaggatgacctgaactctgttgcctttctttgccatttgttacttcggtgttttagtaaacggacttaggtgcggcagcctcgcgcagagcgactgcaagacccttcttgttgattgttttcatgccggcagccgataccttcagggtaatccagcggccctcctgctcagaccagaaacgcttggttttcagattgggactgaatttgcgtttggtcttgtggtgcgagtgcgagacgttgtttcccacgatcgccaccttgcctgtgatttcgcaaactttcatttttgttttcgataatattaatattattcccgtaagggagtgcaaatataaggaaaaaatgagaactaaagattcagttgcccgattaatttttaatgctgaatgttattgtgttgatagtcaatgtttaaacgattggaattgtgagcgtgaaacgcgccccttccgtgtaggaagtgtcgagttcgaccccgccgcccaatgcgccggcgatcagccggcagacggcgaagcccagtcccatgccctgcgagaacgggtcgagtttgacgaaacggtcgaagatgcgcccggcttctgcggtggggatgccggggccacggtccgtgaccgtgaaggcgatccgctttttgtacgagatcagggtgtaggcgagcgtgatccggccgtcgggggcgaagcgtgctgcattgcgcagcagttcggtcagggccttggagagcagcaggcaggaggtgttgaccggaagttgtgcgcattcgggttcgaagcggatgtcgagtttgcggaggctgtagtccctgacggtctgaatgcactgcatgcagcagacgttgatgtccaccggacccaatgcgggcggggtgtcggaggattcgaggcctgcgatatagagcacgtcgtccacgagtttctggaggtagccgctgttttcccggatgatctcgatgtaggactgacgcttttcgtcgtccgcgtccggggccgcggccagctcggcgaaacctacgatggaattgagcggggtgttgatctcgtgcgtgatgttgcggatgaagacgcctttcatccggttgctcgcttccgcggcccgtttggcatgcgccagacgacggttcatgcgcgccgtgaagacaagaaagaggaccgtcagcagcaggatgacgctcagcgccgcgatgcccagttgcgtgcggtgcaggcgcacttcctgcgtctgccgctgcagctccgccttttcgacgtcgagacggctgacgtcgagcagcgtggcgaattcgccgaggtttctttcgttgtcgtcgccgacctttttccggtagaggtcgaggtagtgtttctgacttttgtaggcggcttcgtaattgccggtttcggcataggtttccgcacgggtttggaacagttcgtagaaataggtttcgctgtgcccggtctctttgaacaggccgatcagtttgtcgagtgtggtcagcgccctgccgaattcgtgctcggcgaggtcgatggcaagctgcgcttcggtgaggctggccgtcgtaaggtatccgtcgtgtccctgccggatttggtcgaacagcgtgcgggcttcggcgctccggccggtccggctgtagaggatcacctgtttgagtttcagcggccagatgtattcgggcagggtgagccgcgccttgcctttttcgatttcttcggcggcttcttcgtaccgttcggtgtcgatgaggacggtggccagttcggaatagagaatcggcagcgagaatttgttgaggttgttctcttcgatgaagccgatcgccttgcggtagtagtcggcggcggtctccttgagtccgcgggtccggtagatgtggcctaactgcttgtaggcttcggcgatggcgggcttgtagtcgtcctgctcggcctgcgccatgtagcgttccagctcgtactgcgccagcgtgtattgcccgtgtttcgtgtagtagagaataagccgcgaccaagtgaaaaaatagtaggtcggctgcttgtttgcgcgtgcgaaggcctgcacgcggggaatccacgccttgagggaatccagttcgttgttgaagtaatagtggtcggccttgaacgagagggcgacggcctgcatgcggatgtcgttcttttcgcccgccagccggaacagcgtgtcggccttgagcaggacgaccgaatcgcggatgttgttgttgcaccagcggtaataggcgtaaagcgtgctgtctacgtttttgtaggtttcggtctgcgcgtggccggacggaatccgggtaaacagcatcaataaaagcagggcttttttcattagtttttgagctgaatagttgcaaagatatgtaaatatatgctataaagcaaactattcagtctattgatagggctaattagcctgatttgccgcccgcaattcttcttcgagcagttcgatggccgccgttccggctttccggatgacggcgtttcggctgccgccggcacgaatcaggcgggtcgtggtgcgcagcggggagctgacggcgatccataccgagccgacgggatattcgggcgttccgcccgtagggcctgcgatgccggtcgtggcgacggcatagtgcgaattcgaagcccggcgtacgccttcggccatctgacggacgacctgctcgctgacggcgccgtagcgggcgatcgtgtcgcagctgatttgcaggatctcctgcttggtgtcgaggctgtatgccacgacgccgcatttgaagtaggccgaagcgccgggcagggccgtaaagcgcgcggcgatcgtgccgcccgtacaactctcggcgacggccagcgtctggatgcggtcggtcaggatgcggtgcacccgtttttccggagcgtggctgctgcaggcggtcagcgagagaatgaatgcggttgcggttgagagcaggattttattcatcggggcgtcttttattttccgttgagttcgtcgcgcagcagaccgagggcgaaggcgccggcgcggtcgatgatctgtccgcggtcggagccgcactgtttgagcagggcgaccgtgcggcgggggcctgcgacggcgatccataccgtgccgacgggcttttcggccgtaccgcccgcggggcctgcgatgccggtggtcgagacggcgtagtcggcgccgctgatgcgtcgcgccccttcggccatctgtcgggcgacctgttcgctgacggcgccgtaacgggcgatcgtgtcgggatcgactcccagcacagcctgcttcgacgcgttgctgtacgaaaccacgccgcagaggaagtaggctgaagcgcccggcatggccgtaaagcgcgcggcgatggtgccgcccgtgcagctctcggctgtggcgagggtctgtcgccgttcggtgagcagcttgtgtatcaactcctgcatggtggccgtttcgtagccgatgatgttgtggggaatgatcctgcgcagcgcttcgaactgccgttcgatctccttcgatacgctttctccctcgacctcgtaggctgacagccggagccgcacggcgcccggattgggcaggtaggccagcttcaggtagggcggcagggcgttttcccacgtttcgatcgctttggcgagcatcgattcgggcagtccggcggtgatcatcgtgcggtgtacgatctggcgcagttcgaagtgcgccttgagccgcggcatgacctcgtcctgcatcagatgctccatttcgtagggtacgcccggcagcgagacgaccactttgccgccgcgttcgaaccacatgcccggcgccgtgccgtgcgcgttgaacaacaccgtgcagcaggccggaaccagagcctgtccgcggttgaggtcgttgaattcgatgccccgctcttcgagcatccgttttacatggtcggagacggtttggttcaggatgagttcgctgccgaacatttcggccagcgtctttttggtgatgtcgtccttggtggggccgagtccgccggtgatgattgcgatgtccgactggccgagggcgcgttccacgcacccgacgatctgcgcgctgtcatcgccgatcgagactttttcatgcacgacgatgcctgcggcgttgaggtggcgggcgatggatacggaattggtatccacgatctgaccgatgaggatttcatcgccgatagtgatgatcgttgctttcataagcggtgtttttgactcaggactccggctgttctgctccggcttgctctgcggaaagctgttttgtcgcgggctgttccgccgcagcctgctgcactgcgggctgttctgctgtcgcctgcgccgctgcggccttttccgctgcggctttcgcttcggcgtcggcgacgagggcgcggcagatgtcacgcaccagtccgggaccgttgtagatatagccggtgtagagctgcaacaggtcggctccggcgtcgagcatcgctttcgcgtcgtcgggggtcatgatgccgcccacgccgatgatcggaaaattgccgcccgaacgggtgtggatgcggcgcacgacctccacggcccgctgcgtgagcggtgcgccgctcagccggccgctgccgatcttgtcgagcgtcgtgcggctggtgtgcagcccttcgcggttgtgcgtgccgttggtcgccacgatgccgtcgaggggcgtttcgagcagaatgtcgctgatttcgtcgatcacggcgtccggcatgtcgggcgataccttgagcatgatcgggcggtattggttctgtccccggcggaagtcgaacagcgggtcgagaatccgcaggatatgttcgcgcgtatgcgtcgcgccttcgcggcacgagttgtcgcagctgatgttcacagtgaagtaatccgcgtactggtagaggttgcggaagagtttgaggtagtcggccgcggcgttttcggcgagggtagcggtgttgcggccgatgttgcagccgacgatgaatccttcgtggggccggcgcaggtgctggatggtcttttcgagaccgcggttcgaaagcccgatgcggttgatgatcgcctcgtccttcgggagccggaagacgcgggggcgggggttgcccgcctgcgggcgcggcgtcacggtgccgacttcgacgaatccgaaaccgagggccgccagttcgcggaacgcctcgccgttgcggtcgaaacctgcggccagcccgacggggttggcgaatttgatgccgaagacctcgcgttcgagcgcggggtgttccacggcgtaacacttgcggagcagccaccgtccgccgggaatcagcccgatggcgcgcagcagtatcagtacgacgcggtgcgcccgctcgatggtgagcgagaagaggatgggctttatgatgctacggtacatggtctcaagtggcggtttcgcttatggccgcaaaggtactaaaaaagaattgatttcgctaaaagtattcgcggcggtagcggtaatggtcgcgcatcggctcgaaatcctccggccgggccttcaggctgcggctctgggcctcgatgtcgaacgcgcccccgatggtggtgcaaagctcctgccacgaaatcggccggggcgtcgaaggggcggcctgaggcgggtaccatccggcgaggggcaggccgaagaaacgggccagcgtatcgaccgacatggccgtggcattggctttgccctgctcggaatagcccgcgatgtgcggcgtggcgagcagtgtgcgggtgagcagccggcggtcgatggcgggttcgtgctcccagacgtcgagtacgcaggcaaggccacttcgcagcagggccgcgccgtccacgacctcgccgcgcgaggagttcaggattacggcgccgggtttcatccgtgcaaaaagggcgtcgccggccatgcggcgcgtcgtgtcgtcgagcggcgtgtggaacgtcaggatgtcggcttggcgggcgacctcctccagcggcaggaagccgcagtgttcgcgcgcctcgcgcggcgggtcgcagcagaggacccggaaaccccatgtttcggcatactccttcacgagcgatccgacgtgtcccacgccgacgacgcccagcgtacgcccggcgggctgccagccctgcgtgcgggcgaggtgggccagcaccgcccccgcccattggagtacgcctctggcgttgcagccggcggccgtgcagacgcggatgccgtgcgccgcgcaccacgccgtgtcgatgtggtcgaaaccgatggtcgccgtggcgatcagacggacgcgggagccgccgagcagccgctcgtcgcagcgggtgcgcgtgcggataaggagggcgtcggcgtcgcgcacctcctccggcgcgatttccgcccccggaagataacgcacctcggcccacggttcgaggaccccctgcaggaagggtatggcgctgtcggcgatgattttcatggctgatggctttttcctgatttctactctttacgggaagcaaatatagggaaaaattaaaatttttgtacctttgacatttaaaacggatcttatggaacagaaaacgttcgatcccgacggggtcggtgtggataacgggacctatttcgggctgcctttcgaaccggagacggccgagctggtgatcgtctcggcgccttgggacgtgacggtatcctacggggcggggacggcttacgctcccgatgccattatcgaggcctcgacgcagctcgatttccacgaaccgctggctcccggcgcatggcgccgcggcatcgccacggccgacgtggactattcgctgctggacgaatcgcagcgcctgcgcggcgatgcggcgaaggtgatcgacctcctcgaagggggcggcagtcctgaggacgactatgtggtgcgcaaaatctgccgcgtgaacgaagggtgtgcggccatgaacgccaatatcggggcgcaggccgcgcgctggctcgatgcgggaaaactcgtcgggctggtcggcggcgaccattcgacgccttacggcctgatccgcgcgctcggcgagcggcatgcggagttcggaatcctgcatatcgacgcccactgcgacctgcgggacgcctacgaggggttcgagttttcgcacgcttcgatcatgttcaacgtgctgcgcgacgtgcctgcggtgacgaagatcgcccaagtcgccgtgcgcgacttcagcgagcgggaggcggcgctggccgcgtcgtcgggccgtgtcgtcctgttcgacgatctgtcgctggcggccgccgggtttcgcggcgaaacgtgggatgcgcagtgtctgcgtatcgtcgaaacgcttccgcaggaggtctacgtgagtttcgacatcgacggactctcctacgagaactgtccccacacggggactcccgtcgcgggcggactgggtttcaaccaagccgtctggctgctggacaccctcgtgcgttcgggccgccgcatcgtcgggttcgacgtggtggaggtcactccggcccgcgaggagcggatcgacgccataacgggcgcacgggtattgtggaagttgtgtaatttaactttaaaatcaaacgttcgataaatgcgactattttcgatgtaccgctgggtgcgcgagcgccacatgatcggtatacgcggccgtaatttcatggaggccccttgggccgggggcatcgtgctgctcggatgcgtgatcatcgccatgctgctggccaatctgcctgcgacttcgctctattaccgtcatctgctggagaccgacctctcgctgatggtgcatagccccgacgggctgatcgactgggtgttcccgcgcgggatgaccgtcgagaaactgatcaacgacggcctgatggtgattttcttcttcgccgtggggcttgagataaaacgcgagatcgtctgcggacagctttcgtcggccaaaaaggcgctccttccggtgctggccgcggcgggcggcatgctcttcccggcgatcatcttcaccgccttcaaccacggtacgatggccgccaacggctggggtattccgaccgccaccgacattgccttcgccatcggcattctctcgatgctcggcgaccgggtccccgtgtcactcaagatattcctcacggcgctggctatcgccgacgacctcggagccattctggtcatcgcgctcttctacggcgggcaggtgcagatcggatgcctgctggcggcgctggtcatcatgctcggcgtctacttcatgaaggagatgggcgagaagcgcatgttcttctatctggtgccggccgtggtggtgtgggggctgttctactattcgggcgtccactcgaccatttcgggcgtggcgatggccatgctgattccgatgacgccacgctacagcaaagagtatttcgtgcacaagatgcgccatctgaaggcgctgatgctcgccgccggcacttcgggcgacgatttccccaacgaaaaccaccggttctacctgcgccgcatgcgtaatctcgcggccgactcggtgggcatgagctaccggctggagcatgcgctggcgccttcagtgaccttcctcgtgatgccgattttcgcgctggcgaacgccggggtcgagatatcgtcgctcgaatacctcaatattttccatatgtcgcccgatatcggatcggtggggatgggcgtcttcttcggactgctcgtgggaaagccgctgggcatatttcttgcgagctggggcgccgtgaagtcggggctggccgagctgcccgaaggggcgacgtggcgcatgctcttcgccgtggggtgtctgggcggtatcgggttcacgatgtcgctgttcgtcgatgcgctggcctacaccgaacccgacctgatcgaccggggtaaaatcgcgatcctgatgggctcgacggccgccgccgtcgcgggcagcctgctgatactgattttttcgaaaaaacgaacctgatatgcgtaagacattagttgtcctcatggctgcggcgttgctggccggggcctgctccaaaaagacgggcgggggcgtgaagctcaagaccgacaccgattcggtggcctatgtgatcggcatgaacgtgggcatgaacctgatgaagatggattcgacgatcaacgtgaacgccgtatgcgaaggcatccgcgacgtgttccgccaagggaccagattctcggctgccgacgccgaggttttctacctgcgctatatgaattacgcgctgccggagaaagcccgcgcctacgaggagcagttcctgcaggatattctcaaggccaaccgcaactacgcccgcaccgcatcgggcgtgacctatacggtcgaggtgctgggcgatcaggagcagatacccgcttcggaccgcgacagcatcgcgctccgctacctgatccgcactgccgacggacaggaagtctactcatcctacgagcggggcgatacgctgcgcacgacgctcggcggcctgctcaagggcatgaaggagagcgtcaaactggtcggcaggggcggaaagatcaacgcgtggattccctcctcggcggcttacggaacgcagggcgacaaagagctgggaattc

SEQ ID NO: 42 - DNA, 27852 bp, unidentified
  source 1..27852: mol_type = unassigned DNA
  misc_difference 1786: note = a, c, g, or t
  misc_difference 1787: note = a, c, g, or t
  misc_difference 1788: note = a, c, g, or t
  misc_difference 1789: note = a, c, g, or t
  misc_difference 1790: note = a, c, g, or t
  misc_difference 1791: note = a, c, g, or t
  misc_difference 1792: note = a, c, g, or t
  misc_difference 1793: note = a, c, g, or t
  misc_difference 1794: note = a, c, g, or t
  misc_difference 1795: note = a, c, g, or t
  misc_difference 1796: note = a, c, g, or t
  misc_difference 1797: note = a, c, g, or t
  misc_difference 1798: note = a, c, g, or t
  misc_difference 1799: note = a, c, g, or t
  misc_difference 1800: note = a, c, g, or t
  misc_difference 1801: note = a, c, g, or t
  misc_difference 1802: note = a, c, g, or t
  misc_difference 1803: note = a, c, g, or t
  misc_difference 1804: note = a, c, g, or t
  misc_difference 1805: note = a, c, g, or t
  misc_difference 1806: note = a, c, g, or t
  misc_difference 1807: note = a, c, g, or t
  misc_difference 1808: note = a, c, g, or t
  misc_difference 1809: note = a, c, g, or t
  misc_difference 1810: note = a, c, g, or t
  misc_difference 1811: note = a, c, g, or t
  misc_difference 1812: note = a, c, g, or t
  misc_difference 1813: note = a, c, g, or t
  misc_difference 1814: note = a, c, g, or t
  misc_difference 1815: note = a, c, g, or t
  misc_difference 1816: note = a, c, g, or t
  misc_difference 1817: note = a, c, g, or t
  misc_difference 1818: note = a, c, g, or t
  misc_difference 1819: note = a, c, g, or t
  misc_difference 1820: note = a, c, g, or t
  misc_difference 1821: note = a, c, g, or t
  misc_difference 1822: note = a, c, g, or t
  misc_difference 1823: note = a, c, g, or t
  misc_difference 1824: note = a, c, g, or t
  misc_difference 1825: note = a, c, g, or t
  misc_difference 1826: note = a, c, g, or t
  misc_difference 1827: note = a, c, g, or t
  misc_difference 1828: note = a, c, g, or t
  misc_difference 1829: note = a, c, g, or t
  misc_difference 1830: note = a, c, g, or t
  misc_difference 1831: note = a, c, g, or t
  misc_difference 1832: note = a, c, g, or t
  misc_difference 1833: note = a, c, g, or t
  misc_difference 1834: note = a, c, g, or t
  misc_difference 1835: note = a, c, g, or t
  misc_difference 1836: note = a, c, g, or t
  misc_difference 1837: note = a, c, g, or t
  misc_difference 1838: note = a, c, g, or t
  misc_difference 1839: note = a, c, g, or t
  misc_difference 1840: note = a, c, g, or t
  misc_difference 1841: note = a, c, g, or t
  misc_difference 1842: note = a, c, g, or t
  misc_difference 1843: note = a, c, g, or t
  misc_difference 1844: note = a, c, g, or t
  misc_difference 1845: note = a, c, g, or t
  misc_difference 1846: note = a, c, g, or t
  misc_difference 1847: note = a, c, g, or t
  misc_difference 1848: note = a, c, g, or t
  misc_difference 1849: note = a, c, g, or t
  misc_difference 1850: note = a, c, g, or t
  misc_difference 1851: note = a, c, g, or t
  misc_difference 1852: note = a, c, g, or t
  misc_difference 1853: note = a, c, g, or t
  misc_difference 1854: note = a, c, g, or t
  misc_difference 1855: note = a, c, g, or t
  misc_difference 1856: note = a, c, g, or t
  misc_difference 1857: note = a, c, g, or t
  misc_difference 1858: note = a, c, g, or t
  misc_difference 1859: note = a, c, g, or t
  misc_difference 1860: note = a, c, g, or t
  misc_difference 1861: note = a, c, g, or t
  misc_difference 1862: note = a, c, g, or t
  misc_difference 1863: note = a, c, g, or t
  misc_difference 1864: note = a, c, g, or t
  misc_difference 1865: note = a, c, g, or t
  misc_difference 1866: note = a, c, g, or t
  misc_difference 1867: note = a, c, g, or t
  misc_difference 1868: note = a, c, g, or t
  misc_difference 1869: note = a, c, g, or t
  misc_difference 1870: note = a, c, g, or t
  misc_difference 1871: note = a, c, g, or t
  misc_difference 1872: note = a, c, g, or t
  misc_difference 1873: note = a, c, g, or t
  misc_difference 1874: note = a, c, g, or t
  misc_difference 1875: note = a, c, g, or t
  misc_difference 1876: note = a, c, g, or t
  misc_difference 1877: note = a, c, g, or t
  misc_difference 1878: note = a, c, g, or t
  misc_difference 1879: note = a, c, g, or t
  misc_difference 1880: note = a, c, g, or t
  misc_difference 1881: note = a, c, g, or t
  misc_difference 1882: note = a, c, g, or t
  misc_difference 1883: note = a, c, g, or t
  misc_difference 1884: note = a, c, g, or t
  misc_difference 1885: note = a, c, g, or t
cagagtgaactcatgtccaccctgactttacttattcaaccactaattaactactcaaacgtaaacgttaaatcatacgcaggttgttaaaatcaacgccgcctattatgagcggcgtggtttccggcattcatccggaaggctatctgaccatggcatgagataatccaattctgtaggatctatatttcctctttcatcacagagtttaggcaactctgtaaggatatatttaaagtaataatacggtcgcagattattcagctttgcggtttcagaaatactatataccattgcgctggcagaggctccttttgcagtattgtggaacatccagtttttcttgccaaggcaaaaggtacgtatagctttctctgaggcggaattatcaattggaacatcaccatcttcgagaaatactcttaggtatttttcctgattaattacaaaattaagtccatgacctgttttggattttggaggtactgtacagtcactcgcctgctgttttacccacgcaaaaacttcttcaaccatcggcttgatcagttcctgccgtttttgaagacgttcctttgatgagagttcttttaactcggtatcagcattataaaactcggcgatcttctgcaaagcctggtatgcagccgattgtcttacagacgatggatcttttttatctgcagccttaaccgcatccgcaaaatcacgccttgcatgcgcccaacagtttgcgtttgttacgtctgcaagctttttgtcgaccaaatggtattgctgcaaactatccgttacaaggattcctttataatctttgtaaaaatccagaggtttttgatgatcgcgacctttctggtattcatatatcacgattggacgcctggtataaaactctccggaacggtgcacccacatataacacttgctgttatggtggtcgctgtctgctatcacctgcgttggtgtttcagccattgtcggacggttacgtttgcaggtcgttcctgacattgatttataatatttaaccagttagcacgccttacattatgggtgagtgaatccatgatagtttacctcctctaaaaaacgattagttttttcgtgttttttagagtgtctcacaaaaatgctagttatccaaggcgggtggtttgacgtttacaaattcccctcacactccctcaaaccaaaccctcaacccctcaaaaactggcattctaaaagggccagcccctcacgactgaccctcataaactttggcaaccccacaaaaagtttgattactcgtataaagttctattttgattttaatattaaattacataattggaagctcccaatcctcaacagatattatattcgcctttacttcagagcttattatgctatttccacttgcatcctttactatgcagcgcacaagcattccgttatgctttccctctgtcgtgaagctgtatgttgccgttgttgctgttgttgagcctgaattcttccagctctcgttagggaattttacctgccactggtatttaagtcctgttccctctgcctttaccgcaaatcttgcctggcttcctactgacacgctgcagttagacggctggcctgttatccttagtgcttctgctgtactgcattttgcctcattgctcgtcacgctatttccgcttgcatcctttactatgcagcgcacaagcattccattatgctttccctctgtcgtgaagctgtatgttgccgttgttgctgttgttgagcctgaattcttccagctctcgtnnnnnnnnnnnnnnnnnnnnnnnnnnnnnnnnnnnnnnnnnnnnnnnnnnnnnnnnnnnnnnnnnnnnnnnnnnnnnnnnnnnnnnnnnnnnnnnnnnnnttccctctgtcgtgaagctgtatgttgccgttgttgctgttgttgagcctgaatttttccagctctcgttagggaattttacctgccactggtatttgaggccggttccctctgcctttaccgtaaagcttgcctggcttcccactgatacgctgcagttagacggctggcctgttatccttagtgcttctgctgtactgcattttgcctcattgctcgtcacgctatttccgcttgcatcctttactatgcagcgcacaagcattccgttatgctttccttctgtagtgaagctgtatgttgccgttgttgctgttgttgagcctgaatttttccagttctcgttagggaattttacctgccactggtatttgaggccggttccctctgcctttaccgtaaagcttgcctggcttcctactgatacgctgcagttaataggttgactgacaagatgtaaagtctgaacgccatacaattcacactcgctagcactgaccagtgcagttgattccactaataaacaaccacacagaataaggcttgcaatcaatttttcaataataaatttactttttttcattagttgcccccattaaaatatattttataattttatagtactatatacttaaatattcatcagattccaaatatactacttacttttttagaaagctatattaggaatatgtccttccgttgcattgtctctatgatggatttttgcaggatttccaataacaatcgaatgatccggaacatcaaaattaacaaatgtattaggagctattaaaacatcatttccaatctgtattccacctacaattgttgaatttgtacgtatacacaccctatctccaaattttggaacacctgctcttttccccctaatgtctctccccacagttacaccatgtgttataaacatttgatttccaaactgcacttgaccgttaataacgatttttccccagtgtcctattataagaccatctcctattgtaatattatcctcaaaactaaaacctgtcttattttccagcttcttcattttccatcgataatattttccccaaatattatcttgattcgcttgaaattttcgatataaatttatatatttccattcatatccatgtaaaaattctttagttaataccccacctctaaactcttgattaatcaaataatccttttttattctctccttatattctctattattatttttatagaaatttgttgtaaataattttttaatattcatgttgctttccctcgaaaaaatattgttctctttgtcgaacaatctcatcatgacttatattcttattataccaaggatactttaaattaatattttttatatttaaataccaatcatctatcttcgcaattacccttgcaggatttcccataacaactgaattttcttcaattgaagtggttataacactaccatctaatattaagcaatttttaccaattttaacatttggatataatatgacatttgaacaaatataaacattatccgcaatatcaattggtcctaaatttcttaacttctgattctctccattgtcaattataccatcaaaaaattctgctgtcggtctataattaataaactttgtattatcttctatcacaacattattacctatggaaataagtttcaagtcattaccaaagtcacaattacataatttgcaattatttcctaaatagtgaaatgccatattcaaatcactctccggttttctcaggactatacgttttatcctatctgaacattttttttttaaatatcgtaaaattttttttaaaaaagagaatcccttacgtatataattacaaaatctacctaatgttggatatctgccacaataatacgagattttgtctttaaaagacacaaccttctccgaagatctaaatcttaattttgatttatccaattttatgccttgtttctttgctagcttattaatagcccaatcaatccttccatcccattcataatcaatggttctttctcgtgggttactctcataattttttatagtctctgctattccaaccgcaaacggcttaaaatttctaaagtctggtgccgcatccacgattttgctattgtcaaatattctgtctcttgctttatcccccaataaaacccctgaatattcaggtaaaactttaataatatcatctgttgaagcagaaaatactataggcttttttttcaattcctttccaacatactgtaatacttcgttccatgtcaagacttcacctgatgtaatatgaaatgcttcattatatgcttttggattatttactaaatcaatatatgccttggcaaaatcaactgtatttgttaatgtacattttgctttgccattgtcccacaacaatataggcttatcatttataattctatttgcaagagaccaatactctccattaactggtataattccaaaaggtattcttgttttaccatatgtaatatatggtcttataatagtaaatataattccatattttttgtagttatcccgcaagaactgttcacatttaactttattacttccatagtcccaatattcatttcctagttttgtattctcagtaataacctcatcttcaaaactatatgcaacagatgaagaaacaaagaaatactgtttacattttgtagccaaataatcaagtttatacttcagtcctttaacatcaaacgacaaaaaatcaaatattgcatcataattattatccaacccatctactacaccatctaatttgttaacatcaccgtgaataatattcactcctcttggtaatctataatccctaatacctcttgtaatacaggttatatcatatgatctacgcaagccttcatttaacacatctaagcttaatatccccgaaccgcctaaaataagtatttttgtcatttttttaatctcctattgccgatcttattttactacatacttttcttaaaaaactattttgaggatttttccccataacaccaaatgccaataccggataaatatacaataatttataaaaaatatttcttcccttctttgtggttgtagaattattataatttgagttatattttaaaacgttgctatattcaaatctttctactattcccatttcttttaaaattcctattaattcatcacttttatttgaatggcaaattaccattgaaagacctttattatcatctaactctgatatataattttcacagccccaacaatcagctattgttatatccgctatcttactttcacttttaaagcaacaatcaaagcatgattttcttatagaatatcctttaaacatacattgcatatatgtattatcaaaccctggaatcgaaatacttgtaccattatttttttccaataaaaagctgaatttgtgccaccccaaacttttgtccttaaaattaatcttttttatttcagagcgtttataatatgtatccaaatatttatcccaagccaacggagaaggtattcccatacatatcaaatcaacacaatataaaaaactataattttttcctaaataagcacgtaatccctcaacttgacaagttgtgccaaaaaaaataacttttttttcttgttcaagcttatctttgatttcaagatatatatcatttattctactttgtacatatttagaacctgccaattcaatcacttcacttgttgatgtagccgatttatgaataacattatagcttccatcaaatgaagcaccatatacaatgccatcgtgttcaataaaataagttgcaagagatagaaatacagctcctgaagagcatattcttctaaattcatcattatttgatttaaaggcatacgcagtttttttgtccacaatattcctatgatttttgtcataattaataaccgggcatatattaatgcacattttacaattaacacatttatttgaattaacttgaggcataaaaaagccctcataattctgtaccatatctatacatttagtaggacagaccgaagcacatccttcacatcccgtacatctatcttttattatagaatctatcattataaaagcctcctaatgataaaattattatctaaaaatatttaaaattctattaaactttctttttgtaattctatcaattaaatctaacatctgtttaaaatagatattttttctaaatataataaaaagtaaaacattcgagataatcacacataacaaggcattaataactaacttccaaaaatcacctattttagatgtaataaaattgcaaataacaaaacaaacaacagaaattatacatgcacaaaaaaagtaaactatcatatcaacagtatattttcgccaatctcttttaaatacatatttaaaaacattgcttatcatccaaggtattgctaccactatataactaataagtgttgacaagataatcgcatatattccccaccatctaactaatattaaattcaacgttaaattcactaaagccgcaacaagcggtctgaatctatcttgatgccatattccagctgcatctttatacattccaattatctgttgcattattacaaagtaaaaataaacacataacattgcaacaactaaagtatcaaatgtatatttctttcctacccacaaaatgataaaaggttggtaaagacatccaaaacaactcatacatattgttactatccaattaattagaaaagtaattattctgaaatcattataattcttatcaatggtttctgtaatcatactatttcctataccagctaaacatgaactaaaaattatggttaatattcccataacagaagacattataaaataataattctgatacattgctaatatagtcaaacccaaaaaagctgaaataactactgtgtctgcagaattaacaattgtagctcccaattttgctgtaaataaatctttaattcgttgattaatacttttcacaatttttggtgctagttttcctttagctctatattctggaaacattttatttgctaaaaaagcaacaattaagttgttcaatatttgtgtaactagcattacaatgacataataataataattatgaaaacaccataatacaaaaagctgcagcacatactgaattgttgtagtaaaaaaagtaactttacttacaatgtcagttctttgatgtgcttgtagtaatgaatttttatatgcaaaaagccaatatgtcaaaactgtcgcagcaagattaaataaatataaaatataaatattaatattatttgggacttcaccactaattagttttggtataaacggagtcagcaataaacctataactgcaattactaatcctacaaacctataatacaacttataaagatttaataatgcacaaatagtagatgtgtctttatcaacaataggcttatacatactatacaccattgcagatcctacacctaactcagctaaatttaatacctgtaaaattgaagtaaataggctatttaatcctaaatattctacactcattaagtatatcattgctgttctcatcaagaacggcacaataatttgatatagtcttaaacccataccaaatattatatttcgcatagcatttttcgttttgttcatatctatttttacctatattattatatctatttttaataaattgtattttataacaaaatatcttttaaaatattagttgtctcataagattcttttttcattttctcatgaactgaaatcaaatattttttatattcatcatagttatcagttaaaatcgaaaatttcttttttaattcctcatctgaaagcttgtccaaagaaatacaatacctatctaattccatttttttcataaacccttgcattttttgttcatatgaaatagaaataaatggcgtccccatttttgctgagaaaatattactatgatatctcattccaataacagcatacatacatccaataacatattgttgaaaatatgtatcatatttttcgtcatcagaacaaataacaaaataattttcctcgtcaaaacaatactctttcattaaattataatcatttcctaatccatacaattgcggaataaaaacaattccgtaaccattttgtacaaaattctttaatacatttgtgaaagtttctttaatttttatcttaatttcattatttgaatatttaggatgccaactcaaatctgtgattgttacaccgatacattttttgtggttttttataaaactacatagttctttatatttatctagtttaactttattcgatgtcaaatctatatcatgctgcaacgcagaatccaatgttaatattggatttttctctgggacaaaattattgacataactatatgaaatgggatctcttacaacaatagctgttgctttacagagtatcttttttctccacttatttctcttttcaaccttaaaaggacccatagatggagcataaaacatatatttcttattcatagatattattaaatcaaatatcgatagatatgatggttcatcatcataatataaatctccaatacttggtcctccaggcgcatgcactactatatcagaatcttttatctcatttacaagtattctttcattatgtgataatgccaacgtccctttcgtaataagtgctatattatgtgcaatttttgatttaaaagatccaggacaaaattggcgtatcatcttgacgttactaggcatattaggatatcgtgttccaatccctcgtattgctagtgtaatgctcaaatttgtatataatttatttaattcatctaccattgcatgaatagcggcttcatctcctctattatcacaatgacaattgataactaatatcttcattatattattatcctccctacaatctataatccaatcttttttatccacatatcaattgacaatgagtgatagctatttattacatattctttagccataaaattatctggtatattgatattatccctatccacgattatcatattatctgaataaacaggataatatttcatatatttattaactgtaataacctttgtttctgtcaataacgcatcaaatgcccgtgtagttggacctttttgacatatctgtggaacatctaaaattgctttggattctctcataatactaatatattgtttatttgtaagtggtgaattatggcaaaatcttcctccaacattttttttatcatataaataaataaataatctataaatcgacgaatatctttcatacaaatcatcagcaatttttcttctatcatcatttaaagagccaataaatacaatatcatatttgtcttctttactatgccctacacccgattcttgaacaaaaacaggtaggtaattccacttattttttttacattcaattatgttatatgaataaacttcatcaaaatatctaatatgattttttttaatcaaattactaacatcgtcccatgcataatatatatatcttgcattcggatttaacattcttacctttttataaaactcatctgataaataaggtccattaatacaaaaaacaactgagaaataatttttttcaagacatattttgccaagttcgttttctaagaaaaacgcttctgccttctccaagtcataattaaaacactttctaaataaatgtctaatcccccatcgaattttattacatttataaaacttatctaatatttcccggtcaaattcatcactgtccaaccagcaaacctcatattttctattcaagttttctttaaggctcttctcataatccataaatctaggcattaacaataaaagtctatccatcttaatcctctcatatcatattatttatctgtgtgatactacttcatttgtagttaaattaaccaccacttttggaagtttatcatcctccggaattccatctctttttgatgaataaccgtattttccatcatcatataacaagacaaatttatccaaataatatgcctcaaaactttcaattatactcgttctcttaataatagagttgttttctcaacaatatctttccaaaagaatcgattttttgaaatctttacaaccattataaatttcttaatgccaatagtattttttattattcgcttctcatctttgtagtgtgaaatcagtcccaatctcctatgaaattcttcggagttaagaaactttgaaatggactcttcagtaattgaatcaatctgcttcatattttgagcaagataatctctcataagaaattgctctgcttcatttgattttgatataccactctggcgtatcctataactcaattcaactttaggaatatttccaactttgtagccatgagccattgcacgaagtataaaatcgtaatcttcacaacgaggaacattcctataaccatttaattcttgatagacctttaatttcaccatccatgtaggatgtgccaaacagtttccccatcgcataaataacttgacatgagctgctgtaactggaaaacgcattgtctccttttgaacaacacctttctcatctattatttcaataaaagatccaacaatatccaaattattttgctgcatatattgtagttcatctttcaagcgtgtttttctgctaacatcatcagcatccattcgtgcaataaaggatcccgtcgcctcactaattgctctgtttaaactttgaaccagtccaacattttctttattttcaataaattttattctttggtcatttgctacttgaaccgccgtctttatatctttgttttccggattatcactaacaattataaattcaatattctgatatgtttgattaataatggagtcaatacttctactcagttcatcaaacgactcgttatatgcactcataattacagaaattttaggtgtattgctcatttctactctccaattattttctatcaatctctttagctggaattccaacaatagtagcattttctgtcagacaactttttacaacaactgcacctgcaccaattttgactccatttgcaatctgaatattacctagtatttttgctcccgttccaatatcaacgttatctccaataatatggcatccttctgtttttccattatttccaatacagttatcaccatgcaacatacaatttttaccaacttttgattctgcatttacaataatattaccataatgccaaatatgtagtcctttgtcaaaaacacctgctggtatataaattcctaattttgccccaagtctatttttactcaatcgatatataaaccttgaaacaatatctgttgctttttcttctgctcgcaattttttctgaaagcaatataaataccattcatgttctttaagtatcgcagactttaaaaattttctcttgtctttgaaatatatttttcttgtattctccattgtttactcaatttttttctttttattttgaagccaggtaaggaaataaactgcatttatccacatatgttccatcgcaaaattgtaaatatattgtaacttattaaaagaatttctaggatagcttcttattaacgtttgaacatcttttctggaacaaatttttcttatatttagaattgctgttccatagctatttttatctttataaaatacttcaagtttaatacaagtacgaatatgtcctataaaatttgtgtctaagcgatattgtgcctcaattggcaagtttaatatctgaatttttttttccatataatgatataattccataacaagattcaacttattgggtttatatgtatgtgtcaatgacccttcgttaaagcaataatagtatattgctttatgaaatatataaaccttttcacactttggatacacatctacactaaatgctaaatcttcccatataagttttctctcagatggaaaccttaaattatttttaataaatagttctttcttaaataatttggcagttgccgtatatgaaaatgcatccttttttttaccgcaatctcccatcatatgattgattataatattttttatgtcatccccctcatataatcgttcttcaatcataaccttcatttctttgtctttgtaaaacatattggctactactacatctgcatttgttacagccgctttttccaccatagtttcaactgcatccaatgttaaatagtcatccgaatcaacaaaagtaatatactcaccagtagatttttctataccatagtttcgtgttaatccaagtccttcgttttctttatgaaatattcggactctagaatcttttgactcatattccttgcaaattgaaaacgaattatctttcgatccatcatctactaagataatttctagattcttataactttgttcaataattgaatcaacacatcgtttcaaatatttttctacattgtatacaggaacaataattgatactttctgctccattttatcctccattaataccaattcaataagatacctagttttaatgctactgttccagcgaccgtcaaccttttgaaactcggatcaaacaaaagggacattttatctttaaatacatttttataatcgcttacttttttcaaaaatgtctgatcacttggcttcaaaatatcactataaaactctaacattgctgtactaatgttagggtacgacttcttttgtaacgtttttttcaatctatactgaatcgcagtttcttttgttccctcgccagtaacactagtatcatatctaatccaatagtaaagttcttcatctacataatatacttttccaaaccaaaaacataacgttccaatccacatatcatgaggcaagtcatcaacctcaggccaaactctacaaaccagttcttttgcactcttatttatgactgttgctgcaccataattgtacgttttaattaatgtaagtttttttgttaattgctcaggtttaagaatttcaacctgttcatccagccgattcagttttatatcactacgttgcattttacaatacgccaactgtggaacattattttcgttctgcattgcatcaatacacttaatcaacttattaggtttccaaacatcatcctgatctgcaaacgcatagtaatctgcatcattacacatcgaaagaccgagccaaaaacttttcgcataaccaacgttttctcctttaataatctcaattctgttatttggatgtctttgtacgtatttttgcacaacttcaactgtattatctttgctacaatcatctctcactaaaactcgaacatctactccaatctgtgcaaagattgaatctaactgtcgttctatttgtctagcaccattatatgttgaaataactattattactgttttcatttatcttcctttattttttcaaattttactcttaaattttttataactttattagttccaaaatcattaaaagcccaaagtataaacgggaggaacgagtaatcaactaaatcgttatcgacaaagtttgctataaaaaccatcactatagttcctagtatacatatattttttttattttttttggccaaaagatacgcaataaagaaataaaaaaatagaactaaaatcccatatcttaatattatatatagataaccattatccagaacaactgtactcaaattttgtccattagcataagtaatattatcgtttataaaattttcattactcataatatttataaaatgaaatccaattcttctcatcttaaatatagcaagtctgaatcttcccgaaaaaaaagtatcaattgtattccaaattcctcctcttaataacaaaaacatcattgaaaatgaaaaaatcgacataactggaatacttaaaaccgttgcatgatataataccttattctcaccattttcttttttctttgcaaggataacaaatacagataagagcaatgatataataattgcatttcttgaacggcaaaaaacatttacaatcaccgaaaaaatcataaataacactatcacactatcgcgtactctttcttttacaatgcaaatataatagacctccaaataaaaaatcaacaatggaaatacattactatggtaaaatcccaatgaatgtctgttataatctatttgctctaacgtatcacgcgaagttaaaatatctggcaaaattccaatcaaacataaaaataacacactaatgattccaattattattattcttaaacttattctataaacactctctatattaattttttttgaattgtaaataagcaaaatcaaaatgctccaatataaatctcctgttttcattgcataaagcaatgtaatcataaaaataaccatcatctggagaaattcttttttcacaaacctcaaattaaagcatgaaatagcaatcaatatatatgaacaaatacgtaaatatctcgctagaatatccaaaccaccgatattataaacatcaccaataaacaatgaaatgtacaatattatataggacaaataaaataatatttcattttttttaatttttgttaccattttttctcccatgacttaacatatatataatgcaaagtaactcaaatctatttttccacctataatttacacaaattcaatacatacactttacttattacttattcatcgacaaatacaagtcttatagctaaaactaatgatttaaatggtacagaatatgatttgcactttttaccaatctgcaaccctaaaccgcaacattttaaaaagcctaaaaatctaactttaataccacctattattctagtttgtctcataatatcaataatacgtaatcttagcctcttccatcctgattctgccgaaagcttcaaacctctttggtagaaattttgctttatttctacatttagcttcataaatttcttattcttttgtctttgatcataaaaaaaattctgatccacctgatccacaaacagtttttcattaaacctataattttgaaacacacgcattcgaatagccaggcaacttgcaatagcattaaattcttcttgtggaatttcttgactgattttctgaatatattggctcctcataaaattgtatctgtttggtgaatagattacaccatcctgaccatagataattggtgcaaatatatcaacatctggattagaatccaaagcaatctgtaactgttcaaaatattgttttgtaacatcagtatcatcatcaaacaaaataataacatctttatctttagataaatcaatcgcagcattgtatgcttttgataatccctgatttccacccattgatatatatttaatgtttttcttttcacaatatgttttattgccatagtttgatgtactattatcaactattaaaatttcaattgaatcttcattaaaacttaaaatatttttacatgtaattgaattttcaatgcttttattatagataacaattgtagctacaatagaattattcataatgttattccttcatctgctcttttatatctgcatcaactatttcttcacctgtttttccaaccagctgtgccttactagcttcacttaatccattattaacaacgcaattcttatcacaagtactgcagttatctaattcatcttttgtcactttaccatcacggtattctctacatattttgttctcatacatagaatactttccaccaaaaacactcttaactttatgcgtaaatacccaccaagccggtttccaaatatatttgtgcatagccggagaaactgagcctatcatccaacaatctctatcacaacaacgtactttttttctaacattctctgcttccacactattccataattcatcccatgattgattattaagatttcccataacctctttatcttttgttccattacatggcataacatctccataaggatcaataaagaatgtgtcaaaactcatatcacatggcaataatcttttctgtccatatatataattaataagtccgtgattaaaatatgctctaaaccatttcttcggactattactcttcaacagttcattaacaagattttcaaaattctttgcaaccatctgacgatcacttataatatttttcgcctcaacaaaataaaaactattatgtagacttgccgtagcaaactccattcccatttcattagaaagctcatataaaggaacaagatccggagcatttttatcctggacagtcattccaaagcctacatccttcattcccatttcacgtaatttctttaacgtaccatatcctctctgaaatccattttccaagccacgaatctcattatttgttttttcaagtccttcaatagatattcttataccaatttgaggaaattcttttgctaaatccacaattcggtctgtaaaaaatccattagtagatataactattcgatcacttttcttatataattctcttacaatatccttcaaatcagttcttatgaaaggttcgccccctgtaatgtttgtaaaatacatcttaggaagtttttttatagtttcaatgctgatttcctcatccggttttgaaggtgctttatatctattgcacatgctacagcgagcattacatctataagttactatgactgttccatttaattttttttctgacattttatttccaaccttttttatttttatctgtataagcagcaagtatcttttacaattttattccagctatatttattacaaacaaattcctctgctgtacatttaaatgatttcaccttcgaagaattacaacatatatcaacgagttttgtatataagctatttacatctgatttttgaaatataagtgctttatcttcaaccacatcaacacactcaggtatgtccgataccaagcaacaatttccatagctcattgcctctaacaaacttaaaggcattccctctaagtcagatggaagtacatacacatatgcattgctatacaactcttctaactcttgtccttgaacaaatccagtaaataaaattcgtttatcttctttagcaagttcttttatttcattttcaaattcacttgtatccgaactgccaccagcaataaccaattctttatctgtatcaacctgtttaaatgcttctattaaatatttgattcctttttccggaactaatcgtcctaaaaacaatatgtaagaatctttttccaaaccatatttttctgtaattagttcagctttttgttttttgggtctattcaccccattcggaataaacactgtttttcttccatatgttttctcgaagtaatcctgtacacctttactcaatacgattatttcatccgcatactttactgcgttccgttcgccctgccggatgaactttgctccgaatcctgctttccatttttcacgctgccaatccaaaccatgtattgtgacaatcacttttttaccgagcagttttggtatccaagcaaaaaatgccggtccctctgcatgaatatgtacaatatcatatttgccaaaagcacaacataatgccgcaaaaaatgacgatgatacagctgcaagacctttcttttctattgttgggactgttttaagcctgattcctttatattctttaagtcgttttgaatcaaactcagaaccactcacatgatgtccacctctgttatagcaggttacgttatatccttgtgcaaccatccttgtgcaaagttcttcaactactatttcaactccaccttctcttgatggaattcttttttgcccaaacatagcaatattgagtttttctttatgcttactctttcgtctgttcacgtctcttacactgctccatcactctttaatacgcctgtaattgtcttaaagagaatcttcacatcccccttaacactccactccccaatatactgagtatccagcttcaccacttcctcaaagtccgtgatattgcttctgccactcacctgccacagtccggtcagtcccggtctgaatgacattctggctctgtgatgtggttcatacttctcccactcatcgagtgtcggtggtctggtgcctaccaggctcatatctcctactagtatattgaaaaattgtgggaattcatccaggcttgttttcctgatgaactgtccgattccggttttcttctttccgtttggcagcaccttattgcctattattcttgggtcaaagtccatcttgaacatcattccgtcgcccactttattctgtgccattagctccttctttctctcctcggcatccatatacatgctacggaatttgtacatcttgaacttcctgccgtttctgccgattctctcctgtgagaagaatatcggtcccggcgatgctatgtatatcatcggtcccacaaatatcatgatgataagtgtgaacaggcagcccaccagtcctccgactatatccatgcccctctttaccagaagtgcactggtattggcatagttcacgcttgatgtgactactgtgtagtcacctatcttttctatctgcttgtagccaccctgggctgtgccgtttttggctattcctgtatgtactgctattcccatctcaaggaatatatctgccatccgctccggatattcatcctcgctgcaaggcgggatgagtacctcatccacccactcatcgcacgcatagtccactatgccatcgtggtttacaactatcggtatgccgcatatagtctcacccttcatgtctgtatccagtgaagctgctactatctttgtatagcctatacagcttttctccactgtgcgcagtgtatcacgaagtatagcatcaggtgctatgacaagcagtgatttcttagatgttccgaagccctttttcttaaggaagctcttgagtgcaattcttgccacatatgctattgtcacatagattggaaacatgatataaaatgataatcgcgagtatatatcagccatctgtgtagtgaacagaaatagcgctgtcgccagaaatacaagcattgcgtgcttgcaggtcgatatgagttcatccagatatcctctctttaggacattcttgaatgagtctgccattatctccacaaagaaatctatcagaagaaatgctacccccagtatacggtagtccttgtccacgtacgggttattaaagccgaagcgtatcacatatgaaataaaaaatgctataacaatgcatgcgatatctataagcataaagtctatatgctttgtccatcctctgcctttctttctgtacattctttctaaattctccttatggtatcttttatttccctttatacctactctaggggaggtacctttgtaccccccccgaatattttttagcctgttttattttttgtatgtttattcggattagcgtatctttttttgtatctatttggggtttctaatgtcttattttcactctttttttatttattgtcaacgaatattaggctttctttataattttcgacatattcgctaatccgtatagtattatcagttcgatatttatacattattatatgtcatgctacttatttttcctcaaacagcctctgcttcctctctatcatctcatcaatccttgcgatatactgccctacatccttgacattctcgcatctgtcgatgcggtgtgtgccgtccggattcggtaccgaccagacgcgcttggtgcttgctccggctccgcacgccacaatcgtttgcttttcttccatgataagtatgttgtatacaccggccttaccctttgcggcatagcccacattctccatattgcctgccatgcccttctgcctgtacagatagtatggctcaagccccatctgcttgcagtaggctgcgcagagatccatatgctcctgggtgttgaccatctgcatatcgctgtagcggtccttgaagatggtgagtcttgcagctcgctttactgcgagtgaatggatggtgacgttgtcaggtgccagctccttcaccagctccattgtgtgccttacatcatcgagtgtctcctcgggaagccccatgatgaggtccatgtttatgttgtcaaagcccagctcacgcgcgagcttgaagctttgtatcgtatcgtctactgtgtggtgtcttcctattatatcaagtgtctgctgcttcatggtctgtggatttactgatatacggctgatgccgtttttcttcagtgccatgagcttttctctcgtgatggagtccggtctgcctgcctccaccgtaaattccagacagtcctttaaatcaaagctgcatttgatttttctgataagcctgtcaagctgcgcagggcttagtgtggtcggtgtgccgcctcctatgtagatggagtttagcttcttgtggtagaacttctgcgccgtgtagtctatctccttctcgagtgcatcgaggtaatcatccacgcggttcttccacacacccagcgggtatgaggtaaacgagcagtatgcacaggtgctcgggcagaatggtatgcctatgtacaggctgtagccgttgtcatagtccaccttgtcgagcagtgccttctcacgctttgctatgcctattgagaggtcgattttctcatcgcttgccagataggtttccttcagatagtcgtaggtttccttatcgctcattccgtcctctatgcatttcatggctatcttggtcggtctgatgcctgagagtgtgccccacggaaggctctttcctgtgcccttttctatcatggaatatagggcgagcttgagacgatttttggtctccttgcggtctgcgctgtctacggatatttttgtgcagatactttctccggctgttttaatgtcactttcgtcggcttgctgcatctcatctgtcatggaattatttccaccggctctattcagcgtccactccactgcaatttcatcgcccacatagtctatcttaaatacctgtgaggcatccgcaaattcctttacgccatcagctgtcatttcgtggtgtgtgcaggctaagtttttcccctccacctcatcaggtgagcagctatagtacatctgcacatcctcctgcgggaagaactccttgagcagtgagtgcacatcatattcaaaatccggtctattaaatactactactatcataagtaagggttatacatcctctcgttttctatggttgttgtgtcgttgtggcccgggtacacctctgtatgctcaggcagtgtcatgattttttccttcactgtgcgcacgaggtctgacatgctgccgcccttgaaatccgtacgtccgattgagccgcaaaacagcgagtctcctgtaaagatcacgtcctcatacgggaaataatagcagcagccgcccggtgtatgccccggtgtgtgaagcactactatgtgaaagcctgcgatgtcaagctcctgcttatccttcaaaaatacatctgcataaaatgtttttgactgccccatcatgtagctgacattaagctgcggatcatcaagcgtagccttgtctgcctcatggatatatatcttgacgccgtagcggtctgcgagcggctttgcatcagtggcatggtcaaagtgtccgtgtgtgagcagtattgctaccggctttgcgcctgattcgtccacttttttggcgagctgattagcacacgcgcccgggtctattattatcatttcctttgtctttatattggtgacaaaatagcagttggtctgcaccggtcccactacgaagtggtctatcttcatatttaccatatgagtgtactccttgtctgttatatgttatgcttcacgcaagaaccaccgggatttagccggtggtcctctctacgtctattacactttctatctgtctgagcttctccactagaacctttatctggtccctgcctttgatattaaaaaatacctcgattgtagcgatgccctgcttgctggtcttggactggataccactgatattgatttccttctcggtaaatatctttgtgatatctacgagcagtcccggcctgtcatgacagaatatctttaagtctgcctgatactcggcaccgttgtccatgagggctgtatcctgccactctgcttctatgagcctgtccttttctatcttggacagattgatgatattcacacagtctgtcctgtggatggagatgcctcgtcctcttgtgacaaagcccacgatttcatctcccggaacaggattgcagcacttcgagaagtgcactgccacgtcatagagtccgtgtaccacaatgccgctctttgacttgtgctccggctgtatacctgctgctgcctgctgcttttctgcgatgctgccaagcacatctgcatctgtcaccggcaccacatgatccttcttgtactcgtcgtacatcctgttgactatctggctctccttgagtccgccgtgaccgacggttgcaaggcatgagttccagtcgtggaagccgtatttgcggcgtattttctcctgatactcaggcttgttgatctcagcaaagttgatgccctttgccttggcataggctgctatcagatccttgccgtgctgtatattctcctccttgagctcacttctgaaccactggttgatcttgttcttggcctgtgtgctttttacgaccttgagccagtcacggcttggtcccttggagttctgtgaggtgattatctctatctggtcaccgtttttgatgacatagtctatcggcaccagcttgccgtttaccttggcaccgaccattttgttgccgaccgcagagtgtatgctgtaggcaaagtctataggtgtggagccctttggcaggttctttacatcgccggatggagtgaatgcaaatacattgtcggagaataaatttaaatcactctttaataaagtcataaactccttattatccgacatatcctgttgccactcgagtatctggcgcagccagctgagcttctcctcctctgtgacagtggtggtggtggcattgccgttgtttgtttccttgtacttccagtgcgctgcgataccatactcagctgtacgatgcatctcataagtacgtatctgtatctcaaacggctgtccactcgggcctatgagtgtcgtgtgaagcgactggtacatgttctgcttcggcatggcaatatagtccttgaaacggcccggtataggcttatacttctcatgtatgatacctagcactgcgtagcagtccggtatagtgtccaccagaatcctgatggcaaagaggtcatatatctggtctatagtcttgtcctgattgaccatcttcttatatatactgaagaaatgctttgccctgccgtatatctctgccttgatgccggcatctgaaacatacttcttgacatcgtttaccaggccctggatgtaagtgtcgcgctctgtctttctgagggctaccttctctaccagatcgtaatatgcatcaggatagaggtacttcatacaaaggtcctcgagctctatctttatcttgctgataccaagtcgttgcgcgatagggcagtagatatcctgtgtctctctggcgatacgctgctgcgcctccttggactggtacttgagtgtacgcatattgtgcagtctgtctgccagctttatgaggatgactctgatatcctttgccatggcgagaaacatcttacgcagattctcagcctgcatctcaagcctgtccgcattcttatccttcggatccttggtgctgtctgtcagatgcaggtgctttaacttcgtgacaccatccaccagatgtgcgacatcgtctccaaattctgcacgcatctcatccatggtcatgatagtgtcctccagcacatcatggagcagacctgctgcaattgtttccttatccagctcgagctcggcgagtattatggcaacacaaagcggatgtatgatataaggctctcctgacttacgcgcctgaccattatgagcatcataagctaccctgtaggctttgtccacaaggctcgtgtcatccgacggatggtactttttgatttcctttttcagctcatcgtaaagctcctctgggctcgtaaaatcctttgttccccttataccgctggtatctgagcgaaatttgtccgctattttttctaattcttctgttgagtaatctgccaatagtctcacctcgattgtagtgtatctttagtagccattatattttatttctttaaaaattgcaatctcatgttgttagccgataaccatctttactccgccatacatgccggctgagttgccgagtgtggcaagcttgatctctgtctcacggcttgcatggaaagcatactctttatagtactttgctgctgtatcgatgatgatgctgcctgcctttgaaaggccaccgccgacaacaaatacctcagggtccataacgcatgctactgctgccattgccttgccgagaagcttcatagactgctctactgccgcaatgcccgctgcatctcctgcctttgccgcatcgcatacatccttggctgtgaagcctgcatttaaatcaagctttgttgccacatccctgtgtgctgcaatgtatctctctgccactcttacgagaccatttgctgatgcatactgctctaagcagcccttcttgccgcagccacagcactctgactcatcatctaccataggcatatgtcctatctctccgcctgctccgtttactccggctacgattctgccatcgcggatgattcctccgcctacacctgtgccgagtgtgatcatgactacatcctgatgaccctttccgccaccctgccacatctcaccgagtgcagctacgttggcatcgtttccggcctttaccttgatgccgccgcacagtactgagagtgactgtgccacgttgaacacgccccagccgaggttgacacacttcaatactgttccgtcatcctttataggtcccggcactcccatgcctacaccctcgatgtcacccatctctatgccatgcttctcgttattctccttgatggatgctgcgatatcaggcagaatgagctcgccggaattctctgtgcgtgtaggaatctcccatgtatcgacaagctttcctgtggtctcgaaaaagcctatctttacagttgttccacctatatctactccgtatgcatatttcttcattttttcgtcctccaaatcgttaaactatgtttatattttattgcctaattgcatatttttcaatgtttttcattgttttttatgttttttatattttttctatatatagaggcatgtatatcatcatccatatgcccgctatttgtaaatccaagctttttggcaaggcgcaccgatgccgtatttctctcgtctatccggcagtaaagttcttcaaattctgtgtttttgcgcgcatagtctatgatgaagcggcacacctccgtggcatagccttggttctgaaattccggtgctatcatatagcccagttcatcatgctcaagccctgccctgcctatcagcttccctgttttcctggaaaatacaagccacatgccatactcgtaaaagccatacatgttctctatatatgccttctggtattcaagctctgtctcgtagtcataaagcggttcaacaaagtctgtcatgcccggcttgtcatagagctcatagagcgcaggaaggtctgacagggacagctcacgtatcagacacctgtctgtctcgccgatgtcccacgggatgtgattataccgcctgcgcacccgctccagatactcaatatcaagctctgcaaggctttccactgcatagcgcgtgccgcactgcggttctcctactgatgctatgccaagtgagtcagctatttgcttctgctgcctgtttgatactatccagatgtagttggcgggagctttcggtattcttagatttcccgtattagctttcgcggtgttatctgcagattctgtatatcctgaattattttctatttcatacacacacaaattattctgctgctcatctggcagtttcttctgcaactcatccagcacttttcccggtagtgcaccatacagtttttcttgcagctcttctgacatagatgccttgcctgccacacttctccactgcagcttgaatatctcgccatgatagtaaaaagaggcaagttttgcgcttgcctcatcgataattattatcattaaactgtctccggctccggatagtccactccgaaggtctcaactgttactgtcttcatgacctgggcctcaagtggtttgtccatgtagtctgtgcgcacctctgcgatcttgtttaccacatccatgccctcgattactttgccgaatgccgcatactcaccgtcgagatgtggtgcatcctgatgcatgatgaagaactggctgcctgctgaatcaggtatcattgtacgtgccattgaaagtacaccggctgtgtgctttaagtcatttttgaagccgttgtgtgtgaactcgcccttgatttcatagcccgggccgcctgtgccgtttccgtcaggatctccgccctgaagcatgaagcccttgattacacggtggaagcatactccgtcatagaagttgtgattgattaagctgataaagttgtttactgtgtttggtgcgatttccggataaagctccgccttgattacatcgccgttttccattgtgattgttacgattggattctgtgccattatttttctctctttcttttataatattatgaggcttggagaatatccattcctcgcaattattaaatatcgaattaatttctacccgattgattttacctaattttactcactcagagcctcgactaccttcggaaactccatgaagtgtgatgccttcaccagtatggtgtcgccctccttcacatatgaaagaagctcctgtgtcatagtctccctatcctcgaaatagtggatgtctacatcggacgatttctctgcggctccggctgcatattcctttgccagctctcctgcggcaaaaagtgtatggatatgattctctccaactgcttcgcctacctcatggtgcagctttttctcatcgcttccaagctctcccatgtctccaagcactgctattgtcctgccctttgcatgtgaaagcacctcgatagaggatttcatggatacaggatttgcattgtagcagtcatctatcactgtcatgccgtgtgttttgatgaaattggtacggcctgcgattgtctctgctttctcgattcctgatttaatctcagctattgtgagaccaagctgcaatccgacagccgctgccgccatggcattgtatacattgtgctcacccgggatgtggatttgtgcatcgaactcaccctctggagtgacaaaatgagccttcatgccgtcgaagcccaggttttcaatatttgtggtatatactgatttatgaacgcctgaagctgattccttgccatagtatatggcaggctttccatttaccgtctgcactgtggccagcttgtcgtcatctgcattcagcactgcgaccgcatccggcatcatatgctcaaagcactctgtctttgctttaagcacaccatctctgtcgcccaaaaactccagatggcagtagccgatattggtgatgaccatgacatccgggcaagacatggtagaaagtctgtgcatctcgccaaaatcagatatgcccatctcaagcactgctacctgatggctttccctgattccgaaaatggtgagtggcaggccta

SEQ ID NO: 43 - DNA, 15736 bp, unidentified
  source 1..15736: mol_type = unassigned DNA
atgaaaaaaggaaataaatacggaacgcatagagtaatttcaccgaaaggagtattgccacaaccagctgataaactggataacaatatggacgaaatctatgataacgagattttgatcgatgtgcaaactctgaatatcgattcggctagttttactcagattgaagaacaagccggaggggataaagctaaaattgccgagatcatgctgggaattgtagagaaacaaggaaaacaccgtaatccggtgaccggttccggtggtatgttactgggaacggtggaaaaaatcggagatgctttagttggaaagaccgatctgaaagtgggagataaaatcgcaactttggtgtctttgtcgctgactccgcttcgtatcgataaaattaaagaaatccgggcagatgtcgaccaggtagatatcgatggtaaagctattttgtttgaaagcggtatttatgcgaaaattccgtcagatctgccggaaaagttggctttgtcggctctcgatgtagccggagctccggctcagactgctaaattggtgaaaccgggagatacggtattgattatcggtgccggtggtaaatcgggtatgttgtgttgctatgaagcaaagaaacgtgctggtgttaccggtaaagtaatcggtttgtgccatagccagagaagtaccgaacggcttcagaaattaggcttctgtgattatgtattctcggccgatgcaactcagccggttccggttatggagaaaattgccgaactgacgaatggtgaaatgtgtgatattacgatcaataatgtgaatattacggatactgagatgaccagcatcttgtgtactaaaaatgacggattggtctatttcttctctatggcgaccagttttacgaaggctgctttgggagcggaaggtgtcggcagcgatgtgactatgatcgttggaaatgggtataccaaaggacatgctgagattacactgcaggaacttcgtgaaagcgaggcattacggaagatatttacagagttgtatgcctgaatggtcgggattttataatcccgacgaattaaaaatatgtttttatggctagcagaagaaaagagtttttccctgaagtgaccgatgaacaatggaacgattggcattggcaggtgaagaacaggattgaaactttggatcagctgaagaaatacatccggctgacaccagatgaggaagagggtatccgtgagtcgctgaagacattacggatggcgatcacaccttattatctgagtctgatcgatcccgataatccttattgtccgatccgtaaacaatcggtgccgaccattgaagaattgcatcggtcaccggctgatctggaagatcccttgcatgaagacggtgattcacccgtaccgggactgacccaccgttatcctgaccgggtgttgttcctgatcaccgatatgtgttcgatgtattgccggcattgtacccggcgccgctttgccggacatcacgattgtgccactccattggaaagaatcgataaatgtatcgaatatatcgctaataccccccaggtgagagatgtcctcctatcgggaggggatgccttattggtcagtgacgaacgattggaatatatcatcaaacggctgcgtggaatccctcatgtcgagattatccgtatcgggtcgagaacaccggtggtgttaccccagcgcattacgccggaattggtaaatatgcttcggaaatatcatccgatttggctgaatactcatttcaaccatccgaacgaaattaccgaagagtcggcggctgcttgtgcccggctggccgatgcgggtatacctttgggaaatcagtctgtcctgctccgcgggatcaacgattgtacacatgtcatgaaaaaattggtgcacgagttggtcaagatccgggtacgtccctattacatctatatctgtgatctttctgtgggtatcggtcatttccgtacccctgtatcgaagggaatcgagattatcgagaacctgcggggacatacttccggttatgccgtgcctactttcgtcgtggatgctcccggtggaggcggaaaaattccggtgatgccgacctatctgatttctcagggccccaatcgggtggtgttgcgtaattttgaaggcgtggtgactacgtataccgaaccgacggattacagagacgaatgccactgtgaagagtgtgagaagcgccgtaaaacagaaggagtggctgagttgctgagcggagaacgcttgtctctcgaaccggcgaatctggatcgtaagacacgtaatctattggcgaaaggataaattatttgtgattttggatttaccgtttcattcgattgaaaggataaatccggaatcataaatgaaaatgctgaacagatgggttttgttgatgacatatccgattacaggagtctggcaattgtcggattggagaaaaatacagggaaaacagaatgcctgaattacatccttcgcaggataaaagattcggcagatcggttcgctctgacttcgatcggaattgacggagaaaaccgggatcaggtatgtcaaaccccgaaacccgagattatcgtgccggaaggaatgatattcgttacctcggagaaacattaccgggagaggaggttggtggctgaaatcatggaaatcgatgatcatcggactgctttgggacggttggttatcgccagggctaaaacttcgggaaaagtattgctttcagggcctgcggatactgccgggttgaaaagtctgatccggcatatgaaagatttcggggtacgaacgaccttggtcgacggggctttgtcccgtttaagcctggcgtctcccaccgttacggaggcgatggtcttagcgacgggggctgctgtttccgggaatattcgggaattggtgagacgtacccgttatgtttgtgatttgatcgatctggaagaggtggacgaagttttacaagagaggttggatgccattcaacaaggtgtatgggcggtcgggccggagggagaatgtatcgatctgaaattgccttctgtgtttatgctggagaaaagtggaaccgatctgctgcaatatgggcatcggatctttattgccggtgctgtgagtgataaagtatttcagtttttacgcgtacagaaacagaccgtagaattgatcgtccgtgattttaccagtgtttttgccgcacctgagtctttttatgcctttttacgtaagggcggaagagtacaggtgcttcatcgtagccggcttttggccgttacgatcaatcctcagtctccgggaggattacttttggattcgttgcgtttgcagcaagcattggaagaaagcttgcaaattccggtgtatgatgtgaaaaaaatagaaaaagtcggtaaaaaccgttgaggatatgattttaagggaagcgataagacaagtcaggggattccgttatatgatcgaacaattggatatctgttcggctgtaggccggagggtattgtatgatctgccctggctcgattcgaaatctcggttggaggccgaatttgaacgtattcaaaagatcatggtactttttgaacaacctgaaaatgaatcccggctggaacgtttgactggtaagctgatgcaggtgagagatatccgggggacgatcgggcggatggcgatggagcaagtgttggatgatcttgaattgttcgaattgaaaacttttgctttgtgctcggaagaaatcagggaacttgtcgaagaatggcggattgttttactcccggaactggagccggttgtacgtttgttggatccggaagggaatcggattcctcatttttatatttatgatacttattcggctgagctggccgggctgagagctgaaataaaacaaaagagccttcaaggggcagaagaacgggaattagaagcgttgtatgtacaaagtgtggttttggaagacaaggtacgcgaagagttgtctgtgcagttgagaccttatcacgacgatttgaaacaggctttggaagcggtcggattgctggatgtcgtattggcaaaagccagacaagcaataagaggacaattgactttgccgcaaattccggaagagggggaaatggtgttcgaaggtcttttccatcctcagatccgggagattttagaacaggaaggaagagcgtttcaggctgtagatttgaaattggaaaagggaacgacggtgattaccggagccaatatggccggaaagacagtgttgttgaaaagtgtgcaattggcgcaatacctgatgcagttcggtttttatgtacctgcccggcgggcgggtatgccgctcgtggaacaagtcttgaccagtatcggggatgatcaggatgaattgaacggtctctcttcttatgcggctgagatgttgcgggtggatgaaatgatccggcaagtcaggcagcgaagtaaaattttggtgctgatagacgaattggcccggacgaccaatcccgtcgagggacgggcaattgtgaatggggtagtggattttttgactactcaccgggtgatggctatggttactacccattatagcggaataacggccgaatgccgtaaattgagagtgcggggatttgtagagaatcgggttgaagggaatatgaccctgaaaaatatcaatgagtttatcgattattcactcgaagaagacagcggagaagaagttccccaggaggcgatgcgtattgcctggatgctggggatcgaccgtggagtgttggaacgggtggaaaattatttgcaggaagaaaatcctgattggaaaaagacagtacagtagaaagaaaatatatatgaaaagtaaattaggaatagattttgataaagtcggacatgcccgtgaaatggcccgtaagattgctgaccaggtgcaggattttgtggatggctatacgacagtggctgtcgaaaggacattgtgtcgtttgctgggtatcgacggagtggatgttcatgctgtccctctgccgaacattttggtagacgagctgaaagaaaagaacgtgttgggagaaggaattttattctttctgggtaatgtaatggtggaaaccggaatgactccgcaggaaatagccgaacaagtggctgccgggaaagtagatgtcacccgggtaccggtatgtactcccggccagcgggaaaaagcgttgcaaccctatatcgaggccagtatccgtcggatttccgacaaccggaaacggcgtgagaattatatcgcaacgatcggagagggagcaaagccttatctttatgtcattgtcgctaccggtaatatttacgaagacgtggtacaggcacaggcggctgcccggcaaggggcggatgtcattgctgtgatccgtacaacggggcaaagtttgttggactatgtaccctatggggctacgacagaaggattcggcggaacttttgccacccaggaaaattttcggattatgcggaaagctttggatgaggtaggagaagaagtcggtcgttatattcggctgtgtaattattgttccggtttatgtatgccggagattgctgtgatgggagctttggaagggctggatgtgatgttgaacgatgcgttgtatgggattttattccgggatatcaatatgcagcggacgttggtcgaccagtttatgtcgcgggtgatcaacggctttgccggagtgataatcaacacaggcgaagataactacctgactactgccgacgctgtcgaagaagcacatactgttttggcttccgatctgatcaatgaacaattggctttattggccgggctgccggaagaacaaatgggcctgggacatgcttttgaaatggatcccatgctggaaaacggctttttgtacgaattggctcaggcccagatgacccgggaaatttttccgaaggctactttgaaatatatgcctccgacgaaatttatgaccggaaatattttccgcggacatattcaggatgctcttttcaatatgatcggaatctggacttcacaaggtattcaactgttgggaatgccgaccgaagccatacatactccatttatgtcggatcgttatctgtcgatcgagaatgcccgttatatttttaataatatgaaaaatatcggagatgaagtggtctttaaagaaaacgggattatacaaaacagggcgaaagaagtgttggataaagctaccgttctcttggaaaagattgaacgggaaggactttttacagccttggaaaaaggaatttttgccgatatcaagcgtcccaaaaacggaggaaaaggcttggacggcgtttgtgccaagggaaagaactatagcaatccttttgtagagattatgatgaacagataacaaaaatcgtaaatcaaataaagattatgagcggaggtttatattcaacagaagggagagatttcgatcaaaccctcgatctgaaaaagataaaaccctacggggatacgatgaacgacggaaagacacagctgagtttcactttacctgtacctgccggagatgaagcgatagaggctgctaaacagttgatgaaaaaaatgggatttgaaaatcctcaggtggtgtttcatcaggaactgacgaaaggatatactttttttaattgttatggaaattgtgtacacacggtagattatagccatatctatgtgccgaaagtggaatcgaccaagtgggatatgggagagaccgatcagtttgtccgggaacatatcggtcggaaaattgtggtgatcggagctagtaccggaacagatgcccatacggtgggaatcgacgctattatgaatatgaaaggttttgccggacattatggtttggagcggtatgaaatgttcgaagccttgaatatgggtagccaggtgaccaacgaggaatttatcgctaaggctatcgagttgaaagccgatgctttattggtttcgcagaccgtgactcagaaagatattcatattaaaaatctgacggaactcgtggagatgttagaagccgaaggattacgggacaaagtgatcctggcttgtggtggtccccggatttcacatgagttggcgaaagaattggggtacgatgccggcttcgggatgaatacctatgccgacgatgtcgcctcgtttattgcgcaggaattggatcgaagaatgaatcattgaaaatatacaagctatggaaaaagaacaaatcagggaagtgattgccaggagagtggcaatggaactccacgatggagacgtggtgaatctgggtatcggtttgccgactttagtaccgaattatctgcctgaaggtgtcgaggtcattttacaaacggagaatggattgatcggtatggggccgactcctgctccgggagaagaagatccggacttgatcaatgccggcggtggagcgataacggctctgcccggagcggccagcttcgatagtgctacttcgttcggtattatccggggcggacacgtagatgtcagtatcctgggggccttgcaagtagatgagaaaggagatttagccaactggatgataccggggaaaaaaacaccgggaatgggtggagcgatggacctgctgatgggagccggtaaggtgatcctggccatggaacatacggcaaaaggaaatccgaaaatcctgaaaaaatgtactttacctttgacagccaaggggcaggtgaatatgatcgttacagaaatgggagttatggagatcacacccgggggaattgtactgaaagagatacatcctgagtttacggtagaacaggtgcaggcagctacagaagcaactctgatcgttgccccggatttaaaaaagatgtgctgaacgacgaaagcgtattgaaggaaatcacgatggaggatggatggtggatacctctagcccgaatcgtaaactataaattaaaaaaggtatggatttttcattatcaaaaaaagagatattgtttcagcagatgatcagagcatttgctgagaaagaagtaaaaccgctggcggcagaagtggacgaagaagagagattccctgtcgaaacggtagaaaaaatggcgaaactggggattatgggtatccctttcccggtggaatatggcggagccggtggtgataacgtattgtattctatggctgtagaggaattgtcccgggtatgtgcaacgaccggggttattgtttctgcccatacctctttgtgtgcttctccgatctatgaattcggaaatgaagaacaacggaaaaaatatttacccaaattatgttcgggagaatggatcggagcttttggtctgaccgaaccgaatgcaggtaccgatgcctctgcccagcagacgatggctgttgctgaagaggatcattatgtgctcaacgggtccaaaatatttattacgaatgcagcttatgcacacgtttacattgttatggcgatgaccgataagtcgcagggtacacgaggaatctctgcttttatcgttgaacgggattttccgggattttccatcggtaaaaaagagaaaaagatggggatccggggatccgcaacctgtgagttgatttttgaaaattgtattgtgcctaaaggaaatatgctgggtaaaccgggtgaaggatttaaaattgcgatgaagacgctcgatggcggacgtatgggaattgcttcacaggccttgggaattgctcagggagccatggatgagacaataaaatatgtgaaagaacggaaacagttcggacgctctatcggacaatttcagaatacccaatttcagttggccgatttaaatgccaagatcgaagctgcccgtttgttggtgcggacggctgcctggaagaaagacaggaaaatcccttactctgtcgattcggcacgggctaagttatttgctgctgaaacagcgatggaagtgacgacaaaagccgtacagttccacggagggtatggatatacccgtgagtatccggtcgaacggatgatgagagatgccaagattacggagatttatgagggaacctctgaagtacagcggatggtgattgctgctgctctattgaaataataatgttttccgcattgaacttataaaaagagaatacatgaaaatagtagtttgtataaaacaagtacctgatacgacagagatcaaactcgatccggtaacaggaacaatgatacgggatggtgtacctagcattatgaatcccgacgataaaggtggattggaaatggctttggccttgaaagataaatatggtgcgcaggtaaccgttattacgatgggaccgcctcaggccgacgatattttgcgtgaagcttttgccatgggagccgaccgggcgattcatttgagcgaccgtaagtttgccggtgcagatacattggctacgtcgaatgctattgccggtgctttacggatgctggatttcgacctggtcattaccggccggcaggcgatcgatggagatacggcgcaggtaggacctcagattgccgagcatctcgatttgccacaagtgacgtatgtcgagaatttggaattcgatggtgacaagttgtttacgatccgtaaatctaccgaagaaggatatcaaaccgtacaggtggaatctccctgtgtcgttactgttctggctacggcaaacaaagcgcgctatatgtctgtgcggggaatcgtagaggcatacgatcgggaagtggaaatctggaattttaataatatcagtgtggatgaagctaaattgggattgaacggttcgccgacgcgggtatggaagtcttttaccaaaggagctaaagcagccggaaaagttttcgaagtggaaccggccgaagctgtagatgttattatcgaaaaattgaaagagaaatttattatttaatacatgattttagaggaaaaccgggaataatccggtgaaatctaaagtttaaaatctgatgaagatggataaatctcaatataaagacgtttatgtattcgtagagcaacgggaaggagttattcagaaagttgccatcgaattattggggaaagcccgggagttggccgatagcctgaatgaaaaagtggtggcgatgttgttgggttatgaagtggagggtcaggcacaggaattgatcgcttatggggccgatgtcgtattgtgtgctgacgaacgggagctggtacaatataataccgagccttacgctcaggcgattacacagattgtacatgagcgtaaacccagtatcgtactgattggagcgacgacgatcggccgggatttgggccctcgtttatccgcccgtttagagaccgggttgacagccgattgtacgggcctcgctatctcggatgaacgggatttgctgatgacccgtcctgcattcggaggaaatctgatggcgacgattatttgtaaagaacaccggccgcaaatgtcgaccgtacgtccgggagtgatgcgcacgaaaccgaaagatgaacaacgtgccggaacggtagagaaggtgaatattcatttcgataagtcgaaatttaaagtgcggattctcgagacggtgaaagaacaaaagaaccgtatcgatataacagaagcgaagattctcgtatccggaggccgtggtgtaggtaatacggagggatttgagatgctcggaaaattagcggaaacgctgaatgccgaggtttcttcttcacgtgccatggtggatgccggggttatgcctcatgaccgtcaggttggccaaaccgggaaaaccgttcgtcccgatctgtatttcgctatgggtatttccggagctattcagcatttggccggaatggaggaatcggaatttatcgttgccgtgaacaaggataaatatgctccgatttttaacgttgccgacctgggaattgtcggggatgtgaaacagatcgttccgttgctgaccgagaggttggcaaacatccggaaaactgacaaataaaagcccggacatggagtatcaaaaattaatgctggaaaaacaagatcgtgtttgtctggtaaagatcaattatccggaggcattgaatgccttgaatacggtgatcttgcaggaattggaccgggcattcgatgaaattgcagccgatccggaaaccgatgtggttattctgacaggcgaaggacgttcgtttgttgcgggagccgatattgctgaaatgagtgtgatgaaggccgaagaaggccggcgtttcggtgagttaggggctgctgttttccggaaaatcgaactgatggctaagccggttattgctgccgtgaatggatttgctttaggaggaggatgtgaactggcgatggcttgtgatatccgtatcgcctcggctaaggcgaagttcggtcagccggaagtgggacttgggatcacgccgggattttccggtacccagcgtttaccgcgtttagtcggattaggtaaagccaaagagttgatttatacggctgcggttatccatgccgaggaagcttgccggatcggactggtgaacaaagtggtggaaccggaagaattgatgaatgagtgtatggctatggcaaagactattgctgctaaagcgccattggcggtccgttatgccaaagaagccatcaaccggggagtggaaacggatatggataccggtatcgtcatcgaaaacggtttgttcgggttgtgtttcgcaacgaccgaccagaaggaaggcatggaagcttttttatggaaacgtaaacccgaatttaaagggaattaaaatctttgtaatttaaatttatcgattatgaaaatatgcattgttggaacagggactatgggacatggtattgcccaggtatttgcccaggccggacatgaggtattgttaaaaggccgttctgaagcttctttggcaaaagctcacaaagctatggataaaaatctttccagaatggtggaaaaaggtaaattggaagccggggttaaagatcaggtattggccaggattaaagatacgatgaaatatgaggattgtgccgatgctgatttggtgatcgaggcgatagctgaagatatggctaccaagcatgagatattcaaattgttggacggtatttgtaaaccggaagcgatattggcaaccaatacttcttcgctttctataacggaagtggccgctgtgactaaccgtccggaaaaggtgatcggtatgcatttcttcaatcctgttccggctatgaaactggtggaagtgatcaaaggccggctgacttcggcagaggtgcatgatcaggtatttgctttatcgcaggaaatcgggaaagtgcccgtcagtgtcgaggaagctcctggatttatagtcaaccggattctgatccctctggtgaacgaaggcatcggtatattagctgacggagtggcgaaaaaagaggaaatcgatgccgctatgaaattaggggctaaccatcctatgggaccattggaactgggtgatttgatcggattggatgtttgtctggctattatggaagtgttgtaccgggaattcggtgactccaaataccggcctcatcctttgttgcggaaaatggttcgcgctaacttattgggacggaagaccggagtcgggttttatgactatcggaaataatgaggagagtcttctttaccgggatacgatgttggggaatatttccccaacatttttactttttccccactttctacaagctgcgattcttaatctgttgtatgtaatgtattgataattagtgtattttgttgattttgtgcttgtggcatcggatttgttctgtttaaggataaaatctaactctaaaaaataatagtatgaaaaagatcgtcattttaggaatcggagcttctatgttcttcctgggtagttgcgtagagagttctcagaaatataagtctttacaagcccgtctggattctttgagtacagtacatattatgcagaattccgaaatggagagtatgctggccgatttgaacgatatttctgccggaatgcaatcgttgcgggatgccgaacgtttattgactttggaaacaattaatgaaaataaagacaatagtaaatccaaacagcaattgaatcagctgaaaaaagacgtacaggctattaccgaggcgatcgcttcttataaagaacagatttccaaactcgaaggtaagaataaaagccagtcggccgagtttaagagattgattgccggcttaaatgcggaattggatcaacgtacacagaaactgaatgaaattactaaacaattggctgagaagaatcagcaattggcagtgaagaccgaggaagtcgctaatctgaccgagaatgtggaagctttggataaagccaataaaagtcagcaaatgacgatcaatgaacaggatatggcgattcatcagggacactatttgattggaaaccgcaaagagctgaaagaagctgaggtaatttccagacaagggattttctgtccgccgatcgtatcgtcacaagcacaaaaagccgactttaccgatttggatatccgtgagatgaaggtgatcccgttgaatagtaaaaaagcgaaattactttctgtccatccggctgattcctatactttggagaccggtgaagatggtaatatgaccctgaaaatcaatgacgaaaataatttctggaaacaaacaaaatacctggttgtgatgattgaataaaagcgggaataattttaactgagagaggcatacccaaaaagtatgtctcttttcttttttcacaacgattattcttgtcgggagagaaaataatgaaaaaaaactagccgaagatcatcaggatttttaaaagtgtatccgatgagaaaatcgctttcaatttgtcgatacttttgtatttcagtgttttaacactgcttactgagatgtttatttcctgtgctatttgctgattgtcgaggccttgaaaagcgagctgcatgacttgtttactacggggaggaagtttttctatttctgcgagaatctgcatggcgacgtctgcttctacaatgacattgaagatattgacctctttcagaggatggttgtttagatatttagcttgcagcttgcgggttcgcagccattcaagtgaaaggttatgaaccagcatatacatataattatcgatattctcaatatttttgttttttccttgtaattcccagaggcgtgcaaaagcttcctgtacaatatcttgggcagctgttttatcgccaaggaaacggttggctgcgaaacacaaagagacatacagacggttcactaagctttcgaacttggttgcagctgtatttcccgtttgatatgttgtgtttttatccatttttataacatccttttaaggaattgctctacaaatttaaaaaaaattataattccgttcatccttttcgttactgagttagtctttaatatgaattaagagaggaaaatgtagtaaaatagattcagatgaacagagaaagtttaaatatattgttaaaaaaagcctattgtcaacagctttctgaggaagagagggaaactttgaagttgtggttgggagagtcgggagaaaatgcagagatgtataaacggttgatgtcgggacagagcttgacggaatattcggattgggtgactggattcgacctttcccgggcgatggaagctatccggagtaaggtgaaacggaacaggcaaaggagaatccggaaatcagtaagttgggtggctgcctgtgtaatactctgtctgggcataactttcgttttttatttcacttcaatggattcagaacaggtattgacagaacaaatggctgctcagatacagcctggctcggcaaaggcgatattgactttaggggatggacggcaagtggctttggataaaaaacccattgaattgcttgtcaataaacaacaaatggtgacgggagatagtgcgaccttgaattattctattgtattgcccgcttctgagaccgaacagatacaacggcaggaagtggcagaatatcatacaatagaagttcctgccggaggagaatatcatctggttttggctgatggtacaaagatatggttgaatgcagaaagttctctggtatttccggttgaattttccgggaataagcgacaggttattttgaaaggagaagcttattttgaggtggtccggaatgaacatttaccttttgttgtgagtacagtctccggggtacaaatttgtgtattgggaacacagtttaatgtggaagcttacgatgaccgggaaagtgtaaagactactctggtggagggaagtgtagatgtacaggcagggggcgaaaaggtacgtttgattccccatgaacaattgcaatatcataaaaatactgctgaaatggaagtcagggaggtaaatgtacgggagattatcgcctggaaaaacggttggttcgtctttgataatactacattgggggaaattgtaaaaactttgcaacgttggtataacatagaagtagaatttatacgtcctgaattagaacatttgcgtttcaccggtgatttaagcaggtatgactcttttgatgctgttatccgaatgtttgaagatactaaaaaactgaatatgagtgtgatatcgaacagactaattgtcgatagaaaataa

SEQ ID NO: 44 - DNA, 27374 bp, unidentified
  source 1..27374: mol_type = unassigned DNA
cgggctgaccacaccggcgatctcccagtggccgatggtggtatccttgcccatgctctgctcctgcaggcgggcaaaggcaccggcgggcgcgtcggtcttttcgcccgcggtcacaccgtcaatgttgaacaggcccagctttttcaggttggggcagttgaaattgggatgccctgcaatggcccccagcgtgttggtgccctcgtcgccaaaggcggctgcatccggctccgcgccgatgccaaagctgtccagtacgatcaaaaatacacgcttttccatatgttttcactccattttcctccggggctgccccggaacagtcgcacttttgcttaccttcattataagcaaatcccgccggttatgcaagcgctttgtggtggaaagttttttgttcaaacctgatgaaatcttagcagtttctttgcaaagatttttcttgcgctattgtatccaagagcttataatgtatagtggtatggttttttgaaacagccatattggcgtatactgccgccgcgggcgcaaagcaatcactgcccgccagagagcagccagcttgggctgctgcgtcaagatagagagcattatagcgtaaacgttggaggtattttatgagaaaaacgaagatcatctgcaccctgggcccttctaccgataagggcgatgtcctgcgcgacctgattgcaaacggcatgaacgtggcccgtttcaacttttcccacggttcctacgaggagcacggcggccgtctggcaaagctgaaagctctgcgtgaggagctgggcaagcccgttgccgccctgctggacaccaagggccccgagatccgcctgaaggagttcaagaacggtgtggagatgctggaagccggccagacctttaccctgaccacccgcgaggtggagggcaccaaggagatctgctccgtcacttacaaggatctgccccaggacgtgcagcccggcggcaccatcatgctggacgacggcctgatcatgctgcacattgagcaggtcaccgacaccgacatcatctgcaccgtgctgaacagcggcaagatcaagaccaaaaagggtgtcaatgtgcccggcgtgcatctgtccatgccctacctgagccagaaagaccgcgaggacatcatctttggcgtgcagaacggctttgacttcatcgctgcttcctttgtgcgcaccgcacaggatgtgtacgacatccgcaacctgctgaatgagtacgattccaacatccgtatcattgccaaaatcgagaaccgcgagggtgtgaacaacatcgacagcatcctctccgcagccgatgccgtcatggtggcccgtggtgacctgggcgttgagatcgacttcaccgagctgcccggcatccagaaggacatcatcgaccgctccttctccttcggcaagcccatcgtcactgccacccagatgctggacagcatgatggtcaacccccgccccacccgtgccgagatctccgacgtggcaaatgccatctacgatggcacctccgccatcatgctgtctggtgagaccgctgccggtgactaccccgtggaggccctcaaaaccatgtccgccattgcagagcgcaccgagaacgaggagcactaccgcgcccagcgccacgccgagatccagatcagcgtcagcgatgcaaccgctcatgctgcctgcctgaccgccaaggacgtgaacgctgccgccatcgtcaccgtgtccgaatccggcaacactgcccgtctgctgagcaagtaccgccccaagcagcccatcattgcctgcgttatggacgagcaggtgcagcgtcagctctccctgagctggggcatcacttccctgctgatgggccccgcccacagcaccgatgagctgatcgagatgtccaccgctctggccgagaagaacggctacctgcacaacggcgagctggccgttgtgaccgcaggcgtgcccgtgggcgtttccggcaccaccaacatgatcaagatccacatggtgggcaactgcctggccaccggtgtaggcgtgggccgcggcaagaccgatctggtctccgccagcggcaaggcctgcgtctgccgcactctggaggaggtcaaggcaaagttccgccccggcatggtgctggtcgttccctccaccaccaacgagatgctgggctatgtccgcgatgccgccgctctggtggtcgaggagcccggcctgaacagccacgctgccatcgtgggcaactccctgctcaaacccaccatcgtgggtgctgcaggtgcctgcagccacatccgcgatggcctggatatcgctgtggattgtgcccacggcagtgtccagcgcctgcaggcctaatcctgaaggagaacatcatggaacgcattgcaagcttctgtgtcgatcacaccaagctggaccggggcatgtacctgagccgccaggatggtgatgtgctgacctgggacatccggatgaagaagcccaatcagggcgattacctgaccacaggtgccgcccacacgctggagcacctgtttgccacctacgcccgcaacagcgcagtgaaggacggcgtgatctacgttggccccatgggctgccgcaccggcttttacctgctcacccgcgggctgaccccggcgcaggcattggagctgaccgtggattccttccgcttcatggccgcctttgagggggatatccccggtgccagcgaggtggaatgcggcaactaccgcgatatggatctgcccgccgccaaggccgaggcagccgccatgctgccggtgctggaagcactgaccgctgaccagctgcactactaagcgatacagcaaaagacctccccatgcaggcagcacctgcacggggaggtctttttgcgtttcaggaaagcgatctgcggagtgcttactccacgatgatgctcttgccggtcatctcagcggggacaggcaggccgatatagggcagcatggtgggggcgatatctgccaggcagccaccctcgcgcagcttcacatcgccgcagccaacggccacaaagggcaccacgttggtggtgtgggcggtaaagggagtgccgtccgggttcatcatcttctcggcgttgccgtggtcagccgtgataaaggcgcagccgcctgcgtccagcacagcggtgaccacctgatccacagcggtatccacagcctcaacggccttgacagcggcatcgaacacgccggtgtggccgaccatgtcgcagttggcaaagttcaggatgaccacatcatacttgccgctctcgatgcgcttgacgcactcagcagccacctcaggggcgctcatctggggctgcaggtcgtaggtggcaaccttcgggctggggatgacgcagcggtcctcaccctcgtagggagcctccacaccgccgttgaagaagaaggtgacgtgtgcatacttctcggtctcggcaatgcgcagctgggtcttgccgttctcggacaggtactggcccagaacattcttcagctccacgggaggataggcgacctcgcagttgggcatggtggcatcgtactcggccatgcagacatagttgacctgcttgcggccgccgcggcgctcaaagcccttgaagtcgtcatcgcagaagatgcgggtcatctggcgggcacggtcaggacggaagttcataaagatgacggtatcgccatcctgcacgcggccgccctcacaggtgacgcagggcagaacgaactcgtcggtcttatcggcagcataggatgcctcaatggcctcggcagcgttggcagcgtggttgccctcaccgtagacgaatgcggcgtaagccttctcctcgcggtcccagttgttgtcgcggtccatggcgtagtaacggccggaaacgctggcgatcttgccaacgcccagctcatccagcttggcctgcaggtcagccaggaagcccttgccggcgtggggatcggtatcacggccatcggtgatgcagtgcaggtagacttcctttgcgcccatgtgctttgccatttccagcacgccgaaccagtggtcagcgtggctgtggacaccgccggtgcccactaggcccatcaggtggatggccttgcctgcctcaatggcagccttcatgttcttgaccagcacggggttcttgaacatctcaccgtcccggatggatttggtgatgagggtcaactgctggtaaacgatgcggccagcgcccatgttggtgtggcccacctcagagttgcccatctggccatcgggcaggccgacagccatgccggaggcctcgatggtggtcatgggatattttgccatcagggcatccagatggggggtcttggcggcgaccacggcattaccgtaggtctcgttgggcacccagccaaagccatccatgatgcacagaagtacaggtttcttggacataacgttgaatctcctttgatttagaacaaatagcgcccggcacagcgctggaaaaacggcgcagccgggcgctgggaaaacaggtcagagggccttctcagccgttggaagcggcattgacgataacagcaaaatcaggagccttcagagatgcgccgccgatcaggccgccgtccacatccttcttgctcagcagctcctcgcagttcttggcgttcatgctgccgccgtactggaccgtgacagcctcggccacagcctcgccgtacacttcgccgatgaccttgcggatctgagcgcagacctcctcggcctggtcagcggtcgcggtcttgccggtgccgatggcccagatgggctcgtaggcaatgaccacgtttgccatctgctcggcggtcacgtcgcgcagggcgatcttggtctgcatccgcaccagttcctcggtcacgccctcctcgcgctgctgcaggctctcgcccacgcagatgatgaccttcaggcccgcattcagggcagccagagcgcgcttgttcacggtctggtcggtctctgcaaagtactggcggcgctcagagtggccgacgatgacgtactccacgcccagatccaccagcatatcggcgctgatctcgccggtgaacgcaccggacttctcaaagtggacattctcagcacccacatggatgttggtgcccttggtcttttccacagcggtgaccagatcggtgtagggggtgcagataacgacctcacaggaagcatccttgacggcggggatcagctcatccaccagcttggctgcctcagtggcggtcttgttcatcttccagttgcctgcaatgattgccttacgctttgccttatccattctaacgatctccttatcacaaaatacctccccgccgccttcggtgccgcctctcccagaaggagaggcaggataaacgacatctcctgcctcccggatggggagctggcgagcgtcggcaagcctgagagatcttattacccaaaatgaaaagtgcggcggcgtatatgccgccgcacctcagtgatgctggttcagatgcttatgcgttctggatcacagcgataccaggcagctccttgccctccagatactccagagaagcgccgccgccggtagagatgtgggtcatcttgtcgcccaggcccatctgctgcacagctgctgcgctgtcgccgccgccgatcacggtggtagcatcgctctcagccatagccttggcaacagccagagtaccggctgccagggtggggttctcgaacacgcccatggggccgttccacaccacggtcttggatgccttgacagcatcggcaaacagcttcatggtctcggggccgatgtcgcagccctccatgtcagcagggatggcagtgacaggcaccacagtgacatccacgggagcgtcgatgggatcggggaagtccttgatgcaggctgcatccacgggcagcagcagcttcacgcccttctccttggccttggccatcatttccttgcagtaatccagcttggtatcgtcgcacaggctcttgccgacctcgtagccctgtgccttgacgaaggtgtaagccatgccgccgccgatgatcagggtatcgaccttctccagcagattggagatgacgttcagcttatcggcgaccttagcgccgcccaggatggcggtgaagggacgaacgggatcgttgactgcgttgcccaggtacttgatctccttttccatcaggtaaccgacagcggtatccttgatgtagtcagtgacacctgcggtggagcagtgtgcacggtggcagctgccgaatgcatcgtcaacgtatgcatctgccagagaagccagctcctggctgaactcaggcatgttcttggtctcttccttgcggaaacgggtgttctgcagcagaacgacatcgccgttgttcattgcggcaacagcagcctttgcgttctcgcccacaacattatcgtcatcagcgaacacaacggtcttgcccagctttgcgctcagagccacagcaacgggtgccaggctgaactttgcctcggggccgttcttgggtttgcccaggtggctgcacaggatgaccttagcaccatcgttgaccagcttctggatggtgggcagagccgcattgatgcggttctcgttggtgatcacgccgtccttcatcgggacattgaaatcgcagcggacaaggaccttcttgccgcagtaattctgatcgtcgatcgttttcttacctaaacccatggtaacaaactcctctcaaattcttttcgttcggaatcgaattttgctcttcatcgggggccgcgcactgcgaacttccccgtacatccttattataaacaaaaagcgtgtgtattgcaaggacgggagatggataatttattaacaaacatttgttgcagaagcaaagaaatgtggtgattttgccggaacgcaccaaaaaacgccgttttttctgaaaaagacccgctgcagggagtgttcgcccccgcagcgggtcctatccattcaggatattttccggaacttctgcttcactttttccagatattccagcaccagcggatttttcatacccagcaggatgaccgcgtatgcagccactgagcccagcactgccgccagaatgcagatgagattgggcagagccagtgccttgaccccggtacagacaagaacgatgcccacacagccgcagagcaccgagccaacggtgcgccggtcagcagagaccgtaaccaggcccctggagcagcggatgcagagcatcatggagcacagctctgccagcagggtggtaaaggccgccgcattctcccggaaccgcgggatgagcaggatgttcagccccacgttcagcagaccgctgaccagcgtgatccagaacagttccttttctcttccgcagggcagaagcgcgcaggaattgtacagccagccaaacagacagacgatcagggcaaggctcaggatctgcaggggcatcaccgcatccagatagctttccccggaaataaagaggacgacctcccggctgagagcaaacagtcccaccacagccggagccaccactacgatgagcgcgttaaagatattgttgaacagcttgttgaagtttgccttgtcccccacgcccgcataatgggacagccgcgggatagacaccaccagcaccgccgaaagcaggttctttacaatgccatagatcttacccgccaccgagtaaatacccacattgtaatctgttcccagaatgcccagaatcgtggtatccgagctgacataaagggtcgttgccagcgtggatgcaaagatgatgaggatgggcttgaggtgctttttccagtcgatcttccttgtcagccggatggtgcagtaccgccgggcccggaaaaaattgagcacattggcacctaccgctgcaaacaccgtgatgcctgcatagatgcagtagtcatcccgggtcttgacgaaggcaaacagcatgaaaatggacagtacctgaaacagcaggccccggatggtgatataggtatactcctcaaagatcgtgaacacccattcggtgccgatggtcgtaaagaagatctgtaaactcagcaccagcatcaggtcggtataggcatggagctttgtccagaagagcatcgtcaccgccaatgccgcataggtcagggccgtggagatcatattgatggagaacatctccgatgcaaaagccgacagtttttcccggtcattcacatagcgggagccctcacgcactgcataggatgaaataccaaggcctgcaaacagcagaaaatacccgcagacggagcttgcaaagttcactttgcccaggttttccacctgaagaacattggaagcgtaggggaatgtgatgagcgggaagataatattcatcagtgtcttgaacgcactcattgctgcattcagactgagggactttttcattcagatctccacttcataagtttttctggcctgtttctttttcagccagctgttccagagcagatacgaatacaacgtttttataaaataccgatactgccctgcacgaagccagcctagcagaagggggccagcatttctcttaaactcccgttccgcttcggcacacgcctgctccataaaagcatcatccttgcagtatttcaccacaatttctctacaccggagcgcatatccggcccgtgcagaccgatacacgaacggttcatctgcaaacacttcacagatacgccgccatgccttcagctctgtcagttttcctgccgaataatgcccgctcgtcaccgagtcatcgttgacatagtaatagtaaagcgccttgtcgatgcaggcaattttttctgcctttcggatacattttgcaagaaacagcgtatcctcaccaattttcaaatcagtatcgaacacaacgtcttgtgtgacctcacggcggtaaagcgcaccccagcacactgtatgtgccttccggctgttccagtcatatcgtctgaccggcataacactgactttctccgtctcatcgcttttcgtctgcgttcgcccggtcgtgcccagaagatccagaccgtagcaataagcaatctccgcaccggtctcatccagcactcttttgagccgttctatgcactcggcgtggagtgaatcatccggatcagcaaaagaaatcagcgtgcctgtacttttttccaatcccagatttcgcgcagaggaaacaccaccgtttggcttgtggtatatcttgatccgcagatctttttccgcgtagcgctggcagatggaaagagagttgtctgttgacccatcatccaccagaatgatctccagatcccgataggtctgaccgaggatgctgtccagacatttttccagatacttttctttgttatagatcggcacaatgatactgacggtatcgttcagcacaaattatcctcccttattttgccgccgggccgtttttcagcaggaacagttttgcatacagcctccggctgcatctgagcagctgatacttccgctggctgctggtgcagagcagctttgccgccgccgggtcgcactcctgcagaaaggcctccatctttgcgcggcgcaccgtgtcctgcatcagatacggatagcagtgctccaccacgctcagcatggcggcatcattttctgacattcccgggtatgcttcccggatggcctgatatttctgatagcccatatccagcttatcctcgtagaacttcatgttcctgcggtgaaggatgctgtccgggcgctgatagtaataatacagtggcaccgggcggtacgcgaccttgctgcactgctgaaaaatacggtatgtcgtgccctgatcttccatcatccgccccagtggatagcgcacctcccggaacagttcccgcttgtagagcttgttccaggcaaaatcccccagctcatccgagacaagggtgctgcggatggcctcccggcctgtcatacactgcaccggtacggtgagttctgccggggcaagctcttcctcccgttcaaacatccggaagcccaccacagcaacatcagcatcctgttcctgcaggtcacggcaaagcgtttccaacatccggctgtccagaaagtcatcactgtccacaaagcagagatacgttccctgtgcccgttcgagccccgcgttacgcgctgcagagagtcccccgtttttctggtggactgccgttacgcgttcttcctgtgcggcatattcgtcgcagatggctccactggcatcggtggagccatcatccaccagcaggacctcaagatcctgataggtctggtgcaggatgctgtccacgcagcggcggagaaatcgctccacattgtagaccggaacaatgacactgatcagctctgtctccatgttctgttccctcagaagaatgtttctctgccgatgtggaggatctccgaggtgtacgggcaaatggcattgttgccctgaatatacgcctgatagatccagatgatgaccagcattccccacatggtagccttcagcagcttgcgcagacgctcatcctccacgcacttgaccacacggccaatggcgagataacggaagaacgcaaaatacaggcagatacggtagagcggcacattgatgttgcgcagctgggccgttgccatctcgatcaggatcatcacgatccagaaatcagcatccgagcgggtaaagcggcggcggccctccccttcctcttttgcgtaccagcggtacagcacaatgggcaggatcagaaaaggcagacgcacaatgatgggattcagcgtgaaaccgcccgcattggcatcataataatatccgtaaagtcgatcaatgaaatcaacattcagggccagcctgaccacagccttgctgaagaaggcaaggtagaccgaaaatgccgccaagccacccttgacccaccagttgtcgaaatgctgaagcaggatatagatcagcagcgcgccaaacgagataaaggtggcattgtggaacaggcaggagaccgccagcagtaggaccgcccagtgatactttttcttccacacaaagctgaacgccagaaatgccacgcccagcgccacagactgccgctcggcattgtaggtatcgccataatacaggcagaggtaagccagccagccatagggcacggagacatactccttatactgcaccagcccaatcataaacaggccgcaggccagcaggtccaccataaagtagagccagtggacatcaccaaaaacatgggccgccagatagaccagcgtcataaacagcggctctgttttgtgccgctgccggatgcaggccagcaggccatcctgcagctttgcatccgctacccatccctcatacaccacgctgtccgtgccaatggacgggtcccgcaagcctgccaataccgccatcaccagcaccgccagcgccaggcagagataaaagcccttctcgttgtttttcttcgtccgcaggtgctcgccataggcggcaatgcccacagaaaccgcaaaagcccccagataaatcagcataacttctccattttatttttcgactgtgtgtttatttttccattctcccagcccataaacggcataaaacagccgcttgctgatcagaagtgtttccaccttgatccggtctgcctttttggcccagggccgccgggcaagcgcccggtgttcctgcacaaagcggcagatccgtgcctgagcctccggatagctggcaaaatcgccatccagaatgcctttcagtgtcttcaggtatgtaaccagctgcaggtattccgcttctgctttcagcacagggaccgtttccgcaataaagcgggtcacgtcttcgcccacatccagaatgaccagattcttctcggcaatgccgctcttcatggtcgaaccggtatggatgcggtaatcgtacatcggttccggaaacacttccacttttgcacagcgggcaatggcccgatacatcaccgcatagtcctcgtacaggatgccaacggggaactgcaaatctccccaaacctcccgccggaagaaaacgccgcctgccccatgcccgatgccctgatgaagcagcatccggcgcatggtctcttcccggttcagcagctctgggatctggtgcgaattttccgtccgtccctccggctgctctgtcgagaacatttccagcggggtaagggccgcgtcagcaccatctgcctcacagcgctccacgaactgggcaagggccgtggagcggatcagatcatcgctgtccagcaggtaaaaatattttccctgcgtctgttgcaacccaacgttccgggcatcggactgtcccccattgggcttatggaacacccggattcggccatcctccacagccagttcatcacaaagctccccgctgccatcggtggagccgtcatctaccaaaagtagctcccagttctggtaactctgcgcctgcacgctctgcacacagtcccgcagatacggataaacattatagaccggcacaatgaccgatacaagcggttttctttcctccaaccggatccctccactttacttttttccacgccattgcgtttttttataaacccgtcgggtcatggcatcgccgctgtaggaaagcgccgccgccagccgggcctttttgcgggcctgcgggtccagcagaacattccggcggtattttttcacttcctgccagagagccttctctattttttcatgttgcttgtcctggatctggaacaggatattgcagacattgctcagatagcggcactccgccgcacggctcaactgggggaaatcacgcttcacattttccatcagtgcatggcagtgccgtacactgtccagctttctggggttgaaggccatattctggatgctgctgccccgctggaaatagtagtaatcccggtttgcgatatgtgccgccttatgggcacgctttatcacctcgtaggcgaccgggatatcctcatagagcttgcccaccgggtagcgcacaccctcaaacagtgcacgcttatagagcttggtgggggtggtcacctccatgccctcctgatacaggatgcggcgcaggcattcctcccggctcaggatctcgaatgcttccagacgctctgtgggcacggactgcaccggctggccctcgaacacctcttcaaaacagctggctgaaaaatccgctcccgcctgctccagtgcccggtacaggttctcgatgtaataaggtgacacccagtcatcgccatccacaaaagagagatactcccctgctgccgcgtccacaccagcgttgcgggcatcggacaaaccgccatttttcttgtggagcacccgcacccgggcatcctgtgcagcatattcatcacagagggtctcgctgccatcggtggagccgtcgtccaccagcagcagctccatgttctgatagctctgccccaatagactgtccacacagcggttcagatatggctttacattataaacaggaacgatgatgcttaccaaagggtccatcttatctcctcatttcagcaggtcgaagtaaaactcttccagcttcttcgcctcggtgacgatatcaaagccgcctgcccgcatctcagcagaggtatcccgccgccgggcattttctgcagcccggatcgccgcatccgcccagactgccgggttttcctgcaagctcaggtactgcatctcgggcaggacctgagcctcctgcggcacctctgtggaacagatgaccggcaatgccgccgcttgtgcttcgatcagcacgatcccaagaccctcataccgcgaaggcagaacaaaagcatccatggcctgatagaactttgcgggatcgctctgtcggcccagaaagcggacattctcctgcagccccagtgcctccgctttccggcgggcagcggcctcgttttccccttctccgatcagcaatagaacggcatccggccgttgcttgcagacctccgccattacatccagcagaaattcgtgatttttggcatagcagaaccgcccgacatggcccagcaccagttcatcccccaggccaagctcctgccggacggctttccgtttggcggcatcataagtaaagcggtcgagctcaatggcattgttgaacacccggaaaggcttttcaccataaagccagctgcctgccgttctggagcaggcacagagccgggtgggatacactgcggcaaagggacggagcaggtacttcatcacatttttagccccttctcccctgcccaccgtagaatggttatgcgcgatccggttgggcacccctgcacgctttgccccccagagggaaagcacgctcagggtgttcatgtgggagtgaacgatctggtatccgttctgacggaacagccgcccgatctcccgttcatactgcggcaggtgggtatatttgggcaccacatacacccggccgcccagccgttcgatctcttcccgctggggcagggtcgagccttccagcgcgaaaaaatcaaactgaactctggaacggtccatgtggcggtagtagttcatcaccaccatctccacaccgccgtagttcatatccgtcatcatctgagccacacggatgggctgtgcattctgctccatggtcataccagctccctgcggtcacaatcctcgaaccagtcccggaagctctcctccagcgtatagtggaacttgtaatcagtggcggccagctttctgccgcagacattggtggataccatcagtttccggacacgggcgggatggatgcccacctttttgcccccgatgggtcccagaatgcccgccgcaaacagcagcagtccggcgggcaccaacggcacatggcggtgcaggccggtcgccttctgcattgcatcgcagatttcttcaatggtataggccggctcgtaggtacagttatagatctctgctccggtgaaggaatgatccagcatccggtacttgaagaagcgcaccagctccttgacatagatgcacgccttgatggtgtccttccggccggcatagaaaaagtagcccttcttctgccccctgtacaggcgggtcatgttgccgtgctcccctttgccataaacgatgcctggccgcacgatggtcaactcccgggccggatcacgggcctgccagatctggtggatcttttctgccaccagcttgctgatcccatacggcgtgttgggcgtcggcagagtctcctccgtcttaaggtcctcagacgcgccatagggtgcaatggagctggtgaataggatcttccggatgccgtatttttccgcaaatgcggtcacattttccgcgccccggatatttgtttcaaaataggcttcttccgggtggccgggggtgcggtggaccgctgccagatcaaagatcacgtcctccggagtcggaacgaactcaaaatcgatgggcttgcgcacatccagccggatatactgcaccccatcgttcttttccacaatgcccggcaccacgccctcttccccgggcatcacaagatccaggtcgtagatcacgtcgccgggtctgacgcactccttcagcagcaaatgaatgagatgggtgccgataaaaccagatccaccaaaaagaatataattcattttgcccctttccgatcaaacacaacgcccaccgtcctgaacagcaggtagatatccatccagatggaccagttgtcgatgtactggacatccagcttgaccacttcttcaaaatcatcaatatcgctgcggccgcttacctgccacaggccggtaattcccggcttcatggaaaggcggcgcttgtgatggctctcgtactgccggtactcatccagcgtgggcgggcgggtacccaccaggctcatggagccccgcacaacgtcaaaaaactgcggcaactcatcaatgctggtgcgacggatgaagcggcccacccgggtgatccgggggtcatcttccatcttgaacatcaggccgttcatttcgttctgggccatcagttcctttttgcgcgcctccgcgtccacatacatgctgcgcagcttgtggatgtagaacacacgtccattccggcccacccggcgctgcttgaagatcagcgggccgggactttccagcttgagcgggatggccaccaacgcaatgatggggatactgatgatgcatcccacgatgccgcctacgatatccatggtccgtttcagcacctgatcccgcagcttgagttccaccgtgcccatcgtcacaacattgccgcccgcacagcggctcagttcccggctgatgcgcaccgcactggtctcatcacagcaggctttttcaatccggtccagcaccggcaggcggaaatggaccgtcagccccatgctctccatctcctcgagatagggcagcatgttctcctcactctcctgcgccacatccagatacacttcatccagcgctgcctgccgcagccagtccatgaaattatcgaagttcgcctcgatcttcaccccatcgatttcagtatgaagctgctccggggcagcttccagaatggcaaggccagtcacacgcttggaccagtcctttttcagctcttccagaatggggcttgcgttctcctgcgtggtcaccactcccacaaggctctgaatccccttggtatagcgggagcgtaccagcatctttttgaggacagcatgagcgcccgtcatcacaaagacatcgatgacgggcacaaacaccagaaaatagcgggagtgcagcatggaagccttggtcagcgccagacaggccgcatcaatgagagtcagcaaaaaattgaaccgcaccgcaatttcaacttcacgaatcggagtgcggttcacgatattttcgctctgatcaaatgtaaaaaaggtcaggatataggccagcagcaataaaaaacaggcttctaccagatcgtccagctggaagtcccccatcttgtgcagaacacctgcggtcagcccccacgccagcccgatgctgagaaccagagagagcagatcaatcagaaacaggtatccatactgcagtttttcacgtttcgtaatcatactgtttcgttgtctccatttatttttaccattttatcatatcgggggaagggttgcaatagatggagatcgaatacgtgctgcttttgtcggcacactgcaaatgtgttgtgccattttacgaaagcaccttatcgcgcccaaaatggtcagcaaaaagagccctttctctcgcatcacacaagagaaagggcgcagtcaagctttattcagctcaggagaaactccgatcagcagttctcagcgaagtacttaatggtacggaccatctgagaggtgtaggagttctcgttgtcgtaccaagacacgacctgaacctgataggtgtcgtcgcagctacgctgaatttttgcacttttccaagtagttcttcacagtttcgtaacaacagttacaataccagaacataccgttgtcgtaccaaaaccggtttgttcgtaccacgattatatcacgtttcagcgtcatttgcagggatttaatccgtttcgcttctgacctgcatttttcagatttcagcgtatatttttacgacattccacggttcaaacgccttgggtctagggcttccgccggggcagcagctctcccaagtactctcctcagaagcgctatgacggctagattgccaacatgttcctgctgattaactgaaatttctccggacgtgattttgagccatggtgtgggaaatgtagtcatttatgtttgatatggagcaatttcacttccttcgaaccacgataattgtcaaagtagttgtcagtaaaaatatattttacttgcaggtcatcagatattgttctgtacctgacgtgagggttcctcccttcacaacatttactgcgtaagaaatctgccaagagcagaacgctcctggcagcaaaaatttttattttacttcatttgtaagttacaatcttgactttcttcttgtttttaaaagcctctgcagcagctcacgctctgccggatcagctgcaaacaaaaacattactgcgccgtacactatggtatagaggagaataccgaggcccaattgtattacagataccggatcatgccaaatcattcccttgatgaaacatgcagccccggtgagaagaactgccaaacttatgatgccaattgtagttttccagaactttatcatgttcaggccgactcttttctgaaaaaaccagttcattatcaatccactggtcagaaacatcgaaattcctgtggaaagtgccgcaccggtaatcccaatcctgcgtgcgaataacactgttgttataatgttcagtagtgcacttagcaggtaaatcttcgcgcgaaagccatactgtcctttgacctgtagaatgcataatccaaggttttgtgccagatcaacagagaacggcagcattacaatgattgcaacccaataggctgcctcatagccttcgccgacccatacaagcagaaattcacgaccaaaaatgatgaagccggacaaaaccagcagtatcacaaaaaatgtagcccttccaacccgaataaacagatccgaaaccttctgcaatccattttcttcctgatacaacacactgactcgcgggtaaaaaacacctgcgatctgtgtcccaaactgcatatagatcatgtagatctgcgcaccaacagagtataccgcaacaactgcggtgctgaacattttgcccaaaatgacctgatctgttttccagaaaatctgatctgcgatgcatccgatcaggatggccgaagacaaggtcaaaatttcttttgccacttttgaattcggtttcagcgtcggaatccggatttctaacctgcactgaacataccaccagcgaaacaggatgttgaccaaattcaaacctgcaatgactgctgtcacagacattgcataagggagcctcatcacgcagaggatcacaagcagtggctgaactgtctgaagtaagatcccggaaattttcaaaaacacaaagcgttcctgccctgtgatcactgtcagatagactgaactcaacagagttgcaaccatattgcagaacagcatcccaaggatgatggtgctctcctggagttccgcccccgtaaaggaactggcataaaaagcccggaagcctaaaattacaacaactccaagccctgtcattccggctgccatcagccgatagatgctgcgtgctgtggaaagaatttcccttgccaactgttcatcctgttttccaagtgcattgcagtaattgcgcaggactcccgcagacatacaggattcaaataccgtgacatacgagaaaaaggagccaacgatttgataaagaccgtattcactttggccaaggtaatgcaacaataccggaacatagataatgttgaccagaacatttaaaatgacttgaatatatgacagaactacaccggttctacgttcagtgttcatttattttcttaacaattcctttaatagtttttcttattttgcgatagtatttcggcggcgcaacatttgatgctgtcatatagattttcagcctcatcgttaacggttcctttttgagatatggattgtttcgccattccggaaaacattgatcaatccactgccgattttcccgaatcaagctgtactctccatgatagctgctcagtactcgttccgtgttataatacaacgcatgctgttcatagacttttccctactgatttttactcttcatgattccattgtattctaattttcttttaagtcgaaacggaagaactaataccgcgctaactttctgtccaacatttactccaaaacgctcaatacattttttattgatcgccgcaatttgcttatccgtttttccataccaagatgccgcataatgatggatagttctcgtatttttagttatatttaattcaccacttttgtaattcatcgggcaaaaatactctggcggataaatcgtaataccctctaccgtttgaatttctctatccggtttccatccgtgttgcaccaaaatctgtgtcgtataagtcacaattgttgttgtatcaatcgcaccattctgatttcggaaatgccgcttttcataaaaatcaagcatttctttgtatatgcctaatccgggattagcagccatgcctaatccgggtgctacagtatatcgagtttcgcagcccaaaaaagccccctgttttaaaatttcattcagcggtttaataatttcgacatcagtatcaaaataaatgccacccttatgatacaaaatccaaaatcttgcataatcgctcacaaatgcccacttttttgcctcataagcttcccgaacataatcgcagcagttcaagtcgaaattgctttcattccactctctaatttcatattccgggcagtactttttccatgatgcaatgcacttttgcgccaactctggaagaggatttcctccaaaccagcaataatggattatcttcggaattttctgattcatcattttttcatcctaaccttctactttttcattcccaaaagaattgatacggcataattccttgggcactttgcgctatcatcaagaactcatagagaacgagaaaaactatcacacatatattcactatcttcgcttgttttctgtttttcatttccacaatcaaatttggcagtatcgtcatcacacttcccgtaaaataatacggaattcgatttacaatttgcactgaaagtgaaatccaatagaacagaacacctactgccaacatttcatactcgattttgaactttcttttttttgtagattttgcccccatacttaagatcgtacaaaacattaagatgatcaaaaacagcgcagggtgaagaacatttccagcgttcgcatattcggtctgcaaatagctcgaatatccaatcagtcttgccccgatttccgttaatattcttccgaaaactgcacaaataccacataacgctacaatcattatagacagcgacaaatttatcttacatttcacaaaagaaatcggaagtagcaaaaagaaaactgcagcactcgaatggaaactcattgctatcaaaatgatcaatatataccgaaaatattttctctcatccagcaaactcactgcttgcagaacaattcctatcgccaacgcttgccgcaccagactgaactctaggaaatagaacattaaactcgcaaaaatgtatattgaaaggtatatatctttcgaatttcggattatataacgataaaacaacaccatagtcggtattgcccatgctgccagatattccgtatatgttgtgcatatgttacctagcagatgtatatacgctctgctgcccgcctcaatccaatagatttcaatatcatttttgctccattcaagcagttgaatatacatcgctgtgtctataccaaccgttttttttctcaatgaaacaatagccgctaactgaagaaaagtaattattacgaaaagctttttcccgcattttaagaatcgtcttttcaacacgaagccttctgcaatcatcaaaaaataatttattataaaaatcatatcattcaaatgcactctaatgtcagcaatacttttctgctcagcggcatttttgacgtaagtagctggaagtaatcttttcggacttcactcttcagtcttttgtaaatactttttagatttttatttttcttatcatatccacgaattagcattttagaaagcattgtaaaatttgctctttttctcgccaaaatagcaaatctcaaataatccggctgttcctgttcagtgcgagttacaacacgatcccatacggaaagatagtccaaatctttttccgaaaaagtagaacgtgtaattccactgttattcacaaaataatgatgtaggatttgatttgtttccaccataaaatctgctcttgtataaaactcataacatgcttctacgtcttcgtttaaagtaattacatacctaaagttttctaaaatggaagtttttataagcttattccacacacctgtattacttggctctccgtttacccgaaaaaaataatcaaacatttttcttttgtcataaacggttatatattcttttggctgaataacttgaaaatcggggattgcatcttgccttgaggcacacgccgtaatttttgcctgcggatacttttcaaaaagactccttaagacttcgagaaagttcaattcgatccagtcatcggaatcaataaagcatacatattttccgcacattacatccattcctgcatttcgcgcagaactaagaccgccatttttcttgtgaatcactcgaattcgcccatcacgctctgcccacgcatcacatagggcaggacaattatccggagagccgtcgtcaacaagaataagttcaaaatcaggataggtctgatttacaatagactctatgcaccgatcaaggtatttttcaaccttataaactggaacgattacacttatttcaggcattatattctcccttgcaccttcttgtttactattaaattgacaggaaccaatcatctacatccatatccacttttctcataactagatatttactttcttttgctctctgcaaatcatcttctgttaaaatatccgggctgttcgcacctttttgaaaatgtaaatatgtaagatagtctgtattttcatcagcataaggtgacaacatcaccaatgtatgaaagaaggattcatccggacaagttgtattttcatagaatttataatattccggatgtatagtgaggtactgcataatccaatcaattgtttctctctttaatgcccaccatgaacttccaaaatagaaatctatccctggctgttttctctcgaaaattttccacgtccgattgtatcctccggtgaattcaacccaccccctcttgatgatcttttgccacggttttctgccaataagtttaattggaaaatagatttgattccgtttatccaaattgttttgttgatgacttccatggtttttactattccaatactgaacaaaattcgtgccattgtgttcttcaaaaaactttacaattttatctgctgaacgaagcggccaatcttgtccactaatcaaccaatagtagtcatagccccccccccccttataccagcaacagctgtattcaaaagatttagcgttgccgtaacctgcgaaatctgtgcccattccaccgaaacacgctgttcatccggaagcacaaacacattttctctatgaataattttatctgcaaagtcagccttcttatcaatatgaagatagcaatcaatatctgggtgattcaacctctctaggagaaggttgatttgtttcggacttttatggcattgaatcaaaattgcaattctcatgtcttccttactttctcagtactttctcaaacataaactttcgcagccagttcggagctaacgctgatccgctacgaatcacgctgctctttatgtactgaccttttcctataaagccttgctgcttcatgaacttgaacagctttgcctgcgccttagcatatttccatccggcacgtctcagatacatatccgagccggcccgcatatgcagcaacggctcttgaatgttatagccccgataccctgccatcagcatccttagccaaaggtaatagtcctccagcaagtagaagtcctgataagaaccaacagcttcgactgcggatttcttatacatcacgcaggggtgattaaacggattgcgcttctttgcaaattctacaatttccgcattcgtctccggcggcactcgcctcgtatcaaccgtgttcggattagtggtaaactcctccacaatgccggagcaaatgctcacttccgaatgtgtgttaaacacagcaatctgtttttcacagcgatccgggtacgcaatatcatcgctatccatccgagcaaccagctcatttttacagtgcttgatgccttcattcagtgcattgccaagtccaccgttcttagaaagacgaacaacatttaaagtcatccccatctcttgctgcttttcggcaatcaccttgtccagcggctcgtttaacggtccatcacataccagcacgaagtcatctgttggaacagtctgcccttgaatactttccattgcctgtttgaggtattgtggcttttccttataatagacggacattaagacactgtaattttgcatcattcttccgtctcctgccccatcgccgtggtcgcaccttctgccacaccttccgtgctctccggcatgaacaaaattttgacggttgccagcatgatcttcaaatcctcgatcaggcttggatgtgcaatgtacatcaggtccatctgcagcttatcgtagggggtggtgttatactttccgtacacctgtgcataaccggttaaaccagcctttgcctgcagacgcagcgcaaactccggcatctcctcacagtactgggcggcgatctccgggcgctccggacgagggcctacaatagacagatctcccttcaagatattgagaagctggggcagctcgtccagacggcaggcacgaatgacgtggcccaccttcgtgatgcggtcatctttatcaccggtggaaaggcgtgctacaccatccttttcagcatccactcgcatagaacggaacttcaggatctcgaacggtttgccgtctttggtaaggcgaacctgcttgtaaaaagccgggccaccatcggacttgacggcaatagccgtaatcagaaacaacggactcaggataaccaatgctgccagtgagatcacaatgtccattacccgtttcacaaacagaaattccgggcttgccatatagcgacccacacgcagcatgggcagatggaacatatgcatcggctgggcaccgctcataatcacatctcccacacgagggatcacaaacacattgatgccctgtcccacacagtattttaggatgatattgcgctcatggctgtggacaccgctgatgaacacgctctgcattccatccagcagactcaggtcgttcaggcattcctcaacgttcaatgtcatcttgacatcgtattttttcgagaggccatattcattgatgagcttttccagaccatgccggacatcatagaccactgcggtgggctgaggagggaaggtccggaaataccagcgatgggcgcattttgcccagattgaagccatcacgacctgtccgacaatcgccgcaatacccggcagaatattgcagagccgccgggacatcaggcagatcacgatatacagaatgccgtctgtcgccattgccgccagcacttgcccataaatcaactccgaaatgcgttgcaaagacatccagaacgcatcgtagactttacctaacagaaagaacaacaccgcaaacagaccgatcatggcccagttgcccttccaaccaaactttgcatagatctgatacgaataatacagctcccaacaaagtgcaaacggaattgtgatcattaccaaatcgatgatttttacgattttcaacatcacatcatgctgaaattttgacataataccccaatagctcctttagctttttcttttgctcttcgctcaactttttcgacccgctttgcagcagccgtttctggttgtacacccatcggctcagccaaatgccatccgcagtcttgtattttgccggaatctccagatttccatattgctttttatattcctgcgccagttcgtaccggtgctgccacgagtccggtttctcccactgcattccgatggcatccagcaactcaatgcgctcttgtgataaaatcgcattgctcttctccggattccgatatgcatactgctgccgccgcacccattttccaagggcatagccctccggcgaaacataggccaccggaatgtcaaggtttccatttgcctcaaaataccgtttcgctgcctgatagacctcgttccactggcggtcattacggtttccccaatagattcctattttttccagacggccgatttggtcttgggaaagcatttcttttgcatatgccgtcctctgattcaaaatccacgcacccagcttttcgccctcttcagtcgtgtaattgacaggaacattcaagtcgccgtgcttggcggcataattcatagcaagtgcatatccctgttcccatttggcatcaaatacgctccatatcattcccatctgatctagttgtcgaatgcgctcttccgtcagctttccatcgtttcggcgtttccgcgcattgttgatccactttcccagaggatagtcatctttcgttttgtatttcgccgggacctgcaaattcccaaactgttcccgaaattttctcgcttcttccagaccacgctcccatgcggcatcgttgcgatttccccactccatcccgatgctgtccagccgtgcgatttgcagttcggtcaagttccccggaatctgtcccgcacgaacacggcgctgggtcgtcagccattcgccaaggctcaatcccgccggtgtggtataacgctttggaatattcaggctaccatgctccgcatagtaaatgcttgcctccgaaaaataatggtcccaactagaggacaagcttgcttgcaggcgctcaaacagcacccggcagtcgtgcacctgctcgatgacctcaaaccgctcggtgacgatcttatcgccctcaccgttggcattcaggcggtagaccgcctcctgcatctcgccctgtaaccccgcaatgctacacagaccctcaaagttgttgactacatcgaggataagcggtgtagaattttccccagcggtcaaagcgcgtccaatctgctgcttgtagatgatgggtgaaatggtgggccggaacaggatgacacctgaaatgccttctacatgaacgccctcgttcagcatgtcgatgcaaaacagcagcttcaggcggtcactttcatcggccttgaagtcggcaaaagccttgtctgtaccggggtcatccgagtaggcttcgtagaccgccacttccgcattcacctttgcaaaccactccggcacatgagagatcatttcgtccatgtgctccttgttggcgcagaacacgatgtactttccagacttgttcgtgatatgatgagcgaaaaccttatctaatccatccgcctgttccagcgcccggcgcagggcatccagatatttttgattcac

SEQ ID NO: 45 - DNA, 12848 bp, unidentified
  source 1..12848: mol_type = unassigned DNA
caggcagggagtctgcaccttgaccatcatgtagccgtcttccagcatacgcttgaccgtgaggctgttgccatccttctggatgtcagcaacataggtcacctgaggcaggtgcagcttctcagcgatctgaggaccgacctgtgcggtatcaccgtcgattgcctgacggccgcagaacacgacgtcctcggggccgacgccgatcttattgacagcagcagcgaggatctggctggtcgcgaaggtatcagaaccaccgaactcacggccagagaccagaacagccttatcagcgccgcgggccagcagctcacggagcataccctcggccggcgggggacccatggtgacgacaacgacttcgcagccggtctcgtccttcagcttcagagcggcctccagagcgttcaggtcatcggggttggtgatggttgccatagaggcacggtccagagtaccatccgccttgacagccaccttaccggaggtatcaggaacctgctttacacaaacgattgctttcattgtaaatcttgcctcccttacttcagcagcgcgccggaaatgaccatcatctgcacttcgctggtgccctcgtagatctcagtgatcttggcatcacgcatcatgcgctcgatggggtagtcacgggtgtagccgtagccaccgaacagctgcaggcagcggcgggtcacgtcgcttgcggtgcgggctgcgatgagcttagcctgagcagcctcgacgctgtagcggacctttgcgccattcatagcttcctgcttcttcagagcggcagcgtagaccagatactttgcagcctcgatacgggccttcatctcggccagctcgaactgggtattctggaaagcggagatgctgcggccgaactgcttacgctccttgacgtaagcgacggtctcctgcagagcgccctcggcgatgcccagagcctgggaagcgataccgatacggccgccgtccagagtagccatagccagctggaagcccttgccgcgcacacccagcatacggtccttcgggatgcggcagtcctcaaagatcagctcgcaggtagaagaaccacggatgcccatcttatcctcagccttgccgacggagaagcccgggtcggtacgctccacgatgaaggcggagcacagcttggtgggacggcccttcttgtcgagaaccttatcggtaacagcgatgacgatgaacacgtcagcgtagcctgcgttggtgatgaagatcttggagccgttcagcacccagtaatcgccatcttccacagcagtggtctgctggccctgagcatcagtaccagcgcccggctcggtcagaccgaaagcacccagccactcgccgctgcacagcttgggcaggtacttttccttctgctcgggagtgccgttctcataaataggtgctgcgcacaggctggtgtgtgcggaaacgataacaccagtggtgccgcagaccttgctcagctcctcaacagccatgacgtaggacaggacgtcgccgcctgcaccgccaacggaggtggggaagtaaatgcccatcatgcccagcttgcccatcttctcgacggtctctttggggaagtactcttctgcatcaactttcttagccaggggcttgacttcgttttcagcaaactcgcggtacatcttctgcaccatctgctgctgcttggacagagtaaaatccatcgctatatcctcctaacggatgtttttctttcagcacagggcagctacactcatgtcctgtgcaaacaaattcctcccggccgttttcttcgggacgaccgagagaaatttcaaactaatttacagctcgtcgacaggggtcttggtgcggtctgcgttgtaaacgtagaagcccttgccagacttgcagcccaggttgccgccgcggaccatcttacggatgagcgggcatgcacgatacttgctgtcgccggtctccttgtacaggacgtccataatggcgaggcagatgtccaggccgatgaagtcgcccagctccaggggacccatcgggtggttggcacccagcttcatagcggtgtcgatgccggcgatgttggaaacgccctccatcttgataaaggcagcctcgttgatcatcgggatcaggatgcggttgacgacgaagccggcagcctcgttgacctggaccggctgcttgccgatggcaacggagatctccttgatcttctcgacagtctcagcgggagtgttgcagccagcgatgacctcgatgagcttcatgcggtctgcggggttgaagaagtgcataccgaccagaggacggctgacgcccttgccgatctcggtgatggacagagaagaggtgttggaagcgaagatgcactcgggcttgcagatcttatccagctcgccgaaagtggtctgcttgaccttcatatcctcgaaagcagcctcaacgaccaggtcgcagtcagcgcacaggtcttccttcaggcccggggtgatagcagcgacgatagcgtcagccttctcctgagtcatcttgcccttagcgaccagcttttcatagcccttcttgatctttgccagaccattctcggcccactcctgcttgatgtcacacagagcaaccgtgttgccctcgacctgagcaaatgcctttgcgatgccctggcccatagtgccagcaccgataacaccgatcttcatgggaaatctctcctttattatatcttttgaatgtagtgcctctccgtgcctcccctttccggggaggcgctgcagaggcgttatggtttagtttagttgttggtgaacactgccttgggcttcggcttctcacggctcaggaagcaggccatgccttccttctggtcatgagtctcgaagcagtcgccgaacagcttttcttcgacttcgacagccttctcgatggggaggctgatgccgtcgttgatcgccttcttgcagttgcgcacggcgatgggagcgttcttggcgatcttgttggccagcttcaggacattctccatcagctcagcctgcggatacactgcgttgaccaggccaatgcggtaagcctcgtcagccttgatgttcagtgcagagtagaccagctgctttgccatgcccatgccaaccagacgtgccagacgctgggtgccgccgaagcccggggtgatgcccagaccgacttccggctgaccaaacacagcgttgtcggagcagatgcggatgtcgcagctcatagccagctcattgccgccgcccagtgcaaagccgttgacggctgcgatgacggggatggggaagctctcgatcatcaggaacacatcattgcccagtttgccgaaagcctcgccctcggccttggtcatggtgctcatggagccgatgtcagcgcctgccacgaagctcttgtcgccttcgccggtcaggacgatgcagcggatggcggactggtcaactgcctcaaaagcagccttcaggtctgccagaacttcggggttcagggcgttcagtgccttcgggcggtcgatggtgatgatctcgactgcgccctgcacctcggtttttacaaatgccattgtgaaaacctccattcaggttatatcttattcaaaacagcccccggacaaggggcaagtctccggtctcgcccactgtccgggctgtatcaatatccggagtgacccttcaaagggaaattagtccatctcgacgatggttgcgcagcccatgccgccgccgatgcacagggtagccagacccttgtgagcaccacgatgcttcatagcgtacagcagggtgacgaggatacgagcaccggaagcgccgaccgggtggcccagagcgattgcgccgccgttgacgttcagcttgtccttatcgaagcccagagcctcgccgactgcgatggactgtgctgcgaatgcctcgttggcctcgaccaggtccatatcagcaacggtcaggccggtcttagccatgaccttcttggtagcagcgatggggccaagacccatgacctcaggctcgacgcctgccagagcacctgcgacccaggtagccagaggcttcacgcccagctccttggccttctcttcgctcatgatgaccagagcagctgcgccatcgttgatagcggaggagtttgcagcggtgacgatgccgtccttggtgaaagcgggcttcagctttgccagcacttcgggagcgctcagacgggggccttcatcggtatcgaacacggtatcgcccttcttgcccttgatgacaacaggaacgatctcatccttgaaagcaccgtccttgatggccttgtcagccttcagctggctgttgtaagcgaaatcatccagcatctcgcgggtgatggggctgtagccgtacttcttctgataggtctcgttggtgcagacgttctcagcggtcatgcccatgtgcttgttgaagccgcaggcatcccacagtgcatcgttgaccatggtatccacgatctcgctcttgcccatgggagcgcccatgcggtagccgtaacgagccttctgcagtgcaaagggagccatgtccatgttctccatgccgcctgcaaccacgatatcagcatcgcctgcctcgatcatctgagcagccatgttcacgcagttcagaccggagccgcagaccacgttgacggtgacggcaggagtctcgatgggcaggccagccttcagggaagcctgacgagcgacgttctggcccagaccagcctggatgacgcagcccatgtaaacatgatcgacctgctcgggtttcacgttagcacggttcagggcctccttgatgacgatggagcccagctctgcagcagggacgtttgccagagtgccgccaaacttaccaatagcggtacggcaagcagatgcgataacgattttcttcatgttaatagcctcctgaatttatacgtttcggggtttcgtaaaactatttatcaaaaagcccgagggcctttctgcattataaaaggtatcagaacatctttccttccgcccggagctgctccactttggcgtggatggcctcctctacgttgggcgtcacgaacttggagatgttgctgccgtagcgggcagcctccttgacgatggtggaggaaaggtagctccacttgatgctggtggcaaggaacatcgtctcgatgccgggcatcagtgcgtggttcgtctgggcgagctgtatctcgttttcgaaatccgtcaccgcccgcaggccccgcaccatcaccgaagcgtggcgcttcttggcgaactccacggtcaggccgtcgaagctctccaccgtcacattcgggatgtccttgcagcactcccgcagcagcgccacccgttcttctacggtaaacagagggttctttgcgctgttgatgagcactgccacaatgagccggtcgtttatctttgcagctcgcttgatgatgtcgagatgtcctctcgtgaccgggtcgaaggaaccggggtaaactgctgttgccatcagtatggtctcctttatttgcgcgctttggaaaagcgcatttggtgttgccatgatagcacttttcagtttctgcttcaagtaccaggccgcatcgccatcgcaatatcgttaatttttagtcaatcaacgtcgcactggggcgcatcatcttggtacacccttagtaaaccatatcgtcaaaattttatcaagtactttttcgaaaaaaattgtttttgctataccaaacaatcgccacaaatacctaagaaatttagtcaaattgtccttcgagacattttttcgcggaagagggcttgattataatgtttgttaatgttataactaagctgtgcaggtgtgccgctgccggaggcttctgccctgtcgaccccaaggataccgccggggtgtgataagacagtgtccggactggaaagaaacggtaaatttccggctaagattttgtcccgtagaattgtgaataataaatttacaattcttttatgttcttaaaggagaggatggtttataatggatttcatggaaatgtatgcccagaaaaagatgactgccgagcaggctgcttctctggtcaagagcggcgactgggtggattacggttggtgcgtcaacacccccgtggccgtggacgccgcccttgccaagcgcctgcccgaactggagaacgtcaatttccgcggcggcatcctgatgtgggtgcctgagatcttccagatcgacgaccccgctgcccacatgacctggaacagctggcacatgggcggcatcgagcgcaaagccatcgcacagggcttctcgttctactcccccatccgctattcggagctgccccgctactaccgcgagagtcccgacccgctggacatcgccgtcttccaggtgactccgatggacgagcacggctacttcaacttcggccccagcgcttcccatctgggtgccgtctgtgagaaggccaggaagatcatcgtggaggtcaacaccaatatgccccgctgcctcggcggtatggagaactgtgtccatatctcccaggtcaccggcatcgtggagggcaacaatccgcccatcggccagatggccgctgccggccccgcctccgaggtcgatttgaaggtcgcaaacctcgtcgtgccgcaaatccccaacggtgcctgcctgcagctgggcatcggcggtatgcccaacgccatcggcagcctcatcgcccagagcgatttgaaggacctgggcgtccacaccgagatgtacgttgacgctttcgtggacatcgccaaggccggcaagatcaccggcgcacacaagcagctggacaagggccgtcaggtctatgccttcggtgccggcacccagaagatgtacgactacctcaacaacaaccccgagtgcatgtctgctcccgtcgattacaccaacgacatccgcagcatctccgcgctggacaacttcatctccatcaacaatgcggtggacatcgacctgttcggccaggtgaatgcggagagcgccggcgtcaagcacatttccggtgcaggcggccagctggacttcgtgctgggcgcatacctttccaagggtggcaagagcttcatctgcctgtcctctaccttctttaataagaagaccggtcagctcgagagccgcatccgtcccacgctggaaaacggcagcatcatcaccgatacccgcgccaatctgcattacctctgcaccgaatacggctgcgtcaacctcaagggtctgaccacctgggagaaggccgaagccctcatcaatgtggcacaccccgacttccgcgaggcgcttatcaaagaggccgagaagatgcacatctggcgccgcagcaacaaaatctaaacatcgccgtaccggctcctgccgtctgcggcaggaatggagtcacacatgatggacaaaaagccgcacatcaagccctatctctacggaatgctcgcgggctttggtgcgataagtctaagtatcctgttcttcttcttcatctaccgcttcgacgggttcggcgacgcggtctccaaggtgaccggcatcctgatgcccttcatctacggtgccgtcatcgcctatctgctcaagccggtgtgcaacaccattgagggctttctgcaccgcatcttccccgaaaagctccacagcatggccaatatgcttgccattgcggcgacgctgctgttcggtgtgctggtggtctacgccctcgtgatgatggtggtgccgcagctcatcacaagcgtcacctccctctactacaccgcgcagaccagcatcacccggttcatgcggtgggtgaacacacaggaagtcttcttggataatgagacactgatgggctatttcaacaatgcctacgatgccattgctgacaatctgaccactctgcgcaccaccctgctcccctcgctgcagaatatacaaggcatcctgagcggtgtgggcgtcggcgtcatgagtgtggtgacctggttcaagaatctgctcatcggccttatcgtcgctgtttacctgctggccagccgcaaaaagttcgccaagcaggccaaaatgatcctctacagcgtcgtcaagccccactgggcgcagctcatccaggaggaagtcctctacgctgacaagatgttcggcggcttcatcaacggcaagatcatggactccgccatcattggtgtgctctgctacttcgcctgcatcatcttcaagttcccgagcgcactgctggtgtcggtcatcatcggcgtcaccaacgtcatccccttcttcggccccttcatcggtgccgtgcctgcaacgctgctcatcctcatccagagtcccatcaaggccctctggttcgtgctcttcgtgctggtgctccagcagctggacggcaatgtcatcggcccgaagatcctgggcaacaccaccggcctttcgagcttctgggtgctcttctccatcctgctgttcggcggtctgtggggcttcgtgggcatgatcgtgggtgtgccgctgttcgccgtcatctatgacgtcatcaagaagctggtcttccacggcctgcgccgcaacggccagctcgaccagatgaccgtctaccacgacgagttcggcgatcccggcgacccggctcccgcacctgtggaagatgaagaaaccgaaatcgttatggattccggcgaagaataaaataacaagataaagcccccatcctcccggctgcctcagccggtgaagatgggggcttttctgcgcaattttatctttgaaagaccgataaagtcatttcgcgtgagcagtggaatgtgccggttcccaatccttgtaattctcgtaccggctctccctgagggtgacgtgcgaccagatctcgtcggccacaggctgccagtcggccgcatatgcactgcatttgtcgcagagatggtctacgctctcgggcgactgcaagtcggtgctgtgagcaccggtgtcatgcaccatctggcgcaggagctcggggttctccagcatcgggcagggacgcaggtggtttttattgaagggctggccgttgtggtaggccatgaagagcgggctgcggagaatatcgaggatgctgctgtcgtggatgttggcgttggagtagtggatgaagacgcacggttctgcatcgcccgccgagttgatatggaaatagtttcgtccgcctgcgatgcatccgcccacaaactcgccatcgttctggaagtccatcggatagaacggaatatcgctcttttcggagcggagataccggatgcgctcgatcatgtacttgcgctgagcaggcgtgggcatcagctccggcgcggcctcgttgcctaccggcatatagtggaagtagaacccgaagtgcgcacccttgtcgcagagcatccgcataaagtggtcgctggtgacggcttcgagattgtctctggtatagcagatggaggtgccaaaaaggatcccgtgggccttgagcaagtccatcgcattcatgacagcggcatagtggccgtcgccccgccgggcatcattggtagagggagttccctcgatcgagagcatgaaggcgatatttcccagttttacgacctcttcacagaatggctcatcgatgagggtcgagttcgtgtagatcgcaaactgcacgtcgttgtgcttttttgccagacggagaatatccgccttccgcaccagaggctcgccgccggtgagcatatagagatagacccccagctccttgccctcggtgatgattttgtccatatcctcaaagctgaggttgtttttgtggccgtactcgcccgcccagcatcccacgcagtgcatattgcaagccgaagtggggtcgaacaggatcagccacgggatattgcagtggtactttgtgcggttctcgcggatggtctttgtcccccggaagaacgcctcatagccaaggttgagcgccgtggtgcgtgccacgttgggcgcggtctggtcgagcacacagttgatgagctttgaccacttgctgtcctcatcggtcagcactgcgcgggcgtgctcatacgtctcctcgctgaacgagtctccatagaactgctttgcgacgtccaccatctcggcaaacgccttctgacggtcttttctggcatgagccagtgccacatccaccatcgttccgacagcggtacgctgtaccttatggctcaacggctccaacgcgatactcataaaagtctgcctccttgtgtgggtctttgccggccctttgttttgacaatactttaacatttttccgacaaaggttctataaacaacaaaagcagggtgatagtttttctatcatcctgctctgcttgttcaaatttttatcagtcgtcgatttttgatgctctgccgtcggtgctgaagcgcagcagcgcccgcttcagatccccctgcatcatggtgttgagccgttcggccatgatggctggttcggtcttcatatcgcggcgtatccattccagcaccatgcccacaaagccatacttataaaaatcaatgatgaactgcttgtcctcttcctgcaccgggatgttttcacgctctacaaacatccgcagcagagggtcaagcattttatagaggtactgctccacctgttcccggctgatggagcggtagacattcagcaccagcacccggttggcctgcaccttttccagcatatcgcggaaggcgtcgctccacgtctcaaagtcctgatggccttccagtgcctctgtggcatcctccaccaggatccagtccaccaggtcgtatatatccttgaaatggtagtaaaaggtcatgcggttcacaccgcagtcctcggtaatgtcgtttatcgtgatcttattcagcggcttgcggagcagcagctttttgagcgatgcttccagcgcgcgttttgtcgtctgtgccacgagaatgcccatcctttcgcgtttgccccgttcggtgcggagtttcccgacttctatctattatgatacctcatctgcccgtgcaggtgcaagcacctttttcgactttttcatgaactttttatgttttcttaagattcggacaacaaaaaagcctgcgccgccgcagcgcgtctatcaggagctttccgaaaagctttgacattttccggctttcctcttgatttctcccccggccctgcttacaatggagacacagaggggggcatctcccctgttcttttgattgggaaagaggttttttcttatgctgaataccatcggtttcttaggctgcggcaacatgggcggggctatcgcccgggccgtttgcaaggcggcagacccgcagaacgtctggctggccaaccgcaccgccgccaaggcagaggctctggccgctgagctgggctgcaacaccaccatcaacgacgaggtggcaggccgctgcgacctcatcttcttagccgtcaaaccccagatgatggaggagctgctggcaccgctccgcttcacgctggccgaacggcccagccgcttcgtgctgtgcagcatggcggcgggcctgtccatcgcccgcattcaggagatggcgggcggcgactgccccgtcatccgcatcatgcccaacacgcccgcttcggtgggggccggtatgatccagtactgcacctccaacgtcaccgccgaggaagaggccgagttcctgaaattgatggcccccgccgggcggctggatgctgtgccggaaagcctcatcgacgcggccagctgcgtgtccggctgcggcccggcctgggtgtaccagttcatcgaagcgctggccgacggcggcgtggcctgcggcctgccccgtgccaaggcgcaggagtacgccgcccagatggtcctgggcagtgcaaagctggtgcttgagagcggccagcaccccggcgcactcaaggacgccgtgtgcagccccggcggcagcaccatccagggcgtgcgggtgctggaagaaaagggcctgcggggcgcggtgatggacgctgtcatcgcctcctacaacaagaccaaagagatgggaaagggttgatctatgcgcatcgtagtcaaagtcggcacctccacactggcccactccaccgggcggctgaacatccgccacaccgaagagctggtgaaagtgctcagcgatttgaagaacgccggacatgaggtcatcctcgtgtcgtcgggtgctatcggcatgggtgtgggcaagctgtcgctttccgcccgccctaccgatatgtcctccaagcaggcttgtgccgccgtgggtcagtgtgagctgatgtacacctacgaccggctgttcagcgcctacgaccacacggtggcgcagattttgctcaccggcgtggacatcgagcacgccagccgccgtgagaacatccagaacaccctcacccgcctgctggagctgggcgcactgcccatcatcaacgagaacgacaccgtcgccaccgacgagatcacctccatcggcgacaatgacaccctcgccgccattgtcacctgctgcatcaaggccgatctgctggtgctgctgagcgacatcgacggcctctacactgccaacccccacacccacccggacgcaaagctcatcccgctggtggaggacatcacgcccgaggtgatggcgctggccgacggagccggttcggcgctgggtaccggcggaatgtccaccaaactccgggccgcccggatggtgacctccagcggagctgacatggtcatcgcaaacggcgcccaccccgaactgctctatgacatcgccgagggccgtgccgtcggcacccgctttgcggcccacagacaggaggcataa

SEQ ID NO: 46 - DNA, 14185 bp, unidentified
  source 1..14185: mol_type = unassigned DNA
atgtcaaacatgcaactcggagaggacactaccaccatgtcgatgaccctgaatcccgtcaacgaagccgcttttcagaaagctgtacagtctctggagaccctgaaccgggccgccgtgttccaccccaccggcaccggcaaaagctgtattgcctggaaggtggtggaggctcacccccagaccacctttttctggctggtggccggtgcacagcgtctggccctgcggcaggcagagctgacacgctacaacggcggcaccctgcccggcaatgtccgcttctgtgattgcgaaaagctggccgctgccaccccggagcagtgggtgcggctgggggagcagaaacccggctgcatcgtgctggactgctaccatgagttgagcgccgtgtgctgggcacagtcggtgcagaagctgctgcggatgtgcccccaggcaaaggtgctggggctgggtgtgcccaacggtgcccccgtctgcgccgccgcgcaggagctgtttgccgactgcatcgtctcccacatgactgtggccgaggccatggccgccgggaccatgccagtgccttcagcctatgcggccctgctctggcctcaggaggaggagctggccaccctgcgcgcccggatcaaaaacctgtgtatgcccaagggcgacacctccctgcgcgttcaatatgaagagctgagctggtctctgcgtcaggtggaaaacctgaccgttctgctgccccgcctgctcagcgataccagcggccattatctggtcctgtttgaatccgccgcctatcaggaaaagctgggcacggagctggaacagctgctgcgcactgtggaccctgccgtccgcttttacgctgcagatcacgcctgctttgcggattctgctgctgtggagaccttcctctctgatacagcccccggccccaaggtcctgctctgcgtcaacgcgccgggggtccagcagccgctggaggggctggccggggtcattctggtgcgccagtccagcctgatgtccaccttcaagcagatgctctgccgcgcgctggtggctgcaagcagccgcagcgtgccggtgttcgaccttgtggcgcagttcgagggactgggcaacggccgtaccctgcagcgggactgcaccgaggccatgaccagagccggcagtaaaacgccgggcttccggcaggagcgccccatgcagcagacctaccgcctgtatggcaagctgcgccgggagatggaagcccgctgggaggtgctgtgtcaggctgccgccgatgccgccgccaaagagggcaccttggagctgccccggagctataccatccacagcggcgtgcccgtgggcaagtggctcgagctccagcggcaggtacaggccgggcagcgcccgggccgcctgacagctgagcaggccgccaagctggaaaaactgggcatccgctggaaccaccggctggaagctgcctgggaaaagggctttgcctccgcacagaaataccgcaccgagcacggcgacctgctggtgccggtgcgctaccgcgataaaaatgattttgcgctgggcgaatggattgtctacaaccgccagcgctatctgggcggcaacctgacccagaaccgcatcgagcggctggaagccatcggcatggtgtggagcacctccaacgatctgtgggagcagaactatgccgccgccactcagtattatctggagcacggtgatctggaagttcccatcaagtacgaaacgccctctggcttcggtctgggggtctggctgggggcccagcgcgccgctcacaaggcaggcgagctgcctcaggagcaggtggagcggctggacgctctgggcatggactggaccaaccgcaacgaccgcaagtggatgtccctgtacgatgttgccgccgcctactaccatgagcacggcaacctgaacgtcccctcggagtatgtcacgccggacggagtactgctgggcaagtgggtggcgcgccagcgctatgcctacctgaacccggaccgctccagcgcccgggtcacccctgagcgcaaggccctgctggacaagctgggcatggtgtgggaaaagtacgacccctggcaggagcgctatgatctggctctggcctacaagacagagcacggcgatctggagattccctctgtctacaagaccgcggacggcgtttggctgggcagctgggtcaaccgccagcggcaggccctgaactccggcagcagcgccctgagcagtgagcgccgcaagctgctgcgcaccctgttcaagggcgagcgccgccccagtgattccactgctgaccacggcaccgtgcgcgaggccaactgggagcggaacttccgcagtgccgcccgctatgcccgcaagtacaagcacctgctggtccccgccagctatgtggacagcgatggtgtccggctgggcgtgtggatctccaacctgcgtgcagcccgcaagaaccgcccggattcctatcaggtcacgcccgcccacatcaaaaagctgaacagcatcggcatggtatgggatgcccgggatgccaagtggggaaccgcctatcagcaggcaaaggcctactacaaggcacacggcaacctccacgccgccgccaactacaaatccgacgaaaccggcttctgcctgggcgactggctccgccggatgcgggagtgggataccacccacgaccccaagctcacccctgagcgccgcgcaatgctggataagatcgggatggagtggagcgaataagagaaaagagccaccggtttttgccggtggcttttctgatgcagattacagctgatccagctcctgctgcagctgggccagcgcattgcggatgggcagatgctgggggcaggccgcctcgcacttgccgcagcggacgcagtggctggccttttcggcatcggggaagtaggcttcccactggtgcttgatggcctcaggctggccgaacatccccagcttgttccagatgctgaagttgtccgggatgtccacccccatggggcagggcatacagtaccggcagccggtgcagccgaccttgatgcggctgtgcaggaaggcggcggtctgctccaccgcggcggtctctgcagcggtcagcggctcaaagcgggcaaaggtggccaggttatccgtgagctgatcctcggcgctcatgcccgagaggatgacatggacgttccggtggctgcccacccagcgcagggcccaggaggcatccgaggcctcgggccgcagggccttgaggggtgcttcggcctccgggggcaggttggccagcgtgccgcccttgatgggctccatgatgatgagggggatgttcagctcctcggtcagctgatagccgcggtcacccgagatctcctcggcacggtcatcggtgtccagatagttatactgcagctggcagaaatcccatggctgatcccgcaggatgtgctcaaggcccgccgcgttgtcgtggcaggagaagccgaagctgcggatgcggcccagctttttctgctcccacagccagtccacgatgcccatttccttggcccggtcgtaccgggcggcgtgcagggagtgcagcaggtagaagtcgatgtactccacgcccagccgccggagctgctcttcaaagatatgctgggcctcctccaggctcccgcactgccacagcggcatcttggtggccagataaaagctctcccggggccactttgcaatgaccctgcccacaaagggctcgctctggccgccgtggtaggggtaagcggtgtcaaaatagttcacgcccgcgtccctcgcggcgttcagcagcgcttcggcccggggctcgtcaatggctccctccggtgtggtggggaaccgcatacagccatagcccagcagggaggtgcggatgctctcccctgcgctgttctgctttttccatgctctgtattccatctctttcgtgcagctggctgccgtgttccagccgcgcctccttttgtccccagtataccggaaaaatcccgcgctgacaagaaagatgttccgcttcttgttctgccgccggaaatatggtatacttataatccaaattttatcatgttatcaactaaatcagatagcgctaaggagtatcatggaacctttcaacacccctttgaagatcagggagatctccctgccccaccgtgcagtgttcggccccatggcgggctttaccgatgccccggcccggcggctgatggcccagcacggagccggttttaccgtcagtgagatggtgtccagccgggcgctggtatacggcgaccacaaaaccgtcagcctgctcaaggccgaacccaacggtgccccctacggcgtgcagatctttggcgaagtgcccgaaatcatggggcaggccgctgccgccgtggagcagtacgcgttcgattttctggacatcaacatgggctgtccggcccccaagatcgtctcgggcggggcgggcagcaagctgatgcttgaccccgaccgctgcggccgtattgtggaggaagtggtcaaaaacacctcccgccccgtcaccgtgaagatgcgcaagggctgggacgcggagcacgtcacggccgtggaatgcgccaaagcctgtgagcaggcgggcgcggtgctcatcgccgtccacgcccgcacccgggagcagatgtacaccccgggcatcgacccgtccatcattgcggcggtgaaggatgccgtccatgttcccgtgctgggcaacggcgatatccgcaccgccgaggatgctgtgcggatggtggaggagaccggctgcgacggcgtgatgattgcccgggctgctctgggcgacccatggctctttgagcgggtgaacgccgcgctggagggcctgcccgcccccaaggagccgaacctgcaggcccggatgaacgccctgcgccggcaggtggaggagatggtggagcagaagggcgagttcgttgccatgccccaggcccgggcccagaccatgcactacatgaagggcctgaagggggccgccagcctgcggcgctactgctgtgagctgagccgcctctctgacctcgacaccctcatcgacgcggtgttcgagcagcagcgcagggccgcgcaggaccccgatgacacccgcgaggtgccgttcccgtaagcgggaaatttccgatactgaaaagaggactgacgcatgactgcatttcattcttcgccccggatgctgggacagaagcaggacaagttctggctcaccgtggggctctgcgccctgacagccgccctcatcttcctgccgttctatctgctggacggcggctttttccactatgcaggcgatttcaacagccagcagatcagcttttaccgctacatgaacggctttctcaagggggcaggctaccccgccggatacggaggcgtgaagaacaccttttcctgggcaactgacctgggcagcggaaccatgaacgcctattcgttctacctgtacggctcccccttcttctggttttccctgctcttcccgcagaactggctcccctacctcatggtgccgctgctggtgctcaagttcgcggtggcgggcggcggcgcgtatctgtacctgcgccgctacgtcaaagacccgaactttgcagtgctgggtgcggccctctacgccttttcgggctgggggctgtacaacatcttcttcaaccacttcatcgatgtgctggccctcttcccctggatgctctgggcactggatgagaccatctacgagcaccgccacggttggttcgccttctgggtggcggtgaacctgctcaacaactacttcttctttgtggggcaggtgctcttccttgtcatttacttcgtctgcaagctctccgccggggagttccggctcacgccccggctcttcggtcagctggcctttgagagcctgctgggcgtggcactgggctttgtggtgctctggcccactgtcctcagcgtgctgcagaacccgcgcaccatcgatctttcctccggctggggctttctgacctattccaagccccagcagtatctggccatcctgctgagctgggtgctgcccccggattccccttatatgacctccatctggtctgagggcatcatcaaatggaccagcatgacagcctatctgcccctgtgcagtctggccggtgtggtggcctactggcgtgcccggcagggcgacagcaaaaagcggatcattgccgtctgcacggtatttgcgctggtgcccatcctgaacagcgcgttctatgccctcaattccagctactatgcccggtggttctatatgccggtgctcatccttgcggccatgacggtgagcgcatgggaggaccccagcctcgacctcgcccgccccgcccggagcattgcctttgtgatgatcgccacgctggcctttgcactggtgcccgtgcaggatgcctccaccaaggagtggagcctgggcgtgctgcagaatccgggccagtactgcgccgtgcttgcctttggtctgggcgggctggccgtctaccattgcatctgcaggcgctggcagcagcgcagggtctttgcccgccgcctgctggccggtgtgctggcgttcagctgcctgttcggcatcgtccacatcggcattggcaagttcggccagtggaacaccgacagtgaccttgtggagcagtatatcaacgcgctggccctgaaagaagatctgcccgagggggactggcgcattgacacctacaagacccacgacaatctgggcctgtggctggacaagagctgcctgcagtatttcggcagcaccgctgcccccagcatcctcagcttctatccggcactgggggtcaagcgggatgtgcgcagtcagcccgagctctccaactacgccctgcgcggcctgctcagcgtcagatacctgctgaccacgctcgcgcatcaggagcagttccgcgccgaggccgatgagggctggacgtattacgacaccctggacggctatgttctctacgagaaccagaactacgttcccatgggcttcacctacgattactacctcaccgaggcccagtacgaggataccgtgactcccacccgctccaacctgctcatgcgggcactggtgctcactgaggaggatgcggtggcctacgggcagtacctcacgcccctgcccacggcagagctcaacgacctgacctacacccgctacacccaggattgtgccgaccgccgggcctctgcctgcaccgcctttgagatgaccagcgcaggcttccacgctgaagccacgctggacagggccaacctgatgttcttctccgtgccctacgatgacggctttacggcctatgtggacgggcaggagaccgagatcctgcgggtggacgagggcctgatggccgtcctctgccccgccggaacagtcaccatcgactttgtctatcagccggacggcatccgcctgagccggactgtcacccttgccgccctgcccgtgttcctgctctacgccgggcactttgcctgggacgaaaagaaaaaacggaagcattaaaaaagccgccgctccaggaagcgacagctcaaagaaaagctcaaatgaaagaaggtatcctatgggcccctggtattacgaggtcgtcagctttgacggcgattatgtcaacctgcgccgcaccgacattgagagcgacgagctgaatcccgttgcgctggccctgctgccgcccgagatcgaggtgggcagcaaggtcaagtgcgagtattttcagtatgaggtgatcggctgagcctctccgtcatccctgcgggatgccacctcttctattagggaagctggtgcgaagcacctgagaggttcgccagcaccgctgccagcagcattccgatgggtgcgctgatccagctggacatccagaagcctgcaaaaccaatgcggggtacaaggatcacacaggccagcaggttcagggcgatctgccccaggttggaggccagatacagtcccatcttctgggcaccgcgcagacgggcctcgaacagatgcttctgtgccacaaacaggcaggtcaccgattcaaaagccagcatggtgcagccatagctggctgctgccgggtcggtggtaaagagccggagcagcggcccccgcagaccgatgcagaccgccaccactccaagcgaatacaccaacaagatccgccgcccttcccgcaggccctcttttacacggcccggctggagggcggctgtgttttgcgcaataaagaacactgtggactgcacaaagccgaacaccggcatcatcaacaggctggacagcttgcctgcgcaggagaaacctgcaatggcttccacacccagaccgcccagcagcccctgcttgaccgtggtgatgatggtgccgctggcctgctgaatactgttgggggccgacagccggaaaatatccctggcatagcgcgccttgagcatccggaacgagaaagccgcgtccatctgggtgcgacgcagaaacgctaccatgtagaccgcgcccgccacctgcgccgccgctgtggcagccgctgcaccggctaccccgaagggccccaccagaacaaggtcaagcacaatgttcatcgcactggtagccacaatgaccttgagcggcgttttggaatcgccgcagcccatgacacactccttgctcagatcgtagggcatcagaaatggcagccccatcagatagatgcgcccgtagagcacagcagtatccaggatctccgcaggcgtattgatcagccgtagcagagccggcagggtcacaaagcccactgccgtggtcaacagggcgatgacctcatccacgaacagcaggttgtacagcagctctgtcatctcacgctttgtggcagtgggcttgcctgccgccaccagcagaccaccgcccagctccatgccgccggagataaacagaaagatcatcagcaccgtggaagcgttggacactgccgccagcgcatcggcatccagccgcaggccgatgatcatggtatcggccacggcgtaaaactgtgttgccaccatgctcaggataatgggcagcgcgtaccgcagcagcgcaggccgcaccgccccggtcaatagagaattctcttcgttcacacaaacaacctccttttcacaaaaagaaaacccgcagggaacctgtcgctcaggccccctgcgggttctttttcagttgcgccagcaggagtcgaacctacgatgggggagtcaaagtcccctgccttaccgcttggcgatggcgcaccggtaagaatcagtatagtagaatttctttcatttgtcaagcaaaagcgttttttccctgtctgtacaaagtgttttaccatatctatacagtgtccttgtcatcatgcgatccgcttgctcattttccgctttattttcccaaaaagtattgacaccaccctcatagcatgataagatatcatcgattttgagagacaaagcgtgtcagagtcttttcaaagcaaattacctgggaccgcccatcggggctaaggccatacggacagccgggtccactgccgaccggcggcgcaagctgccattattgattgagttgaaagctcaaattttataagttggttcctttacagccatgaaattgcgcagaacgtgcgcagacttgtgaaacggtcaataagagtagtaaaagtgtaattgctatatagactctcgtcatcccgtctttttgaaccatgcgaaggttttccccagtgtcaccgggggctttgtctgcatgttcggaacgctttttcaagcgcaggtctgcaccattgtggtggacctgcgcttttttgctgcgccggaaccagggacggaggagaaaagatgagtgagaaccgtacacggttccggctggatcagcgccgcgcgcccatttacgaggcgctggagcagttccggcagatgcgtgtggtaccttttgatgtgcccggccacaagcggggccgcggcaacccggaactgacggcctttctgggccagcagtgcgtgggtgtggacgtgaacagcatgaagccgctggataatctctgccacccggtatcggtcatccgggaggcagaggagcttgctgccgatgcctttggcgcggcccacgcctttttaatggtgggcggcaccaccagctctgtgcagagcatggtgctgacggcctgcaagcggggcgatgagatcatcctgccccgcaatgtgcaccgcagtgtgctgaacgcgctggtgctctgcggcgcggtcccggtctatgtgaatcccgaggtggacaagcggctgggcatctcgctgggcatgaagcgggagcaggtggccaaggccatcaaggagcaccccaacgccgtggccgttctggtgaacaaccccacctactacggcatctgttccgacctgcgcgccatcgtgaagatggcccacgaggccgggatgctctgcctggccgacgaggcccacggcacccacttctactttggcaacggcctgcccgtttccgccatggcagcgggggccgatatggcctcggtctccatgcacaagagcggcggcagcctgacccagagcagcctgctgctcatcgggcccaatgtgcatcagggctatgtgcggcagatcatcaacctgacccagaccacctccggcagctacctgctcatgtccagtctggacatctcccgccgcaaccttgccctgcgggggcggcaggtgttccatcaggtggcggatatggccgagtacgcccgggaagagatcaacgccgtgggcggctactacgcctttggcaaggagctgtgcaacggcaactctgtctttgactttgacaccaccaaactcagcgtccacacgctggacatcggccttgccggcatcgaggtctacgacatcctgcgggacgagtacgacatccagatcgagttcggcgacatcggcaacatcctggcctacctctccatcggcgaccgcccccaggagatcgagcggctggtcagcgcactggccgagatcaagcgccgctaccacaccgacggcaccggcctgctgagccaggaatacatcgaccccgtggtggctgccagcccgcaggaggccttctatgcccccaaaaagagcctgcccctgcgggagaccgagggcatggtctgcagcgagttcgtcatgtgctacccgccgggcatccccattctggcccccggcgagcgcatcaccaaggagatcctgaactatatcgagtacgccaaggccaagggctgcagcatgaccggccctgaggaccctgatattttgcacctgaacgttctggcataaggagggaaagcagatggagttttggttttcggaatttcacacccccgatgtgaagcacagcatccgggtgaacaagcagctctactccaagcagagcgattatcagcgcattgatatttttgaaacgcccgagtttggccgggtgctcacactggacggcaatgtgatgctgaccgagcgggacgagttcatctacgacgagatgatcgtccacgtgcccatggccgtgcaccgggaggcaaaggatatccttgtcatcggcgcaggcgacggcggcgtggtgcgggagctgacccgctacgaccgggtggagcgcatcgacctggtggagatggacccccaggtggtggaggcctgccgcgcctacctgcccggcaacgcctgtcggatggatgaccgccgggtgcacatctactttgagaacgccctcaagttcatccgccagtgcgaggaggaatacgacctcatcatcgtggactcctccgaccccttcggccccagcgagggcctgttcacccgcgagttctacggcagctgcttcaacgccctgaaagaggacggcatcatggtcaaccagcagggcagccccttctacgccgaggatgccagcgccatgcagcgcagccacaagcgcattgcttccaccttccccatcagccgggtgtatcaggcccacatccccacctttgcggcgggctactggctgttcggctttgccagcaagaagtaccaccccattgatgatctggacgcaactgcctggaaggccctgaacatgcgcacccggtactacaccaccaaactgcatatcggagcattctacctgccggcttttctggaggagatgctgcgggaagtggaggaacactgatgctttaccccaacgttgaaacctttatcggctgcgacagcagctaccgtgccgccagcatcgtgctgtacggtgccccctacgattccaccaccagctaccgcccgggggcccggttcggcccggctgccatccggcacgagagctacggcctggagacttacagcccctaccagaacgccgacctgaccgattttgacatcttcgacagcggcgatctggagctctgcttcggctccagcgagagcgcactggccgacatccagagccgcgcggcagagatcctgcacgacggcaagttcccgctcctgctgggcggcgagcatctggtcacgctgggtgccgtgcgggccatggtggaaaagtaccccgacctccacatcgtccactttgatgcccatgccgacctgcgggacgactatctgggcgcaaagctcagccacgcctgtgtcctgcgccgctgccatgacctcatcggcgacggacgcatccaccagttctgcatccgcagcggcgaccgcaccgagtttgagttcgcagctgcccacaccgagatgcacaagttcgattttacgggccttgcccagctcactgagcagctctgtgccagcaaggtgcccgtttacctgaccatcgacctcgactgcctggacccctcctgcttccccggcaccggcaccccggaggccggcggcgtgagctttttgcagctgctggaggccatccgcaccgtgaccaaggccaacatcgtgggtgcggacctcaacgagctggcccccacgctggacaccaccggcgtttccacggccacagcctgcaaggtcctgcgggagctgctgatcgcgctggacaagggctggccgggctttcaggtataaggacagaccgtaaaaagacaactttacagataaaggagtaaccgacatgagcaaagttctgatcatcggctgcggcggcgtggcctccgttgccatccacaagtgctgccaggtccccgaggtgttcaccgagatctgcatcgccagccgtaccaaggcaaagtgcgacaagctggccgccgagctggcccccaagaccaccaccaagatcaccaccgcacaggtggatgccgaccatgtggatgaggtcatcgccctcatcaagagctaccagcccgatctagtgatgaacatcgccctgccctatcaggatctgaccatcatggatgcctgcctggcctgcggcgtgaactacatggacaccgccaactacgagcctgagaacaccgacgacccggagtggcgcgccatttacgagaagcgctgcaaggaggccggtttctccgcctactttgattacagctggcagtgggcctacgccaagaagtttgaggaagccggcctgaccgccctgctgggcagcggctttgacccgggcgtgacccaggcttactgcgcttacgccaagaagcacgagttcgacaccatcgacaccatcgacattctggactgcaacggcggcgaccacggctatgcctttgccaccaacttcaaccccgagatcaacctgcgcgaggtgtccgctcccggcagctactgggagaacggccactgggtggagatcccggccatgagcatcaagcgggagtacaactttgatcaggtgggccagaaggatatgtacctgctccaccacgaggagatcgagtctctggccaagaacatccccgaggcaaagcgcatccgcttctttatgaccttcggccagagctacctcgaccacatgcgctgtctggaggacgtgggcatgctgtccaccaccccggtcaacttcaacggtcaggagatcgtgcccatccagttcctcaaggccctgctgcccgaccccgccagccttggcccccgcaccaagggcaagaccaacatcggctgcatc

SEQ ID NO: 47 - DNA, 22668 bp, unidentified
  source 1..22668: mol_type = unassigned DNA
tcaacgcctgcgataggctaaatcaaccgttgctacgttgccgcacttgaggcactttatgcggatagtgcctgaacagctctcatctttttgatagagcttgtgtccgcaaacggggcaaaacctccagccgatgctgaattgtgcctgctgtatattgctcagcggtttatttttaaaagaacgattatttgattgaatcatgtttattctccaaatcggatgatgtccaatggatggcagtggatgggtttgccttttatgacctgcatctgctgtagtctgatcctgatagcagaccacgatgctcccatccgcgcagccatctccagaattttttcatagttcgggtcagatgcggatttgtataggattccattcggcaggcacagcgctgctcgttctatttcggcgttgactagaaatgttggcatcagcagctctgccgcaagggtatttgcctgccattcctcccatgagggttgtccgtttcgttcccgataggcaatgtgcccacggcacttgactgcttttccatagtcgttcggaaacaggtcagccaaaatctgatgcgctgcttcatgcgctattgtgaaattccggcatccagtgcgtctgtctgccgcaagggcggaatcgattacaacgtccctcggcatgaatatctctacaagctttgtaccatcccctaaagttacggtaaaaccgcatctttgaaaaacggtcagcccgaggacactgccatcactacatagcggcaacattttcacattcagcccaagaacagcgcttgcaagccgttcagggtcaatgggttccggggcatctttgctgatcccgaagcgggtatagtactggtcgatatacttacccgctatgcgcgaaaggtctgcgcgggataagtaccttgccattacgaagcacggctttccggcacggagcagtaggcttccacgaaccacttgccctgttcaagccagagattccgcttctgcccgcagatcatgcaggtaaagcactgccccttcccgccaaggcgcgatgtgccacgcctgacagccaaaacacggtcgattccatagatatggcttttgtcgtaattgatggcaagagggcggatcttgccatcaggggtaaagcgaacgtccacttcaacgtatctcttttcacggtggaacttgttgtcatcacgcatcgaggggcctccttctcattttttaggttgtttttgcggtggtttaatttggattttttacaccaaattggtgtttacggctcgattatactgcgatttgttttagttgtcaactacaaatttgcgaaaatattttcgaagtccagttgattttacttaaatcacgcgttacaacacaagtcacaaccgttagtgttccttcactcccattttctccttaaccttgtccggcacgtcgatcaggccaaatcggtagaacagcccatagatgtacgacacaccccggatatctcccagcgccttgggtctgtccactacctctccgattttactgatattgtgatacgccagcagcatagaactccaagcaaggctcttgctgccctctctgcggtcgatccacagctccttggtgaactcatctcccctgccctttttcagcgtatatgtaaagggcaagccggacatcgtcttgaacttgtatccccgaaaagccactacgcacttccagaggttttcttcgcaggggtcctttctcagcgcaaccacagctcggtagtgacgctgccgctctgccccggcactgatattcgccgcttcagctccctctgggaagtacacgcctttctcatacggcagataagaggtcacagaagggcgggacaactgcaaggtagccattgtggaggtgacggcagcagaataactctgcgtttctctgagggtattaaaggtctgttggacgagctttgccgtgtccgactcgtagaccccggctgtgatgagcagcttccgaaccttgatagggttgagggacagggcgtctgcaatggcttgcaggctcattttgtccgtataaagttcagtaactgctttcatctgctgtgttaagttcttggctgcactgtactctggctttgatggcttccgaccaccgccgggcttgcgcgcacgtgtattacccactgattttcacctcgttttaattttcgtcacaaactatatatcgtgctcaagaatatgccgtgtgaacttctggaattcagttcacacggcgtactgttttatttcagctttgcgaggatctcgtctgctgtcataccggatgcaagcagtttcttcagcacagcttcagcctcgaccttcttagcagcttcggcagctttcgcctcagcggcagccttcttagcctccagctttgcgattgccttttcggtctgcttgatctccgccttctgcggctttaggctttcacgcagggatttgatgttggtcttcagcctttcgatctgggcgacagtcttggcactcccttcctccaagagagccttgtccttctgcagctttgcaatctgagcatcgcagtcggtagatgcggtaacacagttcttgctgcccttggttctgggcatagggtgatacctctgataagattatgtaagatttgatgttagtatagcactatgaaaaaagggttacaatgagaatgcttatatttcctctgttgattccaatgaatagtactgcaccccttcaaagctctccaacgtaaatgtttgaaacgattcattgccatctacatcttcaaaattgatgttaaaccacttcggaatcccacgttccgttctttcatactctgtttcaagtattcgagcaataacggcgacttttgtgtcggcatctggtgaatccgaataaaccacataaatatctttaggttcattcggtttaagcaactgaaaataatatcggtcaaaaataataacatttcgaatcggaagctctgcaacattttcaattctaatgtgaacatttcggtgcttaggaaaattgctggagctatatagtccaaccgcttcagttgtgccaggaagttgttgatctatatcaataatctccaccgaaaagattggttgaatctgtttctttcgaacagctaagtcccgactgttttgctttttcgcatagatgtgagtttgtaccaatgctattacacttactaatgttgcccccacaaaggataaatatgtaccaaaaaaagcaagccaatcacctttcgttaagtattcccctgttggaataaagccatttcctgcaaaggatagataaattagaatgtaaagcaggattgcactggatgctaacaccaacccaataatccagtagtttcttcttttttcttcagttttctttcctttattccccatcgtaattcctgtctcagcattcatatttcttactacttgcatctccgccacattctcatgtgttgtctgccgcccaccacgtagaggtgtgcaaagtttcgagcgacaaagctgtgaggtatcatcccccacagctcaatttttctgaaaatttctggttctatattactctttcaccagtcgttttgcaatacacacgccggtcaacgtccccagcgtattgaacaacacgtcgttgacatccgccatgccacgcccggtcaagtactggagcacctcacagaacacagacaaagcaaaaccaaccgcaactatcttcttgccttccctcctccactgccagcttgttgtcccatacggcacatagagaagcaggtttaacaaattgcctgcccatacacccgcattcggccacagcttcaagcggagtcggatgctctcgttataccccgacgcacggcgtagcagcgtaatatagaggattagaaagacacagtacgcaaccgggagccattgcttacctttgcggttgttccatgcaatcgtacccagcagtgccaagagaatgatttctaagagcgacaagtttgcagatgtggcgtagtggatctggctcagcagttctctcaaactccgtaaccccggctcttgatggtttccacaacttcatctacatacttctggcaggtgtcgtggtcaggagcctccaccatcacacgcacaacaggctccgtgccggactcgcgcaccagaatacgaccagtgtcacccagtgcctcggctacggccttgactgctgcctgcaccgcttcatcatcctgtgcagctttcttgtcggtcacacgaacattttccagaacctgcgggtagatcttcagaggctcagccagcttgctcatgggcagcttcttggcaagcatgacttccatcatcttcagactggtcaggataccatcacccgtactggcgtacttactaaagatgatatgaccactctgctcaccgccgatacggcagccgttcttagccatgtactcatagacgtacttgtcacccactgcggtcttggcgtagccgatgcccttctcatcaaaagccttatacagaccaaagttggacatgaccgtggtaacgacggtattggtcagcagcttgccacgctccttcatgtagcagccgtagatgtacagaatatggtcgccagtgatgacattgcccttttcatccacacacaggcaacggtcagcatcgccgtcataggcaaaaccgatgtccagccccttctctaccacgaacttctgcagaccctcaatgtgggtagaaccagcattgttgttgatgttcagaccgttgggctgtgcattgatgacgtaggtatctgctcccagagcatcaaacacagacttggcaatgttccagctggagccgttggcacagtccagaccgaccttgacacccttaaaggagtagataccgaggctgatcagatagcccatgtagcggttgcgaccggacacatagtccacagtgcagccaatgtgttcccgatgggcaaagggcagctccggccagtccttgtcgaacacatggagttttccgtcgatgtaatcctcgactaacagcaagatttcctccggcatcttctcgccatagcagtcgatcagcttgatgccgttatcgtagtagggattatggctggcagaaatcatgatgccgcagtcgaagtcgtccactcgggcgatgtaagccacagaaggggtagtagtgacatggagcaggtaagcatctgcaccggaagcggtcagacctgcgaccaggctgtactcgaacatataggagctgcgacgagtatccttgccaatgacgatacgagcggggtcggtgtcaccattgcgctcacgcagagcgttgtaataccagcccagaaaacgaccaaccttataggcatggtcagcagtcagatcaataccagcttcaccacggaagccatcggttccaaaatactttcccattatagttttttcctcatccaaagagtgatttggcaatcatatgctttagccggatagagatccgttgcctgctgctcaccacgaagaggtcgcatatttgagcagcacagccatgtggcggaacacatgaccgttgtgtggaatcagtattttctccacaccattttattaacgacgtttacatacccctgaatgatgcgaaccaccttcatggacacggtctcgtccacataatcggggcagggtttgcccagaacgcccttctgcttcatctcaatggccatatcggtggcgttgagaagttcccgggtggtaatgccagccagaataaagtcaccagcttccagtgcctcgggacgctcagtggaggtgcggatacacacggcggcaatgggatgcccgatggacaggtagaaactagactcctcgggcagcgtgccggagtcggagacgattgccagagcgttcatttgcagcttattgtaatcgttgaagcccagcggctcattgacccggacacgagggtccagctggaagccactcttctccaaacgatgcttgcttctgggatggcaggagtacaggatgggcatatcgtacttctctgccagtgcgttgatagcagtaaacaggctcaggaagttcttttcggagtcgatgttctcctcccggtgggcggacagcaggatatacttgtccttttccagccccagacgctccagcacatcgcttttctggatcttctccagattcatgtgcagcacctctgccatgggagaaccggtctggtaggtacgctccttgggcagacccgtatccgccaggtacttccgggcgaattcggaatagcacatattcacgtcggagatcacatccacgatacggcgattggtctcctcgggcaggcactcgtccttgcagcggttgcctgcctccatgtgaaacagcgggatgtgcagccgcttcgcagagatggcggacaggcaggagttggtatcgcccagcaccagatagccctccggctgcaattcggacagaagctcatagctccgtcccagaatgttaccgcaggtcacgcccagattctcgcccaccacggggacaagaatatccgggccatattccccaaaggtattttttagctcgaaatcctcccagaacacggtggagaggtttctgtcccagttctggttgtagtacaccacgcagcagtcaaaatattcccggcagcgcttgataaccgcagccagtcggatgatttccggacgggtgccgcagccaatcatgaccttggtgcgcccatcatttttccaattaaaattgtgttccataaaaatctcctaacgtcaaccagtaccttctcttacaccggctcgaagaatgtgtccgggtgattcgggttgaagatctcgttgcaggtcatcaccgtcaccagattttccgtctccgacaggttgatgatattgtgcgtccagccgggaatcatgtggacagcctcaatcttgtccccagaaacctcaaactctaccgtttccccggtgttgatgtttcgctcctgaataagtccgtgacctgccaccacaatgaacagctcccacttggagttgtgccagtgctgccccttggtgattccgggacggctgatgttgatggacacctgaccgcaatcggcggtatgcaccagttcagtaaaagagccacggttgtccacgttcattttcagggcatacttaaacttgtccgtaggcagataggtcaagtacagggaatacagcttcttggcaaaggagccatccggcattttaggcatcataagcgtattcggctgtgccttgaactcctgcagcaagtctacaatctcgcccaatgtgaccttgtgggtcacggggacgcagcagtagcgaccatccgcctgcagaacggtttccacaccgtcaaattcacagtgctgctccttgccttccagcaggtcgaacatcccttctaccaggtcatcgatgtacaacagttccaactcggtactgcggtcgttgacggtgaagggctcgtcattggcaaccgcccagcagaaggtgctgacggcgctgttgtacttggggcggctgtgtcccatcagattcacgaagcggtagacggcaaccttagccccagtctcctgagcatactggaagaatagttcctcgccagccttcttgctgcgtccgtactcgctgttgccgaaacgaccagccagcgtggcttgaatggaagaagacagcatgatggttgccttgttgttgtgctttttcaggcagttcagcagatcagatgcaaagccgaagtttcccttcatgaaatcttccgggttttccggacgattcacgcctgccagattgaacacgaagtctgctttctggcagtactcgtccaactcctccggggtggaatccaaatcatactcgaagatttcttcaatattcaatgccgggcgggtcttgtttttcccatcccggatgttttttaggttgttgcacagggcggttcccaccatgcccttggcacctgtgactagaatgttcattctctcacctctttaatgtactgcggtgcagtccggaatatctgcgccatccggcacagttgcgttattgcagatggtgcagttgctgccgatgcgggcaaagttgcccacagtcgcaccagtgcgaatgacgctgttggtgtaaatcagggcgtagtcccctaccgctgcatcacagtggatttccgttccggcattcagcagaacaccgttgccaacggacgcaccattctggatacaagcgttttgcagcaccacacagccgtatcccatcttggaatacggactgatataggcactgggagcaacgatgttggggaacccatagccaagtgtttttgctttctcatacacctgcgcccggaactggttgctgccgatgcccaccaccagcaggtcatagtttttccgcaactctggtaaatcggaaagacctccaaccaccggaatgccacagatctcagtgtccacgtcttgtccatcgtccacaaaagcgcagtcatactggagcatcgcctgttccgccaccatgcgcccgaatcccccggcaccaaccagcaacagcttttctttagacattcgggatgcccttcagtgcgttctggacatattccgtggtcagaatcttcttgacagtgccttccacatccaagcgttcggtgttgtggctggtgtaggactcgtctgccatggtatgtacctcgcccttgaccacaaacttgtcgtagttcaggtcacggttgtcagcggcaacacggaagtagtgacccatatcctggctgcgcagacgctcctcacgggtcatcagggtctcgaacagcttctcgccgtgacgagtgccgatgatgttcgtaccggtatcgccaaacaactgctggactgcctttgccaaatcgccgatggtggaagcatcagacttctggatgaacaaatcaccgggatttgcatgttggaaagcgaacaagaccagatccacagcctcgtccaggttcatcagaaagcgggtcatgttggggtcggtgatagtgatggggttgcctgccttgatttggtcgatgaacagcggaatgacagaaccacggctgcacatgacgttgccataacgggtgcagcagatggttgtgccgcctcgctcagctgccacacgggcgtttgcgtagatgacgtgctccatcatggctttggagatgcccatagcgttgatggggtaagctgccttatcggtggacaggcagacgacgcgcttgacaccggcgtcgatggcggcgtgcaggacgttatcggtaccgatgatgttggtctgaacagcctgcatggggaagaactcgcaggaggggacctgcttcagagcagcagcgtggaagatgtagtcaacgccgggcatggcatcacggatagactgcggattgcggacatctccgatgtagaacttcaccttcttggcagtgtcaggatgcttggcctgaagctcatgacgcatatcgtcctgcttcttttcgtcacgggagaagatgcggatttccttcaaatcggaatccaggaagtgcttcagaacggtggaaccaaaagaaccagtaccaccagtgatcataagagttgcgttatcaaatgcagacatttttattttcctcctaatcttttatcaaaaaacatccttcaaaagaattgcatcaatcatcagtttgacatttggctgcaagtcttttatgagggccggaaacaaaaggattgtgcttatttgcgtcagcaacgatgccaacgcagcaccagacgctccccacaagggaatcataattgcattcagcaatacatttgttattgctgctccgatatacaaatatttgagataattttgtttactgtaagaaacaacccatgcatttctggctacccccagataggaaaaagctgtataccatgtaatgattctcaacggaactgccgccggggcgtatgcgccaccatacaaaatactcacgatcggagacgctaagagcgaaaagagaagtgaaacacccacagacacatagaacacaattgcataaagctgcttattcttgcgttcaaacagcttcttattatcgaaagactgcaaaataaccggatacagagaatcaattattgcagttagcaaaaacacccatgtattgcacagtgaaactgccgttgaataaaatcccacttccgactcattcaacatttgtttcagcatgaacttatccgtactgccgtaaatcgagaccatcaagccagctaaaatgaagtgatagctactaaagaataattcttttgccttgcgtactgagcacttaaactgagggccgttgtgctttttatacatgacaagaaggacaacagccaccaccatgtagtcgatagaagtcgaaatggcaaaccattctacgctttttcctgttgccaacagccacactttataagcggaaacaaccgtatatgatattaccgtcgcaaaagcagagtatttcgattcaagttttgattgaaaccaatagtccagggtgtccatcacttggaaaaccacaccaatgccgcagagaaacactacaatgtgcgtcgtagtctctcccttatcagcgatcagcgtgatacacaccatcataagtactgataagacgctggaaaccgttctaaggacaatcgccgatccaacggtttcgccttcctcatcgggatgatccacaaaattctttacgataaccgaattgattccaagcgtacagaatgatgcaaagaaagatgtgtatgttgcggcataattaatcagtccgaaattgcttggtcccaggtatcgtgccgtaagtaatccaacaaaaaacgcaagcagcatgtgatatacccgtccggcaataatccagcttgcatttcttgtcaccttactgctcagtaaatctcgtatcttcatacttctagactcctaatgacttttgccggaacaccaccaaccaaagtattatccggtacatcatgtaccacacacgcacaagcagctacaacgcagccattacctacagttgaattgttgcaaatcgtacttctgcctccaatccatgttccgtttccaatcacctgatgataaatctcgccctcaccggctcttcgggtcctatctccaattgcgtgtccgcccgtttgaaacgtaacctctggaccaagatcacaattatcgccaatttggactgtaccgtttccattgaccttacagtttttaccaatccaacaattatttccaatcgcaatggtacctttgcattcaatagggccaactattgtcgtcccgtctccgactggacacccgattccacggagcaattttcgtttcatattgcacgcacgcggttttgttccgacaaaaacatggttaatcaaaaacaggtttagcgttctcttgataccatttaaatgcagcattcttttaagattcatttgcatgataccatccattatccaatatttctgcgctgctgcagggaccatcttcaaacaaattcggcaccgagttgcctttgatgatttccctcgccaattcaacgaatcgaccggatgccacctgtgcgttccatgtatctgaaatcgtggcatacgcattctcgcccgtctttcttctataggcgtcgtcgtccaacaatctacagacctgtttttcaaagtgcttttgattcccgttttcgtaaatcagaccatttacgccatccttgattaagaaaggcactgagccaattgcgtggcttgcaacaaccgcacatccactgttcatcgattcatttaaaacggctccccatccctcattaaaatcactggtaaacaggaacacatcggctctttccatatgagcacgcacttcatccggagacattgcgccaagcatttctacgcaatcttctacgcctttacgccgaatcatttcatggagctgcgcttccatctctccattgccgataacactcattctgaagaagtatcccttttctttaagcgatgctgccaactcgattgaagcatccggatgcttccatcctataagcctgccggcccataggattgaagcctgaggatgcttccatcctgctgacgtaaccgatagctttcgcttcatcaattcagcggcatcatatttttttgtctccgggaaatacccccacttaaaggttcttcccttaaaatttgtgtagcgattcaaatccgtagcagtataggcactgctacagcagaaatacaacgatcccttttcaaacggtttcaaatgcttccacgcactcgcgaaattgtgcgggatccgcaacaaccccgttccctccttaaagtagcgctcactaaacttaaagcacagttttcctttgctcgtgcggcgcacaatcagactatccgggcatgagccgtatatcgctacatctgcatcatcaattagtttttctgcctgatgccttttctcctcagaatcgtaggcacaaagcacaaacgggtatttgtgattcatatcctcataccccatgtcaagtctctcttgcggaatcgcttctaaggcaacaaatgtatactccacaccatcttgacttaaaatttcctgtgaaaaaggaagctgatgatgattcataaaattagaaacgtaggttatcctcatatgttccacctctgtattgtgacagctgacttcggatgattccacaaatcaataaataagaaaacaacagcgctcgacacccggtaagaacaggctcaaaaaagaattgaactgttacagtagccgttatccctgtgatcaacactcgattttcaattggtacctttttatttaggatatacttaagattagaaaaagtaatctgtatggtcacaatccatataagaacaaacggaattatcccagccgagtcaaaaacatccagccaaagttcatgtgcgtaaaatccgactgtacttagcacctttcttccgccccatggataatcaaacattaaggcaatatattgatcccgaacgtttcccctatcgctggatttaaaaaaggaaaacaaatcctgtgactgcgctatattcgcatacgatattctgtgaaacagatatgtcgactcaaacattcttgttattgtatcttgatacctaatgtatactgctattgctacagcaccaagaacaagagcaattagaattagttttccaattgccttcatctttttcttgtcgtccttttgtccccagatatacacaatcatgctcaaaacaaaactaacacctgtcaatgcaaaaaaagttcttccacctaatatcatgtcatatgcgaaggcaatcactattaacaagatacccgcagcccattttttaaccgaattgctttccataatcaggtaaaaaatcacacctgcaaaaagtgttaaatatgttgcagcacccgttgctgatgtttttgctcccagactaaagaagtcgtaatgtgttccgccagaattgattccgccgaaacgaaccaactcatacaaaaaattcacaacagcatgacatgtcatgcctgctaccaacagtgtcgtcaccgatttcaactgcttttctgcctgagccaatgctattcgttcattctgcactcgaagcccgatataataagccatagggcatccaattgcggatattcctgcatttaaaccattctgcgctgaaaaaacaaaaaagacagccgcaaaaaatacaagtacaacaaacacattatcatttgccggaatatacagctttcccctatcaaaaatcactacaagtataaatactgccgcaaggatcaaactgctttgattgaatacgtttaatgaaaacaggaaaagaagtatatatatcatcctgcttgtgaaatttttttctgagagcattctttattcctctaaaacagttgcatacaattcgatataatctgtaaactttttttgcatattgaattttttagaatatgcgacgatatagtcctcatcgttgcacctttttttctcgcagatgtcctttattgctttctctgtcgcctcaatattatttgcttctacaactattcctgttttgtcatcaagcatctccggacttcccccagttctaaatgtgactaccggagttccacatgcaatagcttccatgttgacggtcggatagttttcctctcttgtcggcattgcaaacacatctgccgcactatagatttctgcaagctctttttgattctgagttcgatgaattgaaataatgctctgcggcaagtttttatcaatttcgttatccgtaccgacaaggacaatctgataccgctcgcctagtttttctgccatctcgacaaagcaatctaaccctttgcgataaccccatccaaaggaaacacccaaaactatatatttgtctcccggaatcccgtactgttcgcggaagttgctatgggtaggtttgaacgcatttaagtcaatgccattattgatcacttcaattggatactgttttaaatacgattctcgagccaatcctgccaaccattcagacggcgtaacaattgtcatgttctttacgccggtgaaccatttctttttaagctgccacattttttttgtattgtcatacagtgatgcagggtactctttatattgcggacagttgtggcagccaaccttccacttatcacactttactatagtaaagtgtggacattgccctgtaaatgaccagcaatcgtgcaatgtccatactgtcggaacattgtgcttttttatgtacgaaaaaagcatggaaagattgatatacgaatcatgtaaattgtgcagatgaataatatcgggcttgaattcatcaatcttcttcaaaagtttatatgtctcaaaccacgcaaaacatccattgaatcccgtgattctggcaagcgcaacatttacccgacgactattgaatgttccgattcgataatagccgcagtcctcacctgcatcacggttcgttgtggtaataggcgacgcacacattacctcgtgaccctgcgctcttgctacctcggcaatccccatcatgatttttccggtgcttccttttgccccaccgttaatctgcacaatacgcattcctcgtacccctcactgattatcgctaaaaaatgtatatcctctacgcctcatgattgcctttgagagattgaacagtggcttcggaagccactcacgaagccacgtccggaattcaagcatccattcatctttaactcgcatatcctctcggtcacctttataaataggattcccatcgaaatacttgcgtgctttcgtcagtacctttcctttacggatcacatcaagaatcggaaattcacctcggcggctatctgcgcaacgggcattcaactgccgtgccatattcgtcaacgcaacctcatactgccatgcattcagcgttttcgtcagcgttttttccataaaatccttacgccagatgcctgcgtacagactgacaatgtaatcgcctgcgtaattgttcagcagaaaaatgcctgattccaattccttagcttttctgttcctcaggctcttcatagtcataacaaacagacgcagataatcaatctgatgcttttccatgatttgaatatcttcattaagcgcttgagtagaaatcttttccgtcaggaaatagtcatccaaggtaaagagaacatactctgtcttaatcagcggcagcacaactttcagacgttccgttatttctgtgccttcgcctgctgccaccactgttacattttcaaaagtacgatcagtgggtttatcggttaccaaaaacgtctccacgtttcggtctgcccaattctgattcaaaagcaaaatatgtgcatcccacaaatccgaaaacttgtcgcacgtcgaaataataattgaaaagttgttctccatcaccatgtatcctctgccacttatttcatatgttggattgcctttgcaaccacattttctgaggtcttgcagctagcctgcagattatgatgctctcttgtcatcacaatcgcctgttcgtagtatttcttttgaatttcctgattcgaaatcagctgtgtaatcgaatccaccaatttagctttatccgtacaaaccattgccgcatccgttgactgcatatactcaatgatgccgctttctagcgagccatatgttagaatggatgcgccactcgccaatgcgtccgctgccttcgtagagagtgaataccgtgaaaggttgatgtccttttcctcaaatccctctacaataacagttatgtcgctttctgccatgcgcttttgaacctgcgtgtacggcacagaacccatatatttgacattttgattgtccttgaatacagaatagacctgctcgtccttttcgttggaataaacctccagcatatattctggattgattttcccaagggcgtaaccaatatcgttcagggagttgttgcgtcccataccgatatttccgaagtaagtaataaccgggcaatctttgttaatcacgctgaacggtttacgctgaaccgtagaagtcaaataaaccgtttcgccgtccagtccaaattccgaattatacttatcccgaatcttgtcgctgatgtaaatcgcactacctggccaagccagaaccttgtcaatcaatttcttgtaggtcgatttataaaggtgatagatcggattcagcgtcttttccacattgaaataatagtcatcgccaatgcaggagacaattggcacgttatatctcttggcgacatacattgcaatctgcgggataaaatagtcatccgaaaaagccagaaacacgcattctggtttgaagtcatctagccaattatttagcttctccgtgcaccagaatctcttacgccaaaggattccccttagcaaatgcgtaagaggcgtatgctttccaccgaacttgtaggcaacttctgcttttgcatttccaagttccaaatcattgtctttccactcggtgtcaagctcatcataatgataaattacgccagtatcgactttcttccccatccaccgctgcaacacacggtgatccgtaatttggaaaagcgtttcgcaatgccccttgcacggcttctttgtattagagaatatctgtgcaatattctctttctcccaatagtgaaagtacgcatcaaaagcgcgtgacgttgattttgtgttatatggaaccgttcctacgatcagcactctcggatgcatatcgtttctcctttgaacttttatcgaatatttaatactttcttgagtacggcattttgatcgagcaggcggataaccactgcacatagccctattgtcagggcaaagtttccggcagtcagtaaatacccctcaatactgctaaattggattgcaacactgcttttgaagatattgagaagcagaccgtgcatcatgtaaatttctaggctttgttttcctgcccaaaggaaaaactcccttactttttctttccggttaatataaatctcagcacggcattttggctcatcatcactattgccatcacagtgagtgctaccgtaatcacatagttgaccagaaccaggctcagccccattgggctgtacagcgtcggtgccttgtctagccggatcaaactgagcagcagatagtgcgtgagatacacttccaacgagtgctctccgacccatgcaagagtaccccccccgattttactggagaagattcccttacagaggccacataccgcaatacacccagacaacgatgttgccgcacgcaagataatcgcagagccgccatccgacatctcataaagcgaaattctaagaatgatgaacagccacactacaaagcagattgcaactacgctatcaataatctttttgccaatctcagattccttcatcctgtcatcaaactgaccatataagaaccctgcatagtagaaaggcatataatagagcgtcaatttgattgcaaagaacgaaagccctaaaattgcgccaattccaaccagcagaatcattcccaccaagtagaaccccagaagtacgatctgcctcttcagcaggttttctttgctcaaacgttccgcaacgaaagacgcaatgccaaagatcatgctaatcgtccaaatcgttgcaaggaaccaatagccggaatccatattccataggagatgcttaacgtttaagaaatcatcctctccaaaaatgatgcccctgactaaaaagctccatacagcccacggcagcatatacgcaaccgttctgcgtttcacatatttccacagtcccttgctgttagagatggggcggctatattttgttacatatccgctaatcaagataaacagcggcatctgcaacgaccagatgatgttgaaaataaaacttttctgtgagtcaacagtacatccagtcatcgtatgccccagaacaaccaaaagcatcgcaatgccacgcatgatatccacaaattgatttcggttctctgtcttagcctgcatctcttaataccctttcaaacataaacttccgcagccagttgggagccagcgccgacccgctgcggattacgcaacttttaatgtactgaccatttccaataaagccttgctgtttcataaatttgaacagtcttgcctgcgtcttggcgtatttccaaccggcccgccgtttatacatatccgagccggctcgcatgtgaagcagcggttcttgaatgttatagccttgatatccagccatcagcatccgtagccagaggtaataatcctccagcaaatagaagtcctgataagacccagccgcctcgactgcggattttttatacatcacacaggggtgattgaacggattacgcttctttgcaaactccacgatttccgcattcgtttccggcggcacacgcttcgcatcgacggtgttcggatcagtagtaaactcctccacgataccggagcagatgctcacttcgggatgtgcgttaaagaccgccatctgtttttcacagcgatcctgatatgcaatgtcatcgctgtccattctagcgaccaactcatttttacaatgcttgattccctcgttcagtgcattgccaagccccccgttcttcgcgaggcggacaacattcagagattcacccatctcctgccgctttgtagcaatcacgctatctagctgtccattcagcggtccatcacataccagcacgaaatcatttgtggagagcgtctgcgtttgtatgctctctatcgcctgcttcagatactccggcttctctttgtgataaaccgacataagaacggagtattctctgtattccacaacactcatagtccctctccgcatatcaaagattacagcccagactcatctcaaagagtctgagccgtttattccttatataaagctctactaatcgtcctcagctgtgtaaatcacactgccgctatgtctcttgtaccaccacaatgtcttgtgccgctgcattgggtctccactacgctcttaaattgcaccatttttgacgctacggtagctcccgtctttagccctaatggcaccaacgctcgttacggtaacccctgccttgacgttactgtaagagccgcatttatacccgattccgctctggaattccttccaatttttagcagcttaaaatgtacgaaatcgtcgatatttagtggttttctccactcattgcagtggtttggccctcagaaattccctcggtactttcaggcataaacaggatcttcaccgtagccagcatgatcttcaggtcctcgaccaggctggggtgggcaatatacatcaggtccatttgcagcttatcatacggtgtggtgttatattttccgtacacctgtgcatagccggtgaggccagccttcgcctgcagacgcagcgcaaactccggcatttcttcacagtactgtgctgcgatttccggacgctccgggcgaggacctacaatggacagatcacccttcaggatgttcaccagctgcggcaactcatccagacggcaagcacggataatatggccaaccttcgtaatgcgatcatccttgtcaccggtggaaaggcgagccacgccgtccttttcagcatccacacgcatcgaacggaacttcaggatctcgaagggcttaccatccttggtcagacgcacctgcttatagaatgcagggccgccatccgacttcaccgcaatcgtcgtaatcaggaaaaccgggctaagaatgatcagggccaccagggacagcacaatatccattgcccgcttaacgaacagatactccggctttgccatgtaccgaccgactcgcagcaccggaaggtgaagcatgtgcatcggccaggcaccactcatcagaacatcgcccacacgagggatgatgaaggtattgatgtcgttcatcacgcaatacttcaggatgatgttgcgctcatggctgtgaacgccgctgaggaatacggtcttcataccgtccagaacgctcagatctttcaggcattcctctacgctcagaacatttcttacctcgtacttgctatccaaaccgtagtcccgaatcagcttttccataccacggcgcacatcatagaccacggtggtaggctgcggagggaatgctttgtaataccagcgatgtgcaaccgcagaccagatgccagccatcacaaactgccctgcaatggcagcgattcccggcagaagattgcacagcttagtggccatcagacagatcacaatgtaaaagatcccgtccgttgccatcgccgccagtacctgaccgtacatcaactcggaaactcgctgcatggacatccagaatgcatcataggtcttgcccagcagaataaacagcaccgcatacaggcccagaataactgcatggccttgccaagttccatccatcggtgtttttgccgcatagtaccagatccagcaagccgcaaacggaagtgtgatcatcaccacatccaatacctttacgagtctcaacatcacatcgtgccgaatttttgtcataattccctaactactcctttttcaccctatcatcaattctttttgactctattacgagcccatcttgttccaaatcatcccgatggcgtccagccgctccatccgttcttctgtcagtgcgccgctgcttttttcgggattcagccgtgtgtaacgctgccgcttgacccatttaccgagggcatatccctccggcgaaacatagttgaccgggaccctcagatccccgtgggcttcaaaataacgttttgcttcctgatatccttggttccactggcggtcattgcggttgccccagtacattccgatcctgttgagccgttcgatctgctcctccgtcagctttcctttcgggtacgaccattgctgatttgcgagccatattccaagccgttccccggccgctgttacataggagcggggaatattcaagttcccgttttcctcgtaataggccacagccagggcataggccttttcccacttggcgtcgaagatgctccacaccataccgatctcatccatctgtgcgatgcgttcttccttcaagcagccattcaacttctgctgccgggtcttgaggatccattggcccaagggatagccctccgggtccacatactttccagccaccagcagatctccgtaggtgtcatggtatttctttgcagcctcgaacccgtgctgccatgcaatttccttccgattgccccagaccatgccgatgctgtccagccgtgcgatctgctgctgggtcagatcgccctggatctgcccttcacgcacacggcgctgggtgatcagccacaccccaaggctcagacctccaggtgtggtatatcgtttcgggacgttcaggtcgccgtgctccgcatagtagatgctcgcctcagaaaaatagtgctcccaactggaggacaaactcgcctgtagcctttcaaacaacacccggcagtcctgcacctgctcaatgacctcaaaccgctccgtgacgaccttatcgccctcaccgttggcatacagacggcgaacggcctcctgcatctcgttttgcaggctggaaatactggtcaggccctcaaagttgttgaccacatccaagatcagcggtattgcagtgtcccctgcagtcaaggcccgtccgatctgctgtttgtagacgacaggggagatggtaggtcggaacaggatgaccccggaaatgccctccacatgaacgccctcgttgagcatatcaatgcaaaacagcagcttcagccggctgctggcatccgtcttgaagtccgcaaaggccttgttggcattcgggtcatccgagtaagcctgatacaccacaacattcgggtttaccccggcgaaccactccggcacatgggacaccatctcgtccatatgctccttgttggcgcagaacacgatgtacttaccagatttgtttgtgatatgatgggcaaatactttatccaggccgtctgcctgctccagtgcgcggcgcagagcgtccagatatttctgattcacatcctgaatgcccggtgtccgcaggttgtccacccgtgcctgatactttgcaagcgttttctggtactggtagaccgtggtcacatatttcggggcaggcaaaatacccctgacgactgcttcgccaatgg

SEQ ID NO: 48 - DNA, 17959 bp, unidentified
  source 1..17959: mol_type = unassigned DNA
tcttcagagcagtcttcttctctttcaggtcagcctttaaagtgtcaatgttggcagtgatggatgcgatttccgctgcgagtgcttccttcgctgactgcttttccgcaatctgtgttgcaaaatcagcagtcatagtcttgggtttattcttgctaccttttgttctgggcataataaataacctccagaaaattatagtaattttagtatagcactctgataaggctgtttcaatattacgcttaataaatgcttattttctggtaggctattttcaatttacagactatatcctctatcacgaatcacatcgacaacttcggaaacatatttctgacaagtatcgtgatcaggggcttccaccatcacacgcaccacaggctctgtaccggattcacgaactagaatacgaccagtatcgcccagtgtctctgtcactttatttacagcttcctgtacagcagagtcattctgtgcggctttcttatccgtcacacggacattttccagtacctgcggatagatcttcagcggtgctgccagctcactcatcgacttcttcttggccagcatgacttccatcatcttcaggctggtaaggatgccgtcgccggtgctggcgtacttgctgaaaatgatatgaccactctgttcaccaccaatgcggcagccattctttgccatgtactcgtagacatacttgtcaccaacggcagtcttggcgtagccaatgccctgctcatcaaaagccttgtacagaccaaaattagacatgacggtcgtaacaacggtattgttcagcagcttgccacgttctttcatgtagcagccatagatgtacagaatatgatcgccagtaatgacattgcccttttcatctacacataggcaacggtcagcatcaccatcataggcaaaaccaacatccagacctttctccacaacgaacttctgtaagccctcgatatgagtagacccggcgttgttgttgatgttcgtgccattcggcttattattgatgacgtaggtgtcagcacccaaagcatcgaaaacgctcttagcgatattccagctggaaccattggcgcaatccagaccaaccttcacacccttgaaagagtagatacccaaagagatcagataacccatgtaacggttgcgtccggccacataatccacagtgcaaccgatgtgctctcggtgtgcaaagggcagctccagccaatccttatcaaagacatggagcttgccgtcgatgtaatcctccaccaacagcaacgtctcctccggcatcttctcaccgtagcagtcaatcagcttgataccgttgtcatagtatgggttgtggctggcggaaatcataattccacagtcaaagtcatccacgcgggcaatgtaggccacggagggagtagtggtgacgtgcagcaggtatgcatctgcgccagaagcggttaggccagccaccagactatactcgaacatgtaggagctgcggcgggtgtccttaccaatgacgatgcgagcaggctcgttgttgccgttgcgctcgcgcagtgcattatagtaccagcccagaaaacggccaaccttgtaggcatggtcggcagtcagatcaataccagcttcaccacggaagccgtcagtcccaaaatactttcccattatagtttttcctcatccaaagagtgaatcaacgattatatgctttagccggagtataatccgttgcctgctgctcaccacgaagaggtagcatatttgaacagcgtagccatgcggatgcatggctataattttagagtttttcttccagtatatctgcaatccgcttacaggcttgtccatcgccatacggattgcttgccttactcattgcctcatactcatctttatcagacagcagacggctgaactctttataaatcgtttcttcttccgtgccgaccaatttcaacgtacctgccgcaataccttccggacgctccgtggtatcgcgcatcaccagaacaggcttacccaaagaaggagcctcctcctgaattccgccagaatccgtcagaatcaaatagctacggctcaggaagttatggaagtccagaacatccagcggttcgatgatatggattcgatcatcgtcacccagatactcatttgcggtttcgcgcacaacaggattcatgtgaatgggatagattgccttcacgtccgggtgctcatccatcacacggcggattgccttaaacatgtgacacataggctcaccgagattctcacggcgatgggcagtgatcataatcagacggctgtcccttgcccattccagttcagggtgcgtatagttttcccgcacggtggtcttcaaagcatcaatagccgtgttgccggtaacatagatgctggccgggtctttgccctctttcagcagattctgcttagaaagctctgtaggagcaaagttgaatttactgataatggaaaccgcctgacggttgaactcttccggatacgggctatagatattgtaggttcgcagaccagcttctacatgacctacaggaatctgcatatagaagcaagccaatgcagtcacgaaggtcgtagatgtatcgccgtgtaccaatactacatcaggtttttccttttccagaacagccttgatactattcagaatattggtagttacgtcgaacagcgtctgcttatccttcatgatggacaaatcataatctggtgcaacagaaaacgcttccaataccatatccagcatttgacgatgctgacctgtcacacaaactactgtctgtaattcttttcgctttttcagttcatttacaagcgggcacattttgattgcttccggtcttgtaccgaaaacgagcattacttttttcatatgttctcctcttctctggattttacttttaatattttatgagtcaatagaagcgtcaaacctgcttcaccaatagcagctgcactagaaacaccatagaccccaaaagcgaagcccagtgcaacatttagcaacactgtaacaactgcacttaaagagaatgcctggctatactctttttgatgtccacttgctacaagaaattggattcccagaaaattgtttgtaattgacaatatcatccaaataaccaaaggtataattatattagaatactctgtataagctacaccaaaggcaatagaaatcaaaaagtcgcgcagcaaaataatcagaaatccacctattgcaaaaagacccacgatacacattgctgcctgctttaccgttttgcatcccttttggaaagattctgagaatttcacactgatgtgtggataaagtgcttgactaactggactgaaaaacaaaatcataatatagggaatcttatatattgcagaataaatgcccacaatgcttgaaacagctactgtaccaagaaccgtgactcccacactgctaaaaattttagacattgcctgggaaacaaacaaataccaaccatcttttatttcatcaatagcttccttaaatttgcaaagccttaccttcaatccatacttttttcttgacaaggccaaacctaaaacagccgaaaaaataaatgtcactgaatagcaaaagcaatacaaatataaatgagcttccgttttaacaaccaagaaaaccagaatcactgaaatcaggcgagacaccgcattgattatggtaatcagcttcatgtcctgttttccctgaaaaagccaggtcaactggaatgcaacgccaataatcacaagaaataaaatgttcatacttacaaactgttgcacaccaacatgtgttacataagcaagaacattcattcccaaataggaaactgccagcaataaaagtcttgcgcttattattctactatataagttttgtaaatcatcatctccttcgatagatacctttcttgctcccgtaaaaccaaaaccatattctacaataacctgaaaataagtcacccagttcagagataatgaaaaaacaccatagttggatgtgcccaaaactcttgtaatgtacggaagtgtcagcaacggtacaactgtattgaaaatctgtaagatgaacagccacattccattttggaaaagcttggtgcccaacattttttttattttatccatttatctccttcccaacactttctttacacacattttcgccgcatgaataattggtctcttcaacttttcctttttaaaaacaacattacatgccttgtcaaaacctttctccggatacaattccacaaagcgattacggtatgcggatggagtggatggattagcaagctgattttcatacttcagtgcttcttcaatgggtcttgaatcaatagaaaggtatttttcattccctagctgtgcaagaaacttctgtcccttctctgaattacaaagcacacaagaaacgccttgatatttcatttctgcaagatttccgtcaacagaagccactctaccgagtccagtaaagtctccaatggttaaatcgccacatcggttaggtcccgcatacatacaactataacaattaggtctgtaaattgttgcgttgtgatatccaatctggaaattatcattactttctacgtatttatgatagttcttcccattataatccacactaaatacgaatttggatgtcataaaacgttcatctctaaatgataatctgtcaatttctgcccccccattgcatatgtttttaacatgctccttaatgtaactatcagaaggcacaccatgacaaatgatatcgattgtaaacaggttctctgtgtcaactttttttatttctgcatatttttttactgccgctacctggcaaggcaaaccaataaagacaaacggctttccattttttaagatatcagcgatatcttcactaatatttcccataaaagaaaatgtatactttgaattcgtaaattgatgaatatcatcttctgataatcccagtttatacttagccgtcaattctttgttatcaaaatacacacccgcaaatgggatatcatttttcaggcaccatctataaactgcttgcgcaacaccgccagatgcgctagatttccgaattgccttgtttgtagcataacaggagtaacactgctttggtgtaatcttttctacttgattaattgcgggacacgctttttggcataagccacactctacacatttactgctgtcgatcaccggataaatattgttcaacccatctcgtgtaaacgcaacagcgtttttcttgcataccaatctgcaatttccgcaaccagtacaggagtctttgcttgctagttccattgtctatctcctttctgttatctgcctattctaagcactattttcggatgttttatatgctgctctaggtagtacataaaaataaaaagaatataaacaacatatacatctgtattttgtgtcagcaaaactagaatgagcataaaaaccaaagattttgatttagtttgcttcataccgtctgcaaaataacaaaagcctatcagtccgaatataccaaccagataaccaaaatatccaaaattgcacaatgtcatttcataccagcaaggtgttgttcccgcaggcaactttgaaataggaaggccaaggatagatgacgtcaaatattgatagtgactatatggcttgttgggccaaatgattctcggaataaaaataaaaagcgtcgaaaaaaaactttgtcccggataatccaagatgtgatttttcttgaaaaactcctcatatataacatacttaataacatcatctcttccgaaatcaactcgaagcatgtcgtacacactatcaaagttcatatttgaaaggggtttaattacagccaggtaaaatgccgaaaaggcaatcaatgtgattcccataatcgggagtacccaaaagattcttcttctgcctttttctcctagctctgactttgtaaggaagaagagataaaagacgcccataactgcaataataaaacgttttccctgtagccaagcaagaatgaatgtaatcaatgctagcacacacatcttttttgccgtgattcttccagagaacaacataatacatgtgcaaaacaaacttacaagaatcagcgaatttagaatcaaattgtcctgtccgcttacacctctcaagttcatagaactgtaaattaaaaatttactagcgttaccagataacaacacataaagtgctggcgaagcaatccccaatacataaatccaaggcttttcattttcgcttcgtaggattgcgtttagcgcagtttctcttgatgccaattttttgttcattttagtgccataattatacaaagcaagaatggccaatgtgatataaatgtcatagatagcaccaacgtcaacactattcatgggctcaataaaagctttgtaccagtatacaacagtgtattgtggcattccaattaggtaattcaatataattggaacgcagcaaaaaatatatacaattaatattacataaaatgatacagagcagtgtctatcaaaaacgagttttttatatgatttatatgttacaatcgttgtaatcaaaatcattaaccaatctacgattggaaacataatctacctcctctataccatataattcacttatctcataaaatgccattttctttaataatccgtttcatcaatgcttcattatctgttccctgataaaaatcataggcgtttttagcatacaaatcatagtgttcttcaatatcacgaattgcacgcatcaaagcatcttttttcatgggtacacaaacgccagccttggcagccccgattgtattaaccagaccaggaacttcatttccgattgcaggaatacgcagaccagagtattcataaatcttatttggagcacaaaatgcacggttcaaactattccgatcgtcataaaagacaaaaccaatagcagcatagctagtcacttccagatgatatggtgcaggaatattcttaataaaaacactcttatcatattcttttttaatatctgcaaaaatattttccgggtccagccccatcaacacaaagtaatatccagtattggaatcacgaattgcccttgccatctccaacatataatctcgacttttcaagattccctgataaataataaatttcttatcctggactagttcaattgctttcttggtcgcttcaatagacggcgtcttgcgtctttcgtcatgaaaatcgtatggtttattcggcataacataaggcaacttcttcagaccataccagtttctcataataaaagctctcgttgtctcgcaacaaacaatgaactttgcatctcctgtgagcatactaaaaagtctgttcttagtcttattgtcatccaagagctccaaggacgtcagcgcgtaattatatcccttcagcttgcccaccatcggcatggcagtctctgcggttccaaaccaaaacagcgtttgtgaagcatcctttacagttttcattttctttttcactgcagaagcaaactgataccagttattgagtctatccagttttccgggcagttttccacgctgttcgtgaagatcaacataaggaatattttctgcatcaaaaattgccagcagctgcttagcgcaagagccataccatacttcaacatccacaccgttcttcttcaacatacgaatttgtgcaatgcaagggggataaatatgtaactcagatttcactatatagataacttttttcatttcactaccctctcattatcgattgctctttgaagaaatgcctttgatgcatctgcagccgatcgaattttggggtctacttctgtgtaatcaatctcttcttttggaataactggtgcatcaccataaaaaattctactctcaaggccaatcaaggtcagataatcccgaattctggaatcagtgctttgcctgttattgatcacggaatacatgggcttgttaaatattgtagagaaaaccgtaccatgatatccgtctgtcatgacagccgaagcatgatacatataattcaaaaattctaccggacttgcatcattgataaaattgccacggaaggattctttttccaaatgcatccaaatatacttaattttcagtccacgctcttttgcaatctgctctgcaattgccatgttctgcttgataggtttcttatcaatgagatagcaaagcaggtatttttccttagcaagcggactgcttttatctacaaatgtttcccaatcttctcttgtcagtaaaaggaccggatcaactgtgtccacaacactgtgcccgcaaattgcttctactttttctttcgcgcccttttctctcaaaccaacatacggaaaatcctttgcatatttagaatatccacgaatatcctccaaagatgactctccgatacttactgaatagccaacctttatcgccttcgtctcaaatgggaaaaagaacatctcgtcaaaatcaaagatatgcggattccacacctgatcactgccggtgataatggcccgatactgttcccggtccaccaatgcttttagctgctccacattttcaactttttctgtatgcggaatataattttctacaaaatctgcaaaccctttttctttcctgagcctctgctttacaaatggcagcaatacaacattcacaattacattcttaattccatctttcttatgaaagacagaattgtttttctcctgaactctggaaattgcattcagtactgtagcatcgtaccccactttctccaaatattttctgagggcatagcactgtagaactgctccatagtttctggcgaaatgatatgtaatgattccaactttttctttactcatatatgaacctctatctctctcctatttctttattgcacgcttcgctttctccaacaaaattgtaggattgaactgataatacagcaaatcaattacttcaagactacccattttattgagtgtatgtacacgtcgatagtttcttttactatttatggtcatgtcagagacagaataagtaccaatttctttttcctgcaacgtctcgccatcaaaggaatctaatttgcacaaacgtaaatactcaccatatactctgccgcattcctgcaaagcatgatagattccattatcatattgaataaaattaccagccggtcgcttatccacatagtttcccttaagtgcagcaagttctgccttccatgtatttgtatcaattttgaacaacacattctttttttccggaagtttctgtccaacagcgtacataatattgtcctctgtcttaacaaagacggtatccacaaccgcaatatcatcatacagaacagactgcagttcccatttataagggaaatctactgctttataaagtcgcagctgattagcttcgctggtttccggcatcatataaatatcgtttttaaatttaaaagtattaggaaacgacatatggaatggttcattaataatttctacaaatcctttattatcctgaaggtcaattacaccgatcgttcctttttcaccgttagcatcatccattatttctacaaaaatatattcccgacccttttcaacaaaaggaaaggagtccgcataccaacgatgtaatgttggctccaacacctcaaatggttgagtattatcaaaatgtgtagccttatcattaacatgccggtagccaactgcataagctcctttatagaaattatgcaaaaacttttttattttctttttcatctttcctgctcctccataagaatactatcatacaagcgattaacctgaacaatatatgctgcataactataatccgcacatttgaaagagtctcttatatttttttggaacctatctataacagtatcttccaatgaaatctgtattttttgtttcagagcctcaacatcacctgcatcataaattaaaccatttatgccatccgtaatagtttccgtagcggatgtacagtctgtaacaacacacggaagccctgctgacaatgcttctgggatggtcaaaggcgatccctcattacagatagatgggaataccagacttctggctgcctgataatattttgtcagctgcgtactattaacccagccaacaaactctattttaggatatttctgctttaatgtatcaaccaacggacccactcccacaacttgtccgcgaatgtcaacgtttttctgtacttctgtaatagctttacaaaaatcctctacacccttttcttctgatactcttcccgcacaaagataaatattgctacaatgatggttcattaccatctgatctgataagtcgatgggatttctcaagtaatgaaattttgtcgacttcaaatatggctgtgacaaagttaaaattctattagagatatatgcaaaatgaatgtccttagcgttttttacatatcgattttgaactaactgtctcatacagcgccaaattttttgaaaataggaacgtttgtcacaattacaggatatacatttccaactcatcggctctaaatgacaaagctctttcttctgataattaaaaaagcctccatttggacataccgcaaagtagtcatgtaatgtaatgagaaccggaaaatgcatattctgagcaaccgcaacaacagatactgacaacgctttgctccacccatggatatgaataaccgtatgctttggatctaaatccgataacaattttgcaaattctgtttttgcctgtccattccaaatgccatacaggcttgctttaattttatttttattactagcaatgtgtggtgtatcaatgcaaaccaccttgatagcttcgttagattgcagacattcatcaacttctgcatttgcggcaaaataaatcactttattatctggattttttgccaattcaactgcgctttgaatagcaatttttgcagcacctccgctgatgactgccttatcataaaccattacaattgtttttttcatattttctcccattgttctatagtttttttatgatacgatatttcagccattccggaatatgatttttaacaacgttctttatggatttttgaggaatcatcctttcaacaagattactctcattcaagctatatttcatcttacagttagcatctgtacttttaataatactggaattacacgcaacaacagtttcatattgagattttttctttcgaattgctgtgtctggaatatcattgaataaatgcttacctttatcactatatatcaaaacggcagatgcaccatactttgcatcaaaatcaggatgggctttttcaattccccaaaaatcacacagcagtatatctcctgtgtgaccagcacctttatatttgcaatgatagcaagtatctcttaatgtttttcctttcaaaaaagcggcataaaacggatcttcattggaatacttataaaactttcttccagtcatatcttcgaatgcaaaagtataatgctctccttttttgtgtttcactttatttctgaatgtatattttgcgattttagtattatatttattttcgagccaatcaatatattttataaatagtccaggggcaggaacaccgtggcatgccacttctacagtatataaagactcgaaatcctttcccaaataagatttaagtcctgctatttggcatcctgttccactatataaaacgggtacattgttcttcaacagatcttgtacctctttgaatgtatctgctgtgttcgattgaatatattttgatttttgaatgctgagcaaaccatctttccgagtcaccttaatatgttttagatggaaatcctcattccatgcacaaccaaatacagcaccattttgagataagatttgttctgctagtagcgctaaaacaccacctgatgtactttctttcaaattctcttttttaatatctgccgctgcccaaacttcgattacttcattttgagaatagggattctttttttctggacatacggcaacacacaaaccacatgccacacacccgtcgccaatctgaggaatcaaaaagcctcgatcgttttcgaccatccggatacattgttttggacacttctgataacaagcaccacaaccattgcaggattcttcacttatattttctaaactacgcttcatcacttacaccttttaagcatgtatttaaccactctctagacgcagatgcatttattttcattctcctatgcaaggcttcccagttaaaatcatgctttttatcaacatcctgaatttcagacaccatgcaatcttcacacccatatgtttccagtaaagtgtaaattctggaattttgggatttaacactcgtatcatcgaatcttttcgttacataaaaatcctttttgaaaacaagtgaaaaaatgctgccatgaaaagaatcagtaactactgcacatgaatttttaaccaatccaagccattcacatggaccagcattctgaataattgtgccgtcaaatttatagtgttctttttgcgttggaatcaaaacgagttcacaattatatttctgagcaactttctttgcgatttcttcataagattccttgtttgacaaaaaataagcaaaaacatatcgtccatttatgtgaggattaacagcaagctcattccattcctcgtgttctaacagaagcgttggatccacattcatggacacattttttcctatcaatgtttttacgatttttacacctgtcttttcacggacagatatctcaacaaatttttctagatactcccgaataattttcatttttttactaggaatttcactgacaccaaaactacaggcatacgcatatctgcgttcattctcagacaaaaagttgaaatagtaaactggattcagaagcattggtgaccaaatttgatccgatccgcatatataagcatcatattttcctgataattccgtcaattcatttggttttgaatattgtttggttagattaaagtttttgctcagaaactgttcaaaggctttattcctttggcataacaattctggttgtccctgttttttactcaaatatccatcaaacttttccttaaacaaagaaaaagaattatgacatttgattagattcttcgctttttctatcgtagaaggtttataattaatattgctaacgtcatatccttctctccttaaaaacctctgtaatgcataggcttgtaggagagttccataattcccgttatgcagccatgtcaatatcgctattttcattattttaatccatttccttgttgaataatttgctatgttcctctgaaactcttcgggcattgaacctgttatgcacatcttccagaccttgtgctactatcttctttctcaatccatcttctcgaaggattcgtagcacagccttacttgctccaatatcatcatctacctcaacaagcagaccattttctccattccggattatattgggaatggcatccactctacttgctacaattggtttgccggccatcatgtattcaggcagtgccaatccgaagccttcccaacggctcaataggcatgccacatcaaatagttcaacatagctcatcgggttatcaacccagcctgtaatatgcagactgttcgagaagccattgtcctccgcatactttctgatttcgtcttcctgatttccattgccgacgataatgaagtgtgcatttggaacttcatctttcacatgctttgccatcttaacaaaaacatctggtgctttctgtgggctcattcgtcctaccatgccaacaacaaatgcgtcttctggaatgttcagatctatcctcttaatagtaccacgcactccattttcataggattcgatatccacaccgttaaaaatgacttgtagtttgtcctctctgcaaatcttcttatccaatgcagactgcttctccgcatctgaaatgcagatgattttatcacagaacggtgcagctatcttttcaatagccgtgtacattgcctttttctttgcagagcatcgcatattaaatgcccacccatgtgggttgtatatacagtgattcttcagaccaatatccgcaacacgagtaattgctccggctttgctggaatgagcatatacaatatcggggttatatttttttatcagtgctctaacctctttaatcgcctttaagtcgctacttccaatggctctggtcatctcgacctgttcaaatgaatccaccaaatctctgtagtcttcttcatggaaatcttgtgagcaaaccaatatattctcaaacttctctttgtctaaatacttgagaagcattcggatgtagcggtccacgccacctgcggcctgagccacatgcagtattctaattttatttttcatcatccctcaaatactcctcatcatttatctttacactaatccatatcctcgatttcttcattgcacgacaacaagcccgtatacagattgcagcaacaatctatacacaggctcgccttcgtacctccttattctgttttctgctctatcagctttcgctgtgggtgggttaagtatagagcgcaaccagaagccattagcacctgaaatcacgctggccgcaacgcaccatgacaggcagaaacaggttgaggtgaaaaggtcaagccgcgtaaatccgcatgaaatcaggcttttctctggttgcccatattatttcacactccccatccgggttcagatacacagttccacccagtttatgtatttctctgtaaaaatgaccagcaaaaggcccaatgcggcaagccatgatgtaaacaatcggatgcgggatatggtttttcttgatatgttcgcaacaagcctttagtgcagcaacatcataataaattgcctgtgcagagccaatctgaggtacatctattttgaagcagtgggcattgtgaagttcaaactcgtgatcattgatctttgtcacgccctcaaacttgctctcatccatgcaaccatcgccattggctttgcaggcaacatgatatttgatgttttctttattctggtgatactccgtgagcttgtatacaaaggtttcatatccaccgtaagcccccaatgacttcgcgcccacaagatatacatgctgcacttctttttttgaattcattcctctaacctatcctcgctctttcgtatctctacctcaatgccaatctgaacattgctccagacacaacagttccttctcttagtttttcgtgcctattatcactgcggcaccaaataccgcaattctaaggtctttttccatctcgtctttccaaccgttttccttccatgtactattttttactctccatgtcccagcaggcacaccttgaaggtcttaaaaataatcttccaatccacccagaagctgcgctccttaacatacttcacatccaaatccatccactcttcaaaagagaggtcattgcggtgcggggcgatctgccagtagcagctcaggccgggggtcacatacaaccgctgcttttcatagtcgccgtactgctccacctcgcggggaagtgccgggcgggggccaacgatgctcatatcgcccttcaggatgttccacaactggggcaactcatcaatgctggtcttgcggataaacttgcccacacgggtaatgcgggggtcgtccttgatcttgaacacgggaccatccatttcgttctggtctagcaggtcgtccagttttgcctctgcattggggcacatggagcggaacttatagaacttaaagggcttaccgttgcggccgatacgctcctgactgaaaacaggacccgcagacgggtcatccaccacaattgcgatggccgtagccagcatgacaggcgacagcaccaccagcgccaacgatgacaagatcacgtcctgcgtccgacgcccgatccagtacaggcgatggtcgcgcagattttccttgcggttaacttcaacttccttatcgattccaacagtattcgtagccattttttctcctcacataaatccttgtctatgcacttcttatcgtcattcgttttatcgcaattttcagaaatagtgccctatcaacacggcatatttgcgatatgcagtttgcggatgctgcttgcgcattaaaaacacaaactgctataaagtaatccctttaactcacaccgttcccgcaagcaccttccttttagataaccgttcctcttttcctaaaaccggcagaccgttattcctgatctccgggcaagcaaaagccctcggatgacagcttcgcccaaggtcatttcaaatgcaatgtggccgtaataaaagccagaacgtcatgctacagctcaagcgccgcatgtgtattgcttccagtatgcaatatttcacatttttgtagaacctcaacaagcccacttcattttcacctttgcgcatcacgccagcaagggaaacagcagtgggctttttattttgatctatcattcggatttcctcatgatctatcacatgattgttcgcaaacagacataagcccactggattcacctccttaccgcaatcaaggcgtatccttccattacaaaacagaggataccagttcttctacgtggccgtctgaattctcttattattctatcatggttatatctgggaatcaatagaaatccgaggaaatgtatccatccatgttttagaaaaaaatgcgattcagccagaacttttttgcacattgcccagtttcgcatgaaagctccagatgaaatcatcgatggacaaaatgtgtggtcatatagttgtccaaggcgttggaggttacagtctggttggatagccgctctgatgtaatgacaggcgtcaaatagagaacgccccctcgcacggaaaagccagttcatgccgtcacatcagtcaggagttctgacgaggtatatcgcacagtactacacaatttttatcctctcccctgctgcccctatttatatataggtacaatcagcatcccgtcactgcagctaccacctgctctaaatcgggctatttgttcgtgcaaaaaagcccctgccgatcacatttctgtgaaagacagaggctgattttacagcaatgaatccgtcatcgtctgataaacgctgtccgcattttgctctacgctctcatttataatctgcaccagcatctccgaaagcgcagttcgttcgcccggagctgtgttcagcacgatatcctgcagaatgtcccgcaagattttttcccggtctggggagataagacaactccgctgttctaaggaaagggagcccgcctctggatttttaaccaccccgccccctgttgcgccggttcttgcgtagagggtctgcaaaacatacccctgcacactcatgttttcggctgcagcagactggcggattattgcgcccatctccttggagggtcgaatcatgatgttgtcttggcgccgattatattctatatttgccctgctgtgcgcttcttttgttgccataaatacacctattataataaatttttgcaataccagttaattggtatcattgtgcattttctgcagagataaaccagttaacgttgtttattctgtcaatagacacgagtccagttaactggtatactcatgccatcgggaacaccggttctcacatccgaccattcacccaacgatttgaagagaggtacacatatgagtatcaacgttttactgacccttgtcgagcagtacaaggaagccgcccaactgatcgaggctgcacaggctgaacaggaacagctgaagatccagatccgcgaggcactggctgagcgctccaccaactatctggaagtaggctgccacaaagtcc

SEQ ID NO: 49 - DNA, 12086 bp, unidentified
  source 1..12086: mol_type = unassigned DNA
ctacccaatattcgcatatcgtgggattatcatcccacttttatgctcatatcggggcgggtcctaaggtctttcacccacctatgagcaagctcatgtgggcttagaccttttgaccctggcatcatagcatgcaagtatgttattcaggaaagctctggaagagcgattttgcgaatggggttctgaatagttaatgttatttttaagagcgaatcgcccgggaagggcgatttgctcttttataaaagtggaggtatccgtggcaaagctgaacatagcaaaccttaagaaaactctatattatttgcaacgcaacggcctgagggaaacctggatctctgtaagggaacgcctgacagagacagaccgctatttttatgtgccctgtccggaagaggaactggaaaggcaaagttgcagaaaatgggataatccggttacactcagcattgtagtgccgttgtaccgtaccccggaaatctatctgaacagaatgataacaagcgttatgcaacagagctatcctcactgggaactgattctggcggatgccacagaggatcacagtgtggaggagacgttgacaaatcagggattcctgacagaacggctcctggaaaatgcggaaactattgcagcggatgcaaggatccactatatacaccttacggaaaatgccggaattgcggcgaataccaatcaggcattaccctatgcaaggggagaatatatcggcctgctggatcatgatgatgtattgacaccgaatgctctgtatgagatggcagatgctattaccaaagcaaatgacagaggtgtcagagttgcattcgcttattcggatgaagacaaatgcaacggggatgagacaaaatattacgatcccaaccataaagaagactttaattacgatttaatcctgagtaataactatatctgccattttctggtgatggatgcagatctgatgaagaaactggccttccggccagaatgcgacggtgcccaggactatgatctggtgctgcgggcagtgtcagaggtgctggctgcggatggccgctccggggaggagagaattcttcatattcccagagtgctgtatcactggagatgccatgaagcatctacagcagccaatccccacagcaagaaatatgcttacgaagcggggctgcgtgcactgcaggatcatgcggcagaacgtgggatcccggcaaaggcagaggagaccagacatgtaggattttatcggttacaatatacagaggtattacaggagagaccggatgtggctgccgtaggtggcagagtgctgtccgggaaaaaccgcggcaggatcgccggcggcagaatgactgcggacggaaaggtgttctacgagggactgccgaaggactttggcggttatcttcaccgggcggagctgtcccaggatgcagaagcgttagaccttcgctgcatcaggatccggtcagctgacagggaattgtttgaaaaaatcgtgggagtgccttatacggaagtagtaagaggtccggaacaacagccggtatttgacagctccacactgcctgccggggcagatatccggcttttaagtctgcaattatcggaagcattacgaaaacggggaagactgctgtatctgccggagtatccggagaaatgggagagactatgaaggaagtaaccgtcgttatacccaattacaacggaatgaaatatttaccggaatgcatggcttccctgtgtcagggacaggaaaatgcaccggaatatgaagtgctgatcatagacaatggttctgctgacgggagcgtggaatatctggacagcgaatggtgtcgcaaaaaagaggcaccggcagaagaggggggaaaaccgcaggtgcgtctgattgccctgccggagaacaccggcttctgtcatgcggtgaatctgggaatccgggaggcacgaagctcctatgtgatcctgttgaacaacgataccagagtagaagctggatttgtgaaaggactgtatgatgccattcggaaggatgaaaagatcttttccgtcagcgccaaaatgcttatgtgggataaaccagagctgctggatgatgcgggagaccgctactgcgttctgggatgggcatattcccggggaaaaggccggcctgctgtggattatgacaagaatgtcagcatattctcagcctgtggcggagcggcaatttacagacgtcaggtatttgaggagatcggctattttgacgaagcgcattttgcttatctggaagatctggatatcggttaccgtgcccggatctacggctatgagaaccggtacgagccgacggcatccgttctgcattacggcagtgcttctacgggatcccgctacaattcccggaaaacggaactttcttcttccaataatatctatgtcatcggcaaaaatatgccgctactacagtggatcctgaatctgccgttctttttgcttggatttggcataaaatttctgtttttttgtaagaagagaatgggaaaactatatttaaagggattggccgaagggtggaaacgtaccgtgggtcctgtgggaaagcaggcaaaggtgcactttcaatggagccatctatggaattatgtgaagattcagtggcaattatacctgaatgtttttcgaattcttatgaaatcttaagaaatcgcttcataaattcttaagttgagaaaaaaccaccgttattgtagaatgaaatcgttgaaaagaagcttttcggacttaaagattgggtgacccgtatgataaaagacaaccagaaagtctttaacaggcttcttgtgataatagatgcgctgatcacggcagtatcttttgtccttgcctattatatcaaattttatatcttaaatgacggtccggggatcggtgtcctgccggtgcaggattattatatgctgcttccctttattgtacccggttatatgttcctgtattaccggtgcagtgtgtattccccgaagcgtacggttcgccgcagacatgagatatacagtatcctgcaggcgaataccattggcctggcggctttgatcattattttatatatgatcatccgtgagatcaatttttcacgatccgtcatggcaattttttatatcctgaatgtttttctgacttccgtattccgtatcatcatgcgcaaggcattgcgttccatacggaaaaaggggtacaacctgaagcacattttgctggtaggttattcccgggcggcggaggaatatatcgacagaatcctcagcaatccccaatggggatatgtagtgtgtggtattctggatgagcacatcccgggcggcacgacctataagggagtgaaagtactgggaacgcttggtaacctggaatacatccttccggagaacaagctggatgaaatcgcgatcacactttccctgaaggattatgattatctggaaggtgtggtggatatctgtgagaaatccggggtgcacaccaaattcattccggattacagcagtctgatccccagcagaccctatacggaggatctgatgggattaccggtgatcaatatccggtatgtaccgctgacgaacacaggcaatatggtgatcaagcgggcaatggatatcgttggttccattttcggtatcattattacctcaccgatcatgctcatatcagcaattctggtaaagctgtccagcccgggaccggtgatctttaagcaggaacgggtaggacttcataataagccgttttatatgtacaaattccgcagcatggcaatgcagacggcggcggaagagaaaaagggatggacggtacgcaatgaccccagagtcaccggtatcggtaaggttctcagacgtaccagtatcgatgaacttccccagctgttcaatatcttaaaaggagatatgagtctggtcggtcccagaccggaaagaccgcagtttgtggaaaagttcaaggaagagattccccgttacatggtaaaacatcaggtacggccgggactgaccggatgggcacaggtgaatggcttgcgcggtgattcctccatcaagaagagaatcgaatatgatatttactatattgagaactggaccattggatttgatatcaagatcattcttatgacgttctttacaggatttatcaataaaaatgcttattagtacaaggagaagacaagatggcaacaaattctaacaacaatggcggcaatggtcagagacctgccggaagcggaagaaaaccttccggaagcgcacagagacctacaggacagagacccgccggaagcggtcagagacctgccggcagtggacagagaaccggagctgcgaacggacagaagagaatgtctgccaaacagcgtgcagccaagaagagaagaaaggttatcatctttggcgtagagatcgtagtgatcctgttcatggtagcagtattgtatctggtaatgactcataccagcaatgagggccccaaggtaaccgttctggagacagaagaacttcagattcccgaagaggtgcagcaggatgaaactatgaagggctatatgaacattgccctgttcggtgtggatgccaccaaggaaagcctgttgtacaagggcagccgaagcgatagtatcatgatcgccagcatcaacatggataccggtgatatcaaactggtcagcgtatatcgtgatacgtacctgaatatcggtacggattcctaccagaaatgcaatgccgcttattcctatggcggagcagagcaggcggttaagatgctgaacatgaatctggatatggatattacgaactttgtgaccgtaggctataaaggactgagcgaagtgatcgacggtctgggcggtatctatattgatgtggactctgaggagatcaagcatatcaacaactatcagatcggtattgcagaagttttgaaatgcgattatacaccggtaactgagaccggtatgcagctgttgaatggtctgcaggctactgcttactgccgtatccgttataccgctggtaacgactttaagcgtgctgcccgtcagcgtgaagtcattcaggcaatcgaagatcaggcaaagaaagcagattatgcaacattgtccaaggtattcaacagtgccatcgacgacatttacaccagtctggattccaaggacatcctggatctgctgggcaatatttcaaattatcgcatagtggacgaaggaggtttccccgaagagaccatgcgtgacaccggcaatatcggtgcaaagggaagctgtgttattccggtaaatctcgaaagcaatgtagtatggctgcatcagttcctgtttgatgatgccaactattccgtaaccagcaacgtgaaggaatacagcaataagattgaatctgacacatcaccttatatgaataagtaagaaacagtgtatagagtaaagcaacaggaatacaagggagtcttccggaatctgccggggctcccttgtgcattacccagaaggttataatcctcttggacagtaggaaaaggcttgtgccgcaataagagttaaagtataatgaaccagagattggaaaagtgaggagcgatctgacatggagatagatgtgatcattcccctgtataagccgggaaaagaattatttacattattggataaactgggcagtcagagcgtaccggtacatcaggtgattcttctgaatacggaagaaaaatattttgatcagctgatctacggaatcagatttctggaaacctatcagaatatcaaggtataccatgtatccaaaagagagttcgatcatggcggtacgagacggatgggagtaaaaaagtcttctgcggatgtcttcgtgatgatgacacaggatgccatgccgaaagatgacaggctgatcgaaaaactggtggaacccctgcagggggaagtggcggtggcctatgcgagacagctgcccagagaggattctacaccggtggagagctataccagagaatttaactatccggcaaagtcccggatcaaatcggcagcagacctggacagcctggggatcaagacctttttctgctccaatgtctgtgcggcctatcgccgggagatctatgaggaactgggcgggttcgtcagacatacgatatttaatgaagatatgatctatgcggcaaaggcggtggaagcaggatactctgtggcttatgcggcggatgcgcaggtggtgcattctcataattataccaacgggcagcagttccacagaaactttgacctgggagtatcgcaggcagagcatcccgagatttttgcagcatatccttcggagtccgagggaaaacgaatggtgaaagatgtgacggtatatttgcgcagcaaccatatgtctgccggattgccccatttttatatgcaatgcgcctgtaaatatgcaggttatttactgggaaagaactatcgcaggctcccgaaaaaatgggtacttgcttttacttccaacaaggaatactggaaacagaacagaaaggatgtatgactatgtgtggtattgtaggttatattggaacagaacaggcagcaccgatcattctggacggtctgtccaagctggaataccgtggatatgattccgcaggtatggcgatttttgacggtgagaagatcaacaccagaaaggcagtgggaagacttaaggttctggagaacctgacccacggcggagagaatatgaaaggaacctccggtatcggacatacgcgttgggcaactcacggagctcccagcgatatcaattcccatccgcatatgaacaatgcgggaaccattgccgtggtacacaacggcattatcgagaactatattcccctgaagaaaaagatgcaggataaggggtatcagttcgtatccgagactgataccgaggtattggcacatctgttagactattattacaagggaaatcctctggaagccatcacgaaggtgcttcatcgtgtggaaggctcttatgcgctgggaatcatgtttgcagatcagccggataagatttttgcagcccgcaaggacagcccgctgatcgtaggaaagagcgacaacggcagctttatcgcttccgatgttcctgcgatattgaaatataccagaaccgtatattatgtagacaatcaggaagttgtggaattacagcagggtagtctgcgtttcttctccgtggatgaggaagagatcgagaagcagccggtgaccattgactgggatgccaatgcggcagaaaaggctggatatgagcacttcatgctgaaagagatctatgagcagccgaagaccatcaacgataccatctctccgagaatcaaggataatgatattgtgatcgaagagctgaacatgagtgatgaagagatcaaagagatcacgaagatccatattgtggcctgcggctccgcatatcataccggagttaccgcaaaatatgtgatcgagggtctggcaagaattccggtagaagtggatgtggccagtgaattccgttatcgtgatccgattcttcagaagggtaatatggtcattgtcatcagccagtccggtgagacggcagatactctggcagcactgagagagtccagggaaaggggcttcaaggtactgggcattgtcaatgtggtgggaagctccattgccagagaggcagacagtgttatgtatacctgggcaggtcccgagatcgcagtggctaccaccaaggcttacagtgcacagctaactgcactttacatgctggctatgaaattcgccagggtacgtggtactattgatcaggagaagttcgccggtatgctgacagatttaagatgcctgccggatcagatcgaactgcttctgggacagaaggagaagatccaacattttgccaaccgttacgtgggagcaagagatatcttcttcatcggacgcggtattgattacgcgatttcactggaaggatccttgaaactgaaggagatctcctatattcattccgaggcttatgcagctggagaactgaagcatggtacgatttctctgatcgaagatggtacgctggtagtggctttggcaacccagccggatctgttccagaagaccatcagtaatatggtagaagtaaaagcaagaggagcctttgttatggcagtcaccattgaaggcaacaaggccattgagaaagcgtcggattatgtaatatacatccccgagaccaatccgtactttaccaattctctggcaatcattcctttgcagttgttctcctactatgtggcagtgggacgcggctgtgacgtggataaacccagaaacctggcaaaatccgttactgttgagtagagtgtaataacttacccatagagagactgcttgcaggcagaacagactctctgttttttcaggattcataattgcttcagaaagttatcacaattcggacacaattgacggatatactgtgttcataaggtgagaggaagaaatgaaacaggtaatggtaaaaagagtttctcacttgcaacaggataggaggaagcaatatgtatgagaatgataatttttccggttacggaaccggcaatgaaaatacaaccggtacattcagtggagcagatctgaatgagacaagaacagaaaacagttatggctatgaaaatcatagtactacccagagtgcagcaggaagcacgaatggttacaccacttatcagatgggcggaaccacaggcagcaacaatacggagcctaagaaaacccaaaaacatggcggttacttccggaaggcaatggtaagtgtcagcctgggattgttcttcggactgttcgcaggaatcggtttctatgcagtacagcagggaaccgggatgtttacgaccagcacagataccgcagtggtagatgagatcgcttctgaggcaacgacagaaagtacccagagtgcacagctggctaccaatgttacttatgtagagtccgatgtatccaatgtggtagaaaaagtaatgcctgccatggtatccatcgtaaataactttaccgagacagtcaatgtcttcggacagcagtacacacaggaagaagcagccagtggttccggtatcattgtaggtaagaccgatgatgaactgctgatcgtatccaataatcatgtagtagagagtgcagatactctgaccgttacttttatcgatggcagtgaagcacaggcacaggtcaaaggactggattccgacatggatctggcagtgatcgcagtatctttaaatgatctgagtgatgataccaagaatgctattacagtagcaacacttggcagcagtgatgatctgaagcttggtgagccggtcatcgctatcggtaatgcccttggctatggtcagtctgttaccaacggtattgtaagtgccctgaatcgtgagatcactctggagaacggctctaccggtctggagaacggctctaccggtactttcatccagaccaacgcagccatcaaccccggtaactccggcggtgcactgctgaacatgaatggtgaggttatcggtatcaactccaacaagatcggtggtactgccgtagaaggtatgggatatgctatcccgattacttcggcaagtcctatcattgcagatctgatggagcgtcagaccagaaccaaggtagctgaggatgaagtcggttacatcggcatctcccagcaggaagtaacttcccagatctcccagatgtacaacatgccggaaggtatctatgtagtatctgtagaggaaggcagcgctgcagccaatgccggtatcatgaaaggtgatatcattaccaaatttgacggcagcagtatctcttcctactctgatctgcagaaaactttacagtattatgcggccggtgattccgtaaccgtaacggtacagagacctcagaacggtgaatatgtatccatcgagctgaatctgacactgggcagcagacctgcaagccagaaataaagaaataacaggtaaataaaaggaaatggaaagagacccgggcgagacatatggttttgcccgggtcttgtaatatttaccaaaatatgaatagttataaatggtttagaaaaacttaacttgtgccccgctacttcattgagtataataagcgtaggcaatgagaagtgactggatcggggattacacaatctggctgcttgcagacgggattgtgtaaggcacgagacggggagggcgaagcccggatatcgagggaacacgaagtgttaccgagatacactgcgaagatgctttggagccggggatgatagggcgaagcccggatatcgagggaacacgaagtgttaccgagatacactgcggaatagtggtaggaaacaaagaggagaataacatgacagataattataatgatgattatagagaagtgatccctgaggaggaaaaaacagagaccgatgtgagtgaaactcaggataacgaaaaaaataatggaaacacacaggtggcggatactgcaaaagaaaattccaccgaaaaaaagtcagaggacaaaaaggacagcagcgaatacgaagatgtctgctttatctgccgcagaccggagagcaaagccggcagaatgttcaagctgcccaaccatatctgcatctgcgatgattgcatgcacaagaccatggagactgtgagccagttcgattatcagggaatgttgaacaatcccaatgatttcaaccagtttaacggacagaacggattccccaacatcagttttgtgaatctggcggatcttcagggagacggcggtattcccaacaagcagaaactcaagaagaaaaagaaggcggaaggtcccaaacctgtattcaatatcaaggacattccggcacctcataagatcaaggccagtctggatgaatacgtggtaggacaggaaaaagccaagaaggtcatctccgtagcagtatacaaccattacaagagagtggccactgacactatggatgagattgagatcgaaaagtccaacatcctcatgatcggccccaccggttccggtaagacctatctggtaaagacactggcaaaacttctggatgtgcctctggctattgctgatgccacctctctgactgaggccggttatatcggtgatgatatcgagagcgtggtatccaaattgctggcagcggcgggcaatgacgtagaaaaggcggaaaaaggtatcatcttcatcgatgagatcgacaagatcgccaagaagaaaaacaccaactcccgggatgtcagcggagagagtgtacagcagggtatgttgaagcttctggaaggtgcggaagtggaggtgccggtaggtgccaacagcaaaaatgccatggtacctctggcaacggtgaacacccgtaacattctgtttatttgcggtggtgcgttcccggatctggacgagatcatcaaggagcgcctgaccaagaccgcatccatcggtttcaactcggaactgaaggataaatacgataaagataccgatattttatccaaggtgactgtggaggatatccgcaagtttggtatgattccggaatttatcggtcgtctgccgatcatttgtactttacagggattgtcaaaggatatgttggtgaagatcctgaaagagccgaagaatgcgattcttaagcagtaccagaagctgttggagctggatgaggtaaaactggagttcacagacgatgccctggatgccattgccgagaaggcaatgaagcgtgataccggtgccagagccctgcgctccatcatcgaggacttcatgctggatatcatgtatgagatcccgaaggatgataacatcggaagggttaccattaccagagagtacattgaaggaaccggcggccccatcatcgacatccgcagtaatgagatcctggaacccgtggagaatctgaagcagattccggtggaagagaaataaattgagagttagtgaaatacattggcaaaatccacgaactcccggagcatgc

SEQ ID NO: 50 - DNA, 10900 bp, unidentified
  source 1..10900: mol_type = unassigned DNA
tagagcaatcacttctgcacccaaggtatcaggttgaccgaattcttaggaggcggacgctctatccagctgagctacggagacaggagcctgcatccttgggggcacaggacagccgcccaaaatacagtaccatattataataccgcaaccgggctgtaaaatcaagttgaacctgcgggcaaaatggtgtatgctataagggaatgcaaagcggctgcgtgctgcgcagggaggatgctatggaaaaaatgaaaaatatccgcaaaaagctgcggcatcagaggtcgctccggtggaaaaagctgggactgagcaccccgacccagatcatctgcgtcagctttattatcgtgatcgcgctgggcacgctgctgctcaccctgcccattgccagcaggcgcggacggctggatgtgctcaatgccatgttcacagccaccagtgccacctgcgtcaccggtctggtggtgcgggatacatggacgcagttcacatggttcgggcaggcggtggtgctgctgctcattcaggtgggcggccttggccttgttacccttaccagcttttttgcgctggccatgcgccggcgcatgggcttccgggacctgcgcttactgggcgagagcgtctcggcagacggctacgatcaggccaaaaacgtgctgaagatcgtggtggggctggcagcgatgtttgaaggcatcggcattctgctgctgatgttcgcctttgtgccgcagttcgggccggaaggtgtctggatcagcgtgttcaccgccatttcggccttctgcaatgcgggctttgacctgttcggacggttcggggcgtactcctcgctggtgccttatgtcaacaactactatgtgcaggcagtgatcatattcatgatcatctccggcggtctgggctttatggtctgggtggaactgtgccagtggtacaaaaaacgccgcctgtccctgcacgccaaggtggtgctgtccttctcggtgatcttatggctgggcggtgcgctggggctgggactgatggagtggaacaaccccgccacgctgggtgcgctgtcggtgcccggcaaggtgatggcttcgctgttccagtcggtatccacccgtaccgccggcatgaacaccgtggacttggcttcctgcggtaccttgagcaagctgctgatgagcgtgctgcagttcatcggcgcagcgcccggctctaccggcggcggtgtgaaggtgaccaccttcgcggtcatcatcctgaccatccgcagcgtggcgcaggggcgcgacgactgcgtgatcgccgaccatcatatcgagtctaagacggtctaccgtgcgctgaccattatcgtgctgggcgcggcggcagcaatcggctcggccatcgtggtgtactacaacacctcggacgcggtgtcggtggtggatgccatcttcgagtcctgctcggcctttggcacggtgggactttccgtaggtgtgaccagccagctgaataacggggcaaagatcctgtatatgctggtcatgttcatgggtcgtgtgggcccggtggcctttgccatgagcctgaccgccaaaccggacgacaacaagcgcaagatcatgccggtggggcatatcaatgttggttaaatgaaaaaacaggcggctgcacagcactttgcgcagccgcctgttttatcgcaagacaagaaattagtgcaacattcaaacagcatatttgcgatatgcaattcaacgctgttgctgttgcattaaaaagttgaattgctataatgtgagatgatcagcaactgcctgccgctcagaccagataaccctcaaagcagtgcagatcctcggtcttgacgataccttccagatacagcccatcctcccggtattcctctgcctgcacgctgccgcgctcccgcatgggggcggcaagtcccagcttgtcgtagggcagcagcacccggatggtgtgcacccggtcgctgagcacctcgtccagcttttgcagcagcttgtccagcccgtagccggtcttggcgctggtcagtaggatatcggggtcaaagctcagggtgttgggcttgtcgcacttgttgtacacggtcaggcggggaatgtcggcacagtccagcccgtccagcacctcatcggtcacagacagctgttcctcgcgctgctcgtccccggcgtctgccacccggacgatcacatccgaccatgcggcttcctccaaggtggatttgaaggcttccaccagattgtggggcaggcgggacacaaagccgaccgtgtccactagcagcaccgccatgccgctgggcagcaccagcttgcggctggtggggtccagtgtggcaaacagcatatcggcttcggccacgctggggccgcacagggcgttcatcaggctggattttcctacgttggtgtagcccacaaggcttaccaccggcattccggtcttggcgcgggccttgcggctctcgccccggcgcttttccatctcagccagcttttcagccagcgcgtcaatacgggcgtgcacatgacggcgatccagctccagcttggtctcaccggcaccgcggcgggcaccgccgccgccgccaccgccgccgccctgacggctcagcgcttcgcccatgccctgcaggcggggcagacggtagcgcagcagcgccagctcggtctgcagcttgccctcgttggtcacggcgcggctgcggaaaatttccaaaatcagcatggtgcggtcgatgacctccaagccgcccagcgcattggagatgttgcggatctggctgccggtcagctcgccgtcaaacacagcacattccgcgcccagcgtctgggcggcaagggaagcttcctccagcttgccgctgcccagcacgatgccggtctccggggtctggcgtttctgggtgatctgtgccacggcttccatgtggttggcctcgcacagggcagaaagctctgccagactgcgctcacagtcccacagcccctgatccagtgccagcagcactacctttgtgggaggggtctcggtcaaaatatcataaagctcgctcaaagtaagtcctttctgttatcgtagcgttcttttgtcagaaggtagcaccggcattccaccggtgtgccgtcaaatttgtggtaaacatcgttgtggtggtacacaaaaccagccttttccatcacccggccgctggcggggttctgcaccgcgtggcagcaggtgaggaaggcaccgcccacctgtctgaaccagaaatccaccacagcttgcagcgcttcggtggtaaagcctttgccccaccacttctgcccgatgcagtagcccggctcccagatgccgccggaaagctccagtccctgccatttggtcttttgctgcggctcacccagcagggcgttgtacacggagagggagccgaacacctgtccggtggccttttccactatggcccactggtaataatccgggttcggatacagctctgcccacgccgaaagcagttcccgggtctcggcagggcttttgtgcggttcccagcgtaaaaaccgggtcacagccgggtcgtttgcccagttttcgtacatctgcggggcgtcctgcggcagcagacggcgcagcagcagccggtcagtttccagctcaagtgtgccggtgtggcgcatgatccatcctctcccttttataaaaacttattccttgggtgtatctgaaaagtcgaaaatttagtctatttctacaaacacagctggattttgcgttaaagagccttgaaatccacaaaggattcctgcggctatttgccttaaatcccgcttgtgtttgcgaaatattcgtcattttctttgttttcagatacaccttaagatagcacaaaaacagccgcgccgcaagataaatcaggaaaaccgcttgaccggatgagtgaactacgataaactgaaagatgaaatcttttataggaaagggaaagtaccgatgttagatgtgcgcaaactgttagcccagcgtccgctgctgttcgatggcggcatgggtacctattataaagcaaagccggggcaggagtgtgaacaggcaaacctgaccgacccggatggcattctggcggtgcaccgggcgtatcttgccgccggagcggacgccatcaagaccaataccttcagcctgccgcgtctggcggcggcgcagcagccgggctgggagcagctggcggatgcgggctggcagctggcagcaaaggctgcaggggagaccggcgcggcggtgtttgccgaccttggccccgcgccggacaccgaaaacctcccggcggagcaggtatatctttccgtagcaaagcgctttgcactgctgggagcacggaattttctgttcgagaccctgagcaccgaggaaggtgtgctggaagcgattcatgcgctgaagcagaccgtgccggaggcctttgtgctggtatcctttgcggtgctgccggacggctacacccgcgagggccgctactgcacagaacttgtgcgccgcatggcgcagagcggcgtggtggatgccgtgggtctgaactgtgtatctgccccgggtgcgatgcgggcactggtgcagcagctgggagatgcgggactgccgctttcggtcatgcccaatgcgggctacccggtggtggcgcgggcacaggtgcgctatcagggcaagccggagtattttgcccgggagctgagccgccttgccagtgagggcgtgcgcattctgggcggctgctgcggcacgaccccgcagcacattgctgccctgcgcaccgcgctggatgctctgccggaagcgctgcccgctgccccggcagcaaagcccgccgctacggcaaagcctgcagtggaaacggacgatgtttttttgcgcaagctgcgcgccgggcagcgggtcatcgcggtggagctggattcccccaaggacgctgacctgacggcctatctcgagggtgcccgccgtttgcaggccgccggtgccgacctgctgaccattgcggactgccccattgcccgggcgcggatggattcctcgctggtggcctgccgggtgcaccgggagctgggcatgaacgtgctgccccacatgacctgccgggaccgcaacctgaacgccaccaaggcgctgctgctgggactgtacgccgagggcgtgcgggaggtgcttgctattaccggcgaccccatccccaccgccgagcgggacgaggtgaaaaatgtgtaccagttcaactcccgcaagctggcgcagtatatcgtttcgttggccggggaagggcgggagatgccaagccccatcacggtgttcggggcgttgaacctgaacgcccgcaattttgaggtggagctgcgccgcgccgcagaaaagctggaaaacggcatgagcggctttctcacccagccgctgctgtcggcacaggcagtggaaaacctgaaaaagacccgcgagacgctgggcgagcgggcaaagattctggcaggcatcctgccggtggtcagccagcgcaacgctatctttatggaaaacgaagtcaacggcatccatgtggacgaagccatcatccagaagtttgaagggctggaccgtaccgcaggcgaggagctgggcttggaagtctcggtgcaggccgccaaggcggctgcgccctatgcggacggcttttacctgatgaccccttttaaccgggtagcgctgatggagcggctcattgcccgcctgcgcacggaggtgacggattgaacaacgtagaacgagcgctggaaggggaaaaagcaccgctgctcagcatcattgtgccggtgtataaggtggaaaactatctgcccaaatgtattgattccattctggcgcagacctttacggactttgagctgatccttgtggaggacggctcaccggacgattgccctgcgctgtgcgatgccgccgccgcgaaggatgcccgcatccgggtgatccaccagaaaaacggggggctttctgccgcccgcaacgccgggctggacgcggcaaggggggaatggatcggctttgtggactcagatgactacattgcgccggaaatgtacgaagcactgtataaggctgtgcaaagcaccggggcagaccttgccttgtgtgattacaccgaggtggacgagacgggcgcaccttgcccgccgatgcatatcagccttgcagagcaggtctttaccggacgggaactattgaaaaatgccacggatacgatgatccagcctgcgtggaacaagctgtaccgccgtgccatctttgcacagctgcgctacccggagggcaagctgaacgaggacctgtttttgatcccggaggtctgtttgcagatccaaaaggccgtggtggtgccaaaagcactgtattattatgtgcagcgcggcggcagcattatgagcggcaataaaacgctgcgccattttgatgctgccgaggcagcacagcggtattgggactgtcttgtggaaaatggtgcatacgatgcgctggcaaatgcagcaaaatttacgatgggcagcgtgagccgggtgtaccggcagctgccaccggcactgcgcaaggcatcctgcagccgggaaatgctgcggatgcagtttgaggtggtcagccgcacccggcagtactgcaacgttccgggcgggctttggctgcaaagctggctgctgtggcgcttaccgcagacatatagccggctgcgggggttcaagggctgaggagaaagagaaaaaacgcatgagaacacgctattctatcatcaatatgctggtcaacatcggcgggcagtttttgacgatgctgctgtcctttatcggccggatggtttttatccgctgcctttcggcggcatatctgggcgtcaacggtctgtttaccgatgtgctcagcatccttaatttcgcagagctgggcattggcacggctatggtgttcagtatgtacgagccggccgcccgggatgacgagcagaaactggcgcggctgatgaacctttataagtggatgtaccgggcggtggcagcttcggtgctgttgttcgggctggtgctgctgccgtttttgccgtacctcatcaaggatggagaaggcatcgagcatatcaccctgatctacatgatgtatgtgctttcctctgcctgctcttacctgctgaactataaaagctctatttatcaggcctaccagaaaagctatatctgcaccgggtggacgctggtatgcgagtgcatccgcaccgtcgtgcagatcgtggcgttgctgctgacgggcaactttatcctgtaccttgccatccagcttgtggtgcagttcatacccaacatcatcatctcccacatggcggataaggaatttccctatctgaaggaatgccgggagctgccggaaaaggaggaacggaacggcatcctgaaaaacatcggcgcaatgagtatgcacaagctggccaccgtcatcgtgcgcaacacggacagcctgctgatgtcctccttcatcggtctggcgacggtggggctttactccaattaccggctggtgctcaacgcgctgaacaacctgctgaacaagtttgccacggctttttccggcagtgtgggcaattttgcggcgctggaaaactctgaccggctgtatcgggtatataaggagatggactttctcttttttgtgcagtccgcctacctgaccggcgggctgatgatgctgttcaacccgcttatcgccctgctgtttggcggggaatactgttttccgatgacgaccgtggcgatcattgtgacagaattctatatctcgcggatgcggcagacgaacctgttgttccgggaggtcatgggtctgttctggaacgaccgctataaggctgtggcggagtccatcatcaatctggtggtctctctggcgctggtgcagcggtacggcgtggtcggcattatcgggggtaccatcatcagcagcctgtgcacctgtgtctgggtggagccctatatctttttgaagtatggcgttcaggatgcatggcagaagaagctccgggtttattttgcggagtacctgaagcgtgcaatgatcgtggcggcggtctcggcggcagccatgctctgggtaaagcgctttccggtgggcaatttcggcgtttttgttttggacgggctgctttatacggcggtgtttgcaggagtgatcgtattgctctaccggcgcagcgtggagtacgaagcgctgaagcggcgtgggttggaaattttaaaaaggagagccggatgaatacagaaaaaagccccctgatctcggtgatcgtaccggtctataaggtggaaaagtatctacccgcgtgtctggacagcctgctggcgcagacctaccggaattttgagctgatcgttgtgaatgacggttcgccggacgactgctggcagatcatgcagcgctatgcggcgcaggatgcccgagtgcgcattttcaacaaagaaaacggtggggtgtcctcggcgcgcaattttgggctggatgtggcaaggggcgaatacatcggctttgtggattccgatgactttgtgctgccgcagtatctggaatggctgtacgatgccttgtgcagttgcggcacccggatgtccatgtgccgctactgcggtatacaggaaaaccagtccctgtggacagtgacagaatgcccggcaccgcagaggatcacggcggaaaattattcgtggatgcgggaatggagcggcgggcactgctggcggatgctgacccaccgggagatattacgggatatccgttttgatccggcattgctttatggggaggataccctgttttttgtgatggaatttctcaaggctggcagtctggcgtttttgaactgccctctctatgcctatcttgaacgaccagattctgccgtgcggcagaagccgagcctgcgcttttatacggcggcactggcatgggaacgggtctggcagctggcaaaggagcagccggaccccttccgcagtactacggatcagcgctgcatcatgtcctgcgccgaggtgtatttccggctggtcaaccagccggagcgggactcggaaaaggaaaaaacactgctggagctggcttccacgcaccgccacgctgcgtggaaaatcccgtcggagcacaaaagccagaagctgcaggcgctgatgatgggttactgcccacatctgggcgcaaaggtatggaagctggtgcgttgggtgaaaggtttgaaaaactgattgacaaatcccacaaaaaacgctatattctttttataaatgcgttgaaaaagagtgtgcatcgtctgggaccgcacagagagccgggggcagctgaaaacccggcgggataccggcggggcactgtcactttggagcagaagcggtgagctgagccggtaagccgctttcgggtctgccctacgttacaggggcatcaaggggcgcggagctttccgcgcaatttgggtggtaccgcggtcatgtatttacagccgtcccatggaacgctccgtgggacggctttttgcgtcccacttcatcaaatttttgggaggacactatgaaagaacttgcaaagcagtacgatcccagtcaggtggaagatcgtatctaccagttctggctggacggcggctacttccacacgaaagccgatccggacaagaaaccttacaccatcgtgatgccgccgccgaacgttaccggtcagctgcacatgggtcatgcggtggataacaccatgcaggatatcctcatccgcaccaagcggatgcagggctatgccgccctgtgggtgcccggcaccgaccacgcttccattgctaccgaagccaaggtggtggaggccatgcgcgccgagggtctgaccaaggaaatggtcggccgcgacggttttctggagcgcgcctgggcatggaagaccaagtacggcaaccgcatcgtcagccagctgaaaaagctgggcagcagctgcgactgggagcgcgagcgctttaccatggacgagggctgctctgaggctgtcaaggaagtgttcgtgcgtttgtacgacaaggggctgatctaccgcggcaaccgcatggtcaactggtgtccccactgcaacacctccatctccgacgccgaggtggagtacgaggagaaggacggcagcttctggcatctgctgtacccggtcaaggagaccggcgagatgctggagctggctaccacccgccccgagactatgctgggcgatactgctgtggctatcaacggcgaggatccccgctacgcccatctgcacggctgccatgtggtgctgcccctgctgaacaaggagatccccatcgtctgcgatgagcacgccgatatgaccaagggcaccggtgtcgtgaagatcacccctgcccacgaccccaacgactttgaagttggtctgcgtcacgacctgcccattgtgcgcgtgttcacctacgacggccacatgaccggcgctgccgacaaggctgcagccgatgccctgtttgccgccggcaaaaacaccgtcaacgagccccatgtgctggactgcggcaagtacgcaggtatgaccacgctggaagcccgcaaggccattctggctgacctgaaggagggcggtttcctgaaggagatcgagcccctcaagcatgaggtaggcacctgctaccgctgccactccaccatcgagcccatggtctccaagcagtggttcgtcaagatggagccgctggcaaagcccgccatcgagagcgtggagaagggcgagatcaagttcgtgcccgagcgcttcaccaagaactatatgaactggatgaagaacacccgcgactggtgca

SEQ ID NO: 51 - DNA, 6980 bp, unidentified
  source 1..6980: mol_type = unassigned DNA
ggccgtacaatggtagttaaagaagctagacctagagcttaattgccgacgctaatatagctaagaaaaaaagaaacttctgccactcgatgacagaagtttttttatagcctaatttccaactatatccggtctcagccctccatactttgtacttcaaggtctttcaccttgcgaagtaaatccgaagcaaagataaagttattcagacgttcgttggtagaagtgaatatatcgtctttagttccttcccattctttatgtccttcataaatataaatcaccttttcaccgattcccaatacagaattcatatcatgtgtattaataatggtagtcatgttatattcctgggtaatatcgtgaatcagatcgtcaatcactaacgaggttttcgggtctagtcccgagttcggctcgtcacagaacaggtattgcggattcaaagcaatagcacgagcaatagctacacgtttctgcataccgccactgatttctccgggaaacttatcttttgcctcggtcaggttgacacggtccaagcagaacatggcccgcttagtacgttcgcgtaaggtgtcattactgaacatattcaaagggaacatcacattatccaacaccgacaaggaatcgaaaagtgcggcactctggaaaatcattcccatttccttacgaagcatcttcttctccttcttccccatcatcacgagatttcgaccgtcatacaggacttcacccttctccggagtaagcagccccacgatacatttcatcaataccgtcttgccggaaccactctgaccgataataaggtttgtcttcccattctcaaaggtcgcattgatatcactcaataccgtcttatcgtcaaacgatttataaagtcctttaacctcaatcatcccatcaaaagtttagttaatatcaaatccgcaaacagaatcaaaacactactggacactacggaatccgtggaagcctttcccacagcaatagaaccgccttccaccgtatatccgaaaaaggcggatacacttgcaataataaaggcaaagaaaagagatttgataatacctgcccagataaaccattcattaaacatatactgcaaaccatattcaagatcgacagcattcatgactccggcaaaccaacaagtacaaaaggcccctattataccggcaaagatactgaatgtcaccaatataggaatcacggtcaccatagccgcaatcttaggcagtatcagatagttggcagaattaactcccataatttcaagcgcatcaatctgctgcgtcacccgcatcgttcccaactccgaagcaatgttcgaccccactttccccgcaagaatcagacacataatagaagaagaaaactccagtaacataatttcgcgggtcacatatcccaccgtccagcggggcatccacggactttcaatattcaacttaatctgaatggtaataaccgcgccgatgaaaaacgaaatcaacaacacgattccgatggagttcacacctagctgctccaactcgttaaggtattgccggaaaaacatccgcatacgttccgggcgggaaaaagtccgtcccatcagcatgaaatatcttccgacggttctcaatgcttttatcataactcacactatttgtctgcaaatgtacattatttcagcttatttttactacatttgccgcaaaataactagaatatggaagaaagcaagatggtgctccgcacggaagacttggttaagaagtacggtaaacgaaccgttgtaagccatgtttccattgatgtgaagcaaggtgagattgtgggtttgctggggccgaacggtgccggtaagacgacttcattctatatgaccgtggggttgattacccccaacgaaggacgcattttcctcgacgatttggagattactaaatatcctgtttacaaacgggcacaaaccggtatcggctacctcgctcaagaggcttccgtattccgtcagatgagtgtggaagataatatcgcttccgttctggaaatgactaacaaacctaaagaatatcagaaggaaaaacttgaaagcctgattgcagaatttcgccttcaaaaagtacgcaaaaacaaaggtaaccaactatccggaggtgaacgccgccgcacggaaatcgcccgttgccttgctatcgacccgaaattcatcatgctcgacgaaccttttgccggtgtcgacccgatcgccgtagaagatatccagcaaattgtatggaagttgaaggacagaaatatcggtatcctgattaccgaccacaatgtgcaggaaacattgagtattaccgaccgtgcctacctattgttcgaaggcaagattttgttccaaggcacaccggaagaactgtctgagaatcagattgtacgtgaaaagtatttaagtaacagctttgtattgcgccgtaaagatttccaattggagaaataagaatgactgaagattcacctctaacaataaagaaaaacacccgaaaacataatgttttcgggtgtttttctttattgttgtttatttctgtcgaatataaatattaatcggggtacctgtcagattccacttctcacgcatcttattttccaggaaacgcttgtagggctccttcacgtactgcggcaagttggcaaaataaacaaacgaaggaacttgtgtattcggcaactgcgtaatatacttaatcttgatatacttacctttgtttgaagggggaggatacgcctcaatcaacggaagcatttcctcattcaaacgtgcggtcggtatttttgtcgtacgattctcatatacattacgggcttcttcaagcaccttcaagatacgttgcttggtcaatgcagaagcaaatataatcggaaaatccacaaagggagcaaaacgtgaacgaacagcttcttcaaacgttttctgcactttcacagatttatcctccaccagatcccatttatttatcacgacaaccaatcctttctgattcttttgaatcagggagaagatattcaggtcctgactttcgattcctctcgtggcatccagcatcagaatacatacatccgaaccttcaatggcacgaatcgaacggatcacagagtagtattccaaatcctcattcaccttattcttcttacggataccggcggtatccaccagataaaaatcaaatccgaacttattgtagcgggtatagatagaatcacgagtcgttccggcaatctcggtcacaatgttacggtcttcaccgataaatgcatttacaatagaagatttaccggcattcggacgtcccaccactgcaaaacgaggtatctcatcatccaagatttccgaggattccttcttgaacttaccgacaatcaagtccattaaatcacccgtaccacttcctgtaatcgcagaaatacaatacggatcgcccaatcccaatttatagaattccggagcattatattgtaactcgttattatctgtcttgttggcaactacaatcaccggactgttggcacgacgcaggatagtcgccacctgcatatccaggtcggtcactccattcatcacatccaccacaaacagaatcacatccgcctcgtccacagccagcaacacctgctttctgatctcttcttcaaagatatcgtccgagtttaccacccatcctccggtatccaccacagagaactcacggcccagccattccgacttgccatactgcctgtcacgggttgttcccgcttcttcattcacaatagcccgacgcgacttcgtcagacggttaaataaggtagacttgcccacattggggcgtcctacaattgcaactaaattacccatagttcaataccttgtttttcacgactatcacagtcgcatgaatacttttaatctaactgataaccaaaattacgtaattccttatccgaactacgccaatccttatccaccttcacatacgtttccagataaatagtctttccaaagaaacgttccagttcacgacgcgcttcagtagccactttcttcagcgcctttccctgtttgccgataatgattcctttctgcgaatcacgctccacatagatcactgcccggatatggattttcttcgcttcttccttaaactcctctacggctacttccaccgaataaggaatctccttgtcgtagtacaatagaatcttttcgcggataatctcattcacaaagaaacgggcaggcttatccgtccactgatcctttccaaaataaggaggagaatcgggcagcaattccttaatccgcttcatcacataatctacattaaacttggaggcggcagaaataggaataatctcggcttgcggaagcaattccttccattcctccaccagcttaaccagcttttcttgatcggtgaggtcaattttgtttatgagcagcaggacaggtaccgtcatttgacgcaccttttccataaactcattattcttatccggtgtctctaccacatcagtcacataaagtaaaatatccgcatccgtcagtgctgaagtagaaaaattcagcatcgattcctgtaatttgtagttaggcttcaatactcccggagtatcagaaaaaacaatctgcatctcatccgtattatagatccccataatccggtgacgagtagtctgcgccttgaaagtagcaatcgaaatacgctcacctaccaaagcattcatcaatgtcgactttccaacattcggatttcctacgatgtttacaaaacctgctttatgcatttctctttatattttattggttgagacaaaaaaacgcatcgaatcgaaataggatgcgtttttgagtgttatagttcagtaacttacgttacgattccttttttccgtcataaccccacttcacgtaaacggctccccatgtaaatccggcgccgaatgcagtgaaaataatgttatcacctttcttgagtttatcctcaaaatcccatatacataaaggaagagtagcagcacttgtgttaccatagtgttctatatttaccagcactttatccatcggcacttccatgcgatgagccacagcctcgataatccggacatttgcctgatgcggcacaatccagttgatgctgtctttcgtcagtccgttcttttctgcaatagcagccgacacgtccgacatactggaaacagcatacttgaacactgttcttccttcctgatgcagatagtgcattttgttgtctaccgtgaaataagacggaggacaaaccgaaccaccagctttcatgtggaggaaaggcaatcctttaccatcagttcttagtatcgaatccatgataccgtaatcttccgtagtcggttccaccataaaagcagcagcaccgtcaccaaagataggacatgtagcacgatctgtatagttaaccattgacgacatcttatcggcaccgacaatgataattttcttatatcttcccgaacgaatgaaattagcagccgtttccatcaaatacaggaaaccactacaagccgcctgcagatcaaaagcaaacgcatttttcagtccgagtttatcgcaaagaatagaagcggtagaagggaagtgataatcaggagtagtagtagcaacaacaaccaaatcaatatcgtcgggattagcaccagtctttttcatcaactgcttggcggccttgcgagccatgtatgagctacctaatccttcctcattcagaatatgtctttcctttactccgatacgagtcataatccattcgtcgttggtatccaccatttttgatatctcgtcgttagtcaagatataatcgggtacgtacccgccgactcctgtgattactgcatttattttttccatcaaacctattttaaattagcaatactataatacttaaagcagccggagagtttcaccctcaggctgttttcagtataactgtactaattatacagctgcttctttctcaatagcgagcttgcctctgtaatagccacaagcaccacatacagtgtggtaaacgtgccattcaccgcaattcggacaaatagccaatgtaggagctactgccttatcatgagttcttctcttcgcttgtctcgtacttgattgtcttctcttaggatgtgccattttcttaaaactttaattattatctaatattttttttaattcattccagcgaggatcaatttgttcctccacttcctcttcaattacgatatcgtctcctccagtgtcgaaaacttcatcgctatcctcgttcgcatttgtcttcaaatgcttgctcaatttactagtcatagctttattgcacttacccggagcgtgtacatgcttcattgggatggagagtgctataaactcatacatgaaccatgcaacgttgatttctccttcttcttcgggaatcacaatcaggttctcaccttcctctgcatattcatgtccaaacttcaccatcagtttatcagaagaactgatcggtagttccatatcatccagacaacgatcacacggtacccataccattccgtcggtctgaaagctcaattcgaaagcgcgagaggttcttttcacgttcaaagttacatttacttttcccttttgaacttcaggaccatcaatgtgagcgaaataaaggttatccaatacaaactcatacttagcagagtctgtctgcattcctttcagatcaattttgtatttatcaaattttcccaaagcttctctcttttttaaatcgttagcttacaattcgggcgacaaagatacaaataaatatcctcataacatacaaattatcagtaaatattcacttttttaataggtattatgaggtttataagcgttaaaatccgctgtcgtttttccaaacagttaaaaacagaaagcctcgcccgtcaaatagacaagcgaggcttcataaaaaacggcg

SEQ ID NO: 52 - DNA, 6618 bp, unidentified
  source 1..6618: mol_type = unassigned DNA
cttgaaggtctgctcaaagccgaggaacttcaggatgccctgattgacagaggggtggaagcgcaggccgcccttgtaggggccgatggcgctgttgaactggacgcggtagccgcggttcacctgaaccttgccctgatcatcgacccaaggcacacggaaggagatgatgcgctccggctcgaccagacgctcgatgaggccggccttctcgtactcggggtgcttctccacgacgggctggatgctctccagcacctcacggacagcctgcaggaactcaggctcgttggcattgcgcttctcgaggccctcgtagacacgcttcagatattcattcgtcagcatagtaagatactccttttcccttaactctatcgtgtagctctatcatgaggccccggctctcccgtttccacggcgaggacagcgaacctcagcacacttcgttattataaagctttatccgccgatttacaagatggcccgccctgcaaaagctggaaaatctttcaaaaaaactacagaaaagatgaacatacttcacaaaaaagaacgggtgcttcaaaaagcggcgataacacctgattttgcgaaagaataaaaatccccctgcaccggcccgggaagggcggtgcaggggggataagtcttacttcagcagcttctcgcaggcgtcagcggcaccctcgaggaactgtccgccgtaggtctcgatcatgccggcgtcggacagtgcggccagctgggggtcgatggggcacttggccagcacgggcaggtgatgctttgcggccacctcgtccacatggctgtcgccgaacacattgatgtgcttgccgcagtcggggcagacgatgtagctcatgttctcgacgatgcccagcataggcaccttcatcatctcggccatgttcacagccttggcgacgatcatgctcaccagctcctgcgggcttgccacgacgacgatgccgtccacaggcaggctctggaagacggtcaggggcacatcgcccgttcccggaggcatatccacgaacaggaaatcgacgtccttccagaccacatcggtccagaactgcttgaccgcaccggcgatgacggggccgcgccagacgacggggtcctcttcgttctccaccagcaggttgatgctcatgacgtcgatgcccatccggctctggatgggccagcagcccttgtcgtccgccatggcgcggccatggatgccgaacagcttcgggatggacgggccggtgatgtcggcgtcgaggatgccgcagtggtagccgcggcgtgccattgcacaggccagcaaggcgctggtcatgctcttgccgacgccgcccttgccggatacgacgccgatgaccttcttgacgctgctattggggttgggtgcgtcatgctggggcgcagcattgcgggaagaacacgctgccccgcagttggagcagtcatgggtacattcttcgctcattgtctcattgcgcacggccgtggtaccggggtgcgcttcctccttgcattcttagatcctgtctggcagaaaacgctccgccagatacaatatatatcatatcataaaactgggaaagaaacaacccacgccgccgctcatatttcccagagcggcgtgcatacctataaaaagatacgagcaggaaagggagggggcgcagtggggaagagctatctgaaaaacgcggccctgatgaccggagcagatgtcctgctccggctggcagggatggggctgcgcatctggctggcgaacgcgctgggcggcgaggggatggggctgtatcagctggtgctggcggtctactcgcttttcgtcacgctggcgacggcaggcgtatcggtggcggccacccgcctgatggccgaagagctggcccgaagcccggccgaggcccgggggatgctgcgccgtcttctgctggcgggggccgggctgggagtggcggcgctggcggcccagttcggtctggccggcctcgccgcacggtggtggctgggagatgcccgggcggcgggggcattgcgcgtctcgtcgctgggtctgccgtggatggcggtgtcgtcggtgctgcggggctttttcatcgcccggcggcgggtcgagccgaatgtcctgagccagctggccgagcagaccgtccgcatcggcatcgtctgggccgcgctgggccgggccgacgctctcggatggaatgcggggcagcgctgtacggcagtgctgggcgcaacggcggccagcgaggccgtcagcaccggtctgatggccctgttctactgccgggaggcccgccgctgcttcggctcacagcctgtacagcgtccccatgacccggggaggcggctctgggacatcctctggccggtggagggcgggcgatgtctcgccagtgccctccacaccgccgagaatatgttggtcccggcctgtcttgcggtctatctgcaatgctccggcgggcgtgccgaggctgtgacccagtacggaaacctgaaagggatggccctgcccctgctgacctttcccttcgggctgctggggagtctgtccgtcctcctgatgcccgagatcacccaagcccatctccgggggcagagcaggcggctctccgtcctcatcgaccggatgctgcggctcacaggctatttttcggcgctggcgggggcggcattctgggtgtggggacagccgctggccgaggcactctacggcagcgcggaggcgggcaactatctcgtcatcctcggcccggccatgccgctgatgtacctcgagagcatggtggacggcgcgatgaaggggatgggagagcagaaagccgtcttccggtacagtatgtgggactcctgcctccgtatcgtgggggtggtgctcctgctgccccggttcgggatgaaggggtttctctttgtgatcctcctgtccagcctctacacctgcgccgccaacaccgggcggctgctgtccagctgcggcctgccgctgcgactgtggcggtggctgggggcgccgggtcttgcggggacggccggtgccggagcggggctggcgctgcggaagcttctgaccccatggctggcgagaggagtgcccgcgcagctggcggcggtggcgctgggcggtgcggggatgacgctggtctgctttgcggcggcatggccgctgggcctcggcgaggagctgcgggacgtggtggcaggggagagaagacacaaaagcgctggacatggggagaagaatcgagtataatgatacagatacgatggggcgataggcccttgggtcgaaaaaacggcggctggcgtctctccgacaccggccctgatgcaaaagaggactttttgtgaaggaaaagaaaacaagtatgctgcaggtgctggcccgccgggcctttctggtggtgctggacgcagccatcgtagccttcagcttttattttgcgctcctgctccgcgcagacggcgcagtcgaggcctcgtggtggcctcacaaccgcgccctgctctacgcgaacctgccgtggatcgtggcggtctatctgctcagcttcttgggcgggaggctctacaccatcctctggaaatacgccggagagcgggatctcatccgtctggctgggatgatcgctgccccgacggtcgtggtgtatctggtcaaccgctgcttcatccatggcgtgctcttcaactcggccaacgcgatggcttcggtgctcatcttcctgctcgtcggcgggagccgtctggcgtggcggctcttcctgaaccacccgctgggcgagcggctgcggggcaataccagcaaagaccccaaccgccctgtgatgatcgtgggcgcgggcgaggccggtgcgtgggccatcaacgtctgcaagagcaacggcagctacggccacccggtggtggcggtggacgatgaccccgccaagctgggccagaccatccacggcgtcccggtgaagggcacgctggaggagatccccgacctgtgcacccgctacagcatccacaccatcatcattgccatcccgaccttgcggggcagccgcctgaaccatgtcatcgacctctgcgtctccacccactgtgcggtgcagatgctcagcgacccccagcttgtgggggcaggcgcaccccagcagggggcgttccgagagctgaatactgccgatttcctctcccgtgaggaggtcacgctggacacggcccagatctcgggctacctcaccggcaagaccgtgctggtgacgggcggcggcggcagcatcggcagcgagctttgccgtcaggtcatgcgcttcagacccgcgaagctgctcatcttcgatatttacgagaactgcgcctacgagctgcagatggaactacaacagaagtatggccgcgatgtgcccatcacagtgctggtgggctccatccgggacaaggcccgtctggacgaggtctttgagacctaccaccccacggtggtgttccacgccgcggcccacaagcacgtcccgctcatggagatcagccccgccgaggccgtcaagaacaacgtcttcggcaccaagaatctgctggtcagcgccagcgagcacggcgtggagcggctggtgcagctttccaccgataaggccgtcaaccccaccagcgtcatgggctgcaccaagcgcctgtgcgagatgctcatccagacctttgcgggcaacaccgacatgaagtgcgtggccgtccgcttcggcaacgtgctgggcagccacggcagcgtcatcccgctgttcgaggcgcagatcaaaaagggcggccccgtcaccctgaccgaccccaacatcgaacgctatttcatgaccatcccggaggccgcgcagctggtgctgcaggccggcgcattggctgagagcggcagcatctatgtgctggatatgggtgagccggtcaagatcatggacctcgcaaagcagctcatccgtttctacggctacgagccgggcgtaaatatggacatcaagatcgtgggtctccgccccggcgagaagctctacgaagagctgatgatggacgaggaacaggacaagatgcgccgtaccggccacaataagatcttcgtggctccgccccggaacatcgatcttggcgagttctatcagcaacttcaggagctgtctgccgccgccgagcacaacgacgacaacgtcgtggcccagctggccaagatggtgcctacctttacccccacccgagagaacctcaagctgtgaactgctggctgcacggcattcggctgtgtaaaaatatatgagagggatgtatatcatggaaaagaaaccgtttttgactgagtcgatggctcaggacatcattcaggacgtgcccacccccttccacgtctacgacgagaagggcatccgggagaacgcccgccgcatcaacaaagccttcagctggaataagggcttccgcgagtatttcgcggtcaaggcgctgcccaaccccgtcatcctccagatcctgaaggaagagggctgcggcgtggactgctcctccctgaccgagctgatgctcagtgaggtgtgcggcttcagcggcagcgacatcatgttctcctctaaccagacccccgtggaggacatgaagaaggcctacgagctgggcgcttatatcaacctcgacgacgccacgatggtggacttcctcgaccgggtagccggtgtgccggagaacatcttctgccgctacaatccgggcggcaccttccagctgggcgagagcaaggagggctttcaggtcatggacaagcccggggatgccaagtacggcatgaccgaggagcagatgatcgacagctacaagaagctggctgcaaagggagccaagaacttcggcatccacgccttcctcgcttccaacaccatttcggacgcctactaccccgagctggctgcgatcctgttccagctggcggtccgcgtccagaaggccaccggcgtccacatcgcctacatcaacctgtccggcggcgtgggcatcccgtaccgtcctgagcagacggagaacgacatcatggccatcggcgagggtgtccgtaagaaattcgaggagatcctggtccccgccgggatgggcgatgtcgccatcttcaccgagatgggccgcttcaccaccggtccttacggtgcactggtggcaactgccatccacgagaagcacatctacaaggaatacatcggtctggatgcctgtgcggccaacctgatgcgccccgccatgtacggcgcttaccatcacatcacggtgctgggcaaggagaatgccccctgcgaccacaagtatgacgtagtgggcggcctgtgcgagaacaacgacaagtttgccatcgaccggatgctgcccaagatcgacatcggcgacattgtgtatatccacgacaccggtgcccacggctctgcgatgggctacaactacaacggcaagctgcgcagcgccgaagtcctgctctgcgaggacggctcccaccgcctcatccgccgtgccgagactccccgcgactacttcgcaacgctggacttcctgcccttcatgaagccgctgctgggcgagtacgacgactaa

SEQ ID NO: 53 - DNA, 36814 bp, unidentified
  source 1..36814: mol_type = unassigned DNA
tcacttaaatttattttttaatttccaaaaccttacccgattacggttattccatacttttttctgatacagtaattgtaaagttggttttttataccattttttacataattgttgataatccattaccaacaaatcttccatgaacttttcatattgaggatgtactgttttctggatcattccgggacgctgatattttcgcattgattcaaaatcaacctcatgtccaatcatttctttttttgcagtttcaaaaacgtgcctgcccttttccgaattacagataacccaggaacatccagctccggaatcataaagatcgggatattcccggtcaactccccacagatcggataatgtgatatctgcaacacgctcatttgaaacaaagcggcagacattacaagcaggtcgggacattaatctttgtaaaaagatggaataaaatttgctgaaccatctgtctgtaacgataacctttccgttttctagttctgtataggttgactgatcgtcccacttattctttccggtatatctgtaattaaatatttttatggtagaaccatatttactggtgcaccattcgttgtacttcttaacaaataatgcactcgggattccggtgcagaggacttcaaccgtcaacaagtttttctgatctgtatttttgagatatcgatacagtcctgctacctgacatggcgttccggagaagagaactttttttccattgcgcaaatcattttttgcatctgcataggaattgccgatcatactttgtgcatattttgaggaataaaaaatttcgatatcatggatatcggagatccgtttgtgggtaacctgtattcccttagcggcagcaccataaataacataattttcatcgcaaaatgctttgcatattgcggtaaaggcgcctcctgaagtcgaattttgtcttacatttttgtcttttgtatatcccccaaatgacagctggtgtgtcggatgctttacaatttcgtgttccataggacatacatcatggcataacccgcattgcacacattttgtgtggtcaatttgtggatagataaaaccgtatgcgttttctgtcatggaaatcgcatggtgattgcagacctgcacacaggcttcgcagccaacacaatctgcttctttccctgagactaaatatccgttcataattaatatccgctttctatagttttttgatctgtatttacaaaagttctgaaatgtacttcagataatggatagatttctctctgtaattttctaaaagagacattacacttttataatctatctgctgttgccatggtatctcctgttctgtgtcaactactttgcggtcttctaagtttaatagtgtaaggaacttatctatttttttatctccatggatccttggaaaaactagaaaatgtttttgtagtattacggaaaagatcgtaccatgtaatgaattggtaatgacaatctctgcataatgaatgagtgataaaaattcttctactccggcaccgtattggtagttacaatccaaatgtgcatccgtatgaaggctgatatttacgatggtaagccctttttcttttgctattttttttgccagatcatacattttggtatcctgacgtctggagtaaaccagtagatatggttctgctatgatccgctcgctcatgatcgtctggtacttttctgctggcaataataatgttggatctaatacctgctcaacatgtacatccgtatttttggtaataacatcaaattcagttgattcacgcaagccgatggctttgaaatttttcatgcgcagtaacatttgttctcttaattctgtatcaaagactgtttcgccgaagctggcagcatatgcaaaggttctgccctgcatacagggataatcgccataaaaggctttgtcaaaatgcttgaagtattcaatactccagatggcatcacttccgcacagatacccattaaggttttcctgctgaagtgaatcgctgaaagtgtcagaggtatatttcccattggataaatggtatctggtagcaataaaatgccggatcttctgctcgttttctgcgattgcctttaagtcgatatgttgttgcgcatatgcctgctcaatattttctgttatgttcagtggattgagcggatcacattctaaaaaattatccgggcaataatctattaccagtggagtacattctgtatataattttaatgcttcctgtagggcatatgattgaagtacagaaccgtaatttgaatatttgtaatggatgttataacttacgattccaatccgttttgtttttttgtcaaccataggtttgttcacctttatatagtttcgttttaaagtaacattaatttttcaagcagttcatctggcagggacggctgttgattgtgcattggtaatccaaatgatgtctttggataggcatatgtgccaggctccatttctatttcgatcaatgtgggatctgatgtattttgaagcagttcctttaattctgaataaacattgccggatatgatctcatcacatttaaattttgctgatttcattccatatgcggatgcgatggaagaaaatgcaggtgcggaatatccaaattcagcaaccgaaccgcaaaaccgattctcaaacatagctgtttgctgttgacggatcagtcctaaagagtgattattaaggacaatgatctttatcgggatgttttcctgcatgatccattgtaattcctggatattcatttgaaaggcaccatcgcccgcgatacagacaggcaatttaccactgccataatatgcaccgattgctgccgggagagcaaaacccattgctccgtgtgcaccggaaaataacatatgctgattttttttgttttcaaaagattgtgctacccacatctggtgctgacctacatcacatgcaacggtacattcctccggcagtgtgtttccgatgatacggattacctcatttggtttccgataatcttttccggtgtcaacagtatttagcagatgtttaatctgattgcagacatcaagccactcatctgaatttgtagtgtaatctgatttcaacatttcaacaatcacggcgtctgcatctgcacaatatgtcatgtcgtcaggatggattgttcgatttaattcttctttatcaatatcaatacggatgatctgagcatctttagcaaattctgcgggtctgttaccagtctggcgaggacaaagccttgcaccaagggcaatgatcaggtcggctttgatgtttatgatcaaattagcatatcgatgaccataggcatatcctaacattccaaagttgtattctgaatcaaatggcagcagatcttttgcaagtaaggttgtaacgaccgggatctggagtttatctatgagtgcctgcacatttttgcgggagacatcatttttgctgattccattgcccagaaataaaacgggtctttgtgctttttttaaggactcaaaaatagacgatgcaattcttgatacatcattatcatctttcagtagagccatgtctggaaacggatttttgatcacatcgtctggaatgtcaatctgtgcgcgctgtatatccataggaatgtcaagcagtacaggtccctttctgccctgtaacatatctgtaattagggtatcgagaactttaggaatatccgttggggatgtgaccattaacgcattttgggtaatcggtttacagatgttgacaatatcggtttgctggaacccctgctgtctgagctgtgggtgatcggtatattctgaaagattcaactgtcccgtgataaataatacgggagcggagtcataataagcatctgcaattccctgcagtaaattgattgctccgggaccgctggtggcataggcaactgccatttcaccggtagcctttgcgtaaccactggctgccaatgcagctccctgttcattgtatgaaacatggttatagacaccattttcccggtgaatcgcatcaacaaaataagctatcatggttccctgatagccaaagtagtgcgttacaccgcatacttttaagtatttaacgatatattcagatactgtcactgttctgtcccctttccgcttgccgattgagctcagcgtgttgatccattccggatctttatattcttactacatctttgccattataatagtcctccataacctctgcaatagccagggaaacagattcatcgactaaggttactttattttgattttttattgcatttacaaaggcgatgatctcataacggattccttcgccatctaactggtaaaaataccgtttgttgttttccatgttctcataacggatctcaaaataatcggttttccaccatggtgcaggaacataaatataaccctttgtgccggcaatgatcagttcattttctgatttgactccttttccgaccttgacagttgctactgcatgggggtatacaaaatctaattttgtgaaagagtcaaacatacgctcatcatctgcaatatgtgagatgatctgcttattggtgtagccagaaccaagtatatgaaaaacaggtaataaacttttggcaccccatgcttcaatactgttccatcgattaaaactatcaatattttctacaaaatatttttcacttaagctagtactggttacatcaaccgagatcacatttccaatctttccggcttttatcataaggataagccggatataagccgttgcataagctgtcttatttccttccgccaggattaaccctttttcttttgcgatacagtgcaattcttcacattgagaccgggtcagagattctggtgtttcacaaagaacatgttttccggatagcaatgctttttttacctgagcataatgtagttttggtgttgacatgatgtagactgcttccacatgatctaaaaacgtgtcataatctgatgtcacacagggcaaggctttcaatcgttcgggaagttcgtccggataggcggaacaaactgcggtcagctttacaccgtttacataatcacattcaaccgaaaatttttcaagtatgatcgattcaccgacaagtccaaaccgcagctgacgtttttcggtacgcagtgcagaactggagatcccttctgttcggggcaaatagatcacctggcaataatcttttagataatcaaattttccataccagtcagaacccactgtaaagatatcgacatcatatttttggatatcttctattttttgtccttcatactcttccacaatgatctcatctgcgattccagttgcacgtacagcttcaacccgctccattaaattctgttgaacatttagttttcctcttgccttatcaaaatcatctgcagtcactccaacaattaaatagtccccaagtgtttttgccctttccaaaagccggatatgcccaatatgcaagagatcgaatgttccgtatgtaattaccttaaccatctcagattacctttcgtaataaagtgtcttcccgctctgaaaaaatccatgtgatcttataataggataacgtttgaagccggatgaacttttcttttttctactggtggaagtgccatataatctccatatacatattttaagaatgcatcataatcttttacgccatacagtttatggccttcaaaatcatactctgcactttcggcgtaccatctttttaaatggccaaatcccttttttagagacagtggcatgagtaccactctgacttttgatgagttttcccgatttcttttttgaatcaggcgttcataatgatgtaagattttttctcttggaacatggctcattaatttgtatgcggtacgttttacaggatttttttcatcgatccgtccaacttctgaccagaaaaattttcgaatacaaaagcaatggaacgtatcaattaaacgcaaagcataattttctggtatattatcaatcggaaaaacatcaatggaaataccctgttcatatggcatgtgatcctgattttctctcatgtaaagtgtattttttcttcttatttttccgtaactccagcggtagccatcggtttcccaggcatcctgaaaataaaattttgaggtgtctaagtcagttttacatgctattttaaaacgctcatattcgtcgcgtaataatgcaacgtctgcatcatcgtcccatgggataaagcctttgtgccgtactgcacccaacagtgttccaccagttatcgtgtaattgatctgattttttctacagatgcggtctacttcaagaagcatctcaagttctattaattgcagttgtcgtaattgtttgtcatctaaatttaccatgtttccctcacttgaaagtataaatatctgatccacagattgacaacatctgcggattttttacaaaatatttgtcgaaataaacagaataacagctacttaacattttaccccaaataacacaaatggtcaatggaatccacttgtggcagagtacgaaagcaaaagttttgctgttgtttttagcgcaaaatgatataatataaaaacacgtaagagatgtgctgtttgtgcattgatcaggaaaagcagaaagaggaagaagaatggagtttccaaaggatttttttaaaaaagaatgtagatgtgattttgaagtgccggagatgatgaagcgtgcatgggcagcgcagatggaagtacttgaagtggtgggtatggtgtgtgaaaagcatcatttacagtattatgcagactggggaactttactgggggcaatccgtcataagggatttattccatgggatgatgatattgatatctgtctaaggcgaaaagattatagcgagttgatccgtgttctgccaaaggagcttccgcatggatttgttgtggcaggaatgtatgcggcttccgaaagacttcaaaatgcagcatatgtaccgcatctgcgtgtgatcgcagacgaaacgctctgggactttaattcttatatgcgcagatttcatggattcccataccagcgggtgggaattgatatttttccaatggatcgtatgccggcagataaggaaacggcaaagctgcagaaagagattatccgtcagggaattgcaatattaagagaatgggatcgtttgcaggaaagcggtcaattacaggggtatttaaaaggatatggcgaactttgtaatgtggagatcccacagagagacaatcttaaaaactggatgtggcgattgattgatgccttgtgcagcatgtatcaggatgatgacacggagtttattacgaattggaatgtgtggatggtgaagccacgcttatatcgtgtaaagagtgagtggtttgatgagatgcgttatgtgccatttgagcatgtgcgtattccggtaccagggaattatgaagaggtgctaaaggctcagtttggcgattatatgacaccaagtcaggtaaaaggtggtcatgactatccgttttatgctgagatggagaaagaacttgtaaagcagataagagcagtaggtttcatgggaagtgtagaagaattttgtgagaaagtatcgacgggagaacttcaggtatgacaaaaatatttgaaatagagtgataaatgcctgggttcaggaaaaatgattaccatagaagcgtaggagagtactttccttttccttacataggaggagaaggagagtacttttttactttaataggaaaatttttatttgaaaggatagatcaaaagatgtgcgatctctttttttataatggtttcatattttttcatgagagcttcattctgaacgggttgtccattggcatcggtaagcagacatttccggttggtcagatcaatgcgaaggttaggtgacaccggaacggtggagtccatataaaaatgaaaatcctttccatgtaaagcagcgcggtaagggtcacccgggaaaatgttctgggaaaacgtatagtcgcgttcccgtttgccaccaaatgtaaggggcagattggcatcggttccctcaaagtgatatggaataccggcaagtttacacagaatagcagtataatcggcagtttctatcagctcgtccgaaacccggggggaaagattactacaacgcagcataaatggcacattgacacgctgctcagaaaggaaaggtttcccatcttccaccatgaaagcggttccgtggtcggaaaacagcgagacgatgatctcttcatctttataattgtgttccagatactgatacaggatgctaagataaaaatctagctcgtgtaattgctggatataaatttcccggcggttagggctaaatgactgctttaccgtcgttgtgatgtcattgtcaatatgtcgtgttgccagtggcaacctggactgcactggaagagaacacataaaccccccggcaatatcgtgcagatcaaggaagtcgaaccagatatactgacaggcattcttaaaggtttcaatctgctggatgacatcgctcacaacctctttggtgcggtacgcctgagaggaatactgataggtaaagcggtcaattccgcggatatatccctgccatggggtaaccgcatcgtttccaccaatctttgcggttacatatccagcatcgtggaaatattctgccagcactttggagtctttcataaaatcaaagcgatagtcctccatgagattcatgtgatgactggaatgttttccggtccagtaggttgcaatggacggcagagtccattcggaaccagagtaataattattacagataatgcctttggaaaaatatcggaaagtttccggcatcagtgtttcaagaccgagatctttgatcagataataattaaaactgtcgataaaaatgcttaataccggtttttttcgaccttttgcattggagtgcgtcaatgggatcggggtgccaaaaacagcgggataagccgttcgcagtgcagtaccattttctacagggagatagcagtatttttctcgtgctgattccaagtagaattttgttggatcttttgcagcatccgtaatgtaattggaatttttctgtgcgagatcataatttaggcagatgggaaccagtaccttgccgaggtcagcaggaatgtcatattttgtgctgatatcggcaattgggaataattcacatttggcatgaattggatccttgataaatgaaaagttaaagtatgattcgtaccaattgtcagcaagcccaatataatattgctgtccgttataacaggtaagtatttttccacacagactttcctgataattcttaaaagggtccagcatggcatagcggtggttttgctcaatacgggaaaattcgttctccaagtcagtgtcttcttcagcaagtatttgaaattcctgttcccatacagccagtgtctcatcgtcgataactgttatctgataacgcatctgcacaaactggatcattaggaacgactggtatgcggcggcatatttcccaagtgatctggcacagaccatgaaattataattggcttctacatcaaatggattgagggtaattgctgtttttgcaagctcgtaggctgtctggaagtcttcttttagcagagccagtgagattttgtaagaaaaaagatcaaagtcggtgggattgcaggcttcataacgtgtcaggcaggatgcgatttccgggatatcctgttgtaagatcgcctgttcaagtttttgtttcattggtgtgatgtcctctttttaaaattatttgggattcaagaatgtgaagggaagcaatctggaagccttccggtaattcatcttgaaaaattcagcaggaaaattcataagcattacttcccaaattgtgataatataagatataataaatatatcggcaaaatagacgaaacatatataatttttgtaaaaaagaatcaacagaacggcgatacgttcaggagtgaaggagaaaaagatgcaggcgattattctggcagcaggaatgggaaaacgtttgggacaattaaccagagacaatacaaagtgtatggtagaagtcggtggggtaagactggtggagcgtgttttgcgtatccttgataaaaagggattatcaaggatcattatggtggttggataccagtatgaaaatctgatggcgttcgtaaatgaactggatattagtacaccaatcgaatttatcatcaatgatgtgtacgacaagacaaataatattttttcactggctctggcaaaggaacagcttggatgcgaagacacgcttttactggagtctgatctgatttttgaggagagtgtgatcgatctgctgcttgaggatgaaagggacacgctggtccttgtggataagtttgagaactggatggacggaacctgtgttgtggtagatgaggaagacaatattctggattttattccaggcaagctgctaaaatactcggagaaagagcaatattataagactgcaaacatctataaactcagtgcagatttctccagaaatgtctatgtcccgtttctggaggcatatgccagggtaatgggaaacaacgaatactatgagacggtgatcaagctgatcctgaccctggataaaaacaccatgaaggcaaaacgtctgcacggtgaacagtggtatgagatagacgatgttcaggatctggacatcgcagagcttttattccttaaggatgatgtagagcgttatcatacattaacctcacggtatggcggatactggcgtttccctcatctgaaggactattgttatctggtaaacccatattttccgactgagcgtatgatgaacgaaatgacgtcaaattttgacgtgctggtaagacagtacccatctggtatgcgggtcaacagccttctggctgcaaagagtttttccgtatccgaagagcatatcgtgatcggaaatggggctgcagaactgatcaaggaacttttggctgagttagaaggaactgtgggtgtgatcagcccgacgtttgaggaatatccacaccgctgcaatggcggatatgtggtatatgacagcagagaacatgatttttcttatgatgtggacagcttgtgcagctattttacagagcatccggtcagttcaatggttttgatcaatccggataatccgtccggacattatctggataaaaaagagattagaaaacttctggactggtgcaagtcaaatggaaccgcattgatcttagacgagagttttcttgattttgcggacgataccagtgcatccatgctgtcagaacgcatgatgaaaaaatatccgaagctgtatctggtcaagagcatttccaaatcctatggagtgcccggactgcggttgggtatcctggcaagttatgatgaaaagatgatcgcggtactaaagaaaaaagtggcgatatggaatattaattcacttggagaatttttcatgcagatactggataaatataaagccgattataaacagtcactggtctggctgagagaagagcgggcactcttttatcaggaactttgcaagataaaaggacttaaggtatatccgtccgcagcaaattattttatgtgtgagctgacaaatggaaagcgtagtgaggcactggcggcagaactgttaaaagataatatcctgatcaaagatctgagcggaaagattgacaatggaaagcagtatatccggatcgcgataagagaccgcgaggacaatgagaagttacaaagggcacttgcaaaaagactgtaaaagataacgatgaaatggagacaagagatgaatgtagcatttattccagtgcggggaggaagcaaatcgatcccgcttaaaaacatcaaaccaatgtgtggaaagccactggtatattggacggtagcggcagcctgtggctgtgcaaaaatcgacaaagtatatgtggcaacggacagtgagaagatccgggagacactgcttgaggtaacgcagcaggagaaaaatgaagcatttcagaaactggaagtgatcggacgaagcgcggagtctgcttcggacacggcatcgacagaatttgcaatgctggagtttgcgaatgagcatgcgtttgaccatattgtgctgatccaggcaacatcgccacttctgaccgcagaggatttgaaccggggatttgcgttatatgaagaagcggacaccgacagtgtgctctctgtggtgcggcagaagcggtttaactgggatgtggcagaagatggaacggcacatgcgttaaattatgattatttccatcgtccgagacgacaggaatttgacggatactgtgtcgaaaacggggcattttatatcacatccaaagagcgtttgtgtgagacaggaaaccgtatttccggcaaagtcaaggcagtggagatgagtgaggacaccttttttgagatcgatgaaccatctgactggcagatcattgaaaaaatgctgggacggcgtttacgtgtggcacaggaaaaaaccggtcaggacgcaaaaaaaacaattaagatgtttctgacagactgtgatggctgtctgacggatggaggaatgtattattcggaaaacggggatgagttaaagaagttttcgacgctggacggtcttgggatgcgtctgatgcgtgaaaaaggcatcctttgcgggatcgtgaccggagagaatacgaaactggtcgcacgacgtgcagaaaaactgcatctggatatccttaaaatgggaataaaagacaagttgtccgtagtaaaggaactgtgcggacagtatggaatttcgttacaggaagtggcatatgtgggcgatgatatcaatgacaaagagcttttagaggcggtaggattttctgccagtgtgccgggagcgatggacgaggtaaaagcgatcgttgattatgtaacgaaacgtcagggaggaagcggcgcagtccgcgaagtgatcgaatgtattctggcgggacacgaataaagttgtattaagatatttgaagaaaaagccgataaataaatatagatttataaatactttacgaaaggaatgaccgcaaggtcaggtggcaatcatggaggatagcagaacagaaaagctggaggcgttagagacacttgtttcctataatgacaaagttgttaaaaatgtaggaattttgattaaagaattatccggacagagactggatgatacggataagtttctggatagtattctcaatgcgataaactgggaaatccaggtattgaacgcaacgctggatgtgatcaatgaaggaaaagagagaatcgtcaaagaagttttcaatgagaaagtgattgcattgggtgaggcagtaaaaagaaaagaagacgcaaaaatggcagatgcgttccgtgcgttggagccggaactggagaagcttggagcagcagccagagaggtaatcggttaaagggaaagagttcatggtaaatgttaatacttttcgtgaactctttttgtattgtattggataaaatatgagtagaatcttgatcatgtcagacattcatggaaatttgtctgcattaaataaaatctggaaaacagaaaaaatagaggaatttgaaggtattgtgttgttaggcgatctgatcgactatggaccacattccaatgaagtggtggaaaagttaaagaacctgccaaaacacaagatcctggtaaatatctggggaaatcatgaaaaggcggtcgtggatggagacgattcgagattttccagcgaacgtgggaaaaagtgtgcagcacataccagaaagatgctgacaacgcagaccatgcagtatctggaaaacgagatggacaagagcggccacatggaatttgagctggcagggaaaaaatgtctggcagtccatggttcggctgttgatttcttctggaagagcatttctcatggggaggatcaggaaacgtataaaaaatacgattatgtcttttccggacattcccatatcccgcattattttgaacatttttatccggcagaatgtaaggaataccggaaccggaaaaaaaccgtgttccttaatccgggttctgttggacagccacgtaatcataatgcaaatgcacagtatgccatattggaaccggagacgatgagcgttcagatgaaagcagtttcctatgacatagagcatgagatagcggcattttcggatgaagtggattctttttacaaagagagactaaggataggtgtatagaaataaaaaagtgtatttgtgcatgtctactgatattatattattcagacaggacatatcaatgtagaaaagcagcggagcctggcgaggcaaccgtcgggggttttaagtgacaagtattgcgccggaagatctgctccggagaagtgtttaaagtcatggttgcatatgacggattgagcacgttgctcgttgaaaaaacaagtattgaaaaggatggagaaagaaggcagtgtatgaagaaattatatgtaataagtggaatgacgggaatgacaggcaatgagcttgcacgtcagattgtaaagaggcgcgatgatgtgattggttttgataatttttttgcgtcatctacagaaacaatcaaggatgtgatcgcttcggagcacctggaattttttgaaggcgatgttaacaacgatgcacagatgaaagagctggaagaaaaggtaattgcaagaaaggcagactatgaaaaggtgacctacatcaactgtgcagcagtcgtacatacggaacatttttatcatgttgaccgtacatttgagacgaacgtgatcggaatgaaaaagtttttggagcaggcgatccgtgtcggggcagacagttatatcaactgttcgacgtcagaggtatattcgatggcatcctggaaagagggtggcgtaaaagaggatgatttcctgctcctggcaacggcagaacacagccagagaaccagttatgcaaccggaaagcttctgacagaattttttatgaaagatgcggtagagcgtggaatgataaaggggtgttcccttcgttttgccaatgtttacagtaaaaatgagctgctggcaaagcatgtgatcccgcatgtcattaccagtctgatgaaagatgggaaagtgactctgctagaaaactccaaagtaaataaaagaaccttccttcataatattgacagctgtgcagctgtgcttgcagttgcagacacagatgtagctctggatggaaccatttataatgtggcaacagagcaggaagtttccatgatcgaactggtagatgtatgtgcgaaagcgatcgggattgaaaaaccggagattatttttgaaggatatcgtgaatccgatccgcagagacgtgtattatctgctgcaaagataaaggcgcgtacgggatggaaaccgacgatcacgttggaacaggggatcaaaatgtgtgtagattacagaagacaggtggaagaaaagtaaatgaaaacggttatagttgcagttgcgggtatgtctagccgatttaatcaggatatggaagaaccggtgctgaaaggaatttacacagagagggatgttcgtaagacgctgttatattccatcttaagaaaatgcaaagggtttgatcatgtagtgctggtaggaggataccagtatgagaaactggtcgaatatgtgtctgcttgtaagaaggatttcccattccagatccagatggtatataatcccaagtatcaggaatttggaaccggttatacattaaagctgggactggaacaatgtctgcaggataacagttcagaaattaccctgatcgagggcgatttgtttttcgatgaggcatctctggatgatgtaaaaagatcaacaaggagtgttgctacctataacgataaaacgatctatagcaacaaagcagtgatcgcatatgtaaacgaggcacatgaactgaaatataagtttagcaccaatcatggatcggtggagatcacagagccgtttcgggcaatttataattcgggacagatctggaaatttgctgatacagacgttgtgaagcagctggtatcagattgcccggagacaatgtggcatggaacaaatcttgagtttattgaggaatatttccaccagatcagtgaggaggagagagagttgcttcctcttaaaacatgggaaaactgcaatacgaaagcagattatttaaaatacgaggaacagttataagggtaagacggatgaacaaagatgaaagtgcgaaaaagataaaagttgcctttttcccgtataaaatttcgatgtgggattctctggagagtatatgggaagctgcagatcgggatgaaaactgtgaatgtcaggtcataccgataccgtattattccaaaaacgcagatggggagattgaaaaagaacattatgagggagcagcgtttgctaagaaagttccgatcatagattatcagacctattttttggaacaggaaatgccggatgttatgtatatccacaatccctatgaccagtacaataaggtcactatggtgcatccgcgttttttttccacagaactgaaaaaaggcggaggcatcctggtatatgtgccatattatatttcgggattttgtaaaaaatacgaaaatatgttaccaaactgtgccaatatgggagcagtatacagcgattaccttatcctgcagaatgaaaatctgaaaaatgcgtacgcattttgcggttacccggaaagaaggttactggtattaggaagccctaaggtagatgctgtctataagatcagggaaaagcagttctcccaaatagatgagtggaaaccagtgatagaaaatcgtaaagtgattctgttaaatacgagtattactacctgcctgagaaatgacaactggctggaacagatccagaaactgattgaaccgatcttgcaggataacaggctggcattgatctggcgtccgcacccattgttgcttgatacgatgagatcaatgttacaaaagcaggcggaatatgacatgctgttggagcgcatccggaaagcaccaaatgccataattgatggaagcgatacagcggaagctgcaatgaaagcatcggatgccatgatcagcgattacagttcactggtaatgcagtataattttaccggcaaaccgtcctatttactgaccgggaaaagcgaaaatcgtaaggattatgttttttgcgattatttttcaaactatttcagagaagatggagaggatctttctgattttataaatatggtattggctggcattgatccaaagcagcaggaacgaatggaatatgcaagaagttcaatggcaaataccgatggaacctgtggtgaaaaagtccattgcgagatatgtaaaaaagtaatgacaggagtgaacagataatatggatgaaattaagattacagaagaacagcgggagcggatcagaaaaatccagttggaaatgctaagggaagtacatcggatttgtgaagaaaaccatatcaaatatgtgttgggatatggaaccatgcttggtgcagtaaggcataagggatttatcccatgggatgatgatgtggatattttaatgctacgtaaagattatagaagatttcgcgaggcatgcaaaaaagaactgccccaaaaatatttccttcaggatgaatgttccgatgaatattacctctggggatattccaagctgcgcaatttgaatacaacttatgtccgttgcggacaggagcatattccatataaaaatggagtatttatcgatatctttcctctggataatgtgccgtggtttttaccattccgtattttgcaggatgcatatggttttgtactgagaaaaatgttgtgggcaaaggttggaaaaaataccgagaaaaatccactggtacgtctggtatacaaaatattggcaccaattccaaaaagcaccatatataagttgcgcaatgtgatggtacataagggaaataaggtttcagacagagtccgctgtctgctgtttacggcaccgggaaaagaggagaataaaaaggccaacagtctgtattccagatacggatttaaaagggactggctgttagatcgtgaaaaatatgtctttgagggagaagaattctggggaaccagggcctatgacgattgtttgtcatacgtatatggcgattatatgaaacttccaccagaagaaaagagagtgggacatgcgccagtatctaaattagaattaaatcaagaagggctgtgatcatagataaatcatactgggatacattctatgccggaaaataaatgtggaaaacaaagactatgccagcagataagagcagtaggtttcatgggaagtgtagaagaattttgtgagaaagtttcgatgggagaactccagttatgatggagttactctgaataatgttctctcacaaaatcatcaatacttctggtatatccatgagcatccagatagtttcttaatgcacattcttctactttgtaaaaaggataagtgtgtgttgtggcagttatgatggggttcctgtaatcaccgtagcggttggtaaggatttcgtcatactgttttggtacagcaaccataatgttttcaaatggtacggtaatcgtttcatcaaaccattcttttggggtagcgatctggcggccatttgtaaaccagaaaccatctttggcaatgtcattgccgtcattttcatgatataacgcgcggatggaatccgagagttgtatcagagtgcgaaggatatttgtatcacgtgcaatgtgggtactgcatagcgattcgatttcttttacattttcttctcttgtgatctcgctggttttctcccagttgcggacacagaacacgattttctgaatcaggtactgttgaagggaactcagttcgggatcatccgggagataatcaagcgggaagatatcgatccccatattacgataaggaaagccgtgaaaacgctgcatatagtcggaaagcttccagtcggacgaaaccgttgcaacgacagactggcaggttggcaaaaataagttatccgttttggcataaggtccggcgagtgcaatcccatttggaagttcagaaggaagaacacggatcagcttgttgtaatcaggtcgtttgagagcaatatccacatcatcatcccacggaatgaagcccttgtggcgtattgcgccaagcagtgtgccatattcggcaaaataggtaatatcatatttatcgcagatgtcgatgatgatctgcagtaattcaagctttgccgcccaggcgcgcttcatcatctgtgggaccaaaaaaccattgcgatattcgtcttggaaaaagtttttagggaaaatcataatgggggactcctttaaggaataaaaaatactattagatatatcggctgaaataaatgaaaaatgatatatattatgaatagaaaattttcagggaagattaagaaaaagagggcaaatgccgatacactatatagctaattatcaaggaagatgattacagagatacaagcggaagcgtatctttgaaaaaaaggacacggaggggaatatgggcagaatagttgtaaaccataacatgcagtcgatgtatcaacatcggcagttgaagattaatacagaaaatgtagacaaatcttcagaaaaacttgcatctggttacaagattaatcatgcgaatgatgaggcggcagagcttacagtatctgaaacgatgagaaaccagattagaggtttgaacaaggcatccaataatattcaggatggaattggtttggttcagacagcggatgcggcattggaagagacccagacgatattggatcgtatggtagaactgacaacacaggctgcaaatgatgtaaacaccgaggaagatcgtaaggcaattcaggacgagatcagtcagttgaacaaggagatcgaccatattgcttatgacaccaattttaaccagaattacatgcttgcagagggaacgccaaaagcgaaaccaggatattttcatgttcagacaggttctctggcagaacagagtattatcatcaattttgtaaatgcgagcaaggaaagtcttggtgtagataaggttgatgtatcgaatcatgaaaaggcatcagaatcgattaccatggtgcaggatgcgatcgagaaagcagcaggatggagagacgattttggagcagtctgggagcagttagcgcgtgcggtaaagaatgcagattacacatcccagaatacacagcagtctgagagcaatattcgtgatactgacattggtgatgaagttctgggatataccacaaaccagatcctggtaaatgcgtcacagagtctgttggcacagtataatagcagtaaggatgcggttctggtattattaaggtaatatagttagagatgggataacagcggttgattaatatatgtcatgttgatcaactgctattattttttgggggcaaagtgtgagtttgtgaaaccgcagaatgatctgtactggaacaataaatatgtttttgactgttatctgacaaaataaaggagatatggcatgcaggcgattatcttggcagcaggaatgggaaaacgtttgggagagttgacgaaaaataatacgaaatgtatggtggaagtcggtggtgtgcggctgattgaacgtgcgcttcgcatacttgacagaaaaaaattaagccggatcattctggttgtcggataccagcataaaaatctggtttcttttgttgattctttgtgtcttaaaacaccggttgagtatattgtaaatgatgtataccataagacgaacaatattttttcactttctctggcaaaagatcagatgatgcaggaagatacgttgttattggaatcagatctgatttttgaagagaacctgatcgatatgctgttagaagatgaccgggatacgcttgcattggtagacaaattcgaaaactggatggatggaacctgcatcgtggtcgatcaggacgataatattactgatttcattccgggaaaattattaaaataccatgagaaagaacattattataaaacagtaaatatctataagttcggagcacagttttcaagagatgtatatgttccatttttggaagcttatgcaaaggttatgggaaataatgaatattatgaaacggtaattaaactcatactgatgctggataaaaatacgatgaaggcaaaaagactaaatggcgaattgtggtatgagattgatgacatacaggatcttgatattgctcagacgttatttatcgaggatgatgtagaacgatatcatcatctgatgcaacggtacggaggatactggcgtttccctcatttgcaggactattgctatctggtaaatccatattttccgacaaagcgtatgcaggaggagatggaatcgaattttgatgtgctggttcgtcagtacccgtctggtatgacagtcaatacgcttctggcggcaaagagttttgatgtgcatgaagaacacattgtgatcggaaatggtgcagcagagctgatcaaaggattactggaagaactgaacggaaaactgggtgtgatccgtccgacttttgaagagtatccaaaccgctgggagaaagatgttattgcatacgactgtacggaaaatgatttttcatatacggccagccagttaatccaatactttacagaaaatccggttgatacgcttgtactgattaatccggacaatccgaccggtcattgtatgaatgcagacgagataaaacggctgctgcagtggagcaggcaatgtgatataaatctgatcatagatgagagttttcttgatttcgcagatgcggaaaatttatcgttattatcggaacaggtgttaaaagaaaacaaaaacctttatgtggtaaaaagtatttcaaaatcatacggagttccgggaatcagactgggaattttagcaagtggaaatacagatatgatcgggcgtttaaagaaagatgtatcaatatggaatatcaattccatggcagaatttttcatgcagatcctggacaagtataaaagcgactatacagattccctgcggaaaataaaggaggaaagaagtcgttttctgattgaactttgtgcgatcaaaaatctaaaggtctatccgtcacaggcgaattatttcatgtgtgagattttagatggaatcagcagcgaagaactggcaggaagacttttaaaggaaaatatcttgattaaagacctgacaggaaagatacataatggaaagcagtatatcagaattgcgatccggggagaagaggagaaccggatactggtggagaaattgaaggtatgtatgaagcagtagaagagagctggggcctgaaatatggttattataaaacaactgcaaagatagtagaaaatgcttgcatagaatgcacaataatgtcacaattgtaaatgctattgaagttcaagaatgtatcgtggtgatacatggtaaaatacgtaacaagaggagaaatatggaagagaaaagagatgtgatatatctttcttccagagaggctttttttaaagttttgtgaatagagcggaggcttgaaaatatggcaaatgaaattgttattgttattagtttcatttttactatagctgcaatgtgtaaagtatggaatttatatgcaatgaaaaaatatagtgaatccaaagaagagaggttaggattgacatacggattttatgtagacaatatgcaatttgttgaaattgaaggaataggaaatgatgaaaatggagattttgatattgcaaaggccattaagaaaatagaaatgccggatgatgtaaggatcaaagcataatgaataaaatagattttttagaattttataatggtgtagttaaaaaactaggggtgcatttggaaaatgagtacaggcaatttcgtttttgcgataatccggattcattgtatgaagaatatctcaatcaaaagaccatattaagagttttataccaaaagaaaaatggtgaaagtaaaactttattagaccggcataaagtatgtgcctgtatgacagctgcaatcattaaggtcaggctggtaagcggaaatatccaaacagatgatggtttttctttatccgctgcatctaggattaacgaacaactggcttttatgagtacgtgagagttatttttaggtttcataaggcttcacaaagaagagacagacaaaaaaagatgggcatatcagatgttagatgatctggtatgctttttttataatagggagtgcctcacagctgctcccaatactccttaaacttcacctccgtcatcccttccccgatcatccgatacagctccatctgctttggaatcagagcgctgtaaatggactgcgcataatccggcacctccgcaagaacggttttttctaattctttgtagaaagcataggagggtttaaaatcccggagttttgcaaaatacagtgtctcatacagataggtatggagaaaatatagtttgatttcatcatagtattctttgaaaaatggagtttttttcatgaaattccagacagcaagctggacgtcggcatgcatttttagggtttcttcctgtctcatatcatttcgcatggttccagaatcattttgtctgtaataatagtaggcatcgtttaagattacgattttatttgcaaaatataaaagcgggtatacaaaaagtggctcctcataaatgacatgttctgcgtaggctgtatgagcctcattcagcagagtgtggcggtaaagtttattccagcagccataggtaactttttctgagattagaaatctttttcggtcactgacagaagaaatttcaatcacttccggcgtaatgttccgaccggagtccacggcacccagacggtctgtataataaaaatattcaaactggatgatatcagcatccgattctttggctttttcataagtttccaacagaaaattttcagagacaaagtcatcagcgtcaacaaatgcaatatattcgcctgttgcatactgcagggcaacatttcttgcaccgccctggcgcatattttcctcaagttttaagatcataatgctttccggataggcgcgttcaaattcctgcagcatgttccaggtagcatcctcatctgtggatgcatcgtctacaaagatcagttcgatctggtcaattccgattgtctgctgtacaagtgacataaagcatttcggaagatattttgttgcattaaaacatgggatgatgacacttacttttttcatagatcgaaattctcctggtaaaaaggttacgtatggtataataaacaaaaatggtatattattaatttatcacaacaaaaaggaatgcacaatatcagtctgaaaagcagggaggttacaatgtctggaaatatagcgatcggtatacaggatttttccacaatcatccagggaaactatttttatatagataaaacgccttttattaaagaatggtgggattgcggggacagtgcgactttgatcacccgtccgcatcgttttggaaagacacttacaatgagtatggtggagcagttcttttccatagactatgccggcaggtcagatttgtttgaacatctggcgatctggaaagaagaaaaataccgtgagctgcagggaacttatcctgtcatcagtctgtcatttgcgcggattaaagagagagattatgagaaaacaaaacaaaagatgtgtgaggtgttaagaaacatatatataaagttttgttatattaaagacagtgaaaagcttacagatgccgacagagcatattatgagcgtatgttggaggaaaatataaaagagacggatgcgacatcttctttatatcagttatcagatttcctgtatagatattatggaaaaaaagttatcattttgttagacgaatatgatacacccatgcaggaagcatttgtggatggttactgggatgaacttgtcgcattcacccgaagcctgtttaattcgacatttaagacaaatccggcactggaacgtggaattatgacgggaatcacaagagtaagtaaggaatccgttttttcagatttgaataacttaaagatagttacgactacatcaaatgaatatgcttctgtatttggttttacagagaaggaagtctttgatgcattggaacagtatggtcttgagaaagaaaaaaaagaggtaaaaagatggtacgatggtttcatttttggggaacacaaagatatttataatccatggtcaattttaaattatctcgatacacagttatacaaaacattttgggcaaatacaagtgcaaatagtctagtaggaaaattgattcaggaaggaaaccgtacaattaaggaaaaatttgaaaaattattgtgcggagaatacatctggtcagaaattgaagagcagattgtatacaatcaattaaatggaaatgaaaaagcagtttggagtcttttgctggcgagtggatatttgaaagtattatcttatgaaacgtatcaggatattgaggaggggaagatgccgaaataccagcttgcgttgacgaatctggaagtaaagttaatgtttcagggtatggtacatgactggtttgctcctgtacaaccagattacaatgattttgtaagggcaatgttacttggtgatgtggatgcgatgaatgaatacatgaatcgaattgctatacagacatttagttatttcgacaccggagagagggcatctggggcagagcctgagcgtttttaccatggttttatattaggtctgcttgttgacctgcgggatagatattaccttaaatccaaccgtgaaagtgggtttggcagatatgatgtaatgttagaaccgaaaaattcaaaggaatgcaaagcagttattttagaattcaaagttcgaaatccacgaaaggaaaaaagtattcaagagacagttctgtctgccttaaagcagatctgtgagaaaaaatacgatgcagacctgcttgataaaggaatcagaaaggaacagatatatcattatggatttgcatttgaaggcaaaaaagttttgattgggacagacagggaggagtgaatatgcccaccaatatagcgatcggcacacaggagaacaaccacatgttatcagtctgcatcatcaccaaaaacgaagaacacaatatagcgcgctgcctcaaatcattccagaaaaccggatttgagctgatcgtagcggacaccggatcgacagatcagacaaaaaaaatcgccgcagaatatacggaaaatatctatgatttcccatggtgcgatgatttttcggcagcaaagaattttgcggtttcaaaagcagcacatccgtatgtgatggtcattgacagcgatgaatatttacagcagattgatcgggtacagttagagaaaatgattgccgaacatccaggtgaggttggcaggatccggagaatcaatattatttccggaaaagatggaaagcaggaaaataaagagtggatcaaccgcatttttgcaaaagaaagttttcattacacgggaagaatccatgagcaggtaactgcctgtgacgaaaaggaatatcgtacatacgaagcaccggtcgtcatcggccatacgggttatgatcttccgaagaaagaaaaaaaggcaaaagcgctgcgcaacataagactgttagagcaggaattaaagaattcaggatgggatgaaaaagtgcatgccacgcagttagatcagaatatcgcaaagcaggatacggatgcagagcagaaatctgaaattacggatgcaaaaaaagagcagcagatcccgtatctattgtatcagcttggaaaaagctattacatggcagaagattataacgaggcatgcttctggttcgcccatgggctcagttatgaccttgaaccaaagttagaatatgtcatcgatatggtggaaacctacggctatgccctgatcaacagcggacgcgccggggaagcacttttctttgaaaatatttatgaagaatttggaaatagtgcggattttcagttcctgatgggactcatttatatgaacaacgctatgtttgatgcagcagttggagaatttttgaaagcggtcaaacaccgggactgcaggatggcgggagtaaattcctatgcagcttattataatgttggagttatttatgaatgcctggagaaaatcagtgaggcaaagtattattatcagaagtgcggtaattatgagccggcaaaaaaacgtttaaaattgataaacagttaaatttgttatagtcagcttattggagaaacagagtgaaaaatataatttttcaaatgcagaatggagattagaatgggaatatatttaaatccgggaaatgaagaatttcagaaagcacttaattccaagatatatgtggataaaaccatgttgatttctgaaatgaatcagaatctgaataccgaacatcagaatatatgcgtaagcagacctcgccgttttggaaaatctatgactgcaaatatgcttgtagcttattatagcaagggatgtgattcgaaaaacatgtttgcggattataagattgcacaggatgaaagttttgaggcaaatctgaataaatataatgtccttcatgttaatatgcttgactttcttaaccgtgcacagacagtggacggaatgatcgattacctgcaaaagaggcttttgtgggatatcaggcgggaatacggagatgtagactgttttgaccgggaagatcttattgatgtattagagaacatctatagtcagaaaaaacagaaatttatcatcattatcgacgagtgggattgcatatttcgaaagtatccgggggatgatgaagcgcagaaaaaatatctggatttcttgcgcctgtggatgaaagataagccatatattgcgttggcttatatgacgggaatactgccgattaaaaagtatggcgagcattcagctctcaatatgtttgatgaatattccatgaccaatcaaagggaactcgctgaatttaccgggtttacggaagaggaagttcaaagtctgtgtgtgtcatatggtatgccttatgacaggatgaaacagtggtacgatggatatgatttaaagggcattcagatctataatccaagatcagtagtcatgtcattgctgggacatgattttgacagttattggacgaagacggagacctatgaggcactaaaaaaatatatccagatggacatgtatcacttgaaggcgttaatcacacagcttatatcaggcagccatataaggattaatccggataagtttcagaatgatatgtccacatttgcgagcgtagatgatgtatttacgcttttagtgcatttgggatacctgacctacgattttgagaacaagactgtttctattccaaaccaggaggtgcagaaagagtttattaactgcatagaggatggcggatgggaaccggtcatggatgcgattcgtaattctgaaacactgcttcaggcaactatagatggaaaagaagaatatgttgcggaaatgatcgagcaggtgcatcaggaaaatatatccattttaaagtataatgatgaaaactctatgtcatgtgtgctttcgctggcatattatgctgcaagaaaagattatgtgatgtatcgggaactcgccgggggaaagggatttgctgacattgtgtttgtcccgagaaaatttagagatgtgccagcgatcgtggtggaattaaaatgggataaatcgtcagatgcagcgattgcacagataaaaaagaagcagtacatgcagagcctgaaagattatcatggacaagtgatcctggctggaatcaattatgacagcgcagatcccgcaaaggatgattataaaaggcatagctgcagtatagaaaaaataaatctataaaaagtacaggagaccaccatgcagacaaccatcatctacttcaccggtgtttacgacacccttgacttattcacccaggaactgaaaaatgcctttgaatccatgggatatgcttcctttacctatgatgcccgtctcgaagaggtgagcaagcaggcgctgatcgaatgtatcggagatggtgcaaaaaaagatcagaggtttttctgtgtgacgtttaataacctgggatataatctgtcacttccggcaggcatgaccggaacagggatgcttttgaagcaggacattttccaaagtacagcaggatcaaaaagagcaggttctgcggaagaagagccaaatctctgggaaacttacaatattccatatatcaatatcctgatggatcatccgtttcactatgaaaaaccactgcagaatgcaccggcaacatctgttgtgctgtgcacggaccgcaaccatgtccggtatatccgcagatatttcaaaaatatccggtatacggattttctgccacatgccggggtggaacttggcagcagacataaaccgctcgcggagcgtggaatcgatgttttatatgcgggggcacttccaatctacacagtagcgaagatgattccagatctctcatctatcccggaggtggatggggaggagatggcacaggctgtgctgtcagaactggtgcatcatcctgaccggacaacagaggatgtgatagaagaatatttaaaatataagcggaatgatatttcagaacagcgtattcatgagatcatcgtgcagatgcgttttattgactcgtatgccacgtcatttttccgtgaacaggctgtccgtattctggtggaaaacggaatacgggtaacggcatatggaacaggctgggatcagtgtgagtggagtgacaatccgtatctggtgtatggtggaaaagtacttgcgccggaaatattgccactgatgaacgatagcaagattgtcctgaatacgatgacctggtttaaagccggagcacatgaccgtatttttaacggaatgcttgccggagcagcagtggtgacggacgattccacctatctgcgcagagagtttacggatggaaaagaacttgtcatgttttcaagaaatgagatccggactttgccagaccgtgtatttgacctgttcggacacatgcagtccacacaaaggatggcagactgtggatatcagtcagcaaaagagcatcatacgtggaaaagcagagcggagtggatacgggaagcctggatgtagagcggaggttctcattccctccctgcaacaggttttacatacagatgaaaacgttattttggctgacacggcacaggaatggagattattatgcacatattaatgtatcgctggaaagcttataattacagagacatagagcagacttttttattactggggcatacggtggataatatcaaacagcatcttggcaattatgatatcgatccggaatttgaaaaaatcattgaaaacaaactgcgggaaacgcactatgatatggtatttacggtcaattattttgcactgatctcgaatgtctgccagaaaatggggataaaatatgtatcctggagctgtgataatccgctgatcagcatgtatcatgagtctatttttcatccgtgtaattatatatttacctttgataagacaaactatctggaattccgggagatgggagtggaacatatctggtatctgccacttgctgtggatacggaccggatggatacggtaattgcaaattcaccggaaatacagaaatataaaggagacattgcgtttgtcggaagtctttatgaacggaactcttatgataagataaaaagcaggctgccggaatacctgcgcggatattttgatgctgtgatcgaggcacagttaaacattagcggtgccaatatagtggaacctatgctgactacggatattttggaaaaactgcaggaatattttgaactggaaaaatcagaaggatctttttcagaccttggactgatctttcagacgacggtgcttgggtttaaaattgcggaggtggagcgcaggcgcgcgctgatcgagttgtcgaagcattatcatgtcaatgtatacagtaacagtgatgtcagtgacctgctgaggatccagtactgcggatcggttgattactggagtgagctgccacaggtttttcatatgtcaaagatcaacctgaatttcacaattccaaatattaaaagcggtattccgctccgcgtatgggatgtccttggggcaggcggttttctgatgacaaattatcaggcggagataccatattattttaaagagggggaagacctgatatgctttgacggaatcgaagatctttgtgaaaaagcagaatattatctggcacatgaggaagaacgtctggcaatcgcagaaaatggttatcgaaaagtaagggagcatcacaattatatagagagaataaatacgatgctggatattatagaagaaaatgaaaatcaggaaaatgatatatagtacatgatcagtgcgaaagatgcataatctgaagttgcatctgggatattggaatattaaacggacactacagaaaatctgtaagtgtccgtttagcaatatctgtctaacatcattccggaataaacggaggtcaggtaagggcaggaaaaattcttatgacctggttttttgtaagtgatcatcgttttgcttgcataatttaacgggtcaacagagacggttccggcggtcgtcccgagatcgtttttaaacttatttaatgttgcaaagcattcttttgcatccgtggaagtgactgcatccgtcaaaagatgtgtatcgaccttgatggcaccgtcatctgaaagttttaatccatacgactcaaattcattgtaataaggttttaccacctgtgtaaaatcgcgccgcagtttatctgcttcctgtgtgctgtcatagcgatagcttaactggatcagattgttgtatacatttaccagagactggacattgtctacaatggagtcagctgttgttttaaagccgatctgtacagggtttgcctgggagcttggtttattcagtgtcagttcaaaagcattgttgacagtaaaagtatttgacagagatgcatgctccgtaccgtttaataagaaagaagaattacttgctgtctgggtaacacaatcaataccgagtgtctgcattgctttttcggatgcatgatcggaacttggggtaacttcaaacagataggactgaccgtctgcaagaccggtctgacttgaagttaaacgcagggcaatcttgttactggcatttttggcaagatcggcatgaatcccggcacctgaagaattgaccaggcgtgcaagcttttcaagaatatgctggttgtcatcatttctgcttacggtatactgaaactcatatgaacttaaatcagttgatatatcgaatgtgtaagtacctgttttgaaatcgcattcatcagggtaaagaaactttccgacattgatctgtggggctgcaagctgttttacctccacatcaaaatgcaaagaattatcgagactctgatcctcaccaatgtaggtaacattgacagaagattcgtcggaagactttgcaacttttttgttgaatacattttcaatcccctcgtcgttgtcagaaagggcagcgattacattctggatcgaacgggtatgttctttcaggtcaatcgcaaattttttcacatccgtggaatctggaattttatacagaggagtatctttatttgtttttacaatctgattatagacagcacgaagctgactcttcttatgggtatcataacgtgataccttcgaagtgccataagtgcttaaataataatgataggcactgtcaatagcagccaagaaaacccctcctttcttccatgaaatatatacatttatcaggttataggacagcatccttgccgcctggcatgataaatgtggggattttaattatatttttaaaaattctttaaaagtatttcggtctaactatataaaaatattataccatttgagaaaaaaatgtgaaataggaaaaaataatcaaaaaggtttaaaagggtataatatacaaaaaaagattgacggaaacaagtggatatgatatagtagacaggcgatggaagtaggtcttttttttatgcctttttttaaggactgtcgctgatccttaaaaaacgtctcactacggagaccggggcagaaaaaagcacaaagaattttaatggaggtggaagttgtgcgcacaaaaataacattggcatgtacggaatgcaaaaaccgtaactacaacatgacaaaagacaaaaaagctcatcctgacaggatggaaaccaaaaagtattgcagattctgcaagacccatacgttacacaaagaaaccaaataagacgcgcgtggcaaaggagtgaaaaaatgggagaaaccgagaagttagacaaggctccaaaagagagctggtttaccggtctttcggctgaattcaaaaagattatttggccggagaaacaatcacttgtaagacagaccacagcggttattgctgtatccgttgtattaggtcttatcatcgcgcttttggatttcgcaattcagtatggcgttgatttccttgttggttttaatttttaatggaggcagagtgatttatggcagaggcacactggtatgttgttcatacctactcaggatatgagaataaggtaaaagcgaacattgacaagacaattgaaaacagacatctggaagatcagatcttagaggtccgcgttccgatgcaggatgttgtcgaaatgaaaaatggcgcaaaaaaatccgtatcaaagaaaatgtttccgggatacgttcttatcaatatggttatgaatgacgacacatggtatgttgtcagaaatacccgtggtgttaccggatttgttggtccgggaagcaagccggttccgcttaccgatatggaaatgaaacctttgggaatcaagaaagagaacattgaagttgactttacagagggagacaccgttgtggttaccggaggtgtctggaaagacactatcggagtgatccaggcgatgaatcacggaaagcagagtgtgacgatcaatgttgaattgttcggccgcgagacgccggtagaaataagtttcgcagatgtaaaacttaacaattaaagcacagaccaggatctgtgcgcaggcatgagattatgcctgaaacattggattaaggaggcaattccaaatggcaaagaaagtagaaggatatatcaaattgcagattcctgctggcaaggctacacctgctcctccagttggacctgctcttggacagcatggcgttaacatcgttgaatttacaaaacagttcaacgcaagaaccgctgatcagggagatcttatcatccctgtagttattacagtatacgcagacagaagcttcagcttcgttacaaagacaccacctgctcctgtattaatcaagaaagcctgcaacattaaatctggttctgcaacaccgaacaagacaaaggttgctacactttccaaagcaaaattacaggaaatcgcagaattaaaaatgcctgacttaaatgcagcatctttagaggcagctatgagcatgatcgctggtactgcaagaagtatgggtgttacagtggaagaatagaatttgcaaaaacagcaaattcattggaagaatgcaagaacggcattcttctgagaaattctgcaaaaattaacgatatttattaacgattatgtgggagggccctctcccgataataccaccaggaggtttttttagaatgaaaagaggaaagaaatatcaggaagctgtgaaaagttttgataaggctgctcagtacgatgttgctgaagcaatcagcctggtaaagaaaaacgcaacagctaaatttgatgagacaatcgaacttcacatcagaacaggttgtgatggacgtcatgcagagcagcagatccgtggtgcagttgtattaccacacggaactggtaaatcagttaaagttttagtattcgcaaaaggaaccaaggttgatgaagcacaggcagcaggcgctgattacgtaggcggcgaggagctgatcccgaagattcagaacgagggatggttagacttcgatgttgttgttgctacaccggacatgatgggcgttgttggacgtcttggtcgtgtacttggaccgaaaggtttaatgccaaacccgaaggctggaacagtaactatggatgttacaaaagctgttaacgacatcaaagctggtaagattgaatacagattggacaaaacaaacattatccacgtgccagttggaaaagcttcttttacagaagaacagttaagcgacaacttccagacccttatgggtgcgatcaacaaagcaaaacctgcaagcttaaaaggtcagtatgttaagagtgcaactcttgcatctacaatgggacctggtgtaagattaaacgtagttaaaattacacagtaaaagcagaaaattgttgacaaccataatatacaatgttataatgcatatcgttgagccggttttccggtactcagcgatttgcatatatgccgaagacagcaggtgccatatggcgtaaacgtaagacgacctgccgaggggatctttatcaagatttttttgaccgtatctctctgtctttgcagggagttttttattgcagattttaatctgaataaagcggttttatatacctcaagtcttttatgcagcagcagtgagaaaatcactgtgatccggcggattatccgtcggcaaaataataaaaggaggtgcacgattcgtggcaaaagtagaactcaaacagcctatcgtacaggaaatttctgaaaacatcaaagatgcacagtcagtcgtagtagttgactaccgtggacttaccgtagcagaagatactcagttacgtaaagcattaagagaagctggtgttacttacaaagtatacaaaaatactttagtaagccgtgcagtagaaggtactcagttcgaaagcttaagagacgttcttgaaggaccgaatgctttcgctatctctactgaggatgcaacagctccggcaagagttttagctaagttcgctaaaacagctcctgctcttgaaatcaaagcaggtgttgttgagggtacttattatgatgaggcaggcatgaaggctgtcgcagcagtaccatcaagagaagaacttctttccaaattacttggaagcttacagtctccgattaccaaccttgctcgcgttctcaatcagatcgcagaaaaaggcggtgcggcagatgcagcagtagaggctgctccggcagaagaaacagcagctgcagaagaaccagcagagacaccggcagagtaatctatccggcggctggatgaaacagtatatgggcacggcaggagagactgaccggtgcgacaataaattataatggaggaaaattataatggcaaaattaacaacagcagaatttatcgatgctatcaaagagttaagcgtattagagttaaatgatttagtaaaagcttgtgaagaagagttcgg

SEQ ID NO: 54 - DNA, 10414 bp, unidentified
  source 1..10414: mol_type = unassigned DNA
  misc_difference 1706: note = a, c, g, or t
  misc_difference 1707: note = a, c, g, or t
  misc_difference 1708: note = a, c, g, or t
  misc_difference 1709: note = a, c, g, or t
  misc_difference 1710: note = a, c, g, or t
  misc_difference 1711: note = a, c, g, or t
  misc_difference 1712: note = a, c, g, or t
  misc_difference 1713: note = a, c, g, or t
  misc_difference 1714: note = a, c, g, or t
  misc_difference 1715: note = a, c, g, or t
ttattttcccgctatcgccactttaatcaccccgtccagcctattttcgaatacgcggtatgcttcttcgatttttgtcaggggaaaacggtgcgtgataagcggcgtggtatcaatctttcccgcctctatcaaacggagaatctcggcacaatcgcatccgtccactccaccggtcttgaaagtcagattcttaccatacatatcgggcaaaggaagtatttgaggcttatcataaagcgccacaaccgtaaccaccgcattgggacgggcacattcccacgccaggcggaaagtgtcttcggctcctgccacttccagcacgacatcagcgcctccgtgagcgctgttacgaagaacaaattccttacagtcttccggctccgtcaccaatacatcaggataatgttcacggataaaccgaattctttcagaggacttttcacaaacaatgatacgcttcggtttcttcagcattacgcaaagcaaggtacatatccccgtagggccggctcctatgacaagaaccgtatcatcctcggaaatctccgaaatgcgtgccgcccaaaatcccgtagccagcacatcacctacaaaaagcgcctgttcatcgctcaccgaatcgggaatgcggttcaatccccggtcggcataaggaaccctgacatactccgcctgaccgccgtcgatacggcaacccaatgcccatccgccgttcacatccgtacagttattcacatatccatgccggcaaaaaaagcactcgccacagaaagtctcaacatttacagtaaccctgtcgcccggtctgaccgaagtaacacgactcccaacctgttcaacgacacccaccatctcatgccccacggttattcccggcacggcacgcggcacactgccatgcttgatgtgcaaatcactggtgcaaatgctgccaagcgttatacggacaatggcatcacgctcatctttcagtttgggtttcggtttgtccaacaattcaaaccgcccccgttcaacatatgtatatgcaagcatactctcctcctttcgttatcattttcccgcgaatataatcattacattcatgataaaagaacgataacggaaaatattcgccacttcctcacacccgtaagaataagaatggctacatttgcagacagatatataactcctcatataaaccgtaacccatgatgaaagaaaaagaacttgcattctctgatattcccagaaacttcctatggtgcatcaaccggcaatgccctaaagccgcaacctgtctcaggcaactggccgaaagactttcaccggtaacactcgtatcctgtgaaaccatcaatcccaaccatttaaccggacctgccgacggatgtccctatttccgttccaacaagcaggtgagatatgccagaggcttcctcggaatcctagaaaacctcaccacccggcagaagcgcttcttcagcagccgtatcatcaacaactccagccgccgcacctattatcgaatccgcaacggcgaacgggcattgtctcccgacgagcagcagaacataataaacgtactcaaagaatgcggagtgacctttgccattgaattcgatgcttacttcgaggattatgactggggcagtacattatagtatgccacttaattggcacaactttgcctattcgatggcacaactttgccattgaannnnnnnnnnactatcactctgcataatttatttttttactttttccaaaacaaagttgtgccaacatacaattccattatccatgaagtacggatatgaatgtttttatgaagtaaaggaatacaaaagagtaaaacagaacaggcaacttattacatatttcgctatctttgtatcattaaccaaagttcaacgacatgaggaaactgattgcagtgtcagccgtttcattgctcgtcctatccggctgcggcacaagccaaacggcagcgggcgaccccggcgcaatatttgccggtgcagctatcggcggaaatgtcggtggtgccatcggcggtctgataggcgacaataatggcggctggcggagcggttatcgaggttcggccatcggtacaattatcggaaccattgccggagcagccattggaaatgctgtgtctgcccccaaacaagagacatacggttaccggatagaaagaacggagccctacaaaccgcagcacgaaacgtatcccgctccaagcgtcttcgataacctaaggatacgcaacatccgtttcatagacgacagccgtgaccacgtaatcagttcgggtgagaaaagcaaagtaattttcgaaatcatgaacgaaggtgaacagactatatataatgtggtaccgatggttaccgaaaccacaggcatgaagcgcatctacatttcaccacctgtaatggtagagcaaatcgcccctcataatggcgtgaaatacaccgccaccatcagcgcaggcgagcggataaagacgagaaatgtcaccatacgggtggccgtagccgacggaaacgggcaacaatacgactggcaggagttctcacttcccaccgagcgataaacaaattttcggagtctatacaaacggaacacagagacgtagaaaatttaacagcatgaagaaaataatacagagcataccctgattctctgtatttgaaaagcaaaagttgaatactttataaacgacagattatggccgacaactatctggaaaaccaatacgaacagtatcaggcgcgcaaagctgcctgggagagggaacgcaaatacggaaagaagaaaaagaaatcagcgtatccgcatcccttgccgcaacagaaggatgcggaagatgtcctgcccgttctggacgaggagaatgacaacattccctacatcatcaatacggacaatgataatttgattgacgattaacccctctcgccatgttgcaccatttccatacccccgtagcagacataccattgccggaaagatttactttccctttttgctatacacctcatccgctctgcgtggcagcagcgaaagaggtgcaagcctatctcggtttgcaggaagcgtggaaagaagagttggcgcagggcaagatgttcggtgttctggttgtaaggactcaagagggtgaaacaggatacctggcagcattctccggcatactggcgggcagtaatgtacatccgtttttcgtaccgccggtctacgacctgttgcagccgcaagggttcttcaagatagaggaagaacagatttcgcaaatcaacacgcgcatcggactgttggaagaggacgaagaatacaaacggcaaatgcaacaactggctgccctgcggcaaactgcccaagaaacgctggaagaagccaaacggcagatgaaacgcgccaaagagaaacgggaagagcgaagacgcgaagcggctttacccaacagtactccaatgacgcctgaggaagagagtgccctgatacgcgatagtcagttccaaaaagccgaatacaaacgcatggaacgtgcctggaaagagcggattgctcccttacagcaaacgatttccaattatgaggccggcatacaggtattgaaaagcgaacgtaagcaacgttctgccgccttgcagcaaaaactgttcgaacaattcaagatgctgaattaccggggagaagtcaagacgctttgcgacatcttcgggcagaccgtacacaaaaccccgcctgcgggagccggtgagtgcgccgcacccaagctgttgcaacaagcctatctgcacgggtggaagcctattgcaatggcagaattctggtggggagaatcccccaaaacagagatacggcatcacggacattactatcccgcctgcaaaggcaagtgcgagcctatattgggacatatgctgcaaggtcttgaagtggacgagaatccgatgctgaaggaattgcagtccggcaagaaaacattggacattatctacgaagacgaatggctggtggtggttaataaaccggcagggatgttgtccgtacccggcaaggaagatgtagtttccgtttacagcatgatgcgcgagcggtatcccgatgcggacggtccgttgattgtacaccgcctggatatggctacatcgggactgctggtggttgcaaaaaccaagcaggtccaccaaaacctgcaagcgcagtttaaaaaccgcagtgtaggcaaacgctatattgcgttgcttcaaggcagcgtttctcaagatgcgggaacggttgaactgccgttatgcccgaacccgcttgaccgcccccggcaaatggtgcataccggatatggcaagcccgctgtaacagactttgaagtactggaacgcaaggacaaccgtacccgtatcgccttttatccccgcaccggacgtacccaccagcttcgggtgcatgccgcccacccgctcggactgcactgccccatcataggcgacgagctctatggacggaaagccgaacgcctgtatctgcacgccgaaatgctggagtttacacatccggtgaccggaaagagaataagcatcactcaaaaagcagacttctaacctatgaagtaaccgattataaccggtaaccgacgttcatgccaacagtaatcactattaatagccccaaaacaagtatccgatgaaaatccttcgacccaccccgcaagattatgacgaactgctcaccgtatgggaagcctccgttcgcagtacccaccatttcctgacagaagagaacatacaattctacaagtcattggtacgaaaccaatatttccaggccgtagagctttacatcatccgcaaccgggaaggaaaaatcgctgcctttatggggctgagcgacgaactcattgaaatgctctttgtacatcccgatgaacagggaaaaggatatggcaagcagttgatgcaatacgcactccacgaaaaacatatctataaggtggacgtcaatgagcaaaacgaaaaagctcaccggttctatctgcacatgggcttccaactcatcggaagagatgaaaccgacccttcggggaatccttttcccattttacacctgcaatggaagccgtagatgaacacgcatcgtataaaacaaaaacagattgacttatgagaatacatcacatcgccatctggactttccgtctggaagaaatgaaagaattctatgtccgttacttcaaaggtacaagcaatgagaaatacgtcaaccccaaaaaagggtttgaatcctactttatccgcttcgactgcggagccgacctggagctgatgagccgtaccgatgtacagaatactcccatcggggaaaacaggctcggtttgacccacttcgcctttgcactcgacagcaaagaagaggttctcgaactgacggaaaagctgcgaagtgccggatataccatcagcggagaaccccgtacatcgggagacggatattttgaaagcgtagtgctcgaccccgacggcaaccgtgtggaatgcgtgttcaaggcaggctgaaaagtcattttacacagaatttaaatcaacgtctttcgtccggcattgcactaagtttcctatgtttgcagcataattcataagtagattttaaatttatcggaaaccatgaaaatcattgcattcctatttacggcatttatcagcctgcaaatgtccgggcaagagaaattccccgatggcacgcctattcccgactggttcagacagaacgaaatcgtaaacatcgacacactgggcaagaagtataccattaccgattacggtgtgacaaacgacagcacaatcctgcaaacggagaaaatacaagccgtcatcgaccgggcagccgagaatggcggcggcgttatcatcatccccaaaggaacattcctcagcggctccatcttcttcaagccgaaaacgcatctatacatggaagaaggtgcagtgctgaaaggaagtgacgacatcagcaacttcgccattgtcaacacccgcatagaagggcaaagcctgaaatacttcgccgcactggtgaatgccgacaaggtaaacggatttaccatttccggcaaaggcacaatcaacggcaacgggcacaggtactggaaatctttctggctgcgccgtcaggttatcccgaaatgtaccaatatggacgagttgcgtccccgcctagtttacatctccaacagtaacgatgtgcaaatctccggagtacgccttatgaactctccgttctggactacgcatatctaccgctgcaataacataaagctgctgaatctccatattttcgctcctgcagccccggtgaaagcaccgagcagcgatgcgatagatattgacgtctgcagcaatgtactggtgaaaaactgctatatgtccgtcaacgacgatgccgtggcactgaaaggcggcaaaggcccgtgggcggataaggaccccaataacggcagcaacaccaacattatcatagaagactgcacgtacggcttctgccacagcggtctgacatgcggcagcgagtcgatacacaaccgcaacatcattctccgccgctgcaaaatcagcaatgccacgcgcctgttgtggctgaagatgcgtcccgatacgccgcaacactacgaatacatcctggtggaagacatcacaggcgatgccaagagcatgctgctcatcaaaccgtggacacagttcttcgacctcaaaggccgcaaggacatccccctctcacgtgccaacaacgtgacgctgcgcaatatcagcctgagctgcgacatattcttcaacgtcagcaagtccgaccaatacgaattgaaggatttcactttcgagaatttgaatatcaaggccaagaatgcccaatgcgataaagagattatctctaattttgagtggaaggacgttaaggtcaaccaataatgcaggtagcaggcagcaaacacatcacgagaaacgaataaacttcattatcgtataattcgggtacaaataacgcggactttcgtggatacaattaataacatccacgaaagcccgcgtcatttatttccggacaattattcaaaactacgcagcatgctgatttcttccgcccaaagcgtttcatccggagtttcgagtatcaccggcatatcgttaaaacgctcgtctttcataaaacgcttgaagaaatccaagccgataagccccttgccgatactgtcgtgacggtctacacggctacccaacgcttttttcgaatcgttcaagtgtatggcgcgcagaaaaccgaagccaacggtcttatcgaattcgtcgaaaaccttgtcgtattcatttacgatatcataacccgccgtatacgtatggcacgtatcaaggcagacacctacacgcgacttgtcttccacacggtcgatgatatgtttcagttgccaaaactcattgcctacattgctgccctgtcctgccgtattttcaatgaccgccgttacgctttgcgtcttgcctaaggtaatattaatcgattcggcaaccctgtccaggcaagcctcaaccgaaattttatttaaatggctgcccggatggaaattcagcagttccagccccagctcctcacaacgtcgcatctcatccagaaaagccgcacggctcttctccagcccttcttcttcgggatgtcccagatttatcagataactgtcgtgtggaagaatataacgtgcctccaaagcatatttcctgcaattctccttaaacaaggcaatactttcctgcgtcaggggcttcgccacccactgacgctgattcttggtaaacagggcaaaagcattcgctcctattccatgggcattgacgggagccagctccacaccgccgccggcagatacatgtgcacctataaatttcatatttcgattattattcgttaatttattgttctttcataaattcccattgagactttttcatatctacaaagccgtttgtcttaaaccggacaccttcattctccaacaatactctttgctccgtccaacccggcactaatctgccccggctgtttacaaccctatgacaaggtaaatgcaattcctccggtacgttgtgcatagcctgccccaccatacgcgagcactgaggtctgcctaccaaactggcaatctgcccgtaggttacaacgcatcctgcaggaatagcggcaacaacactgtaaacatcttgcagaaaagtagtccgattcataagataaagtctttctttgcggcaaagatagcgtaaacagagagtataaaaaatacacagccttgttttttataccaagcgacagcaatgagatgcctacccgacagccgggcatctcacgtctgattacaggaaagtacttgccccaagcgtattgtaagcgtaagtgatattctgctggcggagaacttcaccattcggagtaaacaatatctgatattttatctgcacgttcggcctgcccacctgtatggctacaataggttgccatttgggaaattgcacccaaacaacattctgtaccaccccgtccgaaaactgactggctgcaaaagcattgaatacggcggcaggcacctcatccagggtttcccaatccgtttgcttcattacccacgctgcatccgtattgaaccagaccttggtatcaaatccgttcatcataaaatccgcaacataatactcctcgtcctgcgaccaggctatccctttggcggaaggatacattttcgtcagagcagtttgcacattatcaggagcatagcctgcaaaaagtggcaaaaatgtccaaagcgtcaaaaaaaagaacaaagacttcattttatccataaccattaatctattccatgttggaaatcaacaatatttcctggtgttttgtttggttctatgcccataaggattatctttgccatacaaatccgttcaaacagcaatgaaatgataagtatacagcctgtgctccataataagaaacaatacctcgacctgctgcttttggccgatgaacaagaatccatgatagaccgttatctggaacgcggtgaaatgttcgtgttgtccgagggcggcagtatcagagcatcctgtgttgtcacccgcgaagcagaagatgtttttgagataaagaacattgccgtttatccgcaattccaacgtcggggatacgggaagaaactgatacagtatcttttcgggcattatgcaggcagatgccggacaatgctcgtaggaaccggagacagcccattggcgattcctttttacgagaactgcggatttacctattcccaccgcatcccggacttctttacggataactacgaccatcccatttatgaagcgggcaaacaactgaaagatatggtttacctgaaacgcaatatggatgaataagacctgccaatcacacattgcccaagaacaacgcaccgtagaacagatgatccgcctctattgccgcaggaaagaaggcaacaaggaactctgcccgcaatgtctcgaattgctggagtacgcacgaacgcgcctgtcgcgctgcccgttcggagagaataaaacaacttgcagactatgcccggtacattgctacaagccggagatgaagaagcggatgcaggaagtcatgcgatatgccggaccgcgcatgctgctctatcatccgaccgcagcgtgcaggcatttatggaaagagcgtatatatcaatatttcaccagacgtttcggagtcccgtgccaggaacagcataagcagtaaacctcttccaggtcatacccttctaaagaagctgccggatctttcggtacgacctcgcctttgtccgacacatatacgggcaaacgctctccctgcccgttcaagacataaaatgcccccaccttgcattgggggcacaccattttgcgcataatcagttgaaataatataaaaatacagcaataccttcaagcgctttcttcttctcgccctgaatctcaatggcaaactttatttccgcctttgccacaccgcgcaggtttgccaacgaatgcagagaagccaccagacggatgctctgtccggaaagtacagcctgaccgaacttcatcttatccattccgtagttaatcatcatcttcaggttatttacctcgataatctgattccacagatgaggcaacatggagagggtgagataaccgtgtgcaatggtactcttaaaaggactttcggtcttggcgcgttctgtgtcaatgtgaatccactggtggtccagcgttgcgtcggcaaagagattgatgcgttcctgcgtaagttccacatactccgaaacaccgatttgctgacctaccagcttttcaaaatcctcgtacgaattgataataactttttccat

SEQ ID NO: 55 - DNA, 7841 bp, unidentified
  source 1..7841: mol_type = unassigned DNA
aatctgatgacagttcatgtaagcaaatccgtgacagttcatgaggtcagtaacaacctccctggaacttcctctgtaaaatcgttgaaaaattttgtgatactcattctgcggaataccgattccctgatcctcaatttccattcttacaagatcgtttcttttttgtaaccggataaatatttttgaaccatccggactgtacttgaccgcattatctaaaacgttgatcacagcttcaccaagccaccttttatcctgcataatcgtgcatgtttccagctcttttgcatagtcaaaaacgaattcaatttctttctcatccgctttaggataagtgcggttcacagcagatatgacagtatccataagcggaagttttttcttattaatctgaatcagtccagtttccatcttggatatttcaagaagcgactgcaataatgtctccagtccatccagagcactccgacaacggatacgaaactcctcctgttctgtggcacttaagtcattctgcatcagcacactaaaacatgtatccaaagctgcaaccggtgtctttaactggtgagagatatcagaaaccatttctttcgtgctctctttttcttcccgtgcttcttcctttagcaactgaatatgatgtccgattgcttcaagctggtcattcaatttttccagttctgtgtgattttccgttttcagtaaatcatcaaatttattttcacggaatctgatcagaatttcttccaactggtctaaaattttctgatgacacgcatcttcttttttcttccaataaaataaaaaagtcaaaagaagcacgcatatcacagtgcttacagcaccggtcaccataacctgatgccggaattgcgaataaaatgcattccctttattcccccagtatccatattgctccaataatcgccttccctgttcgttagtttcaatatccttatccttaagcaattccgaaacagcatccagcccggaaaattcttcctttgcagcaatctctgtcataagattcattttatatttataatcttcataaaacacatacgtggtaaagcaatttaatattgtaaacaataatatgacaggtaataccaaggagagcactactgtaatcttcttgcgatatctctttgtcactgccttacctcctgattccatatatacccaagacctctgatattctttatatagaccggtgcagccggattgtcttcgattttctcacggagtcttctgatattgacagcgattgtattttcatccacaaaatccccttccagatcaaacacattttccaatatttgtgtttttgaaagaatctgtttcggattctgaagaaaaaaagtcagcattttcaactccgtttttgtcagactgatttcacgactctttatcaggactttcatttctcctgcgataaatacgatatctcccgaaatcatctttccggcttccgttttctcctgtctgcggcggaaatgtgcttctattttcaaaagaagtaccgaaagactaaacggctttgtaatataatcatctgcccctgcttcatatcccatgacctgatccatctcctgatctagtgctgtaagacaaataatgtatgtattataattgcatctcatccaccttacaaattccagtccattcccatccggaagattcacatcacaaatggtaacatccacatgattatcacttgcaattcttttcgcttttttcactgattctgctgaaaaaacctcatatccggattttttcagtgaaaatgtaattccacgatttaaattttcatcatcttcaaccacgagtatacctggcatagcatatgcacctctctttattaactatatatatcagctgggagatgactcccacctctataggtggtgagaaacaagcttgtatctccaaaagataaaataatggaactatcgtcagcactgttatcctctgaaaggagtcgtcaaatatgcttttgctttttcaatgccggaagtgtggcaagttcttctgtcggagtaagcattatacagcgtctgtttccaatatatgctgtgtgaaaatcataactccctgcaatataaacaggcaaagaatcctgatgattccctgcttcatattttatagaaattccgaatacgcttgtaaggatatttcttattccccttttaacttaatttctttcattttaacttagtgctgttaaaagtcaagttttttgagttattttaagtttatgcagacagtcgcacaaactcatttttctcattcaaaagcagatttctgtgaaatgcttccagatactctgtcgtttcgtgaatacctttttgcagattcgtatagtttccgcggacaagtgcatttctgaaataaaaaaacgcctgctccggttaggaaacagacggcaaatcaacgtttagatttgatggttttcatttccaccagttacgtcacacttacaccagcaacctgctttccaatggggctgctccgaaagatgtacaggaactgttaggacactctgatgtcagtaccacaatgaatatttatgctcactcaacaagaaaagcaaagcgagattccgcaagacttcttgataaagtagcgagcaatgcttaaataaaaatccatgttccttaaattggaacatggattttgtggtaatggggtaattaataatttatatttcacatgccacatcatatgctgatttaatagcatgatcaatattacttggacgttctccagcacaatcaccaatatagtgaagtggaagaggacaatcagaaagctctggaaggttctttcttgcaccaacagccattacaacaaagtctgaagcaatttcttctgttgatgtattgtcgtctattgttttttcaacaactacagaatcatctttgatttctgataattttgcagatgttactatttgaacattataatgctctaattcactcattagagtaggtagaacagtgttgctttcttcttttgcaatctggtccatcatttcaataattgtaaccttacatccacgtgaagccagatattcagctgtctcaacacctacaagaccaccaccgattacagaaacattaccgaatacgatttctttcttggcaagcacatcccatgcacttgtaacagttggaagatctttgccaggaacagggattattgcgttgttcgcacctgttgccacaattacttcatcgaatgaattataatcctgtgatgtgaattcttcacctagcctgaatgtaacatctaattcaggaagtacatttgcataataattaatacttctcatcatttcttcttttcttggaggtacactagcaataagtaactgaccaccaatctgaagtgatttctcaaaaatggttacactatgacctcttaatgcagcaacacgtgcagcttcaagtccagcaataccagcaccaataatagctattttctttgatgatgctgcaggagttatatgtcgtgttgcttcgtaaccgttttcagcattaagtacacaacttaagaacgcacgattctgaatattatctgtacatcccttattgcacatcatacatgttctgacattacagcaatgtccatctgcgcatttgtttgcaaagtcagggtctgtgagaagagaacgacctaatccaatgatatcagcagaaccatttgcaataactgcttcggcagcttctggtgtaacgatacggcctactacagatacaggaatagatacaagctcttttatttttttagaataagaaaccataaatccgtatggctgtgttcccatggcagggattgtatcacccatatttcctgtatggttagcctgtgcaacatgtaatgtgtcaacaccgcaagcttctaattcttttgcaaaaatgcaagcctcatcaaatggaagaccaccttttcctctaaaactattttctccaagaggagtaactataggaagcttgtagtcgataaccatgtcaggtacgattgtttttaatctttttacaagtgttaatgcaaaacgtgtacgattagccaggtcaccgccatattcatcagttctatgatttaaaataggagagcagagagaaccaacaagacggtctccatgtacttcaatacaatcaacaccagcttcgtgtgctaagatagcacagttttccatatgctttattatttcatcaagttcttctgcagttacttcatttacaaagtgctgcatatcatggtgaagtttagctcttgcttcctgcattttgccctgatggaacatatcgtttaaagctttgacattgtagtcaggatggaataactgaattccaagctttgcaccattttcatgacatgcgtcagcaagttttttgaagctttgaacctgctcatgtgaataaagctttggtgtaggagagaatgttggaagtggtgcaacatctccaattactatatatccgacaccgccttttgcgagacgctcgtaaaaacgaaaactttgttctccaattgaaccatctttttcctcatatcctgttgtaagtggtgggaacataatacggtttttaaactcaatatttccaacttttataggctctaataatttcattgttcatacttcctttcaaagtgagtatactatttaagtggtgttaaaaactctaacattaatttgtctaattctgctcttgcaaaagcactggcaaaattgtggttagcgccttcaatcgttttataattgcattttccattgtaaagtgactcatatctatggcatgttgcatcatctaccaaatcatctgcagttcctcttataaggaggactggtccgttgtatccttctgctgacgagaatggctcataattaaataaatcatgattaaaggatgttgggaaagtgagtccttcaatatcggccttggtgattccctgagcttccatggcttcagcacgatccttacatccaaaccacattccagcacctggacacataagcatgagagcataaggattaacaataggagcggcagtagcagctgcgtatcctcccatactctgaccagataagataatcttatctggattggcaaaatcttgtgttttagtccagtttataatatcctcgatatcgtgtaggatacctgtaaaggtcatgtcctcgaattcaccatcactttcaccatttccgtataaatcaaaacggacactggcaaatccatgttcagctaagaatctggctgtgtgagtataaatacttttgtaaccgcttttattccctgtaaagccatgtacatttacaatagcaggaaatcttgtgccatcttctggaatgttaactattccgcgtaagatgtgtccatcacggtttgtgatttctacttgttttgtcaatttaaaatacctccgtttctaattttattctgcagtagcagcatttcgcttgtcagctaaatcctgtaacatttcagctgttttctcttttgtaagagggtagataaattttaataccagaacagctaataaatatcctacaacatataaacctgtatatgttttccaaagacgtcctgagaatgcttcattctggacagcttcattaacctggaatccagcaattgcaagtgcaaaactactcatacttcctgatacagcattagcaagtttacggaagaatgtatatgctgagtatacaattccttcattacgttttcctgtctgaagttcctgataatcaattgcatcatttacaagtgcccaaactaatacttggaaaccacttactccaagatagcagattccgttgatgataataaagagcataggattttcaagtgggaagaagaataaaatagcataaacaacaactgagaaagttgcactgtacataatccattctttctttccaaatttcttagcaacaaattttgtgcctacgaatgcaataagtgaccagattacacttaacatacctgaaactgccatgatggcaacatttccaaaataatcgcggaataaataagtatttaatccgttaaccatacctgctccaacaataccgataaagcttgataacataactccgagtaatgctttgtttttagtaatatctttaattacctggaagtagttaagcttttcttttttctcaacaactggctctgtaataatacgctctttacaccaatgagatgtaaacataagacagattaatccaataactgcacagattgctgacataataaggaaatggctaggtactggctggttatctttatataagaataatggtccagcaataacgataactgtcataaaaattgtaccgccaagacttctgaaacgagaaaggtcagtacgttggttaacatcatcagtcattacacttgaaagactaccaaatggaacgctgacacatgtgtacataatttcgtaaacaatatatgtaatgaacatataagcaatacgtgcaccataagcgaaattgcttacgttaacaaatcctaatatacagagtactgcagttggaaaagcaaagaatttaatccaaggaataaattttccttttcctttgtttttgtggctatcaacaagtgcaccaattaaagggtcatttatagcatcccaaaactttgtaataagcataaggattcctacgtgtactggattaacttttaataccagtgtataaaaaatagcaagatacatggcacggaactgctcagtacagcaacatcccaaatcgccaagagtgtaaccaattttgtccttcatggaaaaaggtcttgtttctttcatgataatttacctcccaaatttatattgttttggtagctacaatcttattatattgtggttatgctgatatccatatacaaatattgcttgcaaactacgaaaaattgatatattgtatattttgacaaaatgaacaaaaaatataataggaaagtgtgcaaaatagacatatgaaaaagcaaggctacaaaatggaatatttgaaaatattggatagtacccagcgaagctttgggcaaaagaagagctatacaattgtatttatagctggtgggatagggtatatgcaccaggaggatgataatattgtatgtactatggaggatttgatatttattaagccaggtaataaagtaaagcttgaatatcgtaaaaataagtatcctcttgaagtttatgttctttatataggtgaagaacttttaaggaaattgtcagatgaagaaacaagacttgatgaagcgtttgattttgttccgtatcaagttaagattgttcattctgagagtgaatcggctatgcttataaagaatatatccaaaaagctctattcgatgaataatgagccgcctaaatttgcccgctcattatacgagaaaagcctattaactatgattcttgtacttgcacttcgctcatctgttcaggaggatgtacagattaagacgaataagaaaaaacacgttgtaatggatgatatttttatttatatcagagaacatttgacagaagatatctcgttggagcgcttggaaaatgaattttatgtaagccgttatcatatagtaagagagtttaaaaaaatgacaggtgagacacctcattcatacattgtaaagagcagacttgatttatgccgccattatatagagcaggggaaaagtattcgtgaggtatatgcgcttggtggatttggagggtataatcatttttttagagcatttaagaaagaatatggtgttactccaatgcaatattacaataatttacagattgacaggaatgaaaagtaa

SEQ ID NO: 56 - DNA, 7552 bp, unidentified
  source 1..7552: mol_type = unassigned DNA
  misc_difference 1765: note = a, c, g, or t
  misc_difference 1766: note = a, c, g, or t
  misc_difference 1767: note = a, c, g, or t
  misc_difference 1768: note = a, c, g, or t
  misc_difference 1769: note = a, c, g, or t
  misc_difference 1770: note = a, c, g, or t
  misc_difference 1771: note = a, c, g, or t
  misc_difference 1772: note = a, c, g, or t
  misc_difference 1773: note = a, c, g, or t
  misc_difference 1774: note = a, c, g, or t
ctcagccagctcaatgcccttctggacatccttgctgatgccgcggccgacagagacgatcacgtctgcgccgatcagatcgaccagcttttcagcggccttctcaacgctcaggacctcggtcttgatgtcctcagcagccagagcgaatgcgggcttcacgatctggcaggcatcagccttggcctgatcgaagggagccttcttcataacgccgggacgcacggtggacatctgcggacggaagcgggggcagatgatggtagccatcagatggccgccgaatgcgggacgggtcatcttcaggttgcggtcttccatatcgaacttctgcttggacaggtcgatggtggagctctccttcaggaaatcgatgtactttgcagtgtcgatgtccagatgggtagcatcagcggtcaggccggtgtgcagacgagctgcgcagcgggggcccagatcgcggccgatgttggttgcaccgatcagcaggacttcgggcttatactcgttgaccatgtcgcacacgaccttagcgtatgcatcggtggtgtagtccttcagcagggggctgtcgcagaccatgaccttatcagcgccatagccgcccagctccttggcaatgccgtccacgttgtcgcccagcagcaggccggtaacttcgcagcccagctcatcagccagcttgcgggcctcgctgaccagctcaaaatcagtggacatcagtgcgccctggcgctgctcgcagaagacccagacgcccttgtattcgttaaaatcagccattgtaatcctatgctcctttcatcagatcaggtgcttcttggccaggataccagccagctgtgcggcagtatcgtcgcccttgagcatggtgcctgcgcccttctgcggaggagtgaaggacttaaagacgttcgtcggagaacccttcagaccgatggtatcaacctcgatcagcggatcgtccttcagtgcgttgtaatcgaacacttccatcggcttgtcgtagcaggtgaagatgccgttcacgctcatgtaacggggctggttcagctccttgatgcaggtcagcaggcagggagtctgtaccttgaccatcatgtagccgtcctccagcatacgcttcacggtcagggtgttgccatccttctggatgtcagccacataggtgacctgaggcaggtgcagcttctcagcgatctgaggaccgacctgagcggtatcgccatcgattgcctgacggccgcagaacacaacgtcctcggggccaacgccgatcttgttgacggcagcagccaggatctggctggttgcgaaggtatcggaaccgccgaactcacggccggagaccagaacagccttatctgcaccgcgggccagcagctcacgcagcatgccttctgccggcgggggacccatggtaacaacaacgacttcgcagccggtagcgtccttgagcttcagagcagcctccagagcgttcaggtcatcagggttggtgatggtagccatcgaagcacggtccagagtgccatcgggcttgacggacaccttgccggaggtatcaggaacctgctttacacaaacaattgctttcattgtaactcttgcctcccttacttcagcagcgcgccggaaatgaccatcatctgcacttcgctggtgccctcgtagatctcagtgatcttggcatcacgcatcatgcgctcgatgggatagtcacgggtgtagccgtaaccgccgaacagctgcaggcagcggcggnnnnnnnnnncagcctcgacgctgtaacggaccttcttgccgtccattgcttcctgcttcttcagagcagcagcgtagaccagatactttgcagcctcaacgcgtgccttcatctcagccagctcgaactgggtgttctggaatgcggaaatgctgcggccgaactgcttgcgctccttgacgtaagcaacggtctcttccagagcgccctcggcaatgcccagagcctgagatgcgataccgatacggccaccgtccagagtagccatagccagctggaagccgcggccacgcacacccagcatacggtcagcagggatgcggcagtcctcaaagatcagctcgcaggtggaagaaccgcggatgcccatcttgtcctcagccttaccgacggagaagcccgggtcggtgcgctccacgataaaggcggagcactgcttggtgggacggcccttcttgtcgggcacgatatcggtgacagcaataacgataaagacgtttgcgtagccggcgttggtgatgaagatcttggaaccgttcaggatccaatcaccggtctcggggtcctgctttgcaaaggtctgctgaccctgtgcatcggtgccggcacccggctcagtcaggccgaaagcacccagccactcaccgctgcacagcttgggcagatactttgccttctgctcgggagtaccattttcataaataggagcagcacacaggctggtgtgagcagagacgatgacaccggtggtgccgcagaccttgctcagctcttccactgccatgacgtaggacagcacatcgccgcctgcaccgccgacctcagtcgggaaataaatgcccatcatgccgagcttgcccatcttttcgacggtctctttggggaagtactcttccgcatcaaccttctttgccaggggcttgacttcgttctcagcaaactcgcggtacattttctgtaccatctgctgctgcttggacagagtaaaatccatcgctatatcctcctaacgggtctttttcatttaccggaattgcccggtgcaaacaaattcctcccggccgcttttccacggtcgggagaaacgtttatcagaatttacagctggtcaacaggggtcttggtgcggtctgcgttgtaaacgtagaagcccttgccgctcttgcagcccaggttgccgccgcggaccatcttacggatcagcgggcatgcacggtacttgctgtcgccggtctccttgtacagcacgtccatgatagccaggcagatatccaggccgatgaagtcgcccagctccaggggacccatggggtggttggcacccagcttcatagcggtgtcgatgccggcgatatcggaaacgccttccatcttgatgaaagcagcttcgttgatcatggggatcaggatgcggttgacgacgaagcctgcagcctcattgacctgaaccggctgcttgccgatggcaacagagatctccttgatcttctcaacggtctcagcgggagtgttgcagcctgcgatgacctcgatcagcttcatgcggtctgcggggttaaagaagtgcatgccgaccagcggacggctaacgcccttgccgatctcggtgatggacagagaagaagtgttggaagcgaagatgcactcgggcttgcagatcttatccagctcgccgaaggtggtctgcttgaccttcatatcctcaaaagcagcctcaacgaccagatcgcagtcagcgcacaggtcttccttcaggcccggggtgatggcagcaacgatagcgtctgccttttcctgcgtcatctttcccttggcaaccagcttctcgtagcccttcttgatctttgccagaccattctcggcccactcctgcttgatgtcgcacagagcaacggtgttgccctcaacctgtgcaaatgcctttgcgatgccctggcccatggtgccagcgccgataacaccgatcttcataggaaacctctcctttaatatcaaaaattatgtagtgatggattagttgttggtgaacactgccttgggcttcggcttctcacggctcaggaagcaggccatgccttccttctggtcgtgggtctcgaagcagctgccgaacagcttttcctcgacctcaacagccttctcgatgggcaggctgatgccgccgttgattgccttcttgcagttgcgtacagcgatgggtgcattctttgcgatcttgccggccagcttcagcacgttctccatcagttcagcctgaggatacacagcgttcaccagaccaatgcgcagagcctcgtccgccttgatgttcagtgcagagtagaccagctgctttgccatacccatgccgaccagacgtgccagacgctgggtgccgccgaagcccggggtgatgcccagacccacttccggctggccgaacacagcgttgtcagagcagatgcggatgtcgcagctcatagccagctcgttgccgccgcccagtgcaaagccgttcacggctgcaataacggggatggggaagctctcgatcatcaggaacacatcattgcccagcttgccgaaggcctcaccctctgccttggtcatggtgctcatggaaccgatatctgcacctgccacgaagctcttgtcgccttcgccggtcagaacgatgcagcggacagtctcctgatccacagcctcaaaagctgccttcaggtctgccagaacttcgggattcagggcattcagtgccttggggcggtcgatggtaatgatctcaactgcaccctgcacctcggtttttacaaatgccattgtgaaaacctcctattcaaatcttatcaattatcacaaacagcccccggacggaggaaaggctctccggttcccttccccgtccgggtctgtcattcagtcaggattccaagaggtggaacttagtccatctcaacgatggtagcgcagcccatgccgccgccgatgcacagggtagccaggcccttgtgtgcaccgcgatgcttcatagcatacagcagggtgaccaggatacgagcgccggaagcgccgaccgggtggcccagagcaattgcgccgccgttgacgttcaccttgctcatatcaaagttcagagcctggctgacagccacagactgagcagcaaatgcctcgttggcctcgatcagatccatgtcagcaacgctcatgccggtcttagccatgaccttcttggtagcagcgatggggcccagacccatgacttccggctcaacgccagccaaagcaccggcgacccaggtagccagaggcttcacgcccagctccttagccttctcctcgctcatgatgaccagagcagcagcgccgtcattgatggcagaagagttgccggcagtcacgatgccgtccttggtgaaagcgggcttcagctttgccagcacttcgggagcgctcagacgggggccttcatcagtatcgaacacggtgtcgcccttcttgcccttgatcacaacgggaacgatctcgtccttgaaagcgccgtccttgatggccttgtcagccttcagctggctgttgtatgagaactcgtccagcatctcacgggtgatggggctgtagccgtacttcttctgataggtctcgttggtgcagacgttctcagcggtcatgcccatgtgcttgttgaagccgcaggcatcccacagagcatcgttgaccatggtatccacgatctcgctcttgcccataggagcgcccatgcggtagccgtaacgagccttctgcagtgcgaagggagccatgtccatgttctccatgccgcctgcgaccacgatatcagcatcacctgcctcgatcatctgagcagccatattgacgcagttcaggccggagccgcacaccacgttgacggtgacagccggggtctcgatgggcaggccagccttcagagcagcctgacgagcaacgttctggcccagaccggcctgaatgacgcagcccatgtagacatgatcgacctgctcgggagcgacgtttgcacggttcagagcttccttgatgacgatggagcccagctcaactgcgggaacgtttgccagagtgccgccgaacttgccaatagcggtacggcatgcagatgcgataacgatctttttcatgtgaataacctcctgaattgtgtatgtgttacttttcgtaagccatttttatcaaaacgcccgtaagcgcttttacaaattaggtctcggggtcttttttctgccggatcagcgcatacttttcgttgaccgccttttccacattgggtgtgacgaacttaccgatgtcgctgccgtagtaagctgcctcttttacaatggtggaagaaaggtagctccacttgatgctcgttgccagaaacatggtctcgatgccgggcatcagtgcgtgattggtctgcgcaagctggatctcgttttcaaaatccgtcaccgcccgcaggccccgcaccatcaccgaagcgtgccgtttcttggcgaactccacggtcaggccgtcgaagctctccaccgaaacattctggatgcccttgcagcattcctttagaagctccacgcgttcctccacggtgaacagcggattctttgcgctgttgttgagcaccgccacgatcagatgatcgttgatctttgctgcgcgcttgatgatatcgagatgcccttttgtgaccggatcgaacgaaccgggataaactgctgttgccatcgtctggtgtcctccttgagcgctgtgaaaagcgcgttttggttctgccatgatagcactttccagtcttgggtgcaagatttttgtgcaagctgtacgttttatcgttaaaatttaaacaatcaatgtcatgctgcatcgcagctgcttgctacgctataagtaaaccatatcgtcaaaattttatcaagtccttttgcaaagattttggtttttcagcaccaaacaatcgtccaaaaactccgcgaattttgtccatattgccagtcggtcaaaattttctcgataaactattgattctacacattgttaatgttataactaagttgtgcagatctgctgccctgtccgacagctgccttctgctggttatcaggatatcatccgcctgtgtcagagctgtgttcaaattgccaacaggtggtaaacatcctgcaaagatttgtccgtgcaggaagagtaaatgataaatttacaattcctttatgttattataggagaggatggtttataatggattttacggaactgtatgctcagaagaaaatgaccgccgctcaggctgccgcactggtcaaaagcggtgactgggtggattacggctgggctgtgaacacccctgtggcggtggatgccgagattgcaaagcgtctgcctgagctggaaggtgtcaacttccgcggcggcatcctgatgtgggtgcccgcgatcttccagatcgacgatcccgctgcacacatgacatggaacagctggcatatgggcggcattgagcgcaaggccattgcacagggcttctccttctactcccccatccgttattccgagctgccccgctactaccgcgaaagcccggatccgctggatgtggcggtgttccaggtgacccccatggacgagcatggctacttcaacttcggccccagtgcatctcatctgggtgctgtgtgcgaaaaagccaagaagatcatcgttgaggtcaacaagaacatgccccgctgccttggcggcatggagaactgcatccacatttctcaggtcaccggcatcgtggaaggcgag

SEQ ID NO: 57 - DNA, 41397 bp, unidentified
  source 1..41397: mol_type = unassigned DNA
  misc_difference 25664: note = a, c, g, or t
  misc_difference 25665: note = a, c, g, or t
  misc_difference 25666: note = a, c, g, or t
  misc_difference 25667: note = a, c, g, or t
  misc_difference 25668: note = a, c, g, or t
  misc_difference 25669: note = a, c, g, or t
  misc_difference 25670: note = a, c, g, or t
  misc_difference 25671: note = a, c, g, or t
  misc_difference 25672: note = a, c, g, or t
  misc_difference 25673: note = a, c, g, or t
gataacaccggttccttctggagccttctttaaaagtacagaagcgcttccaaattttccaacataatcatgtggaattgttccattctcatctacaggaacagaaacaagtttcttaatagcatcttcctttcccttgcggattgcttcaggaatttctatagctttaccaattccggcaccaacgtgtccgtttccgtctccgacaactacaagtgcagagaatctcatatgacgtccaccttttactaccttggttacacgcttgattgatactactttttcagtaatttctaatgcgctagcatcaattatttcatgtctcattcgtttctcctccctgcttagaactcaaggccagcttctctggctgcctctgctaatgcttttattttgccctgatatatgaaaccgcctctatcatagacaacagttgaaattccgttttcgagcgctctcttagcaattactgttcctaagtaagctgctgctgcaacgtcatttgttttttctaattcagccttaacagctttttctgttgttgaagctgcaacgagagttttaccaactgtatcgtcaataatctgagcgtacatatgattgttgcttctaaatactgcaagtcttggtctttcagctgttccgctgaaacgattacgaatttttctgtgcttgttcatgcgaacttcagctcttgattctttactaaccatcttcgatacactcctttaattatttcttaccagtcttaccaactttacgtctgataacttcatcagcatacttaatacctttacctttgtaaggttctggttctctcttgcttctgatttcagctgcatactggccaactttttctttatcgataccttttacaatgattgtagcctgatccggtacttctacttcaataccttctgggtcaaccatatcaaccggatgtgagtatccaaggctgagatttaatgtcttaccactcttctgagctctgtaacctacaccgtttacttcaagtttcttagcataaccttctgttacaccaataaccatattattaatcaatgttcttgaaagaccgtgtaaagatttcattctctttgtttcatccggtcttgatacgttgacaacatcgccgtcaactttgatttcgattccttcaggtaatactctttcaagtgttcccttaggtccctttacagtcactttattattttctgctatagtgacagttacacctgccggtatagcgataggcattcttccgatacgtgacatgccgttacctccttaatagtattgcagacttaaaaatctgcttattagttagttacattttctatctgattaccagatatatgcaagaacttcgccaccaacattaagctttcttgcttctttatcagtaacgataccctgattagttgaaataattgctattccaagtcctccgagaactcttggtaattcatctttacttacataaaaacgaagaccgggtttagaaattctcttaagtcctgttataatcttttcgttcttgtcttttccatattttaatgtaatacggatatttttgaaattgccatcttcaacaagttcgtatttctggatgaagccttctttataaaggatttcagcaatagcatttttcatctttgaagcaggaacatctactgtatcatgctttgatgtattcgcattacgaattcttgtaagcatatctgcaattggatctgtcatctgattcgtcctcctatttatatcatcatctaacatcggtaagacaaacttaattgtcttacctacgcaattaggttaatcttaccaacttgctttcttaacaccagggatctgacccttgtatgctaattcacggaagcaaattctgcaaattccatattttctcaaataagcatgtggacgtccacaaatcttacatcttgtgtattctcttgtagagaattttgcaggacgctgctgtttaattttcatcgcggtcttagccattgaatttccctcctaaattactttttgaacggcatattgaataatctcaataattcacgtgcttcttcatctgtcttagcagttgttacaactattacatccatacctctgactttatcgattttatcatattcgatttcagggaagatgatctgttccttaataccaagagcgtaatttcctcttccatcaaatgatgctgagttaacgcctctgaagtcacgtacacgaggtaaagcaagattaacgagacgatcaaggaactcgtacatcttttcgccacggagtgttactttacatccgattggcataccctctctgatcttgaagttagctactgaattcttagccttagtagtaactactttctggccagtgattgtctcaagttctttaactgctgtttcaagaacctttgagttatctttagcttctccaacacccatatttataacgattttatcaagctttggtacttccattatgtttttgtatccaaatttctttaccatagcatctactatttcacttttatataagtctttgagcctgctcatcgttacagacctcctttcctaaattagtctataacctcaccggtagatttagcgatacgaactttcttatctccttcaatcttgaaaccgactctggttgtttttccattgtgtacatacataaggtttgaaatatcaattggagcttcctgatgtacgattccaccattctgattctgtgcacttggttttgtgtgctttgtaatcatatttacgccttcaacgattgctttatgattcttagcatcaatagaagttactttgccttctttgtctttatctttaccggcgataactcttacgaggtcaccttttttaatcttcattgttgacacagtaacacctccttataatacttccggagctaatgaaacaatcttcataaactgtttgtctcttaactctcttgctactggtccaaagatacgtgttcctttaggggtcttgtcatctttaattattacagcagcattttcatcaaatttaatatatgatccgtctttacgacgagcgccttttactgaacgtacaactacggcctttactacatcgcccttcttaacaacaccgcctggtgttgcatctttaacagaagcaacgataacatcgccgatatttgcatatcttcttgtagatccacccataactctgatgcaaagaagttcttttgcacctgtgttatcagcgaccttaagtcttgtctcttgctgaatcatgcaggtaatcctccttcaaatattagataaaaattactcagctctgctgataagttcaacaaatctccatctcttattctttgataaaggtcttgtttccataacctttacaatatcaccgatctggcattcgttattctcatcatgtgcctgtaacttataagttctcttaacgatcttgttgtaaagaggatgttttacatggtcctcaactgcaactacgattgtcttatccatcttattgcttacgaccttaccggtacgtgtttttcttaaatttctttcttccacaacaaattcctccttcccggattattgagctgtcttttcagctataactgtctgaattcttgcaatattcttacgaacatctttgattctgcttgtattatccagctgatttgttgcgttctggaatcttaaattgaaaagctcctttttagcagctactaattcttcatttaattctgcaggagtctttccttttaactcttctacatacttattaattttcactgttgtcaccgccttctaactgtgcacgagaaactatcttacatctaagaggaagtttgtgcattgcaagacgtaatgcttctctggctacttcttcaggtactccagcgatttcaaacattacacgtcctggtttaactactgctacccaatattctactgaaccttttcctttacccattctgacacctaatggcttatgagtataaggcttatcagggaataatttaatccatactttaccaccacgcttgatgtatcttgtcatggcgatacgggctgcttctatctgtcttgaagacacccactttggttcaagagcgacaataccgtattcaccgtatacgattttattgcctcttgttgcttttccggccattgagccacggaactgcttacgatgtttaactctcttaggtaataacattactgttcgctcccttccttaactgattttgttggaagaacttcacccttgtagatccatactttaacgccaacttttccgtatgttgtatctgcttctgcaaatccatattcgatgtcagcacgtaatgtctgaagaggaattgttccttcactgtaaaattctgtacgagccatatctgctccgccaagacgtcctgaaactgatgtcttaatacctttaacacctgcagtcttcattgttcttgacataactgacttcatagctcttctgaaagaaacacggttttcaagctggagtgcaatgttttcagctacaagctgagcatctccgtccggtctcttaatttctttaatatcaattgatactttctttgtagtaagtttctgaatcttagctttaagcttttcaatatcagctccacccttgccgataacaacacctggttttgctgtataaatgaacactttcactctgtcagaagctctttctatttcaatctttgaaatgccggcactgtaaagttctttctttacaaattttctgatgttgtaatcttctacaagattatcagaaaaatctgcctcagcataccactttgagtcccagtctttgataacaccgactctcatgccatgaggatttactttctgtcccatgtgtgttctcctttctacttttcgttaagcacgattgtgatattgctcattctcttctcgattctgtaagctctaccctgtgctctaggtctgactctcttcatgattgggccttcgcctgcgtaacattcttcaatgtaaaggttttcagccttcatgccgttgttgttctcagcattagcaattgctgattttaaaagtttctctataactgttgaagcatatcttgggttatatgaaacaatagcaagtgctgttgtaacatcttttcctctgattgcatctaaaacaaagcatgccttctgtacagacactcttgcgtaagaaaccttagcagatggtcttgtatctttattggcatttctctctcttttaatctgggatctatgtcctttagccatggattaaacctccttccgaatctgttaattaacgagattttttctcgtcttttccatgtcctctaaatgttcttgtggcaacaaattcgccaagcttgtgtccaaccatatcttctgtaatatatacaggaacatgctttctgccatcatgaactgcaattgtatgtgataccatctgaggataaattgttgaacgacgtgaccatgtcttaataactgacttatcacctgctgcgttcatagcgtctactttcttaagtaagctctcatctgcaaatggtcctttttttaatgaacgtgccatcttttgacctccttaactatttgatgcttttaccgtctcttcttcttacgataagcttgttagaagatttattcttctttctggtcttgagaccaagtgctggtttaccccatggtgtcataggtcctgaacgtcctactggagctctaccttcaccaccaccatgtggatggtcattagggttcataacagaaccacgtactgttgggcggatacccatgtgacggatacgtcctgctttaccatagttgataaggttgtgttctacgttacctactgcaccaactgttgcacggcagataattggaaccattctcatttcgcctgatggaagtcttaacgtagcgtacttaccttccttagccataagctgggcacttgtacctgctgtacgaacaagctgtccgcctctgcctgggtaaagctcaatgttatggatttctgtacctacaggaatattttcaagtggtaagcagttacctactctgatttctgctgttgcaccattcataactgtcattccgtcagttaatccctgtggtgcgataatatatgctttttcgccgtctgcgtagcagattaatgcgatatttgctgttctgtttggatcgtattcgataccgattacttttgcaggaataccgtctttatttctcttaaagtcgataagtctgtatttctgtctgtttccaccgccatggtgtcttacagtgattttaccctgattgttacgaccagaatttttcttctttgaagcaagaagtgatttctcaggtgtcttctttgtgatttcagagaagtctgagccagtcatatttcttctggaaggggtatatgggttataagtcttaattcccatttttgtttctcctttcgatgtttcaagttacacacggcgcaatattttcatcactctttctgcgccggacttcaccgtcagagcggatactctgaagtggtcttcaaattaaagacctgcgaagatttcaatatcagcactgtcctcagtaagctgtacaattgctttcttcttagctgctgtcttaccgaaagtcattcctcttctgcgagtcttgccttctaagttcattgtgttgacgtttgctacttttgttccttcaaacatcttctcaacagcttctttaatctgagtcttatttgcttccggatgaacaaggaatgtgtatttcttagcgctcatgtcttccatactcttctctgtaattaccggtttaaggattacatcataatactgtacgtttgccattatgcatacacctcctcaatctttgagattacatccttagctacaaccatcttgtcatattttaagatgtcgtaaacattaattgtgttagtaaatgctgtcttaacaccaggaatatttcttgatgataatgttacattcttgttgtcatcatcagttactactaatgctttcttaacttcaagattctttaaaacatttaccatattctttgtcttgatttcatcaaagctgagtccgtcaactacgatgaatttgttctcagctactttagtagtaagaactgatttaagagcaagattcttttctttcttgttcatcttgaaagaataatctcttggctttggtgcgaatacaattccgccacctgtccactgtggagatcttgtagaaccctgtcttgcatgacctgttcccttctgtctccatggctttcttccgccaccgctgacttctgaacgggtctttgcactctgagtgccctgtctcttattagcaagctggagcacaactgcctgatgtacaaggtgagtattaacttcaacaccgaatacagcatcgttaagttccatatctccaactactttgccttcaatattgtaaacagatacttttgccatctgtgtggtcctccttccttaaaatccgattacttaccggattttactgtctcttttaatgttactaaagatttcttaggtccaggtactgcaccttttactaagattaagttattctctacgtcaacttttactatttcaagattctgaactgtaatcttcttagcacccatatgaccaggcattccttttcctttgaatacacggcttggatctgatgaagaaccgtttgaaccctgatgacgatggaatttagaaccatgagccataggtcctctgtgctgaccatgtctcttaattgcgccctggaaaccttttccctttgcaattgctgttgcatcaagcttatcgcctgctgcgaagatgtcagctttgatttcgtctgctactgtataatcagctgcattttcaaatctgaattctcttacatatctcttgtaagatactccagccttgtcaaagtgacctttttcagcctttgttactccatgtctgtttctgatttctttgctgccgtttttgtcaacattaacgattttttctttcttgtcaacaaaaccaacctgaactgctgcatagccatcattctcaactgtcttaacctgtgttactacacaaggtccggcctgcaatacagttactggaacaagaactccgtcttcattgaagatctgggtcattccaatttttgtagctaaaattgctttcttcattaataaattcctcctgtttaaatctacagcggttctcatttacgagaacatcctagaaagttaaatataagtggaactatctgttgcttctatattaaaccattcaggactttcctactttgctttgtgaagacttatttgtttttcattttgatgtcgatgtaaacaccggctggcatttctaatcttgttaatgcatctcttgtcttctgtgatggctcgatgatatcgattaatctcttatgtgttctctgctcaaactgttctcttgaatctttgtacttatgaacagctctgagaattgtaactacttccttcttagttggaagaggtaccggaccactcacctgagatcctgtcttcttaacagtctcgataattttcttagctgactgatcaaccatctgatgatcgtaagctttaagtgtaattctcattacttgacttgccataaaaaaagccgcctccttttcgtacttttgaaaatgatacgttgttatctcgtatctcagtacaacaagtggtgactgtacacatccccgcgtgtgtcgcatctgactgatcaaaaaagaagtggaaaaaccttcttctataatgcaacctcaaacggtcatctctgccatgtgcagatggtaagttgtacagtgacttgtcgtcagtttcctaacttgacattcgctccacggaaaacctgtcttacgacagcaacctcacgcttcacagctatcatgtcacagcaatgattagtatatagtagatacagaaaaaaatcaattatttttattgcactttttttaatacaatagaaaaaatattgtttttcttccaacattactttattatatcatataggtggttcggttgcatcatacgaatcactatataatatagaagaagcaggattataatttatgtggatagcagataaatggaaagattatgaagtcattgatacatcatcgggagagaaacttgagaggtggggagattatattctcgtccgtcccgaccctcaggtaatatggaacactgacaagaacgatagcagatggaaaaaacataacggacattaccaccgcagtaataagggcgggggcgaatgggaattttttaaccttcccgaacaatggtccattaattacagggaactggaatttaacctcaagcctttttcttttaaacacacagggctttttcctgagcaggctgtaaactgggactggttttctgataaaatcaagaatgccggaagacctgttaaggtgcttaacctttttgcatatacgggaggtgccacacttgctgctgccgctgccggtgcaagtgtaacccatgttgacgcttccaagggcatggttatgtgggcaaaagaaaatgccgcatcctcaggactttcagaagctccgatacgctggcttgtggatgactgtgtgaaatttgttgagcgtgaaatccgccggggcaaccactatgacggaattattatggatcccccttcttatggaagaggacctaagggtgagatatggaaaattgaagaaagtattttcccattcgttgaactatgtgaaaagcttttatcggatgacccgcttttcttccttattaattcatatacaaccggacttgcacccgcagttcttacttatatgataggaaccgcaatctgtaaaaaccacggcggtcatgttgaatccgacgaaatcggacttcctgtaacatcaacgggacttgtgctgccttgtggtgcaagcggaagatggtgcagataaccatcaatataaaaggagagcaaaccgctctcctttatttattaattattgctgtccattccttttgcatattttttcataagaaaatctgcaatgcattttggccagtatcttctgtatattcttatatcatcattgtatctgctgttgtccgcaatattttcagttgttcccgattccgcatgtattctatgtcctacaagaggttcaccaatatatacgaaccggcccttttttcttgcaagccttgaccatgcgtcccagtcaaaagaatttttaaagtcatggctgaactggaaaccctcacatttatccattgcaaaggtcacggaaggacagcatattggattacccagtgacaatacccggtttctgatgaaacggctgctctttgacatcttaaaaccgatattcataagacgttttatttttaacagcttattcttgtatactttgccttcttttcttatctcataataatcggtaaacagaataatgtccttgccgggtttcatgcgcttctttatattttccacataccagggttcatacacatcatcctgatgacagagagtaatataatcggctttgaaatttctgagggcataattgaaattatgctgtgccctgtttccgtcttgatgggaaattacctttatgccgtatttagctgctattttgtcaataaaatcattaggtgtggatgtgcatatcacaatatctgctgtaacagtctggttaagcaatgacaaaagacattcctcaagatactcgctttctttgtatgcacaaagtaccaaaagatggttaattctgctcatccttcttctccttctcctcaagttctttttcaagaattgctactctttgtgtcaaaagtgtgatagtcgctgaatgtttgcttattgccacagtcagtacatatattataaacaatgcaatgcaaaagccgcatataaaaagcatattcataggagaggcaattcccactaaccacgcaaccctgtcaagaattacagggaaacaggtaagtattatacataccagtataaaaagcatccacggaaggcagaatttaaaatccagttttttcttatttatatgaaatatcataagcgcaaaaacaagaattaatgctgcaagtattataatctgtattctggtactcattatcatctctcctttctgtctacgctcttcattttttctgtaaaaatggcaagtgtcactttaatcatataatatattgagccaaaaaatttaatagaggaacttccgccctgtctctctctcattataaccggaatttccttaacttttttatgaagtttcagaacatggaccacactctcaggttccggataatccttaggataactttcatcaaattctgcaataagtgacctgttaatcatcctgagtccggatgtgggatccgtaattttcgttcctgtaaggagctttataagcccggtaaaataaccgattcccacccgccttatttttgatgactgaaagccttctttttcaaggaaacgtgaacctataaccatatctgcatgttcattgataattgtatccgccattttcccaagaaatgcagggtcatgctgcccatcagcatcaacttgtacagcaatatcatatccttttaatctcgcatatttataaccggtctgtaccgcaccgccaattccaagattcgccggcagattaatcacattaaaaccttgttctttgcatatcctgccggtatcatcggtggaacagtcattaattatgacataatcaaagtcaggagcctttttttgtatgtcttcaatagttctgacaatgttttcactttcattataagccggtatgataataagttttttcatagcttgtaccattgcaattcctatataatcatccctgtgaataatgcgacaggaattgtattgttctctcttcccttggattttctataacctgtacagggtcaccctgttcaacaatatatccgttatccataaaaataattttatctgccacatctctggcaaaagtcatttcatgggttacaataatcatagttgtatctttatccgcaagttctttaataaccttaaggacttcccccgtaagctcagggtcaagtgccgatgtaggctcatcgaaacaaagaatatcaggatgaagtgcaagtgccctcgcaattgctactctctggcactgtcctcccgaaagctggtgaggataattatccattctatcagcaagccccatctggcccagaagttcctctgcttctttccttatctctgaaagtattacctttttattggatttataatcaggctgttccttggccaaaagctgtcttgcaagcataacattctcaatcgctgtatattgcggaaaaagattaaaagactgaaatacaagtccgaaatgaagtctgttttttctcatagcggaatccttaagctttactcccgacttgctgtcaaaaatcacttcaccgttaaccttaattattcccgaatcagctctttcaaggaaattcaggcatctgagcaatgttgtcttgccgcttccggaagaaccgataatcgataatacctgacctttttcaagtgtaaaactgatgtctttaagtacctctgtattttcaaaagatttttctatgtgttctacttctaatatgggcatggtattcctcctatttaaaatactgaagtttcttctcaagtctgcctaaaagaatagtaagcaatcctacaaaaacaagatagtaaactgctgtaaagaataatggccatattgcaccgtaaattccctgtgagcccttcataaatgcctgtccggcccagataatctcctgcaatgcaatgattcttgcgagggatgtatccttaacaagggtaataatttcattggacataggaggcacaattctcttaatcatctgtttaagcttgactttaaagaaaatctggccttttttcataccaagcacaagacctgcttcgtcctgtcccaccggtatcgactcaatcccgcccctgtatatttcagaaaaataacatgcgtagttaattataaatgcaaccgctgctgccataaaccttcctgattctccacctccccacacagggttattaagcacaagtcccggaaaataaaagataataagcagctgtatcataagcggagtaccgcggattatccatacaaatattttagttatatattttaaaggtggaaatttagaagttgagccaaatgtaatgataagtccaaggggaatggctcctataagtgtcactataaataattttaatgtctgtaaaaatcctgtgttaagtgctttaacaaccacaggaaattgttttgcgaataattccattattatgttcctctgttaagaaagaaaaagagtgtggagctccacactcttaatgtctttaaatttactgttcaataagtgcagcctgcacgccatatttctcagcgcatgtcttcatgctgccgtcatcatagcttgctttaaaaaatttatttaattcttctgcaaggtcagaaccttttctgaagcctacgccgtatttctcgtcgctcaaacctactgtatatgtaaggttctcgtaagaagttccttctcctaccattgctgcagccataagtgaatcaataattgccgcatccgatgttccgcctgcaacttccataagtgcgtctgactgtgctgttacctctgtaaccttaagtccgagttcatttgccacttcattgcctgcactctttgattcaacagcataagtccatccaaggtctttaaggctgtccttatcttttattttatcagcattttctttttttacaataacaatctgctgattattgcaatatggctttgtgcattccattgctgaaacaacatcttctgttaatgtcattccgttccatacacagtcaattgtcttgcctttaagttccataagcttattatcccatgtaatctctacaaattcaacctttacgccaaggctttctgcaaatgctgcagccatatcagcgtcaaagccaatccagttgccgttgtcatctttgtaatccattggtgcaaagtctgtaataccgacaacaagtgttcccttgttcttaacatactcaaggtcgctttcgctgcttcctgccgatgtcttatctgacttaccgcatgctgctaaagataaggcaagtacacctgccaaaatcattgctaaaaacttcttcataattgtttcctcctgtaattcatatttacttatgtgaaataccttaacatattaccactctatcacgataaagtcaataaaatacccgattgataaatggtttttactgccatttcgagattttcttcattgacaaaggagtaattgattataaatacatgctctgagtcattagaagtttccttataatactgtgacaatgcggttacttttataccattttgctgtagcttaaggacaacctcactgtccggaagagttgtttttattttcataagaaaatggagtccggagtccttttccgatatctccacatgtgatgacaatgggcttctttctattatgtttaaaagtctgtccctcttattaagataatacttctgcatcctgttgatatgtttttcaaaatagcctttgttaataaactctgccagtgtatactgttcaaaatttgacaccgtacatgagtaaaaagacatttttttgtaatatttctccgcaaggctttggggcagaaccatataactcaccctgattgtggatgaaagtgtcttggtaaaagtatttatgtagataactttatcctgtacatccatggtctgcagtgccggaatcggatgtctgtcaaagcggaattcgctgtcatattcatcttctattatgtagcgtttatcagaggacgcagcccatcctaacaattcatatcttctgctgacaggcattattattcccgtggggaaatggtgtgacggtgaaatatgtataatatctatattctttttttccagttcatctataataatcccgttggaatccatatccacatagccgcaatcaacgctatggctcttatatatctgatatatcttgccgtatcccggattctccacaccgtacttacggttaaatccaagaagttcaattaactgtccatacagatactccgttcctgcaccgattattatctgctccggcataactgtcatatttcggaactccttcagatggtttgctattgctttcctgagtggtataatcccgccgcagggcggattcgttaaaagctctgcctgattgttggtaagcagctccctcgttatctttgcccatatagaaaaagggaaatgttccgctctggtctggttactggtaaaatctgcaaaatatacgctttctcccgatgacagctttacattatccatgtttatatttccggcttcaacaggggagggattgacctctgacacaaaaaaaccttttttaggtacggaataaatatatccttccgcaattaattgttcgtaagcattttccacggtaataacacttatgttcagattgcgtgcaagattacgctttgacggaagtttctcccccgccttaagaatcctttgtattatgtcatttttaatacatttatatagatatatatacaaacaatctgaccctatattgtcaaaagaatatgtaagcattaatagtttccctccaaatctgacctttttgaatatatgtgttttgaatattttcatatatccagaaatcattataattgcaaatagttaataaaacaacaaaaatcttggaggtatcagaatggctgaaaacagatacaaattaaataaagaacttgcccagatgttaaagggcggcgtcatcatggacgttacaactcctgagcaggctaaaatcgcagaagcagcaggtgcatgtgctgtaatggcacttgagagaatccctgcagatatccgtgccgccggcggtgtatcacgcatgagtgacccaaaaatgattaaaggaatccagaacgccgtttctattcctgttatggcaaagtgccgtatcggtcattttgttgaggcacagcttcttgaagctattgaaattgactacatcgatgaaagcgaagttctttctcctgctgatgatgtataccatattgataagaccagattcaaagttcctttcgtatgcggtgcaaaggaccttggcgaagcactccgtcgtatcagcgaaggcgcatcaatgattcgtacaaagggtgaaccgggtacaggtgatgttgtccaggcagtacgtcatatgcgtatgatgaacagtgaaattaacaaaatcaaagctatgcgcgaagatgaactttttgaggaagctaaagtattaagagttccttatgatttagttgtatatgtacacgataatggaagactccctgttgtaaactttgcagccggcggtgttgcaactcctgccgatgcagctcttatgatgcagctcggtgccgaaggtgtattcgtaggctcaggtattttcaaatcaggcaatcctgaaaagagagccaatgcgattgttaaagctgtaacaaactacacagatgcaagcctcatcgcttctctttcagaggatcttggcgaagctatggttggtattaacgaacaggaaattgaacttttaatggcagaaagaggaaaataatatgactattggtgtgcttgccgttcagggagcttttgcagagcatataaaaagacttaaagaactgggaattgattctgtagagcttaggaaaaaagatgatttgggcaaaccttttgatggtattattcttcccggcggcgaaagcaccgttcagggtaaattattaaaagagctggatatgtttgatactcttaaaaatatgattaagaacgaggttcccgttcttgccacctgtgcaggactgattcttttagccgaaaagcttgaaaatgacagtcatacatattttggcacattacccgttacagttaaacgtaacgcctacggaagacagcttggcagcttctttacagaggaagatttcaaaggtatcggaaagattccaatgacttttatccgtgccccttacatagaaagcagcagtgatgatgttgatattctcgcaaaagaaaacaaccataccattgccgtcaggtataaaaatcaactggcaatgtctttccaccctgaacttgataatgatacaaggatacatgaatattttgttgatatgattaaaggatgttagattatcctaccatcctttatttcaattatgcggtcgcaggattcagcaatatccttgtcatgtgtaataatgataaccgttgttcccttttcattcatcttccttaataaggcaattatatctgaagatgtcttttcatcaagggcacccgtaggttcgtctgcaagcagaattttaggttccattatcatggctctggcaattgcaacacgctgtttctgccctcctgaaagcttactgacttctttatcataaatcatttccataccaacttctttgagtaagtcaatagctctttctttttcgattttacggtttacctttttctttgaaaaatcaaaaggcagtaacacattatcaattaccgtatatttttccagtaatgcaaaatcctgcattacaatacctatatttttgttccttatctgtgcacgttttctgtcattatattccgctacattaacaccgtctataagatattctccgctgtcataattatcaatacagccgagtatgtgcatcagtgttgattttcccgcacctgattttcctataatagccacaaactctccgtcatttatcttaaggcttacatcatcaagggcttttaattggttcggttttcctttgttatatgtttttgtcagatttttaatttctatcatatagtgttctctccctaatttttttgtgcaacaagttgaaaagatgttttcctcatattaagcaatctacacatcagatatgtacatattgcaactaatgcggcatatattattatcatatacatcaactcattcgttatcaggaaattaatattaccgaaaatcttaaacttcatctgcagttttcctatactatagaacaatatcattccgattatcaggtcaaatataacttcaatcgtaaaaggcattgctgcttttctgttattcattcccaatatctggattaccccgaatgctttcttatcattactcaatttgataagtaatatcgaatctatacagactgtcatcattaacaaaataattatggctatcggaatattttttccattttcccttgcatatattttgtctgaatttgatacaaacccattttcggttaaattaatgacgccatttacacccgaaaacatttccattccttcttcaacaagttcacttgcatattcatcaaactgcaccggatccatatcatccatatttatcaggacatttctgtaaaaataatcaccatcagcggttttttcaatctttgaaaattcgctctccggaataatcatgagaagtccgttttcattataataatagctgtcatacatttgcgtatagtttacctccgctattcgttcaaatcctccgtatatactcataagcgtctgattatcagagataattcctgctatcttatatttaactgaataaggatgctcctcattcagggaatatgccgttcttatatcaccctttttagctccaaaactgttttttgaaacatatacattaatatactcatcattgttgccatctatttttctttttcccgaatccagctgcagatttaattcttttattaatttatcaggataaacaactacctgatatgcttcccttccatcaattatatttacctggctttcatcatacaatgttgttgatttaaatgacatggcttttctgcctgctgtcaattcatcatatctatccttattacacacggagatatagaccatattgtctcccgaatatctgttgacaatgtcatataagactttctctctgttaatctggctcaaaaaaattcctgaactacacattgtcaatgcgagaatcaaaataaatacaatatgaaaaaaaatattatatacataatcttttcgtataaatctaatcattatttgttctccttaacagttctttaagttcaacacgattacatacgaatacaactgccgatgtcagcacgattatgcagccatatacaaccgctccggtgagtatatatgttctggcactaaatatattgtagttattaccatatatacgataaaatatgttttcaaaaaccagatgcatcaacgtcattccaatacatatagtcaatgcacttataaccgctatttctgtcatattaatcttaaatcttttaagcttgcttgccccgactatgcccataacgattaattccttacgtctgtttttgataagataccaatataacatacccgtattgacagcgattgttatccccactattacagatataaaaataattgttttgattgacaccagtgtttctccgtcacggatattaaagtccggaacatataccctgtctcccagtttgctttcaaaattatttttgattgctttataatcttttacacttggcaggtcctcaaaattaaatattgtcattaatgcacccgcttcatcaccgattacattaattgttgtactgaccttattgtgcagaacatcgtcaccttctattcctatgatggtatactcttcgcccaatattttaatcttatcacctaatttgtaatcactgccggcaacaacaactttactgttttctgtataatcctgcttttcaaaatagcgccccgatataatattcctgttctcttctatcggttctgcattcataaattcaccgttactatatcctgaataaatattgacgggatactccagatctgtcagcgccatagtatatacatacgataaatctgcttccacttctgcgcatgttgtcctaattaattcctttatctcaccgattgtgacaccttcaaagcttaaatcaatatatttattatcaatgtcaagttcctgttttcgtccgttaaattcggcaaatactccatacagaaaaattaagcaaaccatccctattatctgtgacaaaatcagaacaatatatataattttatgtgctttcattgaattttttaatagtttaaacaaggaaatctatcctcccctcttattttatctatagtatttcactttgataatttataaccgtcctaatttctttagttcctgttttttatggtatcatacccttacttcaatttcaatacaaatgtcgctggcggtcaattttcatatgattatcaatatacaaaaaaggaatcaagttaggggcattccctatcctgactccaatttcaaatcgaatacagtccaatattatgtactcttacctatcaaagcatcaaagcatcacaaaacactatttttcatggctaaaattcttcttttgcaaaataatgaaattttcttacttcttcattattttcatccgtcaagtacatccatacaccacctttattatcttgcgccatatatgatatgtaatatgattcgaaatcctcggatatatcatattttaacaacttacctttttcctcatcaaacgcataaaatatagaactttctctcatatataaaacaggctttttatatgatggcatactattttgtgcaatgcttaaatttttttccaactgtattttctttatctctccatcttcaatactgcctattaatgttgtgtccataaaatttgttataaataaatattgaccatttacatatatctgtgaaattgctgtattaaaaacatcatccttataatccgacatttctattgtcttttcaaattttccttgttcattatatactgttatagcataatcggatacaccatcagcaactatttcttctacagaatatatgtattcatcataaagacatatatttgttatgatacgaccttcgccatttttataatcaatttcatattctattatttcttttcttgtaccgtcctttatattataactttctatatatgtgtatcccgtagtttcatctaaaagtttaccttttgcaacatatattgtttcatcactaccagcaagataaaaaaatgtctgcatattctgctctctatacagttcttctaacacacattgctcaatgtttaatctgtaaaacacatttgaccttgtttgctcattttccaatactgtcacaaagaaatacaagtctttatctactaacagcgaactattattacatatcaaaaaaccctcaatatttccactttctcttgtagcattagtttgtatatcttttacataaaacttcaagttaccattttcgtcaatcttattatatactatcttctcagatgttgttgaaacaatggatgtaaattcattttcctctaactgaatatcttttgctttttctgtgtaattattttttttcatctcaggttcattattttccttacacgatgtcacacataataaaacgacaatactaagcaaccaaataattatttttttcatttttttctcctggataatgtgagcaacagattaaaaacaacctgttgctcttgcaatttaccaacacaatccgatatttacagcattgtacgcattgtacaatgtagtcgcagacttatcataaaatgaacctgacgaataacccaaatacataatcaaagaatccgctatgttaaatgtcgaaccatctgtcgtaacaccattaattgctataaaatgacctccagaagtatatttccagccatcagctgtagaacacgcaataccaactattggtggcatatcatataatgcaatcgaactatataaataatttaccatatctgtcttattaacaccatttttctgaacataataatttgatgaaattttactatttaaatacttcaccatcggtgccaaatatgttccactagttgttgttccacaagcagaagcaattgttgactgtgaatatgtttttccagttaaatactttaatgcacccttaactgtagcaggtccacaataatagttatttatctgtccatatacggtatatccatcatctaaataatcccatgtaacagctctagcctttgatggcttaataaccgctgaaacatccaactcttctttttcagacttaattttcacttgttcacttgttaatgattcaaccacatcattttccatctcataactttcagcaggcaatgctccagcaaaaccagtacccgcattaatctcagctccaaaaactgtgctacatgccaacattgaaatcaacaatgatgtgcttactactttcataaatctcttgtttctcataataaattttcctctcttttatgttttataatacaatatattcaaacaactccctaatactgcctcctttcattattcttgttgcattgaatatatatagtatccatcatatccatcaaacttaactactattttttcattcgaatcgtaattgataacatatatatctgcctctgtcgcacattcgccttcaattttataatctttgacaattatgaccagctctgataatattccttcatatttatcttgatattcatatacactctcattatatttaatcaatttatatattccacagacaccactagttgtagtttctgtcatcacatttcctccaccttgctcatattgttccttatcaacataaaaggtactatttatagaactaatcaacaccaaacatactaccgctacactcacaaatgcgaatgcaaatgttataatctttgcacttctatttacttttttttcactatctataacatatctatcatccagttcacttatgctttcaaatattttctcgctattcaacataataattctccttccacaaataatcttttaactgtgctcgtattctacttagaataaccataacattgttctttgacacgccatacataatagatatttcctcgatggaattaacaaaaaaatatcttcttacaaatatatttcgatatttgagtggcaaatcttctacaaatctgttaataaggtgttgtaattcattctcaataatcgtctcttcaacattattatctttatctggcagacattcttctaattcctccaaaactaatgacaactcgctgccgcctctcttttttgcgttttcttttttatatttatcaaaggataggtttcttgttatttttcctataaatgctcggaaacaattaggaatttgaggtggaattgctttccaaaccttcatccatgtatcattaacacactcctctgaatcttcttgattgtttaatattgaataagctatagaatagcaatatttctcatacttattcatcgtgactgttattgcactttcatttctgcttaaatacaaattaattatttctttatcttccatatgcatatttctcactgttatgaagtaacctttgtcaagagtaaattcacaaaaatcaccacaaacttttcctttcattaaattttaacactgggtacagaggtaattagttattttgcagatgtaatgtgacagagtcagtttcttctgcttgattacccttaggaatattcagatgattctgtcatcatacttattattcgttcaaataatattttacaggtaaatccacgaatctacaattgtgaggtcacttcatattgtttcctattcttatagacgacattttttaacaaaccttacaaaattttcatttttttattttaatttactaatataacttaattccaatatagtgcaattcgtaaattttcaatttatgaaaacaagaggtttcaatgggagactgtatgaaaccgaaagaaatactagacagtaaaggcacgaatgtccgatttgactttgcacttagactggcaaatgaatttgaaattgacgtaaatgagatatgctctgccagtcccttttccggtgcaatcacagaagaagaaatatatcctacacactacccaatagattgaacggtgctcttgacggaaatcaggtaaaaacgtatctaaagaattccatgtatccgcttatgtatcttttcggaaaaaacagtatgccggatgtggataatttgctgactttcttttaccaattggatgatgaagccagaaaagaagtgttggaaacgatacaattcaagctgcagtatcacagagatcccgaacgggcagaacagattaaagggttgtaatttcataacataaatgctaccattaaaccattagagatatactctacaaggagatacgatatatggcaaacaataaatcttttctaacttataatcaacaaatgaaaaaactccgtaaagataagaaaattgattgcaacggaactccacacaaaatatcattagtacgctccggctattttaatataattaatggttataaaacgccttttacttgtggtactgatgctaatgggaaccatacctattttcccaacacaaccttaagtcaaatgaacagtttaaagaaatttgatgaatcactaagaatatttttgcttaaatacatcactcaagtcgaagaggaagttagaacattaaccggttacaaatttgaccaatgtaacgacaacggaaaaataccatggtacgaaacaaatgcctattcctctaatgctactttacaatctaaaatgaatactatatcatctgcttattctgaattaagcaaaagtaaatcagaatatgtacagttttacatgaaaaatcatgagcagattccgacctggattatgataaaagttgtgaatttttccacttttattgatgttcttcataacagcaagacaactgtaacccatgctatctgcaaattatattccatgtatgatggccataatttgcccaatgttaaactgttgattggcagtttacattggctgcgaagagtacggaactcctgtgcacataacgagcgtgtttattgtattcaccaaacacaagcacgtaacaattctgcaagtggtagaattttagacccttattatgcacagctacccacatcatacagtaaatgtacagaaaaaaatatttttgatattcttatatactttaaatattttcttcccaaagaagaatttgcaccaatgattatggaattaaaaaatatgttaatagaactgcaaaacactttacaaccaaatgcgtttgacaatgtcagaggtcagatgggaataaagaatttgaatgttcttgatacattaatcgatttgccaaaatccaaaattgagtaccacaaattcgatactttataacttacttttttctcataaaaaatatataaactcttgtaataaattcataaatgtggtaatatactaacacagagagagccatattgattatggctgaaaaacacctatgcacatatgtgtatgggtgttttttactttacccaaattctttattcataattatttatggcaccgttttggcaccactgaccgcactttcactgttacacagacgtaaaaaggcttccaaggaaaaccttggaannnnnnnnnnctttccctacacgacgctcttccgatctggaagccttgaatttaatgtaattctattaattactcaataactgtagcaactcgactgttaatatcacaaattgtattgttcatagtattttcagtaatgttctattttgcacaatggtacattttgtgattattatacttatttcgaaagtttttcaagtccaaaataagcccatggactttttacctccaattcaaatgaaaggactgataacaatgaaattgatacacgcagaatataacccgatgcacaacagcatcgacattaaccactataacggctacattctccggattgactgcaatcaggcagaatccgggatacggaccactcctaattcacagcgctacctgaatgctctagcaattgataatccgctagaatatgcccagcttgcgctggatggcgaaatacaggcgtgggtggatgcggaggatagtttggaagtgttttaacacatatgccctgaccacttcttcagagcatgtattcatataattggatgttttctataatcaatggtatctattccataaacttccgtctccacacactcaaacaagtccggatcaaacaaagccaaattatatccatcgctgtgcattacgcttttatattcaatgcccgcatattccgcaacatcatcatggataatacttttaacaaaatcggtaatatattgcgtaggaacataatccaaggcactatcgctcctccgcatgattttacccatttcatcatttatcttatttaagtgctctttattaatcgcatattctaagcaatctaatccctctaaaaatggacttatttgattgattttctttaagtcgacaacaataatatcttttttgagcctaaatttaccaaccgttacataatcgtatgcaccagctcttgcttcatatattgtagtctcagcagcgtcacccaaatacaagcacctaattcctcttgcattagctctaccatctgtagtcttatcaattggcggtgcccccatttcttcaataggaatcccttcttctgttgagattctacatctataaaacatctctcccgtcttatatggtttacgaatatatgaacaaaatcgttccaataagttcaaatctacataatgcgtatgaaaacgattttttgtttttagtgcctctacaaaatcatcccaagaattcgtagtcaaaagagaatgttttgataaatactcttggtcatataactcctgaataccaaccggctggtcaaacaactctgcattatattcatacttttctttacatattgcagtaattatgttatacacatcggattcgctctttttattgaaaatattccagttgttaatcaattcagtcttcaacaagcgagtatctgacttcggatacgaatctggcaacaaagaaactggtgtatatatacttatcagttcatcaaacatcatgctcaggtcttcatacttatccgtatcatatatatgtacatttttacatttacacagtggacaatccccaatctctgctttattccggataacagagataacttctgtgtcgcaaaaacatctttcgcaaattaccataagctactccttatccaaatatcttcctattaactctaaatgatgcataatagatagttttttcactgttcccaaccctggataagcttctcggtgatataaatcttcaaactctttcattgccacagtatcaagctgctttgtttcattccatgccactagtttcgacaacgcttcttgaaatttcccggcaggatcactaatatcatcattcgaatcagacacaaaatgctttacgcgtaaactatcatctttatcaaaatatacaatatgtatcgcaaccgcataaggagcaaaccccgtttcattatattcttcaccaactacagagtaatcagcaaatcccacatatccatcttcttgatagtacaaatgatcttctgaaaaaggttcgtcgtcaacttcaatataatcattatttctgtctagtttgttaaacttatccgccaaaagtactctgttttttcttattttccttctaaacccactttcatccggaattaaattgtacttaacatctgtttctgcaaagtatgcttcataaacagaaattgcatctttgtcatcacaaatcgttcccatattatctgcatgtcttgcaataaacttctctggttttgaactcgcccttaataaatacatatagagaatgttattattttcttttaaacatgcagacaagctttcctttaacttctgatttttctcttctctggcatcactactaaagctccccaccttaggattggtaatgatagcaagctgcttactattttccccatatgcttctatggtcttaacaagtgtagaagataattttacaggttcaataatcggtgtaattctgctactcaaaacacctttctctaccaactcacgcaacgcaattaattcaaattgtcgtcctctcaaataagggaaatacatactacgcacctccatattgatgttctaaaaacacttcaagtttctgataatcatcatatgtcaattccataaaatacgccaaaaactttaattcgtatggaatcttaacaaactcctctttctcaagttgcattctcttttttaacattctcaaaacatataaatatgactgttctattggtatctgtaaaaacagttttttacaagcagcataatatttgaactgtgtaacctccggtaaatagccataccactgagcaattatatcttcatattcactttttcttagtaacttgaaaataatttccttgtctaaatcgcttatgtgcctttgcggtttccggaccgtacccaacttcccattttttcttaacacataaatacccacaggtttatctatactatccagcaccttttgtaactgctgcagatttttctcataagtaactacagctacatgatcaaatgccttgtaataatcatctacctgagaacttagtctctccagattatcaagttctgtttttatctcatatacgacagctttaccgtttattaatacaaaatctgctttcgattttgctatcgcaacttctgtcaacgcagttgtcgtattaacgctatgcacacctagaagtaacttattaagcaaagtatttttataaaaatactcattacgataattattcttcaattcaaaataaatttcacttatcaattctcgattattcctttgatcggcattacttgtatatcgtctaacgactgacgaatatacattatccaccttcccatctataaagtgacgaagcatattgcgggtaaatattctatttaaattgctcattttattcgtttccatcaggttcgcctcctttctgtacccgattatttaattatattttaccatacttccttatgaattcacagataatctttcaaattattttattttagcaaattaaaatatacctctattggtatgtagcacaaccaagttcacaatttcttgatacaatatttataaaaacaaaggagactttattatgaacaacctacaaaccttttttgaagaatatatagcattttgtcaatatcaaaagagattagaccggaaaaccttgaatgcatataagacagatttaaaacagttttctcagcaactccattccatatccattgaggctgtaactcctgatatgctggaaaactatatatctcatctccaccagagctacaagtccaaaacagtaaagagaaaaatagcatccctcaaagctttttttcactacctcaaatataaggaaataattgatagaaatccttttaacaaaatacatgtaaaatttcgcgaacctgtgattctgcctaaaacaattcctcttcgcaccgtcgaaacgtttcttgccacaatatatcaccaacgtaattgtgctaaaactacttatcaacgaagaaatgcaatacgcgatatcgcagttattgaactgctattctccacaggtatacgaatatcagaattatgttctctaaacgcaaatgatgtaaatttacaggatggtactatattaatatatggaaaaggctctaaagagcgttgtatgcacattggaaacgataaagtgctttctgtattgcttgaatataaacaggagtattctatcgaaatacaaaactgcaaacacttttttgttaatcaatccggaaggttcttatccgatcaagccgtacgacgaatgattaataaatattcagctctggcagctattgaattacatatcacgccacatatgtttcgccacacctttgcaacttgtcttttagaggcagatgttgatatccgctacattcaggaaatgcttgggcacagttctattaatataactgagatatatacacacgttgctatgtcaaagaaaaaggatattttgactactaaacatccaaggaaggattttgagatataggttatcactataatccctcccctactacatttttgactgataatacatgattatcaattaagaattcacgacacacaaacataacagaggaggaaaccaatgaaagaatcaattattattacatatcacaaaaataaagatatgttgctgttttgtcttaaccgtcttttgaaaaccacaccggatgatgtggaaattttaattattggcaacaatgtgaacagagcagaattagatgtagatatctcaaattcccgatgtaaatatctgaaatatgatcaaaatttacaatatcccaaggctcttaatatagctgttgaacaatgcatgggcgaaataattacatttgtagatgcagatatttttgtatgggacggatggtatgaggcattatacaaaacatttacaagctcagataaaataggcgtagccggtgcaaaacttatcaatccccttacgaaccgtattattgattacggaattatgtattcaaaatataatgcagcccatacaatgatgggattattatacgatcatcctttggcaaaaatggatcgacgtgtacaaactgtgtgcagcgcaattatgatgactaccaaaactttgtatcaaaaaattggcggaatggatgaggacatcccctattcctatacagattgcgattattgctttcgtttaagagatatcggttttgaaacatgggtatcagcaggagcaattgcatatcataaaggaggaacagatcctaataattcaaaatctgctttcagctattatcgtctggacgcaaaaggtatgtatggaatgaaagattatgcaaagattgtttatgataatgcggaatggtataaaaaaagtgcaggctattttttgaaaacatatccattggaagttcaccaatttgtaatgcttgacttttcaacattatatgacagggactcttttcatcaaatgataaaagaagtccttggcataacttatcttgatattattgaaagacctgttgctgaaagagacagtggacaaattgttttgtataataattcatcgtttgaatttattgatcttgttactccgattatttattttgttgatacatttgtggcattattcaataataaattgtggtttcaaatgcgcgacatacaacatgatctcgtagttgaccgtcatggaaatattttgcccctgcatttgattgctgagcaaaaatgttaattatatcaaaggcaaattaagatgtaaatcacctgttcgctgaatgccgctggcaatagactgatcattttcaaatattgtcaaaggctgacgacattcagcagggagaaatgacatgtcataacctgttttatatattccaagctccgtaaatgtatattggatattttcttccaataaatcctttttgatccaatatcttgaagtctcaccgacagaatagtgtttatatgcttctttaaaagaataataaacatcatctttctttttggcataatatgcatttaccccttttaaaagcaatatgtctcctaatttgtgattatccaagagctgctgcatcttcaaaatgtcatcaataactctggcattataaaaatagtttgtttcgggttcatgttgaagctttgccataacctctgccattgagaagaatgttttgaaaataattggttcatgagaatatttgccatccgctaaatatttcattgctttgtcaatttcagaagttaccttctcataatcctgttcgatcagtccatactgcacggtctttctataataatttagagttttttctggcactaatatgggtatatagatggtacagcgatcccagatagaaaacaacttgtccttatctttgtaatatccataataattataaccttcatctgaattattcagataatctataagtccccgcttttgtggatcactaattttctccccataatctcgggatttttgcataagcgtttctctcactgatacaatttcttgtttatagctctctgtattgtaagaaatataccatcgattatacataattgcccgaagtacattcaattcgtcctgattttcgaacccaaccggatgtgcattattacacattttcaatacttcccttaaaaaatccacttcttgcttatacatgtgtttctgcactgcgatatcacaacaaaaatgaataaaaggacgataaaattttagatcctcagatagtgcacacggataataagcctgtatcgtgtcataagcttctttggaacggaaccatgcttttagcgaaccatcatactggcggataaaagtacaaatctggtgaatatattttatgtacacaccttcataattttgattttccaataattcaataaacgcatccagtagacaattataaaataaagaagcgattctttccggcaagaccagattgactaccttggcaccagtatctatcatcgtgtccgtatctttttcaatcgcaattctatataataaataagggataggatatcttctaattttcttttcgatacctttgttttgtacatattctaagcacattaaaatatcttttgaattattttgatagaagaaatttctgataatatcatggtcaaatatgtagattgctaacgtttgcacccgtaaaatattcttttcacatagaaaatctaattcttttgaatcaatctgaaaaatatcttgcaattttttatccaaataatcaaaaatgtagatgatagacaaaataaatttcactctgctttccggtatatctttgtatataaaagcaaatcttttctctaaaacgctcgtgattccatttgaaatattggaaagtgcctcgtatttttccaaatttggtacaatatatccccttttatcaggagaaatacttacaatgtttaattcctccaaatactttgtcacttgcaataaattatatggttttaaagaaattttacttataatctcagaaaaatattcttcattctcatccaaatttgttctggtcaactcctgcaaaaaaaggatgccttgtttcttctcctgaaatcctaacaatgtagccgtaagacaacgcttcatatctgcatgcagaagattatataacagttcagaagtttttggtgtcatatagtcggtattaaatacgcagacaagaatcgataaattgagtgcttgctgatttaccgcataagaagcatacccttcaataaaagcttgaaaggcttttccggtaaactgcatattatcaataatcagaacatttttatcttttgaaatcttttcatacaaaataactgcatacttatttaatgcagtttgtaatgatttttctgtttgattcacaattagttgcaataaacgaatggctttctctacttcactgcgttctgaaatttcacaatcagattgtgacaaacatattttttcctctaacaaacttaatatctcatcactcggtatttcataaagaaaagcaatcaattcctttattagataacgtgataaatcatcttcctgcttctcctgttctgcttgccccgcctgtccggacagactaatgattcgatatccatttgctaaaaagatgttttgacattctgttaggactcttgtttttcctgttccgctgcttcctgtcagtattaaacttgaaatgtaaggattattgaccaatagatgctttgtgtcatctaaaatttttaaataattgttaccaataagtctggtggaaccaacccaatgactttttacgatgaccttttcagagtgccattcaaaacgattaccgctttgcacaccaacaaatgcgatatgaaatctgggcaacataatctcagatttataaacactctgtctcatgtttaaggagactgcgcgtccttcacctttttttagacatgcatgataccaccctttatcttctggtttaatcgtaggataaaaatattgaaaagaaaaacgatcgctttcttcatccgtaaattctatataaacatcaacctgatcttcctgaaaagggttcagcaagctgaatgtcaatgcaaaggtttcgttataataaatcttttctgcagatgtataattttggaagttctccaacgcataatgtacactagaaacagcattttgaaaaaaaaatacgttgacaaaagaatcgtctacttttgccatctcacaatcgctcatatatttgaccggagaatattttttaggaagctctgatgcgtaggtacaaattagagcttcaagagttaccccatcaaaaaagcgaatcatcttattcgtcttttcaccaaaagctaagattttatttttggcaaatctattgatagtggaacggctaaaaaacaagatctcatttacttcatatatttgtgccatcaccaatgtgggtgctagaatgttcattgcaatcgtgtttgaatagtttttacattctgcccataaatgttggttttcagaataaagccaaaaatccctattattatcgtgactaccgccagtaaccacccatttttttctatacattgaaactaataagcaattgactaagttttcaaattcaattccatttcctttttcatttccatcactatctatatttataaatttttcccaatatgcagatgatatttttttcatgagactctcctgatcttttcataaacttaattgataatcatgtattatcagtcaagtttattatacaacaaatacttacatatttcactaactacatacttttatgtattatccatgcttattattcaattttagcaatatccctaacacaaacactgcaccacccatagcaataaatccaccccaaagcagattccaataccatgctgtcacatcaaacatcgcaaggatcaaatcatgccaaaactccaatccggttgcaatagcaaacaaatcaaatagcaaatatccgccaccacactgatatatccatctccaccaataattgtaacgcaaattcttaaagaaagtaataattccaagcacgcaaagtaccattaatacccccataagtccaaagtaaaatattccctttcgttccatagcatttatccaaaacatagcataggcgtccctatctacaagtccccaaattctatgtaagtgaaatagaccaaaaaatatgaaaaaacatggttcataactatatattttcttcataatgccctctcattaaaaactcaataatcatttgtttctcatcttccgccaagctattcatatgtcctctccactccagtaaataggtagaaacattttcaataatctcttttgctcttggcaacacgcccttagcccgaaaaagaccatccttctctgcagccataatcaatgcttaatttcgcagtatcataaatgtcatttgtaacattttcttctgttacagccatcggaagcatgcactttttaagccatttgtctttatgcgtaatccagtacataatcatcgggaacaacatactcatgctattcattgccggtgcatttttaatacctgctggcacatacaatactgcacatttcatttttttaggtgcaaaacacattgttttagcaattattccagcaccaaacgagccaccaaaacagcaaatgctttcatatcctatagctgatattacttcactagcccacttaccataatcataattatgtggagacaaacttacttctgcactctttcctggatgtccaattgtatcaacagcgtatacatgaaaatcttccatcaaaaaatcacacgccaacaaattatatgcagttgttgcatttcctccatgaaatacaagtaaaggtgatccctccagatttcctgtttcaacaagatgtatattaccaaaagacgtagagatccacctagcagagtatggagttgacaggcgttttagttgcttattatgcaatagtaatatttcttcttttccctatccatcccttcactttcaggcatatgacctgaatttttaataatctcacattgtaagttctcattattagattcttttacaagttcacttactctctccgtagatgccacaatatccgtatctccttgcaagattatgtatggaatttgaactttccgtaatagatgtgataaatctaaagccaatatttctttccataaagattgattcttttgatatccatttactatcatggctttaaaatccttcattttataatcaggacttgttaataatccttttataattttccctaatggagcctgtgccccttttttattctggtaaccagccgtatattttctgatacttgttgaaatcaattgcaaatctttagttgaaacattctctttccttataccttttatatcctcaaatttctttttagaaagattggaacattccagagcatttaatacctcctcattaaaaaatacatccttaacaatttgtccccaaacaacaataccatcaactatataactgtctgtctctaggatttttgcactcaatatagaactccatgacatagaaaaatatatactttattatgtggaaacaccttttttacttcccgtatcagatcctttgtcatttgtacgaaagagtctatcgtaaaattatcatcaatcacataattatttataccacaccccaattaatcccaataaaccattataaatctatctgtaaactctgggaaaagaccacgacatcccaccgaaaatggaaccggtgtacccggaccaccatgcaaagttattacaatcggaagattctccattcttccttctactaacaccttttgtttatatccaccaagcgaccaatcatatacctttgaaactttgttttctgttataattccttttctctttttatccataactaactccttctgtataactgatattctcgacaaatatcttctcaaaaacacgctacaaataaaactatattttataaacagttagtaaactaaagttttcatttagaagtataataaaattattataccatctccaaaatattcccacaaccaacaaaacaccccaagcaacatctctaccacttggggcatcccctatcgtcccatcccggcaaccttcctatgcacccactccttcacttcgccaatccgctctcggaacacatccagcatatttctcccattgattacgaactgcttcatcaattcataggcttttcccagcttatcctgcaagacctgaatcttactccggagctgttcattctcgtaggacaaatccaccaccttatcaaataaatccgtattctcagtgtccgttgataacttgtggtacaaatctaaggcgatctcctttttacgagttgcttcatccaattcctccgtcactctgtaaagccccccttgtgcctgctccacttccttctttttatccgtcagaagctcatctgccttcagatactccgacttggaatactcctcttttacctcccactctgccacatcgttttttctactctcgattaaagcatccttgcattccagcgtcatattcttggcggatatctctttatccagctttttaattgtcttctctgacagggtttgaatgtgctgcagggcattttcttgcctttctttctcacgttccgcttccaatgctttctctttacccaaattctttattcataattatttatggcaccgttttgacaccgctgaccgcactttcactgttacacagacgtaaaaaggctcccaaggaaaaccttggaagccttgaatttactgtaattctattaattactcaataattgttgcaactcttcctgaacctactgttctaccaccttcacggatagcgaatgtaagaccctgttccatagcgattggatggatgagttcgattgtcatttctacgttatcaccaggcatgcacatttctgttccagctggaagttcgcaaacacctgttacgtctgttgttctgaagtagaactgtggacgatagttgttgaagaatggagtatgacgtccaccttcatcttttgttaaaacgtaaacctgagcagtaaattttctatgacatgtaactgtacctggttttgcaagtacctgtccacgaacgatctgatcacggttaacaccacggagaagagctccgatgttatcaccagccatagcttcatcaagctgttttctgaacatttcgataccagtaacaactgtcttaagaacatcttccttaacaccaaggatttcaagttcatcattaaggtgaagtgttcctctttctactctacctgtagcaacagtaccacgacctgtgattgtgaatacgtcttctactggcataaggaatggcttatctgtatctcttacaggatctgggatatattcatcaactgtgtgcataagttcaagaatcttatcaccccattcactgaaaggatcttcaagtgctttaagagctgaacccttaatgattggacaacctttgaatccatattcttcaagctgttctgtaacttccatttcaactaattcgataagttcttcatcatcaaccatatcgcacttgttaaggaatacaacgatatatggaacaccaacctgacgagcaagaaggatatgttcctttgtctgtgccataacaccatcagtagcagcaacaacgaggatagcgccatccatctgagcagcaccagtgatcatgttctttacatagtcagcatggcctgggcagtcaacgtgtgcataatgtcttctctctgtctcatattcaacgtgagcagtagaaattgtgattcctctttctctttcttctggagccttatcgatattttcgaatgcaacagcttcacctgtaccaagtcttgcattaagagtcttagtgatagcagctgttaaagttgttttaccatggtcaacgtgtccgattgtaccaatgttacaatgtggtttagttctttcaaatttagctttagccattttaaaaaaatcctccttaaattttccctcttccgggttgtctttttttataagcttttttaattatatttcataaaagaaattttttcaatatttattttgctcttgcagcgattactttatcctgtacattcttaggtacctgctcatatttctggaagaacattgagtagttaccacgaccctgtgtagatgaacggagttctgttgaatatccgaacatttcagcaagtggaactaatgctgttaccatcttaccgccaccgatgtcatccatgctctggatctgtccacgcttagcatttaagcttccgattacatcgcccatatattcttcaggcattgtaacttcaactttcatgataggctcaaggagaacaggattagccttctgcatagcttccttgaatgccatagatccggcaatgtggaatgccatttctgatgaatcgacttcatggtaagaaccatcgtatacgttagctgatacaccaagtacagggaaacctgcaaggatacctgctttagtagcttcttcaataccttctccaacagatggaatgtattccttaggaatagcaccacctactacagtagatacgaacttgaatgtttcttcaccgtttggatccataggctcaaatttaactttacagtgtccgtactgtccacgaccacctgactgtttagcatacttgctatcaacatcaacaggttttgtgattgtttccttatatgctacctgtggggcacctacgttagcttcaaccttaaattcacgaagaagacggtctacgataacttcaagatgtaactcacccattccggcaataattgtctgacctgtttcctgatctgtatgagctttgaatgttggatcttcttcagcaagttttgctaaagcttcacccatcttaccctgatcgttctttgtcttaggctcgattgcgagctcgataacaggttctgggaattccatagattcaaggattacaggatgctgttcatcacagattgtatcaccggttgttgtaaatttgaaacctacagcagcagcgatatctcctgaatacactttatctatttctgtacgcttattagcatgcatctgtacgatacgtccaatacgttcctttttatcctttgatgcatttaatacatatgaacctgagttacatgtaccagagtatactctgaagaatgcaagcttaccaacgaatgggtcagccataatcttaaatgctaaagcagcaaatggagcgtcatctgaagatggtcttgttacttcattgccttccatatctgtacctgtgatatcaggaacgtctgttggagctggcatgtattcaataacaccgtctaataacttctgaacacccttgttcttgtatgctgaaccacagaatacaggaactgcttcactggcaattgttcccctacggagaactgcctttaactgctctttagaaggagtctctccctcaagatacatcatcattaaatcatcatctaattcgcagattttctcaacgaggttatctctccatttatttgcaaggtcttttaagtcatcaggaattgctgtaatctcgatgtcttcacccttgtcatctttgtaataataagcttccatctcaaataagtcgattaagcccttaaaatcatcttcctgtccaattggaatctgtacaggaattgcattctttccaagacgatcaatgattgtctgaacagaatagaaaaagtctgcacccattttatccatcttattgatgaatgccatacgaggtacattgtaggtatcagcctgtctccaaacgttttcagactgaggttctacacctgccttagcatcgaatacacctactgcgccatcaagaactctgagtgaacgttcaacttcaactgtaaagtctacgtggcccggagtatcaatgatgttgatacgatgttctaacgcacctggcattggtttatgatgatcctctaaagtccaatggcatgttgtagcagcagatgtgattgtaataccacgttcctgttcctgttccatccagtccattgtagctgttccttcatgagtatcaccaatcttatagttaacaccggtataatataagatacgctctgttaatgttgtcttaccagcatcaatatgagccataataccgatatttctggttctctctaatggatattctcttccagccaaggtattttcctccttattttg

SEQ ID NO: 58 - DNA, 31037 bp, unidentified
  source 1..31037: mol_type = unassigned DNA
  misc_difference 1122: note = a, c, g, or t
  misc_difference 1123: note = a, c, g, or t
  misc_difference 1124: note = a, c, g, or t
  misc_difference 1125: note = a, c, g, or t
  misc_difference 1126: note = a, c, g, or t
  misc_difference 1127: note = a, c, g, or t
  misc_difference 1128: note = a, c, g, or t
  misc_difference 1129: note = a, c, g, or t
  misc_difference 1130: note = a, c, g, or t
  misc_difference 1131: note = a, c, g, or t
ttaaatcagctgcacgtcatatccgccctgccagctgtgcccgggctgaagcagcgtcacgaacggcttgtcctcgaagcggccgctctccgtcacctgaccgggcatcccgtgccacggctccaagcagacgtaatccgcattcttctttggcatcgaccagaccgccagcacctccatcttcgggtaggagaagcgcagtcctttgccgctgctgcggttgaccaaatcgaccgtgcggctcttcaattcggtgaaaatcagcgcgtcgcggtcgtcgaaaaggtcgtggctgagcggcagcacgcggctgttgtggaagcaggggagatattcgctgccgtcaatgaggtatccgccggggcagaggctgttgcgcccgtcctcaacctgcgggaaaaccagctcgtagtccgtgtagcttgcgcctgcctccatcggcacgatgaagcccggatgcccgccgcagcagaacggcatcaccttgtcggaattgttttcgacaatgaactgcgcggagaacccgttttcgcgcagcgtgtagacgacgtggaacgcgaattcaaacgggtaggatggcttgctttcctccgtgggggtcagaacaagctcaatgaagtcgtcgccgattttctcgaccgtaaactctgggttacgggagaaaccgtgcttggcaatcgggtaggacacgccgtcgatgatgacgtggttatccttcgccgtgccgcagattgggaagagcaccggcgcgtgatttccccagacagcgggatcggcctgccaaataacctcgcggttatcattccccttgaaggaggtcatctgcgcgcccttctgccggacgcgtgcggtcgtattaccgcagtgaagcgtaaattccatgagaaacacctccgaaaatgtcgtttccgcaggaagtattcgcgtcacgaagcgaaaaatcctgcataaaatagaactgattcagcgaaaggaggaaaaaatcatgcgggcagcaggatcgccgtttcaggcgaaaagcagtcaggagcagaaggaacagtggatttggtggcagtgccagcgggacacggtgccgccggaggaaaaagcgccgccagtgaacgccctgcccgaacgggnnnnnnnnnnggacgcgccgccgatgcccgtaccggtgcagccgacgcgccatcagcagtacgacgccatcatgcagcgcatgaaggtcgctcaggggcgaacaggcgcgtttacatcctgcggcaccagcacgcaagactcgtccggcaagtgatacgcatcgaaatacgcattctccagcggaatccaccgcgcgttaaaatccttcagccgcgctgcgccgacgcgctgcaataaccgttcttgctgaacctccgggttaatccgcaggaagagcgtcaaatccgcatgacggcggatgtctggcagcatactgtaactgccctccagaatcgtgatgggcgcgtcgggcaggggaatcggcgcggagaatgcgtcctcgcggcacaggtagcgccgatagacgacaggctgacccgcggcgaaggggatgatcacctcctgcatcaggcgctccaaatcgacgtttccgcccggaatcgccagccgctgcggcgttttcagcgcgtggggcaggaagaagtcgtccatgcggatgatgggcgcattcagcgcggcggacagcgcatccgccaaggtggatttaccgctgccgcacggcccgtcaatcgtgacgagcaggcgcggcttcttcggcagctgggcaatccgcatgagaatcggggcgattcgcgcgtcacgggaaaaatcgggctgcataaaacctccgacacaatcaggcgcactgcgaaaaacatgcagtgcgcctaaatttgattacgcgagatgctttttgagaatcgccaaccccgccgccaaatcctcgtaggaaatgttcagcgggggcagcagacgcaccttttcgtgcgccgtcagcaccatcaagccgtcctgcaagcacgccgaagcgacttccgccgccgtcttgtgctccggcaggatgccaatcatcagccccagcccggtgatgctcttcacgcccggcgcgcccgtcagttccttgcggatgtacgccgcgcgctcctttacgcccgcaaacacgtcctcattcagccgggagatgacgttcagcgccgcggcagcgcaaatcgggttaccgccgaaggtcgagccgtggtcgcccttgcccagcacatgctcgcagcgctcgcctaagaggcacgcgcccatcggcagaccgcccgccagccccttcgccgtcgtcaccacgtcgggatggatgccgaactgctcgtaggcgtacagcgtgcctgtgcgcccgttgccagtctgcacctcatcgaccatcagcagaatgtcattcgcgtggcaaagctcctccgccttcttgacgaacgccgggtcaagcggaatcacgccgccttcgccctgcactatctccatcagcagcccgcagaccttgcccgtgctgaggatggcttccagcgcgggaatgtcgttcgcgggcgtgtaacggaatcccgccgggaacgggccgaagtgctcatggaagcggtcttgcccggtcgccgccagcgtcgcaatcgtgcgcccgtggaagctgttcaccagcgtcacgataacgtcgcggttgtccttctcgccgtacttccgggcgactttcagcgcgcattcgtttgcctccgccccggaattgccgaagaaaaccttcttcatgcccgtgcgctcgcacagcagctttgccaattgcgtctgcggttcagtgtagtagagattggacgtatgaccaagggtggtcagctgatgcgtcacggcggcgacccagtcagggtcgcacgcgccgaagagcgtcacgccgatgcctgtgccgaagtcgatgtagcgcttgccgtcggggccttcgtagtgcgcgccctcgcctttcgacatcaccgcgtcaaagcggccgtatgtgccggcgatgtaagcactgtccgcctgtttaactttttggcacataatttccctcaatctccttcttgaacatcgtgccggcgccctcgtcggtcagcgtctcaatcagcagtgcgtggggaacgcggccgtcgatgatgaacaccttgcgcacacccgcgcggatggcgttggtgcagcactcgaccttgggaatcatgccgccggagatgatgccctccgccttcagctcctccacgcccttcaaatcgacgcggcggatgaggctcgtcgggtctttcgggtcgcggagcagaccgacggtgtccgtcatggagatgagcgcctcggcgtgcatggcggcggcaatcgacgcggcggcggtgtcggcgttgatgttgtaaacgtggcctgtttcgtcgcacccgatggtggaaacgacagggatataccccttttccagcagatcgagaatcggctgcgggttgacgctgttgattttgccgacgtagccgagcttggggtcaatcatctgcgccttgatgagcccgccgtccatgccgcagatgcccatcgcgcgcccgccgaggttgtccagcttcgccaccaacgatttgttgattttgcccgccagcaccatttggacgatttcgctcgtttcctcgtctgtcacgcgcagaccatcgatgaactccgtctccttgccgacgcgcttgagcatactggaaatttccgggccgccgccgtgcaccagcaccattttgaccccgatgaggctcatcagcaccatgtcgcgcatgacatcgtgcttgagctcctcgttgatcatggcgttgccgccgtacttgacgacgacgattttgccgttatacttctggatatagggcagcgcctcgaccagcacctgcgcgcgctggcggttcgtcatgccgttgtacatctgcatattgattcgtcctttcagctccgatagtcgccgttgattttgacgtaatcgtacgtcaggtcgcagccccatgcggtggcggaggcgtcgccgtcgtgcagggtgacgacgacatccacctcgtcctccagcaggatttccttcgctttttcttcgctgaagtcgatggacgcgccgtttttgcacacgtcaatcgagccgacggcgctgcggaaggcaacatccaccttcttcacgtcgatttccgcgccggagtagcccagcgcgcacagcacgcgcccccagttcgcatctgcgccgaaaatggcggccttcagcaggctggagcagatgacggacttcgcggcgagttttgcgtcccgcacggttttgccgcccgtcaccacgcacgtcagcagccgcgacgcgccttcgccgtccttagcaatcatgcggcacaaggcggtcgtcacctcgttcagcgcggcgcagaacacggcgtaatccgcgttttcactgtcaatcagcgcattgcccgccaagccgttcgccatgatggacaccatgtcgttggtggatgtgtcgccatcgacgctgaccatgttgaacgtgtccttcacgttgtccgacagcgccttgcggagcatcgcgggggaaatcgccgcgtcgcaggtgaggaaaacgagcatcgtcgccagattcgggtgaatcatgcccgaacccttcgcgataccgccgaggtggcagaccttgccgtccaacacgaaagacaccgcaacttccttcagccgcgtgtccgtcgtcatgatgccctccgccgcttcctgactgccgttgaccttcacggcggcgtacagcgctcccatgtgctgggcgattggttcgatggacagcggctgcccgatcacgcccgtagacgcgacaatgacgtggtgcgggtcgatgcccgccgctttgcccgccagttcgcacatttgccacgcgacgtcctcgccgtcggcgttgcaggtgttcgcgttgccgctgttgcagacggccagctgcgcaataccgcccgccaagttccgctgggtgacgtaaatgggcgcgcccttgaccagattgctcgtgtacaccgccgccgccgaagcaggaacttcgctcacaatcatgctgatgtcgcgcttgccgcggttcttgcggatgccgcagtgaatgccgcccgcctgaaatcccttcgcggcacatacgccgcccgaaatatgctccatatgcttttcctccatattatatgcttacagattcagtcctgtcgtttcggctgcgcctgtcatcaggttcaggcactcaatggccgcgccggacgaccccttgccgaggttgtcgaacaggctgaccagctcgatgcggtcgtcattgcccagcaccatcagcttcatgctgtccttgcccgccagagcgttcgcggggatgaagccgccgaacgccgccacgtcctgcgcgtccagcacggacacgatgggggaggaagcatagtgcgccttcaggcacgcggtcagttcctcaaccgggtgcgcgcagttcagctgctggcggaacagcggaatcgtcacctgcatcccggcgtagtaatccgccacaatcggcgcgaaaatcggcgcgtgggtcagacaagaaatctgctgcatttcgggcaggtgcttgtgcgattgcgttaagccgtaggggcggggcgcatcgaggtcaggcgtgcgggtgtccgcctcgtactgggcgatcatcttcttgccgccgccgctgtacccggtcagggagaagcaggaaagcagcgtatccgccggaatcagccccgcggcgaccagcggcgcggcgagcgcaatgaacccgctggcgtggcagcccggcacggcgacgtattgcccggagacgacggcgtcccgatgcttcttggacaattccgggaagccgtacgcccagccgggggcaacgcggtgcgccgtcgaagtatcaagaatgcgcgtattgcttccttccgccagcgcgacggattcccgtgcggctgcgtccggcaggcagagaatggcaatgtcggcggcgtgaatggcttcgcgtcgggcatcggcatccttgcgcttttcttccgggagcgtcaggagcgaaaactccccgcgctccgccagccgatcgaaaatccgaaggcctgttgtgccttccttgccatcaataaagaccgtccatgccatgatattcctccttcatttatgcggaatagacgcataaatatacaaacctattatacgcacatcggcgcacttgtcaagcggaaaagcacgaaaaaatcattccgcgcgctcatagcggacagtgaacccgcccgcgtccgccatccactgcgaaacggtcgcctccatcgccgcgacggtcgcgtcccagagctgctctgcgcgctcgccggatagataccgttcgcggcaggaaacacgttcatcctccaaaacacgctgcaagtcgttgtcgtccagatacgggtacagcgccgaatcgcgcgtgatgtccgcaggggtgagggcgtccagcagcagctccggcgcgggcagaatcagcgtcagcacagacccgtcgcgcgtcatggtcacctgctgcaaatcaatgccgaaactgccctcataggtgtaatcggcgttgatgctcgccactgtgccgaggaacgccgccttgacttcgtagttcagcgcgccctcttcggtgacgtgcagcgtttccagcttcgcgctctgctccagcttctgcgacagcacgacggatgcgcgaatcgccgcggcggactcatccggcatgatgcgcgcgacccacttcgcggcgtacggcagcagcacaatcaccagcacgagcgtcagcgcggaggtaatcagccccaacaaccactttccgatgcgtttcacaggcgacctcctgtccagatgtgcagctgaacgagcagcggcacaatcagatagcggaaaatttccacggcgacgaacgccacgccaatcagcgcgaaaacgtacagccagacgcggcgatggcggtgcttttcccgcttgcggcggcgcggcggctcatcgggcggcggctggggaatataggtgctctgtgcgggcggcgtctgctgccggaaacggcggattgtgccgtccggacgctgctcgtagcgttcgtcttgcggtagtttgggctgcatgagcgtcatctccttccgtggctgcattgtgtgattgcgaagggcaaaaagcgcggattcccacgcaaaaccgacgatattagtcgtaccccttccttattatacgacaaaatcagcaagttttcctgcattttcggaagaaaaagcaaaaaagcaggaaaaatacagacgacacggatttttctggaaggcaattgacatacggaaacaggtgtggtaaaataagcaaggtggttcaggtgatttttgcgtacgattcgtcggacggaagataacgtaaaaatttgccgaccgcaaaagcaacagcggtggatggaaggtggatggcggcgatgacggaagcaacggttcagcagtcggcgacgaccacgcgcgagcagatttggctcaatcgtgaacaggtgcgcaaggaaaaaccggtctatcgggcgctgaagcgagtgcaggatgtgtttttctccctgctggcgctgattgtgctttcgccgctgatgctgattgtagcgctcgcgattgtcattgatgacccgaaaggctcgccgatttttacgcaggtgcgcagcggcattgacggcaaggagttccgcatccacaaattccgctccatgtgcgtggacgctgaggcgaagctggcggatttgaagcgcagcacagagatgaacggcccgattttcaagcagaaggatgacccgcgcatcacccgtgtagggcgtttcatccgcaagtgcggcatcgacgagctgccccagttgtgggatattctggttggcagcatgagcatcgtcgggccgccgctgccgtgcgaagtggcggcgtatacggattacgagcgccagcgcctgtatgtccgtcccggtctgacctgcatctggcagattcagccgaaccgcaatgacgtgacgtttgacgagtggatggacatggatatgcgctacatccgcgatcgcagcttcctgctggactggaagctgattttcggcacggtatggacggtttttgcgggcacgggcgaataaaaagcgtgcataaatatgccgctggacgggaaaatgcaaagaaatcatcggaaagcgtgtgtgcgccaagaatgccaccacgcttttttcgcgttccatattatcctgttttcaaattcgcggcgcaactgggtgcattctcataaggcgacgaacgttgccacactcggaaatatataataggaagaaaagctgataaaactgcattttccacaaaattaatcgagatttacttgcaaaataacggtttgcatggtataatggaaaatacttgataggtatgtacctgtcggcagctggttcgccgcaatgtttgcatgacgaactttttttcaaaaacgagacgatggggggacagcatgagagcctacaagattgcggttgctggcgcaggctacgtcggcatggcgatggcggtgctgctgtcccagcatcatcaggtgacagtggtggatattgtgccggaaaaaatcagcatgattaatcgccgccaatcgcctgtgcgggatgacgtgatgcagcaggttttgtcgcacacgcccctgcaactgagcgcaacgctcgacgcccaagccgcctatgccggtgcggacttcgtcgtcattgccgtcccgacgaattacgatgatgtcacccagcgcttccagacggcggcggtggaggaggttatcgggctggtcacgcagtgtaatccggatgcggcggtggtcatcaaatccaccgtcccggtcgggtacaccgcgtcggtgcgcgagaaattccataacaggaacatcctcttcagcccggagttcctgcgcgaatcgcacgcaatggaggacagcctgtacccaagccgcatcattgtcggcacggacatgcgggattcgcgcctgaccgcatccgcccgcgtgttcgctgcgctattgcaggaaggcgcggaaaagccgaacgttgacacgctgctgatgggcttcagcgaggcggaggcggtcaagctgttcgccaacacctatctggcgctgcgcgtggcatacttcaatgagctggacacctacgcggagagcaagggcttgaacacacggcagattttggatggcgtgtgtctcgacccgcgcatcggcagccattacaacaacccgtcgttcggctacggcggctactgcctgccgaaggacaccaagcagctgctggcgaactacgccgatgtgccgcagaacatgatttccgccattgtcgagagcaacaagacgcgcaaggactttattgccgaccgcgtgatggcgctgacgaaggaagatcatcccgttattggcgtctatcgcctgacgatgaaacgcggcagcgacaacttccgccaaagcagcatacagggcgtgatgcagcgcctgaaggcgaaaggcgcatccatcgtgatttacgagccgacactgccggatggtgaaacgttttccggcagcagggtggtcaacgacttggcgcaattcaaggcaatgagccgcatcatcgtggcgaaccgctacgacaaggcgcttgatgatgtgcaggatagggtgtatacgcgcgatattttccagcgcgactaagtacgactgaataagggagcggtaatcatatgcagcatggactaccagaacaggcgatagaaccgacagcatcccgcacgggcgcgaataaacttggctatcgtgccgtcaagcgggcgttcgacctgacggcgacggcaatggcggttatcgtactttcgccgctgttcctgattctttccgtcattgtctatctgggtgatcccggcgctgtcatctacgggcaggagcgtatcggcaagaatggcaagccgttcaaaatgtggaaattcaggagcatgtaccggaatgctgaccagatgattgatcagctgagcgaggagcagaagcgccagtatcatacggagttcaaaatcgacaatgatccgcgcatcacgccggtaggcaatttcctgcgcaaaacgagtttggacgagttgccgcagctgttcaatgttcttgcgggcgaaatgagcctcgtcggaccgcggccgctgctgaaatcggaaatccagcagtattatgcggattcggcggatgtgctgctgtccgtcaagccgggcgtgaccggctattggcaggcatacgcgcgcaacaatgcgacctaccagagcgggcatcgacagcagatggagatgacatacatccgccaagcgtcgatatggctggactgcaagattctaatgaaaaccgtggttgctgtcctccgcagggatggcgcgaagtgagggcgaagcaatgaattacctgattttcggcggttccggcttcatcggcacacacctgattcaccgcttgaaagatgcgtgcgtaaagcccggcaactgcatttacgatttggatttggtcatgcccggcgaagagggcgttgtgcccggcgtcgtggagaaaaacgagggggtcatctatcgccgcgtggatgtgcgcaagccgattgctcttgatttcacgcccacgccggatgatgtgattttcaaccttgcggcggtgcacaggacgccggggcatccggattacgcctatttcgagacgaacattcgcggcgcggagaatgtgaccgcctttgcggagcagcacggcatccgcaaaatcctcttcaccagctccattgcgccctacggcgcggcggaggaactgaaaacggaggacacgctgcctacgccaaacacgccatacggcatcagcaagctggtggcggagaaaatccaccagatttggcaggcaagggaagcgaatcgcgaactgacgattgtacggccgggcattgtgtatggcaagggtgagcatggcaatatgacccgcctgtacaacagccagaagaagcactatttcttctatgccgggcgcaaggacacggtgaaggcgtgcatttatgtgaaggaactggtgcgtttcttccaatatcggatgattgaccatgattttccgggtgtggatgtgtacaactgcacgttcgagccggcgtacaccatcgagcagatatgcagcgccatgcaggcggcgaccgggatgaagcgccatattccgctgattccgggcggcctgctgatgaccgtggcgacgattcttggccccatcggcggcaagaaagtcggcattcacccggcgcgcgtgaagaaactgatggtgagcacgaacatcagcggccaaaagctggcggagagcggctatgcgttccacgcggggctggaggacaccttccgcgactggtttgcggactgcggcaaacaaggcttgtattgaacatccgacgcgatgaggaggaaaatgatgaaagttgtcattcttgccggcggcttcggcacacggatttccgaggaatccgcattcaagcccaagcccatgattgagattggcggtatgcccatcctgtggcatatcatgaagacatattctgcctatggctacaacgaatttgtgatttgtgcgggctacaagcagcacgtcatcaaagagtggtttgcggattacttcctgcacacctccgacatcacgttcgattacacgcacggcacgaacgagatgattgtgcacaacaagcacgccgagccgtggcgcgtgacggttgtcgacactggcttaaatacccagacaggggggcgcgtcaagcgtatccgcgagtatatcggcaatgagccgttcatgctgacctatggcgacgcggtgggcgacgtgaacattgcggaactggtggcattccatcaggcgcacgggaaaatcggcaccatgtcgatgtacaacttcgggcagaacaagggcgtggtggaagtcggtgcgaatagcgtgattgacgctttccgcgagaagtcggacatggacggcgacctcatcaacatcggcttcatggtattccagccggagctgtttgacctgattgagggcgatgaaaccgtgtttgagaaaggcccgctgaccaaacttgtcgcacagaaacagctggtggggtacatccaccaaggcttctggcagtgcatggacacgctgcgggagaaacagaagctggagcaactgtgggcgtcgggcaatgcgccgtggaaggtgtgggagaaatgaagcagttcgatttgtcgttttatcagggcaagaaagtgttcgtgacgggacataccggcttcaagggctcgtggctgtgcaaggtgctcgccaatgccggggcgattgttacggggtattcactgaatccccctacgtcgccgtccttgtttgaaattgccgatattgcgcaggatgtgcactcggttatcggcgatatccgcgattatgcgacgctgaaggccgcgtttgacgccgcacagccggagattgtgctgcatctggcggcgcagcccatcgttcgtgacagctacaaaaatcctgcttacacctatgaaacgaacgtcatgggcacggtgaatattctggagtgcgtgcgaaacagccattgcgtcaagtccttcctgaatgtgacgaccgacaaggtgtacctcaacaaggagtgggcgtggggctaccgcgagaacgaggagctggacggcttcgacccgtactccaattccaagtcctgctcggagctggtgacgcacagctacaagaacagcttttttgctgatggacgcgtagcaatctccacagcgcgcgcaggcaatgtcatcggcggcggcgacttcgccaacgaccgcatcatcccggactgcatccgcgcggcgatgaagcaggaggatattgtggtgcgcaacccgttctccacccgcccgtatcagcatgtgctggagccgctgtatgcctacctgatgattgccgccatgcagtacgaggccggcaagtacgctggctattataacgttggcccggatgatgtggactgcttccagaccggcgcattggtggatttgttcgtgcgcaagtggggcgagggcatgaagtgggtcaaccgctatgacggcggcccgcacgaggcgaacttcctgaagctggactgcgccaagctcaagacgacgtttggctggaagccccactggaatctggacacggcgattgagaaagttgccgaatggagcaagtgctatctgtccggcggcgatgttcgcgcgtgcatggacgaagaaatcacggcatttttgtcggcaggagaataagatggagaatgtaatcgttaccggtgcaaacggttttatcggcaaaacgctggtgaatgcgctgctggcaaagggctgccgtgtcacggcactggatgtccgctttgatgatgtgctggcggatgacccgcgcgtcacctgcatcagcgtgctgaacaaggacgtgcctgcccttgcgaaggagattcccgcggcggattatcactgcttcttccacttggcgtgggcgggcacatccgggcctgcgcgcgcggattatgatgtgcagctgtcgaacgtcaagctgacgtgcgactacatcaagctgtgcgccgatgtgggctgcaagcgtgtggtgtatgcatccagcatcaacgagatggaaacctacgagtatcttcagtcggatgatattgacccggcgggcggctacatctacggcacgggcaagctggcggcgcacctgatgggcgaaacggtcgccaaaatgaccggtgtggaattcatcccggtcatcatcaccaacatctatggcgtgggtgaaaaatccgcgcggatgatttacaccgccatccgcaagctcatccacaaagagcattgctccttcacggcggggtatcagacgtacgacttcatttatatcaccgatgccatcaacgccatcatcgccgtggcggaaaaaggcaagccgttcaaccgctactacatcggttctggtgagcctaagccgctgcgggagttcctgctggaaatgcgggatttggttgacccggcggctgaaattgggctgggggatttgcccttcaagggtgtgaacgtctcctacgaccagttcgatttgaagaaggttgaacgggacacgggctatgtcaatcagattccgtttgcgcagggcatcaagatgacggcggattatattcgggaggaagcataaaatggtgcagaagtttgattttcagccgctggatttgcagggtgcgtaccgcatcaagcctttttatgccacggacaaccgcggcggcttgattaaggattacaatgttgacaccttccgcgcgaacggcattgaccacgatttgaaggaagtgttctacaccatttccaagcgcggcgtgattcgcgcgacgcacttccagcttgttaaacagcaggcgaagctggtgcgctgcatctccggccatgtgtatgacgtgattgtggatttgcgcccggattcgccaacgttcgggcagtggcgcggcttccacctcacgggcgaaaacacggagatgctgcttgtgccgcagtatttcgggcacggctatctggtcatcgaggattcggtagtcagctacaagtgcgccgaggtgttctatggcgagggcgattccggcatcatgtacaacgacccggacatcggcattgaatggccttttgagttgattggcggcaaggagaacctcattatcagcgaaaaggacttgcacctgatgagttttgcggactacaagcaactgtaaggggagtcgaggatggatatcgtctattcttccagcgacagctactgcgagattgcaggaatttccatactgtcgctcttggagcataaccggaacgtcaaggaactcaacctctacctgattgacaaccagatttcggcagagaacaagcagaagctggagaacatgattgcctcgttcggccgcacgctgacgtatctggcgcatccggacattgagaagcgctccgccactgaaatcaacgtcggccgctggaacatcagcacgttctaccgcttgttcctgccctccatgctgcccgaaacagtgaaaaaggtgctgtttattgactgcgatacgctggtcatgcaggacttgacgcccctgtgggaaatggacatgggcgacaagtggctctatggcgtggatgactgccgcggtgctgcctaccgcaccaatttggggcttcagccgacggacaattacatcaacaacggcgttctgctggtggatttggacgcgtggcgcaaaaacaacgtcgaggatatgttcctgcgctacatccgggagaatcagggcgatatcacctttgtggatcagggcgtgcagaacggtgtgctgagcaagctggggcgttcgggcatcctgcatcccaaatataactgcatgacggtctttttcgcgtttgattacaagaacctcatcaagctgcgcaagccgcctgtgccgggcgaccccgcgcagtaccgggaagcggtggagaatccggcgattgtccacttccagtcgtgctttcgcatgagcatccgcccgtgggtggagggctgcaagcacccgtatgccaagacgtatctggcatacaaggcgaaaagcccgtggaaggatacgccgatgaagcccgacgaccgcaccgcgccgcagaaggtgctcagtgctgtcacgagcgccatgccggagaggctgatggtggactgcatctccttcgttcacaccaagatttacccgctggcgagaaatttgaagcagaggatgaaccgaaaatgagcatacagtcaaaggtacatttctggcgctttaccttgcgtcggcggtggattttgatgcggatgatcttttgcggaaatggcgtggcgcgggcaaagattctgaaaaaaagtggcgtgttcggggcaatgggggataactgctggtacgaaccgcacaaattgccgagcgaaccgcagctggttttcatgggaaacaacgtcaatattgcggcggatgtggcaattttgaaccatgacatcatggcggcgatgattaatcgcatggacggtatgccgaaatgcaatattcgggtgggggggggtaaccatcgggaacaatgtgttcatcggtgggcgctcgattattctgtatgatgtgaacatcggcgacaacgttatcattggggcgggcagcgtggtaacgcgggatattcccagcggcagcgtggctgtcggctgtccggcgaaggttatcgggaaatttgaggattcggtggaacgctacattgctgctaatcggaaaaagtgagacagcgaaggcaattcagccgataggagaacacgatgcttgattttgatttgctgaaagactgctacggctgcggcgcgtgcgtcaacgtctgcccgcgcggcgcggtgcatatgacgcaggcagcggatggcagctacatccccgaaattgacgaggcgcgctgcatcggctgcggcaggtgcgaccgcgtgtgcatccatcagcacgcggacaaaaatcatacgccgctgggcaaggaaggctgctatgcggcgtatcagctggatacacaggcgcgcaaagcgtcggcatccgggggcatgttcttcccactggcgcaggaaatgctgcggcagggcggctatgtgtgcggctgcgtgtggaatgagcagatggacgcggtgcacatcgtctccaataagctggaagatgttgagcggatgcgcagttccaagtatgtgcagagcgacatcggcaattgcttggcgacggttcgtggcctgctgaaggcggggaagcccgtcatgttctgcggcacgccctgccagtgcgcggcgtgtgcggcagtgacgggcaatccggaaaatctgctgctggttgcgctgatttgcgagggcgcacccacggcaggtgtctggcagcgctaccgggatgcgaaagcggcacgctacggcgagaaaatccgcaatgtgaacttccgcagtaaaacgccggtcggctggacgatgccgtattttgtgctgacgacaaaatccggcaagcggcatcaggaaatgagctatcggcagaatccgtatgtgctggcgatgctccaaggtctgacgtaccgccaaagctgctatcattgcgagtttaagggcgacaacggcagcgcggatatcgtcgtcggcgacctctggaaggcaggggaacggcttatccagcaaagcgaaaatcagggaatttccgcgctgattgtcaacactcaaaaaggcaaagattgggtggataaagccgcaagcgcgtggttcatggaggaatatccgctggagcgggtgtgcgccaacaattcgatgctggtgcgcgcgggcaaggaaaatgcgcatcgggcgcagttctttgcgcaactggatgctacgccgattgagtcgaacctgaatcagtatattgtgcatgaaaatggcataaagctgcgcgtaacgcaagcgctggttgccgttgggctgtacaagccgctgcggaacgcggtgcgtaagctgcgccggagataaggaggcgcggcatgaagatactgcttgtaaacaaatactttaatatgcacggcgggtcggaaacctactttttcggtttggcggatttgctgcgccaggcggggcacgaggttatctttttcgccatgcaggatgaaaagaacctgccctgcgaacaaagcgcgtatttcgtcagcaatgtggagtttaacggggagttaaccgccgcgcagaagctgaaagccgccttccgcatggtgtattcctttgaagcaaagaaaaaaatctctgcgctgattgaaaaggaaaagccggatatcatccacatcaacctcttccaccgcgtgctgaccgcttccatcgttgatgcggcgaaaaagcacggcatcccggtcgtcttcaccatgcacgacctcaactgcgtctgcccgaatcatgtcatgctcgaccacgggaaaatctgcgaagcgtgcctgcacgggaattactggaactgcgtcaagcgtgtgtgcttcaaggattcgcgggcgaagtgcctgatggccgccatcgagagcgatttcaacaagcgcagcgggctgtacaggaaaatcgacctgtttattacgccgtccgagtgttacaagaacaagctggaaacgtctggactgacaaaatcgcccattgtgcacatgaaaaacttccttccggcggatacgcggtatgccatgcagggcaaacgcggcgattatgtgctgtattatgggcggctttcggcggaaaagggtgtcctgacgctggttcgggcaatggagaagctggaaaatgttccgcttatcattgtcggcactggcccggaggaagatgccatccgcgcggaaatcgaagcgcatcatctaaaccagcgggtaacgatggtcggcttccagtccggcgaaaacctctggcagtatgtgcgcaactgcgcctgcgtggtcgtgccgtccgagtggtacgaagccagcggttataccgcgtgcgaagcgcaggcgatggggaagcccgttgttgcgacaaacgccggtggtctgccggagaatattgttgacggcaaaacgggtttcatcagcccgatgaaggacgaagccgcactggcggatgctatcgggcgcgtgatgcgcttgagcgacgaggaatatcagcggatggcagaaaaatccgtcgccaacgcgaaaaagctcttcgatgcgtccggctatgtagcgaaactgctggttttatacgcaaacctgaaaagaagaggaaattgatgatgaaagtatacacacaaacgtggtatcggggcaataattacggcagcgtactgcagtcctacgcgcttcaacataccatcagcgacatggggtatgcgtgcagcgccctgaattataagcccacaaaggcggatatgtggaagctgaagttcatcaatcacagcctaaaagaaaccatacagtacaaaatcaacgaatatctgatgaagaagaacggcgcgtccgaagctgtcaacaacctctccctgtttgatgattttcgtgcgcagcatatgcagattacgccgccgtgctccactgcgccagaaattgctcggatttgcggtgatgatgccgtattcgtctgcggaagcgaccagatttggaatccatacctctatgatccttactattttctggagtttgtgcaggatagccgccgcaaaatcgcgtatgcgcccagcttcggcgtgatggaaatcccgcacagatgccagcagcggctccgcaaggcgattgctccgttccgctacgtctctgtgcgggaaaagcgcggggcggaaatcgtgcgtgaattgacaggcaaacaggtgatggtggcggttgaccccacgctgttggtgagcatggcgcattggcaaacgcttgcgaagccgattgacagcgaacaaaagtacctgttctgttattttctcagtgaaaatgcgcgatatttggaaaccgcagagaaaatcgcacgggaaaagcatctgacgattcggatgctgccgatggtcgctgcggacttcaagaagccgggaaccgtcaaggagcccgtcggcccgcgcgaatggcttggacttgtgaaaaatgcagattatgtattaaccgattcgttccactgcacgctgttttcgattcgcttccataagcagttcaacgtcctccagcggttcaaggagggtgacaaacgcgggcagaacagccgcattcatacgctgctgcaaacggcaaatatgcagaatcggctggttgtgccgggcgaggatgccacaacggaaatcatcagcgacggctgtttccaaaccgcggatgcgcggatggcggcacaggcagcagattcccggcagtggcttgaacaagcgctgcagtcgtgtgaaggcgcgggcaattcggcgaattgacaaaaatcaagatggaatgtgaagcagcttatgaagattctgcatattacctatgggtttaacggcggcggtgttggattcgtgattgcaaactattgcgcaaaccagccgatgccgggaatagcatttgacattgttggcgagagcatcggcaagccgcatcttttgcaggaacggtttgaaaaagcgggctttcacacgttttatgtcacgcccaaaaagcaaagcctgctgaaaaatatcaaggaaatgcgccgggtgattcaacagggacactacgacgcggtgcatgttcattttgaagaatggtcgtttttgtacctgtggattgccaagctgtgcggcgtgaaagtgcgcgtttgccacgcacacatggcgtatatgaccggcgcttcggctaaactgcactatcggctgttccgcgtgctgctgaatcactttgcgacgctccgcctggcgtgctccaaggatgcaggtgaccacctgtacggcaagcatccgtataccgtgctgaaaaacgcgattgaggcagagaaatacgtctatcatccggaaatgcgccgacagatccggacgcaaatggggttgacagacaagtttgtggtgggcgtggtcgggcggctgacgtatcagaaaaatccgcagttcaccgtggaaattttcgcgaaagttaaagaaaaaagaacgaacgcggtgctgatgttcgtcgggcagggcgaattggaggaggaaatccgccgcttggtgcagacgaaggggctgacggatagcgtgctgttccttggcctgcgcactgatgtgccggatttactgcaggcgatggatgcgtttgtgctgccgtcacgctttgagggattgggcattgtctatattgaagcgcaagccgcaggcttgaaaacttttgcgacagcggaggttgtgccgcaggaagcgtgcgttgatgaatcgctgttcacctatctgccgcgagaggcaaccgcgcagcagtgggcagatgcgatgctggcggcggataccacccagcgggagaacaagcttgaggtgattcaaagccacggctatgacatccatcaggaagctgaaaaactgagagccctttacctgaaaggtaaggcagaaggggaaaaatgaggtacttcagaaatccgaattttatttcgttctgttttttaatcctgattaagcccggctgcatcagcggtatccccgcgctgggaatacttgacacgctgctgaacatgattcgcatcatgctggtgctatttacactcatcgtattgttcaaaaacgcgcaattacttccggttaatcggctatttggcgtaacaatgctggtggttgcgtcgattctctgggagccaatctccacgcttactggtggcggcagcattgcggatttcggcgcgctgatgaatgacttgggcatcgcactggtgtgctatattgggctgcgcgcgggatacgattccttcatcgaaggtgtcgcaaaagtttcgggcgcatatgtgctcatcaactgcctgaccgtgattttgttcccggcagggatgtatgcaacaacgaagtattcgcaaaacttcttcctgagttaccggacagcgtggttcgtcatttacctgctggcgttgacaaccacgctgctttggaatgcaaacgttggttcgcgcttcacaaaacggtttgcgattgccgtggctgtcgcggcgactctgtcgatgatcttgcagtggacggcgacggggctgttctgctttagcatcggcggtctcgtgctgctctactgcacatggaaaaaaaggaatccgttcaagatttcgacggtgatgctcacggaagcggcggcgttctgggcaatcgtcattgcccgcctgatggacatgttttcgttccttctggtgaacattctgcacaaggacgtgacgctgacgttcagaacgcgcatctgggataacgcacttgcagccatccagcagaatttactaacaggggttggacgactggacgcagcgcagatggaagctattctcggctatggcgtgtcacatccgcacaatcgatacttgtatgtcaccctttgcttcggcatcattgggctggctttattccttctgattgtttactatgcaaacaaaggcacaatcaacccgcatagggtgcgtgaaggcagaattatgatggctgccttcattgctctgctgagcgctgcgcaggtggaatcgctctctgccacgggcggttatgcgattccgctgtatctcaatgctgcggcgctccattgcagggaaggcagaagaaaggaaattggggagattccgcagcacatgttgacggcgcgcggaaaaacaactatttatagtagaaaaatctaagtgctgagacgggatgcgcgtcgtgaagggaaattaatatggagaagagagtaacttccgcatttggctggaagttttttgaaaggatatccgtacaaggaactaactttctggttacgttattgcttgccagactgcttacaccgtccgactatggaacagtgtcagttgtgacaatttttattgcgttagcaacgacatttgttcagggcggatttaacacagcgttaattcagaagaaagacgttgatggcaatgattatctcacgattctcatgttctctgagattgtcgcagcggcgctgtatcttgtgatttttttcactgcgccttttattagcaatatttatcatacatcggagttaagcagtctcctgcgcgttatggcaatcgttctatttccgggggcgtttaatgcggtgcaggttgcctatgtaacaagagatttgcgtttcaaagtgctgaccatttcaagctttgtgtccgctttgctggcggcggctgtcggaattggcttggcggtcgcaggatttggcgcatgggcgctggtgatacagcagttggtgaaccaaaccgcgacctgctttgtcacatattgtattgttcggtggattcctaaaggaagattttcagtccagagcctgcggcgacttttgccgtttggcgcaaaagtgttcgcatccaatttcattgtcgccctgtttcttgacataagaagcttgctgattggccagatttattcatcagaagctcttggatttttcaatcgtggcaagcagtttccgcaagccgttatggaaagtgtgaatggcacgattcagacggtgttacttcccgtttattccaaaaagcaggattctgttagcagtgtcgcgaaaatggtttccaaaacggtgagaatatccagtctcctgttgtttcctatgatggttggattggcagcggtcgctgaaccgttggtttcactgctgttgacggacaagtggctggaatgcgtcccgtatttgcagattttcgctattggatacctctttcaggcgatacagctggcgattattcaagcgattaaggcgattggcgacagcggcacaccgctaaagctggaaatcatcaaaaaatgtgtggaagtctttttcctgattgttacgattcggcaaggcgtgctgattttcgcgtcttccttgctgatttgcagtgtgatttctcatctgctgaatatgttcgcagccaaaagaattctaaactatacggttaagcagcaattgatagacattctcccggccaccctgttttcggcagtgatggcggcttgcgtcaagtgcgttactcagcttttgaatggcgcatttgtaagccttgttgcaggaattgcaactggcgtggctgtctaccttctgttgtgcacgctgttccgcgttcccgaaatcaagcagctgaaaaataagctattcaaacgtaagcatgcttaaagcgatgatggtagaaagtggcgggcaaacgtcatgtttcatagctgccgccacaaaatatgggaggtaatacgctatatgaaggggattatccttgcgggcggctctggcacgcgcctttacccgctgacgaaagtaacgtcaaagcaacttttgccggtttacgataaaccgatgatttattatccgatgtccgtgctgatgaatgcgggcattcgcgatatcctgattatctccacgccgcaggacacgccgcgctttgagaatctgctgggggatggccggcagtttggcgtgcacctgacgtatgcggttcagccgtcgccggacgggctggcgcaggcgttcatcatcggtgaggatttcatcggtagtgactccgtggcgatggtgcttggcgacaacattttcagcggacatggactaaacaaacggttacatgcggcggtacggaacgcggaaaacggcaggggcgccaccgtcttcggctactatgtggatgacccggaacgcttcggcgttgttgagtttgacaaggccggaaaggcgatttccattgaagaaaagccggcgcatccgaaaagcaactattgtgtgacaggcttgtatttttacgacaaccgcgtggttgagttcgccaaaaacctcaagccgtccgcccgtggtgaactggaaattacggatttgaaccgcatttatctggaggatggctcgctgaacgttgaacttttaggtcaaggattcacttggctggacacgggcacgcacgaaagcctggtggatgcgacgaacttcgtgaagacggtagaacagcatcagcaccgtaaaatcggctgtctggaagaaattgcgtatctcaatggctggatcagcaaagaggagctgatggaggtctatgaagtgatgaagaagaatcagtacgggcagtacctgaaagatgtcatggatgggaaatatcaggaacgtttgtactaagaggagaagcataatgacgattattgttactggcggcgcgggttttattggcagcaacttcattttccatatgctcaagaagtacccggacgatcggattatctgccttgacaagctgacgtatgcgggcaatctgtccacgcttgcgcccatgatggataacccgaatttccgtttcgtgaaggcagatatttgcgaccgggaagcagtctacaagctgtttgaggaagaacatcctgatattgttgtcaattttgcggcggaatcgcatgttgaccgctcgattgagaacccggaaatcttcctgaaaaccaatattattggtacggcgacgctcatggatgcttgccgcaagtatggcatccagcgttaccatcaggtttcgacagacgaggtgtatggcgacctgccactggaccgccccgacctgttttttaccgaagaaacgccgattcacaccagttcgccgtacagcagttccaaggcaggcgctgaccttctggttcaatcgtattaccgcacctacggtctgccggcgtcaatttcccgctgctccaacaactacgggccgtatcattttccggaaaaactgattccgctgatgattgtcaacgcgctggcggataagccgctgccggtctacggcgaaggcttgaatgtccgcgactggctgtatgtggaagatcactgcaaggcgattgacctgattatccacaagggccgcgtgggcgaggtttacaacgtcggcgggcacaacgagaagcagaatatcgagattgtgaaaatcatctgcaaagagctgggcaaacccgaaagtttaatcacacatgtcggcgaccgcaaagggcatgatatgcgctacgccatcgatccgacgaaaatccacaatgagttgggctggctgccggaaacgaagttcgaggacggtatcaaaaagacgatacagtggtatcttgacaaccgcgaatggtgggagacaatcatcagcggtgagtatcagcattactacgcgaagatgtatggcaaccgctgaaccggaggaaatgaacgtgaagttttttgtaacgggcgttggcggacagctggggcatgacgtgatgaatgagttgctcaaacgcgggcatgaaggtgtcggctcggacattcagacggcttacagcggcatcatagacaattcgccggtgtcaaaagcgccgtatataccgctggatatcacagatgctgacgcggtggaaagggtcatcacggcagtcaatcccgacgcagtgattcactgcgcagcatggacggcagttgacttggcggagaatgcggaaaatcaggaaaaggttcgcgccatcaacgcgggcggaacgcagaacatcgcaaatgtatgcaaaaagttaaattgcaagatgacttacatcagcacggattatgtgtttgatgggcagggaactgcgccgtggaagccggattgcaaggattacaagccgctgaacgtttacggtcaaacgaaactggagggtgaattggcagtcagccggacgctggaaaaatacttcatcgtccgcattgcgtgggtgttcggcttgaatgggaaaaacttcatcaagacgatgctgaacgttggcaaaacgcacgacaccgtccgcgttgttagcgaccagatcggcacgccgacgtacacgcgggacttggcacgcttgctgattgatatgaacgaaaccgacaagtacggatactatcatgcgaccaacgaaggcggttacatcagctggtacgatttcacgaaggaaatctatcggcaggcggggtatacgacgcaagttgtgcccgtgacaaccgctgaatacgggctgagcaaggcagcacggccgttcaacagtcggctggacaagagcaagctggtggaagctgggtttgcgccgctgccgacgtggcaggatgcgctgcgccgttatttgcacgaaattgggcagtaaggagaacgccaaatgggacagattcgagtcgaaaagaacgtgggtggcattacggggctttgcgtaattgaaccagcggttcatggagatgcacgcggctacttcatggagacgtacaacgagcgcgacatgcgggaggcgggcatcgacgttcacttcgtgcaggacaaccagtcgatgtcaacgaagggcgttctgcgtgggctgcacttccagaaaaagtatccgcagtgcaaactggtgcgggttgtgcggggcacggttttcgacgtggcggtagatttgcgcgccgattccgaaacttatgggagatggtacggcgtcacgctgtcagcggaaaataagaagcaattcctgattccggaaggctttgcgcatggtttccttgtgctgagcgacgaagcggaattctgctataaggttagtgacttctggcacccgaacgacgagggcggcttggcatggaatgacccgacaattggcatcgactggcatgtgcggggcgaatatcgcggcagcgcaagtgcggatggctgcacgatggcggatggcacgccgctgaatttgagcgagaaagatcagcagtggctggggctgaaagatacctttaagttttaagacgaatattatcgtaggaggaagctgtggcaaacgggcacttcctcctttttattttgcggcagcgggaaaaatcggccatcagcgtgcggaaaaaacacaaattccaaacggaaaacaaaactttgcataaaatgttcggaaaaacgcttgacagcggcggaagaatacggtacaataaagtgtacccaaacggcgcgggatgtgcagtctgggaaatcggcgaaggaggaggaagcgtcatgacgaagtgcaagggtgctgttatgatgggttctctttctttccggggacaagcagttgcaggagcgcaccgttcgggggactgaacaggtggcgctcttttgtttgcctgacggcgaaggaggtttcgactttcatgaagaaagttgcagtcatcatgggcagcgacagtgatctgccggtgctgaaaggggcgtttgagcagctgaaaaagctggtcattccctttgaggcgcatgtttattcggcgcatcggacgcctgcggaggcggcggcgtttgcggcatccgcgcgggacaacggcttcggcgtgctgattgcggcggcgggcaaggcggcgcacctcgcgggggcgctcgcggcgcagacaacgctgccggtgattggtattccggttaagtcctcgacgctcgacgggctggacgcgctgctatccaccgtgcagatgcccagcgggatgcctgtggcgacggttgccatcgacggtgcggcgaatgcggcgctgctcgcggcgcagattcttgcggtcgaggacgaagccttggcggaaaagctgctggcgatgcgcaaggcgcagcatgacgcggtcatcgccaaggacgcggcgctggttgttgaataacacaaaacacgaacattctaaattcgcaagcatcaactgctgcggcagacaaccgtgatataataggaggaaacagcaatgaagaagcttgaacagctctatgaaggcaaggcgaagaaggtttttgcgacggatgatccgaacgttgtgctggtggactacaaggacgacgcaaccgcgttcaacggcctcaagaagggcacgattatgggcaagggcgtcatcaacaaccgcgtgacgaatttcctgatgaagatgctggagaaaaacggcatcccgacgcattacattgaagagatttccgaccgcgagacgctggtgaagaaggttcacatcgtgccgctggaagtcattgtgcgcaatatcgccgccggctcgctgtccaagcgcctcggtctgcccgaaggcacgaaactcaagcagactgtgctggagtactgctacaaggacgacgagctgggcgacccgatggtcaacgagtaccatattatggcgatgggctgggtctccaagccggttcttgaccagattgccgcctatgccctgcgcatcaacgagctgctgacggcgtatttgaaggaagtcaacattgagctgattgacttcaagctggagtttggcatcacgaatgacggtcagctggtgctggcggacgaaatcagcccggacacctgccgcttctgggatacccgcacgggcgaaaagctggataaagaccgcttccgccgcgatttgggcaacgtggaagacgcttacatcgaaatccgcaagcgcctgatgggcgaataagaatatctgcaccccggatggcaatcgactgtccggggcgcttgtgtggtaatcaaacactggtcagcatgaaggagcaatgaagatgaacaagctggagtcagcctgctatcttgcggaggcggacgaagcgccgtttgacaagctgcacgaggagtgcggcgtgttcggcatttaccgcgcggattccgccaacaagagcgtcgtcgcggagacgtatcatgcgctgtatgccttgcagcaccgcggtcaggagagctgcggcattgtcgtcaacgatgatggcgtgatgaaggcgcacaaggacaacggactggtgacggaggtgttcacgcgcgacgcgctgagcaaaatccacgagggaacgatggcggtcggccactgccgctatggtacaacggggatgcacagccgttccaatgcccagccgctgctgattaaccatcaaaaaggcgcgatggcgctggcgcacaacggaaatctgaccaacgcggcggagcttcgcgaacagctggagaagaacggcgcgattttccactgcacgtcggataccgaggtgattgcctacattatcacgcaggagcgcctgaagtgcggttcgattgaacaggcggttttgaacgccatgcaggtcatcaagggcgcgtattcgctcgtcgtcatgagtccgacgaagctgattgcctgccgcgacccgcatggcttccgtccgctgtgcatgggcagaatcggcgacgatgtggtgtttgcgtcggagagctgcgcgctggatgccatcggcgcgacgttcgtgcgcgatattgaggcgggcgaagtcgtcgtcgtcaacgaagaggggattcactcctataaggtgcccggcgcgtgccacgacggcatgtgcatcttcgagttcatttatttcgcgcggcccgattccgtcattgacggcagcagcgtccacgaggcgcgcatccgggcgggcagcttcctcgcgcttgaccatccggttcaggcggatgtggtcatcggcgtgccggattccggcctggatgccgccattgggtacagccgcaccagcgggattccctacggcatcggcttcatcaagaacaagtacatcgggcgcacattcatccagccggggcagaagcagcggcaggatgccgtgcgcatcaagctgaacgccatttccgccaccgtcaagggcaagcgcgtcgtcatggtggatgattccatcgtccgcggcacaacctgcgcgcgcatcgtccgccttctgcgcgaagcgggcgcgacggaggtgcatgtgcgcctgtccgccccgccgttcaccgacccctgcttcttcggcacggacgtggacagcaaggagaacctgattgccgcacaccattcggtggaggaaatcggcaaaatcatcggcgcggactccatcggctttttgtccctggaggcgtgcgacaagctggcggcggacagccactgcggattctgcaagggctgcttctgcggcaagtacccggttgacccgccgctggtgacggagaagaacaaattcgaccagcccattcacggcggcaaggtgcaggacgacgactaacgcgacgaatgcgacaaaggagcagacaaccatgatgaagagcgagagcgaaagctacaaggcagcgggtgttgacattaccgccggttacgcgtcggtggaactgatgaagaagcatgtcgcgcggacgatgacggcgggctgcgtcgagggcatcggcggcttcggcggtctgtttgcgctggacgcggcgggcatggaagagccggtgctcgtttccggcacggatggcgtcggcacgaagctgaaaatcgccatgctgctggacaagcatgataccatcggcattgactgcgtggcgatgtgcgtcaacgacgtcatttgctgtggcgcgaagccgctgttcttccttgattatatcgcctgcggcaagaatgtgccggagaaaatcgcgtccatcgtcgcgggcgtggcggaaggctgcgtgcaggctgaatcagcgctcatcggcggcgaaacggcggagcatcccggcatgatgccggaggatgattacgacctcg

SEQ ID NO: 59 - DNA, 11486 bp, unidentified
  source 1..11486: mol_type = unassigned DNA
tcagccattgtaaacctccaaaattctctgttcaaatttttctctgcctactctgtcgattgtaaacttaaagcgttcgctcggctttgcgttttctgcaaagaagttaagagcggcatcacagatttccataagtttttctttattttcgataaacggaataattgtttttcccttgttgattgagtttccgaaaagtccgccgaatgaaacaatgtagccgtgaattgtgtcccacgcatctgtcgggcaagccttgaagcatctgccgcagtagttacactttgaattgtcaacggaaattttcccgtcctcaagagtgattgcaccctgacggcaggcctttacgcagactccgcaaccgatacaagcgtcctctttccatgaaaccttgattccgcccttgataccgacatcgttttcctcggctttaagacagttgttctgacagcctgttataccgaacttgaacttgtgcggaagttcctttgcaaaatatctgtcgtcaagctcctttgcaagagcgtatgtatcaatacaaccgctgggacagattgcctcaccctgacaggctgtaattgttcttactctaggaccgcaaacgcccggttcaacatcgccctcggcaagtgcgtccttaactgcctcaacatcatcaagctttacaaaaggaatttcaacactttgtcttgatgtgaggtgaacataaccgtcaccgtagttttccgaaacctcggcaattttcgcaagctgtttagctgtgaggttgccgcctacaactctgagcctgagcgaaaaattatttttctgtttttgacgcataaagccgccctttttaagcgtagcataatcaactgccatttctcttactcctccgattcattcacatttatactgtctacagcctgtttgaagtcagactttaaatcctcaatatcctcaatgccgacgctgattcttattgtatcatcaaacacgcctgcgtttcttttttgttcttctgttccgtgagcgtaaattgtgcttgacggatgaattacaagtgttcttgtgtcgcctatatttgttgcatttgttgcatattttaaattgttgataagcttaaacgctctttctttacttcctgccctgattgtgaggattgcaccgccttttcccttcaacagcttttgacaaaggctgtaataaggagaagcttcaagagccggatagttgacttcgattccgttttgtgtttcaaagaactttgcaagctcaagagcattgtaacaaagacgctccatacgaagtccgagtgtttcaagtccgacagagttcataaaagcattaaacggtgcaaggcaacagcctatgtttcgccagataccgtttctcagctttgcaacatatgcaagccgaccgaattttttgtactctgcaagacctttgtatctttccgtattccattcaaaattgccgctgtcaacgattattccgctgattgaatttccgccgccgttaatgtactttgacgaggaatgaacaacgatgtccgcaccgtgttcaaacggctgaataagatacggagttgccgttgtgctgtcgataatgagaggaacaccgtgtgaatgaacaagctctgatacagcgtcaagatcggcaatttcaagtccgggattgccgataagctcggcaaagactgcttttgttttttcatttatgagcggttcaatctcctcggctgtcaccttgttgacatatcgtgtaacaattccgaaaggctcaagatctccaaacaaatcaattgttccgccaaaaagacctgcgcttgcgattacttcgtcacctgattcaagaatgttcaggagtgccatcgtaacggctgccatacctgacgaacacgcaaccgcaccgacaccgttttcaatggaagtaattctgttctcaaaagatgttaccgtgggattgcctattcgagagtaggcgtagccgggagctctgttgttgaacaccttttcaagctgttcggcagagctgtgcgaaaatgcactgacctgataaatgggagttaaggttgagccaaaaaccttttcaccgttaaaacccttgtgaagtaatgcggtgttaaactccataatatcaccaaccccttaatttcatacaaccaacccttttgtgtaagaccgtcgtaagaatttgtctgacggcttcgattgatataggtagattatactccattaatcatagtatttcaataggtttaataagattttacctcttgcacaatttttctttaaaatttgccgtaattccattatttcctacaatgcatatttgtttagtaggtattgatttttaaattaaaaactgttaccattattatatactctttcagcaaacaaaacgcacggaaaggagatgctaaaattgaagatttcaacaaaggtggaattcggaatcatcgctgttattgacattgcgtcacactcactaaacggcaatgcggtaacaactcccgaaattgccaaacggcaaaatatatctaaaaagtatcttgaacagattctctcatcactcagctcggcaggacttgtgcgaggtcaaaagggttcaaacggcggttatgttattgcaaaaaaccttaaagagattacattcaaggatatcataaacgcacttgacgcaaatgttctgagcaatgtttattttaactctcggggcgatgatgatgttatgataagacttatcgacaacagtctttggtcgaagatgtcgtcatatcttcaggaatatgccgaaagcattacacttgcacagctttgcgatgagtatatcaaaaacaatgaaattgaacacaacattccgatgtactacatctgatagattaaaaacaaaaagccaccgatttttatgtcggtggcttttcttgtttttatcggattttatttaaagctttcaataacctgacaggttttttcaatgtcatcatccgtgtgtgcaaatgaaacaaacatcgcctcaaactgtgacggtgcggcatagattccgttttcaagcagatgattgtaatactcggcatatctctttgtgtcggctgtggttgccgtgtcatagtcaacaacctttttgtcggtaaaaaatgccgtcataatcgaacccacacggttcacattaagtcctgcgttcttcattgcattttcaatctttgcagacttgcgttcaagctcgggatatatcgaatctttatttttttcaagaattttaagcgttgcaatgcctgcacttaccgctaccggatttcccgaaagtgtgcctgcctgataaacagaaccgagaggagcaacacactccataatctcttttcgacctccgtaaaccgcaagcggcattccgccgccgacaatttttccgagggttgtaaggtcgggttttactccgtaaagcttttgagcaccgccgagtgaaagtctgaatcctgtaatcacttcatcaaaaataagaagtgaaccatgcttttcagtgatttcacgcaggaattttaaaaatccttttttgggcggaacaacacccatatttgcggcacaaggctcaacgattacacaggcaatttcatcaccgcagttatcaaaaagctgttgcacggattcttcatcgttatactttgcaaggagagttgtgtctgtgtagcctttcggcacacctgcgctgttcggaattgaatttgtcagaagtcccgaaccgccctttacaagcaagccgtcggaatggccgtggtaacagccctcgaattttacgattttatccctttttgtaaagcctcttgcggcacggattgcgctcataaccgcctctgtgcctgaatttacaagtcggagcatttcaattgacggcatatttttgcggataagctcggcaagttcaatttctccgctgtggcacgcaccgaatgtaagtccgttctgacaggcagaagtcacagccttgataacatcgggctgtttgtgaccgaggatgttcggtccccatgagcagatatagtcgataaactcgtttccgtcaacatcataaatttttgaaccctctgcacggtcgataaaaagcggagttcttccgaccgaacggcacgcacggacaggactgttcacaccgccgggcataaagtcaagcgcctgtgcgtatagcttttcgctttgagttgtattcataaaagcacttccctatttgtaaaattcgtcaatccattttgcaacatcaagtgcgtggtatgtgattatgatatccgcacccgccctcttgattgcaatcatattttcgcacacaattttcttttcgtcaatccagcctttttcggcagccgccttgaccattgcatattcaccgcttacattataggcaacaagcggaaggtcaaagcgttcgcttgcggcttttacgatatcgagatatgcaagtgcaggcttgaccataaccatatccgcaccctcgtcaatatcgtctgcaatttcacgcagagcctctttgccgtttgcgtaatccatctgatagctttttctgtcgccaaatttgggggcagattctgcggcgtcacggaatggcgaatagtagcctgaggcaaattttgcactgtatgacataatcggagtgttgataagtccgttttcgtcaagtgcgtttctgattgcagacactctgccgtccatcatatccgaaggagcgatgatatccgcacctgcttttgcaaggctgacagccattttagagaggagcggaagtgtttcgtcattgagaatttcgtgaccgcaaacaacaccgcaatgaccgtgacttgtgtattcacaaagacagacatcggcaataataaggagtgacggataatttttctttatgtatctgattgcgttctgagttacaccgttatcgtcataggctgatgttgcaagctcgtctttatgctttggaattccgaaaataagaagtcctgcaatgccgctgttttcaatttctttaagaatctcgtctgctctgtcaagcgaatattggtagacattcggcattgaatcaacaggctttttaatattttcaccctctgcaataaaaatcgggtaaataaaatcgcccttgtcaattcttgtttcacgaacaagactgcgaatctgctcgcctgctcttaatcttctgaatcttctcatatatttatccttctttcaaagttacttccttgattatagtttccaaaattccgtctgtgtccttcgtttttgcaatcctgaacgaatttacgccgtgactttcaagtgcctcggcggtgatttcacctatgcagacaacggaagttctgtcggaaataattgctccgccgtcaaaaaatgtgttcacacccgacgcactcgcaaaagtgataaagtcggtatcaacaacggaattatcctgttttttctcaagctgaatgtcataggttttgacatcgtcaaaatcaatgttgttatcagccaaaatccgagtgagttcgggcgaaccgttttcggcacgcagaatcaatactttttcaccgcttttcaccgtttttgcaagcaaaattccaagttcacgggttgtgtagacatttggaatacagtccgcaaaaattccgtacttttcaagtacagccgctgttcccgaaccaatcaccgcaaacttaatatttgcaaaactgcggatatcctttttcaacttacgcagtcggctcataaaaatttctgcaccgttcatacttgtaagcaccacataatcgtaaccgtcaataccgtttattgcattgtcaaaaacttcgttgtcatgatattcaatcacctttaaaaggtcatgtcttttgacctttgcacccgaaagcgtaagcattttgccgagcttgtcggagagctttctcgtacctgtaacagtaaccgaaacatttttcaaaggtcttgtaattgtgggagcaaagtcaaattttgcggtttcgccaaccactataacggcaggcggtacaacctctgcggatttaacattttcgcagattgtcgagagagttcccctcacggtctgattttttgcacaagcaccgtttgacacaactgcaacgggagtatcctccgatttaccgttctgaataagattttccacaatgtcggggaggtttctcaagcccataagaaagacaagcgttccgtcggtttcggcacatttctttatattttcgggcagggtgtcctgtgccgtatgtcccgtgattatatgaacacttcggctcagatttctgtgtgtaacagggattcccgcaagttcgggaacggcaattgaggaagaaattccgggtacaatgtcaaacggaatatcggcacttttgagggcttcaatctcctctccacctctgccaaacacgaacggatcgccgcctttaagacgaacaaccgttttgccctctctcgccttttcaacaaggatttcgttaatattttcctgcttttcgctgtgtctgcccgaacgctttccaacgcagattttttcagccgtttcgggtgcaaaaccgagcaatgacacatctataaggctgtcgtaaacaagcacatcgcagtgtctgatatactccgcaccacgcattgttatcaggtcaaaatcgccgcatcccgcaccgacaatatacactcttccgttactcaatttcgctcaccagcctttttgcaagtttgattctgtttgaaatttcatctgttccgctgactgtttttttacagtcggcagacagagaaagcgttattttatcgttttcaacctttgaaattgcaccaacaggagttgaacaatcggcattgaggctgagcagaacctgtctttcggtttcaaacgaaagcattgtatttttgtcgctgatttcagcgagcattttggaaacctcgctgttttttctgctttcaatcgcaactattccctgacacggtgcagggagaaattcatcggcatcaaacgaagttaccgtgtaatcctcaccgttgtaaaggtcaagtctttcaagccctgcctttgcaagcacaagagcatcgtactcaccgttcaacagctttttaagtcgggtgtcaacattgccccttatatccttgaattttgcattaggatagattttctccgcaaaaagctttcgccttaaactgcctgttccgatgacaaagccgtccttaatttcaaaatcattgcgtgtaacaaaaacatcgccatagctgccccttggcaacacggcggaaatttcaagtccgtctgcaatttttgtcggcaagtcctttgcgctgtgaacggcaacatctgtttctccgctcaaaagtgacatttcaagctccttgatgaacacaccttttccgcctaaagctgcaagcggtttgtcaagggttttgtcgcctgttgtcgaaatgtaacccgtttcaattttaacattcggaaaacggtttttcagcgtttttattaacatttcggtttgtgcaagggcaagcctgctttttcgtgttccgatttttatcgtcattgttcgtattcctcaatcaaattttcaacagttttttcatcgggttcaagtcccgaaaggcaaagcgaaagaagctgttcaaaaatcttccttctgtcatcttccctttcaaccttctccttaattatcgggcgatatttccacaaaacctcggttgtgttttcgttcatactttcaaggattcccacaaaaagctctttaagatattttgcgtaaatcggacttttgcccgaagttgtaattcccgccgttatgccgtttttgcttgcaattgcaggaaaaataaatccgcatttttccttatcgtcaactgtgttgacaagaatatttttctcattgcaaagctgaaaaattctgccgttgagcgtttcatcatcggttgcgctgataacacaaaacgcaccgtcaaggtcgctgtcacaaaatctgcggtcaatgattttcacattcaaagccttgatttcatcgcagattttcggggcaacaacggttatgtccggcgagaacggcgtcagcttttcaatctttctgagtgcaaccgtaccgccgccgactacgagtatttttttgttttcaatgtcaatataaaacgggaaatatgccattagttattctctccgcactttctgtagatttcaagaattcttgcaaattcttctgccgaaacatcggatttcagcttataaatgaatttttccgaaaaatctgacggcattgcgttttttacggactgcatacacggcagaaattcgtgaaaggcaaggtcttttttgagaacttcaatttcctcaaaaattattacttttgcactttcaacactgtcgagtttgagagcattgttctcgtttgcaagctgttttatgcagtcaatgttaatgagccttacaccgcttattttgtggatattttcgtcaatgtcgggcggtacggcaaggtcaataaacagccttgatttttcggtttttatattgttttttaaatcataatatgtaaccgtgtaatgcggtccgcttgtggcactgattacgcagtctgcaaagtcaaacgctttgtatctttcgtcataatcaatcacattagcacccgtattttcaaaaacagtttctgctttgtgctttcgtgaagtcacggtaacgcttatacctttgtgcgacaaaagatttttcacaacagttgaaccgaccttgcctgttgcaccgattacaaggacattcagctcaccgtctttgaattttgccgcctcgtttgacgctagagttgcaacggaaaccgatgtttttgaaatggcggtttcggtcttgattttttttgcacaggcaacagccgcctgaacgcacatattaagctcatatgcaaccgtgtcgttgtcctttgcaaatgcgtaggctcgctttagctgaccgagtatttcatcttcaccgataaccattgattcaattccgcctgccaccctgaaaagatggagcaaagccctgtcaccgtagaaaagacagatgtacttttttagttcgtcaaaatcaattcccgaaaaatccgaaagaacggtttcaaccgttttcacagatgattcgtctccgcaaaaataaacctcggttctgttgcaggtgcagagaatcaaacactcgctgatattttcagaataataaagttcgtcaagaaatgtctttttttgctcatcgggaaaggcaagcttctttctcacaaccacatttgaagttttgtgacttacgctcaggcagtacataaaaatttcgctccgttacaaataaaatccgacagtaaaatacacttttaaagttattttattactgccgacagctattgtcaattaaagttagtcagttattttaccactaaacctatctgtttggtatgttttgattatactacattcaccattctatgtcaataaatttcgggttttgcttgacaaaaacagttattacaatataaactatacaaagatacctcccgtcagcaaacagcgggagttttattccgatgtaaatacttattgtaccgataggaatactaaatgatttgaatatgtattaaggagcgtttttatgcttaatcagttttcaagaacacagcttttgattggcaaagaagctatggacaagctttcaaaaacaagagttgcaattttcggaatcggcggtgtaggcggatacacggcggaggctcttgcaaggagcggagtcggcgggcttgaccttattgacgatgacaaggtgtgccttacaaacatcaatcgccagatttttgcaacaagaaaaacagtaggcaaatacaaggttgatgttgcagaggaaaggctcaaggacatcaatcccgacataatcatcaacaaacaccagaccttctacactcccgaaacctcggaaaaattcgacttttcaaaatacgactatgtagttgacgcaattgacacggtaacaggcaaaattgagcttgttatgcaagccgacaaagccaagacgcctatcatctgttcaatgggagcaggtaacaagcttgatcctacagcgtttgaggttgccgacatttacaaaacctcggtctgtcctcttgcaagggttatgagacacgaactcaaaaagagaggtatcaaaaagctgaaggttgtttattcaaaggaaaagcctatcacacccgttgacgatatgacaataagctgtaaaacaaattgcatatgccctcccgggactgaaagaaaatgcacccaacgcagacaggttcccggcagtaccgcatttgttccgtcggttgcaggtcttatcatagccggcgaagttatcaaggacttgattaagtaaatataatttttaacaaagcaaagcaccgagagaaattaccctcggtgctttgcttgtttttataggattttttacagttgatatcgtgattaaacagattagatgataaccgattcttcctgaagtgatttgttacggagaatctgaacctcatcgcctttggtaatgaaaagccgataaagaaatacattgaccttttcccctacggtaatcggagtttcgtcaagtcctctgtacgcataaaccgtgcctccgtcacattttacggcaatttcgatattgtcgcctctgaacgaagtctttataacctcgccgacggatacagacgctttttgtgcggttgtttcgctgagctttgtcacctttacaaattcgggacggataactgcacggtcaacattatcgacaacatcaaaggtcttgaactttgtataatcgtcaagcgtagtagtctgaccgaaaaatgatgcggaaaatgcggtttcgggatgctgataaatgtcaatcggcgagcctatttgctcaattctgcccttgttcgtaattatgatttcatcggcaacctcaatagcctcgctctgatcgtgggttacaaatatacttgtaacgccgagtctttcaatcatatccttaagccatgagcgaagctcctgcctaacctttgcgtcaattgcggcaaatggttcgtcaagcagaagaagattcgggtttggcgcaagcgctcttgcaaaggcaacacgctgtttttgaccgcccgaaagctggcttggataacgcttttcaagtccttcaagaccgataagctttacaagctcgtttactctttccttgataaatttcttgctctttttctgaattttcagaccgaaagcaatgttatcaaaaactgtcatatatctgaaaagagcgtagttttggaatacaaagcctatgcctcttttgcttgcgggaatatcgttgacaacctttccgtcaattacaatttcgccgctgtcgggattttcaagtcctgcaatcatacgaagaattgttgtttttccgctgcccgaaggaccgagaagtccgataagcctgcccttttcaataccaaagtttacattgtcggatgccttgtagtcaccgaaagttttatttatatttttaagctcaacatacat

SEQ ID NO: 60 - DNA, 29256 bp, unidentified
  source 1..29256: mol_type = unassigned DNA
cgtgtgtcatgtagatttctttatcgcccagcatcaatattgcataatcggcaaaaatgggaaattcaagaaccatttggtcgacctcggtatcgcagttgccgcgtacgcaaagtatttggttttttatatgattgagaagggaaatgacttcctttggttcgtaaccgcttggcagattgtttcgcggaccgtgataaagtatatccccgagcaatataagacggtcggccttttcggctttcatgcggtctaaaagcttgcggcaatagaatgccgagccgtgtatatccgaggcaattaagaatttcatgttacatcacctttgaaatgtatctattacttcgcgcttgacacggcaaagttcggaaatgaacgccttgtcaagctctgtaagcttgtagttgttctgatatataataacgtctttgtatattttgcggttttcattgcaaatacattgaacaagaccgtattgctctaatattttttgaggaacaggcgatacccacataaaggtatttctgttttcggatagaagcgagaattggctggcgcgttcataaacatagattctgcgctttacttcgggtatttcttctttttttacttctgaaagcggcaatgaaggtacgtatgggtctgcatgagcgatctcgatatagtctgctaaatcggcatatgtcagcgaatctttttttgcaagaggggagtcttttcccattagcaggacataacgaaattcggttatcaactcatagcacagctctttttcgtcgaaggcgtccttatagtagtggtcaaaggcctcagcgtagcgtacaataccgagcttaaaatcgccctgcaggacatttttgagcgttttcatagaattggtttctttgtaaaaagcttcgaatttttcttcttctgcaaggcgtttggaaaattcggtaaatgcttccgaaatatagcttgaccgcggtcctgatacagcgaaacgcttcttttgcgtcgtgccgtctttgaacatgtgttccacagagtctacctgactcaatatgttttgtgcgtattttaaaaatatttcgccatccggtgttatgatcatgcctttggcggagcgttcgaagatagaaacgccgagagaggcctcaagctcttttagcgccctgctgaggtttggctggcctacatagagcttttcggcagctttgttgagcgaaccgcatgaagcgatttccactgcgtatttcagatacaaaagattcattgctacctccgccttcagtatgacatagttaataccgctatcattagtttatcatatggaaaaagcgatgtcaagagaaaataagagagccggtggctaaaataagctcggctctcattattatttttggtgtaaatatccgtttgaaaattatccttcgagaagataccgacatttttaaaaggcttgcagtgtggcgattaacgcgttgatgtcgtcaagatcgcttccttcggaaattgccgtggtaacgattgtcatgatcatatcttgtttcgtctcttgcttcgactttttgccgcagagatcgtcatacatacgttcgtaaaggtcaagcagacgctgtgaagtagccgcatgagcttttattgcctcgccaagcgaatcggctagtgcttgagcaccaatatctcctggacctcctgaacaaatctgaccgatttccttggctgtttcggcaaagaactccatgttgattttgacctcttctatgcgatcgagtacataatctatggtgagctttgtggtaggttgggtttcgtttttttgggtattctctactgtaatattattatctgacattcttaagtcctccgtattgttgtattccggcggacacgcaaggcatattttgttttcacctacgaagcgtgccctgccgttttttacaagaccttttgcccgtttcgggtaggtcgcttcataattatttccttgctcgtcaacaacgctgatgtttttttctatgggtgtctccccctcgtatattgaatttgcagtgcgaatgctgttttttatgatggggaaagaggtataatagagacaaccaagaaaaatgctgatttttcaagggttgtcacggttaattcaatttcgctatgaggttttgtgcgaggttggaaaaggcgagaaacagcctttggaaagtcaaaatggcttcttgattgcttattttgacccaatctgataagcgcacaaaatttgataaggaggttgaattagccgaggatggaaagcatctctcggctattcgtcgtgctataaaggataatgtgttacatgatatgactacataaaaaaccggattatcggatagatacaatgcaataaaggttttgtgtagtctgtggtacgaaggtatccagacttttattatagtttggatgtttcatatcgaaacaaaatgtcagaagaaggaggcaggtcatgacaattaaatttatgttcaattctcccaatgatacaagccttctgtatgcttgcacggatgaggttgaagagtcgcctttcggtggtgaagatgcgatcacagtggagataaggcgttcaaaggaatacagcgaagcgattctcgctgatgtgaaatcctgcttgtccggatttacagaatataagtatcttggttgccgagaacgtattgcccgtgaagcgtatcaacttacaataagtggcatgacatacgatgttttcttcgtgtttgacaaacgtgagggtgacaacatccaactgcacatcgaaattgaatctcctattatagaaaatcccgattttgagacaaggtacaataagactttggaagcgttgaaacttgctttgaaagatcgggtcagcaaagactggcaaggttgtacttggttgattgatgatcaatccgaaatgcttggagctgatctctatcatcgttttttcaaaatagaaaatcagttccgtgcgtatgcaaacaaagtgcttatccagcatttgggacagaactggcttgaccgtcccggtctggaacagtacaaggattctgtatgtagcatggaaaactcattcaagcagattgttccgcagtttgccaatatcaatacttctctcttgtcaatgaccttggaaacactttcaaaggttattttgaaagcggtaatctataaagaaaatactactttgacttccgctgaactcacaagattatatcagtatttagagaaacgtaacgaacaagcggcaaaagaatttgtagagaaaaaacgtgagactaaaatcaatttgtggaatgatgtgttttcacagtatttcactgatccggagcaattcaagaagcagctcaatcagtttatcaaggctcgcaatcacatagcgcataacaagctactgacattctttgctttcaagaagatgcacgatgaattgtcagcttttgaaactactctaacacaagcacttgagcagtttgagcgaatgaacgcttcagaggaacttcttgatacttggcagtatgagcaagagcaggacgaatacgatgaacagtattggcgtgatcgtatcttcggagagacgggggttgaaatccgtgatgaagatgaaatttacgaactgctttgtcagactgtagccgagttgtatgataccgtttcggatcggtatcattatgatccttgctttgaggtttctgatatggaaacgcccgtgaaagatggaacaactaaagtattcacggtaacaagtaatgcatctgatgaaaagctaaccatttttgtttcgattgtggttgatgatgatatggacacatcaagttatttgaccattgaagcgaagcacggtgaggatgtaattgcaaaggttgaatgcacttaccacaacggcgaaggacatgagggcgaagaaggtctttgtgtggctgacagcgattcggaatatgacgatactgaggttcacgattttcttgaagatttgattgcgtatattgaagaagatttgaacccttatgtgaaacaagtgtcagctatggagtacgaatgcggcagacatggcggcacatctcccgttgcggattttgcctgccaagaatgtggcaaggatggtgtgtctatcaccgaagatctattaccaatcggaaaatgctgttattgcggttatgagaatgagcattatgtatgcgaactctgcggaactgtgtatgacgatatgggtggtgatgaacacctctgtaatgggtgtatgccgagagacgattaacgattgattttgaaaggatggaaataaaatgaacaagaatttgatgattgtaggcgcaagcacatatggcgttgttgcttctgagattgcggctgacatgggatgctttgaaaaaatagatttcgttgatgacgaaagaaaaacaacccccaacggcatagaggttgttggaacaacacgggatattgatgaactggctatccaatatagtaatatcattgttgcgattggcaatccggaagtcagactttcattgctcaaaagaataaaagaagaaacaccctatcgcattgtttctcttgtttctcctaaatcgtatgtttcgccttcggcgcaaattatgaatggctgcatcattgaaccaatgactgttgtacatacaggatgcgtgatatgccccggttgcatcatttctgcaggagccattgtgaatcatgcaacaatgtgttgtgacggtgttcatgtggattgcaatgcaacggtggagggatactgccttgtacctgctggaacaaaaatttgtagtggcgaggtgtacaaacgcaaagacactataaagccggaggatttgttctttgatccgcaaaagtgggcagagcgtttgactgacatttcaaaacgcacaccaaaggatatcgatggattagaatacacatttgaaagtggaatgtaattaaagcgggagatattttgagatgtataagcacgttataaagagacttattgaccttattctgtcgagtgttgccataatcgtcttggcacttccgatgctgattatcgccattgcgataaagatagacgatcccggtccggttttgttcaagcagaaacgagtcggcaagaagaaaaacggcgagattacatattttatgatttggaagttccgcagcatgaagatgtccacaccgcacgatacccctacacatcttcttgaaaatcccgatcagtatatcacacgtgtaggacgctttattcgcaagacaagtcttgacgagcttcctcaaatttatcaagtgttcacgtcgaaactatccgcaattggtcccagacccgccttgtggtcgcaagaggatttggtagcggagcgtgagaagtatggagctaatgatattaaacccggcatcacaggatgggcgcagatcaatggtagagacgagcttgaaattaatgtgaaggcaaagtttgacggcgagtatgctgctgctttgaactcaggtaaattcaaaggctttgcgatggatgtgaagtgcttctttggtacgattgtgagcgtgctgaagtctgatggtgttgttgagggtggaactgggaaaatacagaaacttaaagaagatacaaaggaagaaatggagcatatcacaaaatgaaactaatctctattattacacccgcttacaacgctgaaaattatatacggagtacgatagaaagcgtattatcacaaacatatcataattgggaaatgttgattgttgatgactgttcctctgacaataccgtcaaagttgtagaggaatattgtaatatagaaactagaattagacttatcaagcacacccaaaatcaaggagtcgcaggtgcaagaaatacggctttgtcacaagcaaaaggtgaatacatcgcttttttagatagtgatgatatgtggatgcctcagaaattagataggcagtatcattttatggaagataatgactatgtattgacatatacttcttatcaaaaatatatatctgatactaacgaaaaaggaaaaatcatttatgttccaaagaagatgacacgtaacgcaatcttctataacacagctattgcttgtttaacggtaatggtaaacaaatctaaagtcggcaattttcagatgcctatgctgatacattctgaagaccaatgtacttggcagtcaattcttgccagagggtattctgcatatgggcttaatgaaaatctggccttatatcgtgttagtgaaaattctttaacagccaacaaaggtaaagcagcaaagcatcaatggaatgtatataggaagttttataacttttcaatattaaaaagtggcatgtattttcttagctatgcaattcatgctgttataaagcatttataagggaatgatattatgttaactatagtagtggactcgtttgatggatacagcgatttatggtcatgctttttttctgtttttaaaaaacagtgggaaacttgtccatatgatgtaaaactcatatcaaatcataaaagttttgatggaatagacaccatcaatgttggtgatgaaatttgttggtctaatagaacattaaaagcgatagaacaaatagagacaaactatatacttttgctattagaagactatttgtttggagaacctgttgataatcgtgagattgaaaatgcactttcatttatggaaaaagagggggcaaaatatcttagattaaccaacatccctaagagtcgttttaatcataaagataatatttttccattgtatgcagatgaagaatatgctgtcaatcttcaagcatctatatgggaaaaaaattttttgattgattcactaaaaaaacatcctggaaatgcatgggaatttgaaattggttttttgaaatccgcagtacatgctgaacatgctgtgttaagagggtgttatggattggctgaagatcctcttcatatccgtaatggggtattaaagggcaagtggtttccgaaggaaatcaaatactttgaaaagcagggtattaatattgcgtggcagaaaagaggcaagttatcttttgcgcaagtgttaaaatactatgtttctattggtataaagaataaactatcatacaaaatgagaaaaagagcaaaaacattacttaaaaaatttggagtgaaattcgcttccgacttataagtgaggacaagatgaaaatattatggatcagtagtatagcatggaagaataacggagagtatccttatactgtgaatggtgccggagcggtatctggctcgttgtttcaacagacgatgattgaggggctggaaaaactcggtcactcagtaaatattatttctgattacccttatgctccaggcgttaatgttcacagtcaaattcattggtcacataacgaaaattctgctgatgtggcggtgaaaacaatagatgtaccatattattctctgatttataaagcccaatctttaaagagattggttaagaaaaaaataaacgagacatcatatgatattgcagtagcttatttgattcatcagccatatatggatgcaataacatatgctaaagcgcttaatcctcatataaaaaccgttttgatatgtccagatttaccagacatgatggatatgtcattggcacagaaaaaattgaagttgcttttgaaaaagcttgatatgaaacgtgtggttcggttatacaaaaaaatggatggctttgttctgtttgcagatgctatgaaggaacgaattggtatcaccgaaaataaatatattgttatcgagggagtagctactgtaggtgatttggatatcacaccgaccgaaaaagaacattttattatgtacgctggaactttacatagaaatattggaatagaaaatattattgaatcaattgattatataaatgatgcttcattgaaactaaagctgtacggaactggcgagttagaggattacataaaggaaatagcatcgaaaaacccacgaataatatacggaggttttattgatcgtcaaacactgtttgaagaacaaaaacgtgctgttgcacttgttaatgcaagaaatcctaaagatgcatatacaaaatactcttttccttcaaaaacttttgaatatctttactctggtaccccatttgttacaacgaaactggaaggcgtaccgaatgagtatcgccaatacttgtatgaaacggaagataatcgaccgcaaagcattgctaaagttattaatcaaattcttgcaagcgatgagaaagtaattaaggataaaggattacaagcgagattgtttgttgaaaacaaaaaaaataaggaaagacagtcggaattactaagtgactatttccaaacactaataaagtgaacattaggctgatatatttaggagaatttacaatgaaagtaatgcactattatacttatccggaaaacgcaggcggtcctctgacatacattagaaatataattgtgagtgagtatttatcggatattgagtttagtgtatgctatcaaggtaaacctgcatcgcaaattaaaaaagcagatattaggagaattataagtgatattaagacattttctccagatattctacatgttcacggagtacaatcagaaggatttataggtgtttatgctggtaaaaaagctgatgttcctcatatactaatgactgtacatggactccaaatagatgcacaaaacataaatattatcaaaaggatgttatttaaatattttattgaaccgtatgctttaagaaactctgatgctgtgtattgtgtatgtgacgaaatggctcgccgcccctatataaaaaagcattcaagagtattattgccaactattcacaattatattacggacaagtttttgaaaatgcaagtagaagatattggtgataaatcggataagactattgtggctacggttggtcgggttagttacgataagggaatgtatgagttggaagaagtaatacgctcggatactaacgacaatgtccaatattgggttattggaagtggagaatacgaagacaagatgaaatcaaacctctcacctcagatcaaatctggaaaggttatattttgggggcagcaaaaagaagtaaaagcatttgttgccaaagcagatatatttttatttttatcgcatcatgaaaatctttcgattgctttattagaagctgcgtctcaaaaatgttgttgtatagcaacaaacgtagggggcaatccggaagtaatatcaacagatattgatggaatactcattccccctatggatgcgaaatcagctttatatgctcttaataaagttattcatgattatgaatacaggcaagaattgagcaatagtttatataataaagttttgtccgaatatggagaaaaaacttttagtaaaagactgttaactgtatattcaagtatggctacacaagaaatgaggtaaagatgacacagtcaaacaatattatacgaatgccaaaaataagcacaagcgttcatagcatttgtgtgtttatgattgctgtatatatgatgctgttaccattcgaatatgtattaacttctgaagcagggacacttaacaaatatataggtgtcttgattatgggactatgcttcattagtggaactttccgaatcaaatttaaagtcagtaacatactaattatttgtttcttgatttacggtgttatgtccggcttgtgggcaatttcaacatcgtattggagtgaggtgttttttatatacttaaaaaatgccgcgttatttttggtcgttgctcaatgcaaattttcgaaaaaacaaaataatcttataatgtccttctttgtccttggggcagtcttactcgccttatatcttatgacttcatctaatgttacaatagacccttttagtggacgaactgtaatctctgtaaatggaggatattttgatcccaattacatggcggcagacataatcatgccaattggatatatgtatggcatattctatgaaaatataacaaaaaagaaatatatgaaatcaatctttgcggttgttgttatgctgattctgttctatattgaaattctgtctggcagtagaggaggattattagctattgcgggaatgatttttgtaatcactgtattaaatatgaaaaatagagctgttagaagaaaaatattatttattgcattgattgcggttgtagttcttactgtcattatgcagatgcttccagagcagattttggatcgtttttctttagagagcttattaggtgaaaaagattcaggtggcggtagattggaattgtgggatgctgcttggagtggaatcaaagacaactttatatttggttatggcgcaggttgcgccgttccggctgttggaatatatcatggtataaatcgagcgtcccatagcttgtatttatcgtctgttttggaatttggtatttttgcttgtttgctttatattcctatcctttccgagatcaaaaaatcatataagaataaacaatacatggaagtagggatggcattcggtatactaatagcaagtatatttttggacgcattgtccactaagttcttttgggcgtttttgataattctgtttacaagaaattcaaacgagggtgaagatgttaaagaaaattagtttaattattggatatatttcatttaaaatcaataacatgatcgaaagatgcagaaatcaatatatattgaatcaaactcaaacgcaggggggtgccatattggtgccaagtgtactatcacacaccctaaaaatgttgttttaggaagcaatgtttggataggaaataattgtttattcatgtgttctaaagcaaagataataatggggagtcacataatgttagctcccaatgtatccattgtaacaggggatcatagaatagatcaactaggtacttatatggattcagtgacagataaattagaaaagaacgatcaacctgtcattattgaggatgatgtctggattggaatgaatgtgacaatactaaagggcgtaactattggtaggggcagtgtaattggagctggcagtataattacaaagaatgttcccccgtactcgatatgttatccagatgcgactaaatgtaagagaaaaagattttctgaaaaagatattattttgcacgaaaagatgatagagcagaatagaaaataggaggacaactatgaaagttgggatactgacattccctcattctccaagctatggtgcatcgttacaaatgtttgcactttataaaaccatagaaaaacttggaggcacaccgtgtgtgttgaattatcaaaatcgatatatgcgaagcaaacatcatattgagcgtgatcctgttaaagctaagttattgaatattgtggggcacaggacatcaaaaaaatttactcaatttgagaaaacacttacttggctgccttcaaaaattatctacgaagctatcaagcttcagtctattagtgctgacttagattatgttattgtcggaagtgatcaagtatggaatcctgctgttactggaagtgatactacctattttctcgacttttgtgaaaaaaagaaaaaaatatcatatgcagcgagttttggtgtagatgatcttgaaccacagtttgcaaaagcaattacagaattactttatgacattcccgcactaagtataagagagattaagggcagagaaatcatcaaaagactaactgggcgagatgtgtcggttgtattagaccctacttttctgccaacaaaagaattatgggatatgactgtttgcacaaaacctatagttaaacaaccgtatatattttcatttgtttttaaccctaatgatgagaatatatcatataggactcgattgtcagatgaaacgggacttccaattgttagtatatccgataatccttttaagaagtccgataaaaactcgatatatgtatctggcataggtcccacagagttccttcgtattattagagatgcagaatatatagtaactgattcttttcatggaacagcattttcgataatatttaatcgtccattttatgttagtttatctacaaaaactaattcaagactagagactcttttatcaacattagatttggaaaatcgcataatatctgaatgtaaaacttttgataaacatatcaattacacaaaagtgaatcaattaatttctgtatacagagaacggtcgttgtcatttttgcaaaatgcactatttggggtggacaacaatgagcagaagtcgaacagttgagtttttgaaaggaactgtatcaacagttcttttgcaactcgttattacagcatctggctttattataccaagggtgatgcttacggtatatggttcggagataaatggtgttgtatcttcattaacccaatttataaactattttacgcttattgaagcagggttaggaggagcagcaatttttgcgttatataagccattgtctgagggaaatcattcaaagattaacgctattgtagttgcttcgaaaaaattatatatgaaatctggcatgatttttgttggtttgatttttattctcgcctttgtttttccaacgtttactacgctttcttcactaaatagattggaagtttctttactaacattcattattgggatgacgggagtattggatttttttacattggcaaaatatagagtattattaacggcagatcagcgagtatatatactttcattagcgagcaccatatactatattctttatactggaataatcgcttttgcatcattttttaatgtgaatattgtcgttattagagcaatggctttaagcgccatgcttgtccgttcaataatactcatcatttactgtaggaaaaaatatagttggattaattttaaggaaacaccggattattctgcgttaaaatcaaagaatgatgttctatatcagcaaatatgtggaatggttcaaactggaatgccaatagttcttgctacatttataatcaaagattttaaggctgtgagtgttttcactatttacaatatggtgttaacaggaataaatggtgtgttgggtgtgttctctacctcgttggcttcaggctttggcaatctcatagtagataaggacaaaaatcttttaaggaagacttacaatgagtttgaagcaatatatcaaatattaatagcaattgtatattcaactacattgtttatgattatgccttttgttcggttatacacagcagatgttacagatataaactacataattcctatatttgcatttctttctgtttggaatggagcattttacaatataaaaacaccgcttagtatgcttgttgtatccgctggaatgtatagggagacaagagctcagaatacgataacagcaattatcattattgcacttggtattccattgacttttttgtatggtcttaatggagttatgattgcatcaatttgttctaatctatacagaacaattgactttatcttctttgtacataagcatattactgaagacagtccaagaaacagtatatggcgaattgtgaaagtcttattatgcatgagtatagcaacggttttaactattgtatttagttttcagatcaattcgataattagttggataatacacgcaattttaattcttatttcttgtgttatagtagttggcattattatgggagtttcggatagaaaatggctatataatttgtttattcgttttaaacgaatatttgggaggtgaacatatgcaaattacaaacatggagcagtgtgttggttgtgcgatttgcgaagcctcctgccccaataaagcaattcaaatgaaatatatgacggaattcggaggatttcagtatccttatatagacgaagataaatgtgttttgtgccgtaagtgtgtttcgatttgtacggcaaataagcaagtagaaatgtatacaccttttgaatacgaaatagcgcaaacgaataatatagatgatttaaacactgcaacttccggtggtgttgctacttcattagtaaagaattttattcaaaaaaacaatggcatagtatatggtgcggctttcgataacaatatgagggtgcgacacatacgatgtgcaacattggaagaatgcgatagactaaaaggctcaaagtatgtgcagagcgatatgacttctattcattcttctattcaatcagatttaaataataaccgaaatgttttatttatcggaactccttgtcaatgtgcagcaatggtcgcatttagggattgttcaaatttctatatgtgcgatttagtatgtaatggagttggaagtcctgaagtattttacaagcatttacaatatatcgaacaaaaatataagggaaatgtgactaactatgtgtttcggcccaaaacgtctcattacttagaaccatatgaagttgcagtgttaaacaatgcaacttctgtaaaacttatatctccctgggaaaaatggggaacgctctactataattctcttgttatgaggaaatcgtgttattcatgcaagtatacctccgaaaatcgagtgggagatatatgtttatcagatattccagaacaactattgaataattgcaaattgaaagcagatgttaaacgatatggagctacgtatataagtataaatactactaaaggtattacattagcgacacttattcatgaacaatgttctactgaaaaagtagatagagttcaaaaaatgagaatgaaagaaccaattccaagatctccacaaagagataatttcttaatgctttgccaagagcggtcgcttgaaaaagcaaagttgagggtgtttggagcgaaaacaaagattaaaggtatatttattaagttaaaaaataatcttagctaacaaaggagatactatcatgtcattatttaccaacaaaactttacttattactggcgggactggttccttcggtaacgccgtcctcaaccggttcctgcgtacagacatcggggagatccgcatattctcccgcgacgagaagaagcaggacgatatgcgtcacgaatttcaggcgaagatgccagaagttgccgagaaaatcagcttttatatcggtgatgtgcgtgatctcgcatctgtcaaaaacgctatgcacggcgtagattacatattccacgcagcggcgctcaaacaggttccgtcctgtgagttcttcccgattgaagctgttaaaactaacgtactcggaaccgaaaacgtacttaccgctgccattgaagcgggagtaaagaatgttgtttgtctttcaactgataaggcagcataccccgtcaatgcgatgggtacatccaaagccatgatggaaaaggtgatcgtagcgaaagcccgtacaactaataccacaaaaatctgctgcacccgttacggcaatgtcatgtgttctcgtggctccgtcatcccgctgtggattgaccagatcagaaacggcaatcctatcaccttgaccgaacccaccatgacccgtttcatcatgtctcttgacgaagcggttgaccttgttctgtttgcatttgaacacggtgaacccggagacatcctcgttcagaaagctcccgcttgtaccattcaaacacaggcagaagctgtatgtgagctgttcggcggcaagaaagaggacatcaaagttatcggtatccgtcatggtgagaagatgtacgaaacgcttcttacaaatgaagaatgcgctcacgccatcgacatgggcaatttctaccgtgttccttgtgacaagcgtggtttgaattacgataagtattttaataagggtgataccgagcgtaacacgttgactgagttcaattccaacaataccgagcttctgacagtcgaacagaccaaggcgaagattgcaagcctgcagtatatccaggacgagcttgcaaagggtgcaaaattatgatgaacattcttgtgacaggagcaaagggatttgtcggaaaaaatctttgtgccgcactcaaaaatattcgtgacggcaaggacagaacacgtccagacctgaccataggtgaggttcttgaatatgatttagataccgatcctgctcttttggatgaatattgtgcgaaggcagattttgtgttcaatcttgcaggagtcaatcgtccgcaaaatccggaagaatttatgcagggcaatttcggctttgcgaatacgcttcttgataccttgaagaagcataacaacacttgtcctgttatgatttcatcctctatccaagcaacctgtattggacgttatgacagtgattacggacggagcaaaaaagcgggcgaggaattgatctttgcatacggagaagaaaccggagcaaaggtgctggtgtaccgcttcccgaatctgtttggcaagtggtgcagaccgaattataactctgccgttgcgaccttctgcaacaatattgcaaacgatcttcccatcactgtgaacgacagaaatgcacagcttgaactgctgtatattgatgatctcattaccgaaatgctcgatgctttggaggaaaaggaacatcattgtacctttgatggcatcgacacggtgctttgtgatgacgggaaatactgtgctgcacctgttacgcataaggttacactcggtgagatcgtagatttgctcgatagcttcaaagagcagacaagcactcttgtcatgccagaaattccgtataacagctttgcaaaaaagctttacagcacctatctcagctatcttccgaaggaaaaagtttcatttcctttgaagatgaacgaggacgcaagaggcagctttaccgagcttctgaaaacagagaaatgcggtcagttctcggtgaatgtttccaaacccagtatcacaaaaggacagcactggcacaataccaagtgggagttcttcattgttgttgccggtcacggacttatccaacaacgcaagatcggcacggatgaagtgctgaactttgaggtttcgggagataagattgaagcggttcatatgctcccaggatatactcacaatatcatcaatctttccgaaacggaaaatcttgtgacggtgatgtgggcaaacgaacagtttgacccgaaccatcccgacacattctttgaggtggtggaataatggaaatgaatataaaacttgattacagcgatgtaaaattcaaagacaacggcaagctgaagcttcttatcatcgtaggcacccgccccgaaatcattcgtcttgccgccgtgatcaataagtgccgaacatactttgatacgatccttgcacacacaggtcagaactatgattataaccttaacggcgttttcttcaaggatctgaagcttgccgatcctgaagtctatatggatgcagtaggcgacgatctcggcgcaacggtgggcaatattatcaactgctcctacaaactgatgaaccagatcaagcccgatgcgcttctcattctcggtgataccaactcttgtctttctgcgattgctgccaagagactgcacatcccgatcttccacatggaagccggaaaccgctgcaaggatgaatgcttgcccgaagaaaccaaccgccgcattgtggacattatatccgatgtcaaccttgcatacagtgaacacgctcgacgttacctccatgagtgcggactccctaaagagcgcacctatgtaacaggttctccaatggctgaggtgcttcatcagaaccttgccgaaatcgaagcaagtgatgttcttgaccgcctcggtctggaaccgaagaaatatatcctcctctctgctcacagagaagaaaatattgacaccgaaaagaattttataagtctttttactgcgatcaataagctggctgaaaagtacgatatgcccatcctttattcctgccatcctcgttccagaaagcgtctggaagcaactggcttcaagttagatgaacgtgtccgcatgaatcagccgcttggcttccatgattacaacaagttgcagatgaacgcttatgcggttgtttcggacagcggtacacttccggaggaatcgagcttcttcacaagcatcggtcatccgttccccgcagtttgcattagaacttcaacggaacgtccggaagcacttgacaaggcttgctttattctggcaggtattgatgaacacagcttgctccaggctgttacaacagcggtggatatgaatgacagcggggattacggtatccctgtaccaaactatgtagaggaaaacgtatctactaaggttgtgaagatcattcagtcctacaccggcgtagttaataagatggtttggagaaagtaaacatgaaaggtgaacgatatatggatgagaaggaagtacaacatatattgatagagattctttatacagccgtaaacgagctggaaaataatgaatcaatcaaagaaaagatcacacccgatattcttcccgctgtatatcgtttagcaaaaaagcatgatttagcccatgtggtttctactttcgtttataaaaataaaatagagattgaccaagagcttcaagcaagactacaacgagaagaaattatgtcagtctataggaatgagcagatgaagtattcttttggggaaatatgcgctatttttgatgaaataggtattgcgtatgttcccttaaaaggttcggtaattcgtccatactatccctatgaaagtatgcgaacaagctgtgacattgatattttgattcatgagaatgatttagaaactgcaataaccggtttagagaataaagggtatcggtgcggtgatcggaattatcacgatgtatcactgtattccccaagtaagattcacttagaattgcatttcaatattcaagaaaacatggataacttggatgcagtattaaaagacgcatgggaatatactgtaccaacaaaaagttctcaatatgcgttttcaaaagaatttttcgcttttcatatttttgctcacatggcatatcattttgtctccggtggctgcggcatacgttccttgttggatatttgggtattggaacataaaatgggcatttcatattcatgcgcaaaagcattgttggagaaagctggtatctatcaatttgcctcagaaatgagcaaacttgcagaattgtgttttactcaaaataatcgagataccttttctgatactgtactcaaatacatttttcaaggtggcgtgtatggtagtgccgaaaatcatattgcagtgaataaatcaaagactgggggttctgttggttatgcggtaaagagactattccttccgtataaatctatggtgatagcgtttccttgtttgaaaaaagctccctatttactaccgttttgttggatagtaagatggataaaagtgatatttggtggcaaatccaagcgaattatctctgaaatggcgtgtgccaacagtatgtctgacgaaaaaatcaaagaggtatcttccatttgttcacggttgggattatgagagatgaatgtgtaaatagaaataacagtgtgcaaaagaggtgattatagtgttcaacacattaaaagaaataggacagaaattcagacttccgggtgagatatattcctatgatgccattactatgggaaatatcaattccacctacaaagttacatatacgcaaaacgataactcattgaaatcctatttgtttcaacgagtaaacacgaatgttttcaaaaatcccgttgagatcatggaaaacattgaccgtgtaacgacgtttatccgcagtaaatatcccgatcagataacgcttcattttcatcatacagatgaaggcttgaactattatatgtatgagaaagatgcgttttggcgtgtagtgaattacgttgattctgtaacatttaacgcttctgatgatcttggtattattgaatcaacgggaaaggcgtttggttacttccagacacagctttccgattttgatggctcagttctgtatgaaacgattcccgatttccataatacaaaaaagagacttgatacattgttttctcatgtagcagaagatccctgcggacgagcagcagaagtacagaaagagatcgactatatcgcttccgtccgtgagaaagccgctgaactcagcgtacaatttgcaaacggagaaatccccaaacgtgttactcacaacgataccaagtgtaacaacgtcctttttgacagaaaaacaaaggagccgattgttgtaatcgacctcgatacaattatgcccggaatgtcgatgtatgactttgcggatgcagttcgctttattgccaatactgcggtggaggatgagccggatacatcaaaagttttctttgatacagcaaaattccgagcatttgcaagaggatttatcggagctacacacaaatcccttgaacctgttgaaatcaccaatttggttaaagccactttctccattacgattgaacttgcttccagattccttgacgattatattaccggcgatcagtatttcagatgcgcttatcccaagcacaaccttgttcgtacccgctgtcagttgaaactggcagaggatattgaacgtaagtgggacgagcttgaatggatcatacaagatattatcgaaaaaatgaaatagacatatcaatttcacaaatacatggtataataccaaaggcagagccacctctgcctttcattcggcatatcgaattgaattgaaacggaaacggaagtgagaagattggcaagaccaaagaagaatatagaaacaaatacagatgatctcatatcacagctcatggaagctatagcagacacctatctgaatcccacggagaacacggcagacgagaacggacggatgtatctcaacctgcttgcagaggaattttccatgactccgatcaaagtgcgaaaattgctcatatcctccggcgtgtatcagaccgatattagcatgagaattaacgaactgtataaaagcggtaagactataaaagagatacagaagatcgtgggactgagtgccgcatcggtcagcggatatttgccgtaccaaaagaccgtgtataatcttgaagtttcaacggacgttgcaaaccgcctgcgtaaatatcggaaccgcaaagcaatggtggaaaaacttgccgccgaggtagaagcgggagcagaacaaacaaaggatttgttgtgggaaaccttgattgcatttgaggactaccccttcaaaacggcaaagggactacggtattactatactgtcaaaggcaacgagcttttcatatcccgtaaagaaaaatccgttacccgatcaagtgtaaatatggcgtttgaaacagcggtcagactgcagagggagggttccgagatcaccggaccgaaaatgctcggatgcttcggggcaagctacttgtacccgattttcatcagaatcggagtgatacgtgacggaaaggaaaagacatagcgttagcagaaatcaatcgcatgacacaggatggggtcgggcaatattgtccggctccatttttttcgcatattgctatgtcaaattttcatcctcaccgcctgctgtttttccgtttcggtgcagatgtcctccggacacctttttgaagcgtcagaactgtctgactgatctataacataaatttttatgtttcaggtcaaattttttcggcaaattctggtgtgccacatcaagagttgatttgtcacataattcaaaaaagtgaggtgttcgagtataatatatgtataagataaaatgcaaggattggagggagaatacgatgctcacagaaatgcgtttggaagaatgtgaactagactgtgccttgatcggcaaacgagtccgcacagctcggaaagcgaaaaaggtcacgcaggaagaactgtcggagcattgcggctgtactcccacccacatctgcaatctggaaaacggaaaaatcggcgtttctttggaattgctctttaagattagtatttatcttgataagagtatggactatttcgtgatggacaacgaaaatgccaatccgcaaatcaaaatcgaaaacaatattgccccgaaattgaagcaatgcgatacgcaaatgctggatatggtcggcagcttcattgacggactcattacatacaaagaatcggttctttcaaaaaaagataaataacggtgtatgtaaacaaggaaatcaaacacagagttgtcaggcgcaaaaacttgtcagctctgtgttttcatataaattacttaattacaaggaggattagcttaaatggctctttttcaaaaactgcagcgaaccgtttgcaaactgacccgccctgtggttcaaaaagcaaacacaacagaacttgcacagtccgaggaggacgaagaaacttgcgattatgcggtggcactgcaaaactgtctgattggtcttgccaacgaagtttacggtgttgccgatccgagggatatatccggacgtgtcctgcgccaagcctgcgatttctatgatgcggattggtgcggactttttgacgtggacagaatgttaaaactgctcgttccgttctggtggtacaaccgcacaacgggaggtatgacgaaaacaaagctggatgaaggcggcgtttacggtgactttacaaggtggatggatgcgctgaataccaacactcccatctacgttgacgatatagagaaaatcaaagacagtaatccggaggaatataccgtatattccaagcaggaggttcggtctattcttgccgttccgtaccataagcgggaaaagggatttttgcttttgcgaaatcccaagcggtacggagataaacccgaaatgcttcaaattatggcaaacattcttgtggctgaaatcaacgagcagaagcatttggagcgcatgaaagcagagagcgaaagcatggatacaagtgccgagattataattaaccttttcggcggtcttgaaatcatcacaaataaaggcacattgagcgaagcggaaatcaaatccccgcttgcctgtaagctgcttgtcctgcttatgatgaatcggcataggagtatgaccggacgggagcttgccgatacactttggccggatgcagattacaccgatcccacaggaaagctccgaactctgctttatcgtttccgaacaaccttccgtctgttctctgataaggaattgattgttacgtctgcaaacgggtatcgcatcaatagtgaactgaccatccgtaccgactatgaggattttgaaaaaatctgcgatgtcagcaaaaaagcgcatgatcggtatcagaaaaaggaactgctgtgcaaggcggtaaaactctatcgtggcaagttgttcccgacaggaagctgtgagcattggctgcttgcctgcaactccaaatatcatctgcaatacctgtcaatcgtggaggaactgatgaccctgcttcacaccgaaaagaattattccatgatgcacgaatacgctatgatggcggtaaacgtggaaccggataatcctactgtattgttctggctgatcgttgctctgcggaagcacggtgcaatcgacatggcaaaggaacaccttgagtccgcaagaatacggcttttgagagaagaatatcaagagcttgaggaacggctgatcgctgtgtaatgaaaataacggctcatgtgacggcgatataacgcaatttgaaaaatatttcaatataatttttatatcacggctcgtataacacctcatataacccctgtttggtataatatccatatcatcatgagacggatataccaagcaggggtattttttatgtactcacgatgaccgagaaaattaaacacaaggaggtaatcatgagcgaaccacagcactttgaagtgcgaaccgacgacaaccgcctgttctgtatggcgagactgatcgaaggggacatacttctgatcttaaaatccgcagggaaagaaatccatattccctatacggatattccgagacttgtcgctatggcgaggaaacggaaaatcggtcaagcaagataatgaccgttacggagaaaacaaccgagtgtatgttttcccgcaggggacaatccccatacatatccatatcgtctgccaatgagcgataccgatatattgagtaagcgccggggtggatatagcaatcgcagatgatctgcggctgctgtgtctgccccggtctttttatttcttggcaaaacaataaaaatatcattctccgagttgcaataggagcaaaggatacgcatacggcacagacaaacattaagggttggtttgtgtccgagcaagtcccatgctttattgcgctctttttttgtgctttcgtggggtctgctctgcgagagttttttcttttggtcatgcgtttctatgctccgattgcaatttggcaactgaaaggagcagagattatgactctcaaagaattacagaaccgtattgaaagaactgcaggtaaggatttaccgactgccgcatggcttcgtgccggcaattcaccacttgttgtcagccgtgaattggagggcggcacaaaactctccgtgtatcagaacggatttgccctttatcagaccgagggaggaagcacggtgttccgtgtggatcattgcggcggttatatctatttcggaagaaatgagcagaccgagctttccgaggactttttcgcaaataccgattggtgggttcgcttgctgatcgaaggcgaggacagattgacccacaatcgcaaagtcctttccgaaaaatatgaatacttttacgagagtgatccggaaattttcaataacatctgcgtagcagaatcttctccccaggatgcgcttatgacaaacgagcttctggaaaaagcattctccatgatgaccgagagacagcgggcggtagtaaccatgtactacattgacggcatgggcgttcaagaaattgccgccgtttacggtatctcacatcaggcagtttcggtcacattatcggacgtaaaaaagaaatttcaaaaaaatcgaaaaaatttttgctgactaccttgcaaaacgcctttccacgatgggttgggtgaaggacaacaaccaaaagtccttacatcaatcaaatcggaggaaacgattatgtcgggaaaaatcccaaaggaaagagaacgctattttgtacgcctggattcgggcgaggtttgtgaagtcagccgtgaagtctatctcagctattacgcaggagaacggcaggaacgctatcagagagaacgtgacatcaagaacggacttgtcagcattgaagcaatagcagaaaccatgtttgacgatggcgagggatgcggatatgactttattccctcggatgaggtaagcattgccgagcaggtagtccgagacatgatgatagaaaagctctacatagcacttgaccagcttgccccggaggacagacatctcattactgcgctgttcttcgataacgtcagtctcagatgctacgccagagaaaacggcgtaacccacagaaccgtccagaaatggcgtgatcgaattttggaagatttacgaaaaatgatgagctaaatcttcattctcggtagccaacagccgtttttatcggcttggtagtaggggcggtgataaagaaacatcaccgtaccgcttgttccttgaaaattccatatacggtactcaaatacgaaacagctatgaggagcgagtcggaggtatgccgccatgaccttttcttgtgggaatttcccattacagattagtgagcgaacagcagagcgagagcgataaccaaaacagtccacctctggtcacggactgatcgccatgaccgtagctgggttaaagatacttccgttccgaaagggcggcttggtgagatccacggagagccgacaggctatgatgccatgtgaccgatggcagtttgagtattcccaagtgtccgggggcgagagaatacggacacaccatgatgttaagaataaggactgcaaaccttttcataacagcagattccatgtggaggaaccataaccaattcctccatattcatgtgctgttatgcagtacaaattaacacgaatcggaggtatcaatgaaagctgcagtcattattggaattgtcgcttttatgcttgcggatacatttctcatgtggtgcttgcttcgggcaaacgctctgtatgagcgaaacgaaaacagacacggggtatccgcagataacagcggcgagagaaaggagacacccaatgaagaaacgtaagaaatcctttgaggaaatgatgaaaccgttctgccttgtccgtccgagggacgagatcggggcgagaaagtgcggtcgggagtgctgcggaaactgccgaacttgtgtgtatcacagaccgcaccgaaaagacagactttgcgtatttcgtgaatgcccgtttgtgccgggtctgtacacctctacatacaagaccagaatggagaatcataagcgagatcgcaggcgaaccaaaaagtgaagccgaaggcagcaaacaaacctctttcaagcgcagatgaacggttcccgttccactatggaggggaagccgatcagtacaccttttatcggatacccaagcggatgtttgacgatccgatgttgaagcagttaagcaccgatgcaaaggttctgtacggtctgatgcttgaccgaatgggattgtctctgcgaaacggatggtttgacgaggaaggacgtgtttacatctacttctcggtggaagaaattatggcaatgcttggctgtgccaacgccaagtgtaccaagctcctgcaggaactggattcggaaaacggcatcggactgataacccgtgtcaagcaaggactttgtaaacccgatgtgatctatgtgcataagtgcatcaaccgcatttcagaatcaaatgcccggacatttgaaaatcaaatctccggaggtttgaaaagcacatcacagggcatttcaaaatcaaacgctaatgataattatatcaataatacttattttagcgatactgagtccatcttttcagaaagagccgagccgatgggagagcgaatgcgacagcgtgaacggtataaggaaatggttctggagaatatcgactatgacattcttaaagaagaacccaaacttgaccgtgaacagcttgacgagattgttgagctgatggtggataccatctgcactacgcaggagtatatcatcatcggcggcgataagaagcctgcagaagtcgtaaaaagtcagtttttgaagctggatgcgggacatatccaatttgttctggactgtctcaaagaaaatacgagcaaagtccgtaacatacggaaatatctgctctcggtgttatacaacgcttccatgaccatcgacaattattattccgcactggtaaaccacgatctctacggtgggtaacatcttgcacgaaacgaagggagtgatgcgatgcaggaagaagtcaatgataaaaccatagcactatccgttaagacggcaaagctgacggggacggtgctgaaagttgccttgcagaagtttctttccgaaatggagaaacagaagcagaaaggcaaagcaaaagcggcacaaccaaagcagggcaagcagaccatgaagcagcttatgcagaaaaatacgcagatcaccaatatcgaggtgacggacggaaatatcaaatcctttgagcgagtagcgagaaaatacggaattgatttcagtctgaaaaaggatgcaagcgagaatcctcccaagtacattgtctttttcaaggcaagggacgtggatgtgatgacagcggcattcaaggagtacacggcaaacgatctaaaaaaaacgaataagccgtctctgcgtaaacgtcttgtcaaagcaatggatactgtccgcaaaaacaaggaaaaggtcagacagaaaacaaaggatcgggggctgcaagtcctatgaaaaaagtcgatctgaaaaagtttctgatgttaaatttcccatacttcatcatcttttatctggtggacaagaccgtatggctattccgtcattgtgtgggagatacgctgattgaccgagtaacggtgctgttcaacaactacggactggcgttttccaaaccgcttccgagccttcacatctacgatctgcttgcgggcgtagcggcggcacttgcggtaaagggtatcttgtatgcccgaaagaaaaacgccaagaagtacagacaaggtgtggaatacggttctgcccgttggggtacggaaaaggatattgagccgtacattgatccggtgtttgagaacaatgtcattctgacccaaacggaacggctgatgatgtcaagccgtccgaaagaccccaagtatgcacgaaacaagaatgttcttgtgatcggcggttcgggttccggtaagacccgcttttatgtaaaacccaatctcatgcaaatgtccgagaatacgagctatgtggtaactgaccccaaaggaaccattcttatcgaggtcggaaagatgatggtaaacggcggctacaaaatcaaagtgctgaacaccatcaatttcaaaaagtccatgcactataacccgtttcagtacatacgcaacgagcgagatattctgaagctcgtcaataccataatcgccaacaccaaaggcgagggcgaaaagtcgggcgaagatttttgggtaaaagcggaacgcctatactactgtgctttgatcggctacatatggtatgaggcaccggaggaagaaaagaacttttccactctgcttgaatttatcaacgcttccgaagcgagagaggatgacgaggaatttaagaacgccgttgacctgctctttgaggaactggaagcggaggaacccaaccattttgcggtgagacagtataagaaatacaagctcgccgcaggcaaaacagcaaaatctatccttatctcctgcggtgcgagacttgcaccgtttgatatacaggagcttcgggagctgatgagctatgacgaaatggagcttgatatgctgggagatcgtaagacggcaatgttcgtcatcatctccgataccgatgacaccttcaattttgttgtagccatcatgtacacacagcttttcaatctgctctgcgataaggcagacgatgaacacggcggcagacttccgtaccatgtacgg

SEQ ID NO: 61 - DNA, 19095 bp, unidentified
  source 1..19095: mol_type = unassigned DNA
  misc_difference 14051: note = a, c, g, or t
  misc_difference 14052: note = a, c, g, or t
  misc_difference 14053: note = a, c, g, or t
  misc_difference 14054: note = a, c, g, or t
  misc_difference 14055: note = a, c, g, or t
  misc_difference 14056: note = a, c, g, or t
  misc_difference 14057: note = a, c, g, or t
  misc_difference 14058: note = a, c, g, or t
  misc_difference 14059: note = a, c, g, or t
  misc_difference 14060: note = a, c, g, or t
  misc_difference 15486: note = a, c, g, or t
  misc_difference 15487: note = a, c, g, or t
  misc_difference 15488: note = a, c, g, or t
  misc_difference 15489: note = a, c, g, or t
  misc_difference 15490: note = a, c, g, or t
  misc_difference 15491: note = a, c, g, or t
  misc_difference 15492: note = a, c, g, or t
  misc_difference 15493: note = a, c, g, or t
  misc_difference 15494: note = a, c, g, or t
  misc_difference 15495: note = a, c, g, or t
aagagcggcttccagttggatcctcgtgtccgggtcaacgagccgctgggcttcaacgactacaataagctgcaaatgaacgcgctggcaatcgtctccgactcaggtacgctgcccgaggagagcagcttctatctgtccattgggcatcccattgccgccgtgtgcattcgtaccagtacagaacgccccgaggcactggaagccggtgatttcatcctggctggcatcactacccgggaactgctcaacgccaccgatatggcgattgaaatgaaacagaagggcgttctgggtaagccctgccccgactatgtggacgaaaccgtgtccatgaaggtggttcgcatcattcagggatatgtaaacgtggtcaataagatggtgtggagaaaagggtaagtgtgaaaaagatgggtaaaacagtattcatcaccggttcatccggttttatcggctctaaccttgccaagcgtattctgaccactgagccggataccatagtcatcggtctggataacatgaacgattactatgatgtccgcatcaaggaagctcgccttgcggagcttcagaaatttgaaaactatacctttatcaagggcaaccttgcggacaaggtacgtatcaacagcatttttgaacagtaccatccggatattgtagtcaatctgggtgcccaggctggcgttcgctactccatcaccaacccggatgcctacatcgagagcaacatgatcggcttctataacattctggaagcctgccgtcattatcctgtggagcacctggtgtacgcttcgtctagttcggtctacggcagcaacaagaaggtgccttactccactgatgacaaggtggataaccctgtttccctgtatgcggctaccaagaagtctaatgagttgatggcacacgcctactccaagctctacaatattccctccaccggtctgcggttcttcaccgtgtatggccctgctggtcgtccggatatggcatattttggctttaccaataagctggtgaacggcgaaactatcaagatcttcaactacggcaactgcaagcgggactttacttatgtggatgacatcgtggaaggcgttgtccgtgtgatggcgaaagctcctgaaaagaagaatggcgaggatggtttgcccattccgccctatgcagtctacaatatcggcaactccaacccggaaaacctgctggactttgtgcagatcctgtcggaggagctggtgcgtgccggtgtactccctgcggactatgactttgaggctcacaaggaactggtgcctatgcagcccggcgatgtgcctgtgacattcgcagataccgagccgctggagagggacttcggttttaagccccacactccgctgcgggaggggctgcggaagtttgctgagtggtacaaagagttctatatggaataaaagacgacgggaggaattatatgcgctgcgaggaaagattctacgaaatatatggaaaagatcccgtggacattagcttttgcccctatcggatttgccccattggtgcccacagtgatcacaacttaggaaagatcacaggacttgcaattgataagggaatccatattgcctacaagcccaagatgaatggcgttattgaaatgtgcagtcttcaattcccgaaacgtgcccagtggcatattcgggaaatcggcgaaaaaaccggcgattgggcagactatctgcggggggctacctgggcgctgagcaatcggtttccattgacagtcggactcagcggcgtcattgagggctcgttgcccatcggagggctttcttcctctgcagcggtgatactgtccttcttggatgcattgtgccaagtcaatggaattaaactggagccgtcagagctcatcagcattgcatttgatgcggagaaaaactatgtgggcgttaatgtaggaaccctggatcagagctgtgaggttctgagcaaaaaagaccacttgctatatctggactgtaaggataacagctacgagctgattcctacgaatcccaacatgaagccctacagaattgctgtttttttcagtggattggagcacagtctggctggctctaaatacaatatgcgagtggatgagttgcgttctggcgtatacgctttgcaggcttttgcgggtcttgagtacggaaaattcaatgaggctaatgcccgtgacgtttcgtatgagatctaccagacctataaagataagctgccgctgcaatgggcaaaacgctgtgaacattggtatacggagttcaagcgtgtggaagccggtgcggaagcatggcggcgaggggatttggaagagtatggacgcctgtcctttgaatcgggctggagcagtatccataactgggaatccggtgcgcctgagcagatcaagctctatgaaatcatgcgggaaaccaacggtatctacggtggacgctttagcggtgctggctttaagggatgctgcatggcattgattgatcccagcaagacagatgtcattcgggaagaagtggagcggaaatatctcactgcattcccggagatgcgtggaaagtacagttttcatctgtgcgagagtgcggacggcgtagggcataagacggaggactaatatgaagtgcttgattttggcggcgggatatgcaactcgcttgtatcccttgacggagaactttcccaaacccttgctgaaggtaggggataagaccatattggactggctggtggatgacattgacactgctggtctggtggacacctatgtggtcattagtaatcacaagtttgcccgccattttgaagactgggcggcaaccaaaaaacagaatatccgtgtggtggacgatggaacaagtagcaatgagacccggcttggtgctgtatgtgatgtgcagtttgccattgaccagttggggctggatgatgacctgctggtgattgccggagataacgtgctggatttctccctctccaagtttgttgcctatgccaacgagaagaaaacctcttgcatcatgcgctattatgaacccagcgaaaagaagctcaccaaatgcggcgtcgttgagttggatgatcaggataagatcctttcgatggaagaaaagccagcccaacccaagagccactggtgctgccctccattctatgtctacacccgagaggatgcccaaaaggtcaaggatgcaatcgaacagaagaaatgtggcaccgatgcgccgggcagcttcattgcgtggctgtgcacagtaacggatgtgcatgctatggaaatgccgggcaaacggtatgacattggtaacttggaaagctaccagcaggtccagcaggagtatcagggaatcaaggcataagtcttgctaaggatggaagaatgtatagaaagggagaaagaccatgaaaattgcagttgcaggtaccggctatgtcggtttgtctatcgccacgttgctgtcacagcaccacgaggtcatggcggtggatattatcccggagaaggttgaccttattaaccacaaaaagtctcccattcaggacgagtatattgaaaaatatctggcagagaaagacctaaatctgactgccacgctggatgctgaagctgcctataaggacgcagactttgttgtcatcgcagcacctaccaactacgatagcaagaagaacttctttgatacttctgcagtagaagctgtcatcaagctggtgatccagtataatcctgatgctatcatggtcatcaagtccacgattccggttggctttacagcttctgtgcgtgagaagtaccactgtgataacatcatcttcagcccggagttcctgcgggagtctaaagctctttacgacaatctgtacccgagccgtatcattgtgggtactgatgtggataacgctcgcctggtgaaggctgccaacacctttgcaggcctgctccaggaaggtgcaatcaaggagaatatcgataccctgatcatgggctttacggaagccgaggctgttaagttgtttgccaacacttatctggctctgcgtgtcagctatttcaacgagctggatacctatgcggagatgaagggactgaatacgcagcaaattatcaagggtgtgtgccttgatcctcgtattggtgatcagtacaacaacccaagctttggctacggcggttactgcttgcccaaggataccaagcagcttctggccaattacgctgatgtgccggagaacctgattgaagcaatcgtggagtctaaccgtacccgaaaagactacattgctgaccgtgtgctggagatcgctggcgcatatgaagcaaacgaggcttatgatcctagcaaggaacacaatgtggtggttggcgtataccgcctgaccatgaaatctaactctgataacttccgccagagctctattcagggcgttatgaagcgtatcaaggctaaaggcgcgacagtcattatttacgagccgactctggagaatggttctaccttcttcggcagcgaagtcgtgaatgaccttgaagaattcaaaaaccgcagccaagccatcattgccaaccgctatgatagctgcttggatgatgtgcaggacaaggtctacacccgcgacctgttccgcagagactaatacttattgcagccatgcgtcggcatggctgtgctgctcaagtgtgctacctctccgtggtgagcagcaggcaacggataattatccggctaacggcacattttattcgttaattcactcattggatgaggaaaaaactataatgggaaagtattttggaactgacggtttccgtggcgaagctggaatcactctgaccgcagatcatgcctacaaggttggtcgttttctgggctggtactacaacgcattgcgtgagcgcaacggcaacaacgagcctgccagcatcgtcattggcaaggatacccgccgtagctcttatatgttcgagtacagcctagtcgcaggtctgaccgcttctggtgcagatgcctacctgctccatgtcactactaccccttctgtggcttacatcgcccgcgtggatgactttgactgtggcattatgatctctgccagccataatccctactacgataacggcatcaagctgatcgactgctacggcgaaaagatgccggaggaaatcttgctgttagtcgaggattacattgacggaaagctccacgtctttgacaaggactggccggagctgcccttcgcccaccgggagcacattggctgcactgtggactatgtggcaggacgcaaccgctacatgggttatctgatctctctgggcatctactctttcaagggggtcaaggttggtttggactgcgccaacggtgcaagctggaatattgccaagtctgtttttgatgcgctgggggccgatacctacgttatcaacaacaagcccaacggtctgaacatcaacaacaatgctggctccactcacatcgagggcttgcagaagttcgtggtagagaaggggctggacatcggttttgcctatgacggcgatgctgatcgttgcctgtgtgtggatgaaaagggaaatgtcattacgggtgaccacatcctgtacatctacggctgctatatgaaggagcgtggcaaacttctgaccaacaccgtcgttaccacggtcatgtccaactttggcctgtataaggcttttgatgagaagggcatcggctacgccaagactgcagtgggtgacaagtacgtctatgagtatatggctaagaacggctgccgtatcggcggtgagcagagtggtcatattatcttcagcaagtacgccaacactggtgatggtatcctgaccagtctcaagatgatggaagtaatgcttgccaagaaactgcccatgagcaagctggctgagcctttgaagatctatccgcaggtgttggagaatgttcgtgtgaccgataaaaaggccgcacaggatgacgaagcagtgcaggcagcagtcaaggccgtagccgaggcactgggtgacaccggccgtatccttgtccgtgaatctggtacggagcctgttgtgcgtgtgatggtcgaggcacctgatcatgatacctgccagaagtatgtgtctcaggttgtggagaccatcaagagccggggttatggagtttgaacgcaaagctgaaacagaaaagtgttcatgcgctgttacttgcttttgtcgtggcttcaatcttgtttttattgccatatgcctcggttgatcatgattccggcttcacgtcttcgaatcttgaagtgaaggagaccgtggaggaaaacgtaacgaacgcgagttatgtgaactctgacggggttatcacagatgccattgacatgggttatgcgacagtacagagaacgcggaatgcaaatgggcaggttacagaagagttttacctcgatgctgctggaaacccagtggaacggtatggcgattactatggcatctcatatgaatataacagtgaaaatgttgtaatcaggtatcttggcgcagataagcaaccaatgatgctaggcgcaggttattccgccattgtgagaacactggtggatggaaaagcaacggacgatttctactacgacctaaatatgcagccagtccgatgcacaggcggctattacggtttgtaccgagagtatgatgagcaaggaaaaaattgtggcatcacttatctcggtgaaaatggacagcctgttatctgcacatctggttatgccgtcaagacgtatctgcgtgattcagaagaaaccgttattggcgaacgatactttgacacaggagaaaaccctgtgaaatcttctcttggccagtatggcgagctatatcagcgagacgaacaaggtcgtatcagccagataacttatctcggtgcagatggcaatccggcaccaacgactgctggctatacggttctgaagcgtacttaccaccgggatggtacagcggacatcgatatgtattttgatgctgatagtaacccgatggccttatccaaagggcagtatggcattaagcgcagcggaaaggtgaatcttctgcttgacaaaaacggtcgtgttatgctgtgcgtagacaatgttctgaatggactcccatttatggttgtcattttcggatgcgttatctgcttgctgatactggtgttgccgaaaaaaatgagtgttctcttgacggcagcgtatattgcgttcattctatatgaaaccctgatgttccgtgaggccggggatgcaaggacaaactttgttttgttctcctatgcagatcgttttctgactgagcaatctgtaagagtgggggtcatcaataacatctggctgttcattccacttggaacggggctgtataggtggtttcagaagaaatgggtgttgcagattccttttgtgatgtctgtggcaatcgaaacgacccagtatgttacgggacttggcatcgcagagttcgatgatgtgttcggtaatacgatgggtggatggattggtgtgctgacagcatgggtgtggttgagcagaaaaatgagcttgaaaaatagagcataaggaagtatacatgtctaattttcttcgttatccttgaaaacgagacctatatagtatatatttgagctgtgagagtcattcgttatggatgctcacagctttgtcgctcgaaactttgcacacctctacgcggtgggcggcaggcaacgcattagaatgtggctgagatgcagagtcgggtatagataaagaaatatttctggaaagggatactagagtgacgaaaaaagaattcgagcttaacttctggcagcactatctctggctggaaagtgaattccgtacagtgcttgaatatgtggaacttgacagtgctaattattctacatattcaagaagaattgaaaagctcattctccagattggatcagaatttgataatgtgtcacgggagatatgtggtttgcaaaatgtggatcgcacatcgatttgcgattactataactattacacatcaaattataataatattattgcgtccatagtgatagctggtgatgttcggctcacaccgttcgatggatggaataacaccgcaccgggagaaacacttgcattttggaaagcctataattctataaagcatgataggatttcaaattacaaggaagcgtcactgaaaaatgctcttgatgcaatggcggctttgttctgtgttgagatgctctatgcgaaaaagttgtatattcatgatgctaatgaggaaaatagctttccagaaattgagagcaagttgtttatattagatgggttagaacatcgcatccgtccttccaaatttgactcgccatatgatttatatgacgatgatgagggaaagaagataaattaataaagaaaggcggatatcttatgcccagaaccaaaggtagcaaaaacaaaccgaaggctactaacgatttcgcatcccaaattacagagaagaaggaatctatcgtttccctcacttcagaaatcacttccatcactgccaacatcgacactttaaaagctgacctaaaagagaagaagactgcgctcaaggctgcccagaaggaactgaccaagctggaggccaagaaggctgctgctgaggcgaaggccgccgaagctgctaagaaggtcgaggccgaaactgtgctgaagaaactgctggcaagcggtatgaccgcagatgagattcttgaaaagctgaaataaagtaatatgccgtgtgttcgtctccttgtggagcatttgaacacacggcttttactattattggaaatcctatatggttttaagacttaatgtgatataatagaaacggcagtttaccgtactacttgtaaagggcaggtgaatgtgcagatgtacatcatttgtcatagcgagaaattcgtgttcaatattgataagattgttgaagctatcacaaaggcttcaaaagcaacattgaatcggatgaacacccgaatcaccaaggaaattcaacagttgttggatttgggtgataactcgcttgaagattttccgcattctcagtggctttatgaaagaattgcggagttggagcggatgcggaagtacatcaaactcctaaagaagatgaaaagcaataaagttccagcgaagctgcacacgctttggctttgcaggataaaaaacagcagtcgaacactggcgagcacatcacttaacccaatgagcatcgcactgcctgttccgcccacgtttgaggctaccttgagtagttttggacgtgggagggatttggatgccctcgcatgctgagaaaaatccaatagagattgaaaactactatcacattatagacccgaagcgtaagctgtctgagaaagaaagggctgaagaggtaaatagggtgttagtgaatatgcctgcttgttttccagaagcactacggtatgtgatgacacgtttcggatttacgcaagaggctctggcttttgaatcaaaggtatcagagtcaacgattggtcgctacagaaacggaaaggttaaaagtttttctgagaaaaacgtggtggctctgtgtgttgccatgcaccttcctccgtggctttcatttgaactcatagcaaaagcgggttttagcttggctgcgaccagagagcagcaagcatatttaatggttcttagctgtatgtatatgaggtcggttgatgaggtgaacgactatttgaaagaaagagggtctgatttactgtcccaagtggcggcataagattgtcgagcattctgagcttctaagtcaaaaatgatgagccgtgtgtccttctccggtaaggagttgaacacacggctcatttacatttatggttattcccattcctcatcccgggctcggagaagatcctgtacttctttttcggttgccgggcggatggcaggtctgttctggtagtccgttttgccgcagtctgggcaacggtcgagcagcgactctgcctcaaagcagtaatggcagacatcgcagaaatagtagttcacaacacgcaagttgtcaagcaaaaaatatatatttgcataattctatgaaatgcaaagcatttaattgattgcatagcattgacaggtatgcaattttcaaatataatagatttaaaggtggtgataaagtgggaaggaaaaaggcagtgaatctatttccggaatatgccagatctaaaagggctgatgcagaggcactgagccaattagttttggcagccaagggaaatatgacgatgaagaagtttgctaacaaatgtggggtgaacacttctaccatttctcgtattataaatatgaaaatggaaaccgtatgctctgatgaagtaattcttgcaatttccgagaatgccgcagcagagagtggcgttaccctcgaagcattgcttgccgctaacggtatggtgaaactggtgcccgatataacaggtagacctatagaagatgctggtagtatgaatgaaggcgagcaagaggcgaaacattccggtaaggctatagtgacaacaaacaagtttggtcatcttagtcacctaaacaaacaggccttctgccaaacgtataatattgctgattatgaaatgcgaatggtggaaacaagtaggcaaataattttaaatgaaattatattaaatggatatacggttgagcttattacgtctgaaaaagcctactggtcctcattgaaacgctattacggtgattatgcaataaaaacagatgcgttaaaaagctacggcatcgacacatggctcttcgattgtaagtcgtatcacactggtaaagtagccgccgcatataaggcactagaaaaactatttgcactagcttacatgaatagcccaaaggatgcaggtgtaaagatatcagttgttgtagaccataaagatatgtttcagcaggcggtcaaggtgtattcaggtataaaggttcgggactgtttttctgtgattttgataaacgcacaaagtcgatgcgttgtggaggaattctgcattccaagagttgatggaacagaggtatcaatctttagaaacgactaaattgggataggaggcagggaaacatgagtgtggattatggcatttatgcgaccaaaggtaaacggatgctacttgcaatccgggcaatggtcaatggccgtaaagcggtggcgtatgtgaagaatggaaaggtacaagcctatgagtacttagatgatttggcagcccagtgctgcgttggaccctgcctcaagtttgaggacgagaatgagaagaagcggatgtgaattagcacacttggctcatcggaatcgtgtgagccagtcaaaaactaaactgctgcctgtttggtgctgctcgaatgcgtagtaagccggggtagacttcaaagaaatctgaaaaatttcggattttaaggagtctattccggcttttttcgtttataggggcgcacgagtgaacttgcacaaaaacagaactccgggtttggtattctgtccaaagatgtcgaaatggtatttacgctggataattttggtgctataatcatcatgggatttaggccaaaaggaggacttaacccatcatctttattccatagtgtaaatgcaatacgacaaaattggacagaaaggataaccgaaaatgcgaggtatataaggctctgaattgattagtatagacagcctaattgtttcagcaaagatatgtgtttgattggtaaaagctgaaacaaatttcttgatttaaggcgtacagatccaaagtacataattagaaaagcagtagaaacgaatttttttaacagcgcaatagaactctgagtagataaactcgaaaacaagaatgcttttataaattatgtaaggggataagtatgctcattcgagaattggactatattttcaattcgatctgacttcgcaatcggaatctttgtatatacaaagaccggagaagctaggatagtgtacttttatcaagtcactgagtcttagcagctccggtctttttttgtttgcatttgcagtatggaagggggtgaaccgaggtggcatctgctgtacataagaatatcgagcctaaagtggcggctgttaatgccaactcggtttgccgccagttgtcgcagaatactgctgagcaggagtttgttgctccggatgagtttgtcgctgaggttcagtggtctttgtcaatacgagagctgatcgcaggtctggagtttggagatgctctgaagctgttgatgaatgaccgggatatgtctgtagagcagatggagtcggagtctggactctctgtgtccacagtgaagcggcttcgcgcaggtcaggaggcaagcgcagaacaaatcgttgccatttcggtggcgttgcgtcttccaccaatggtcagcagtgatttattgagaatgtgtggaatcacactggacttcaacaatcaaaggaataccgtctatcagatgattctgacgagccattacaaagacggtatcgagcaagtcaatgtctaccttgcggcatgtggatgcgctccactcaaaactgcctgctaaagtacctacaacagaatacccatgaggcgattggaccgcaaaatggtctggtcgcctctttttttgaaattttttctgaggttagggctcagaaagtgagctctaaatggcagtaaaagggcgaaaaaccgtgctgtaaagccatcaaaaatgacctcaagctttgcagaagaacggaatatcgatggttttcgtgctgctttttagagctcacttagtgagctggtgatttgatcagtcttcagctatcatgtagtcagttcaagggacgagcccaaaaggacagacccaagaacacaaaaaaatatcgtaagcccgattctagagaaggcgaaggataccataacggagttttaccagctggcagatatcatctgctggaggtgaaacagccggtctatgggtgtacctcccatctctggaatcgggctttttgcattttgcaggcagtcccagctcagaatgtgagccctgctccgcttccgtcatcggtatccttctccctccctgagtccgggggaaaggacaagaaaatgactaacatgctgatgaacggtgcagttgcaatctatggcggcgtaggcgtgatggagattcatcagccgttaccgcaggcagtggagagcgtggcacaggctgtcgaggacttggcagtcaacgcacacatctctctgcgtgagctgaagaactgcgtggacaaggtgctggagaagaagattcccggctataagcagctcatggaaacaaatccggtggtggcagcaagggcaaccgtgaacggtgcgacgatcacggcgtatacgaacggctacgcagtttacgaagcagacgatgcacacaccgtgctggatgtgaaccgttgcggtgactaccgctatgatttcaacgatggcacctatgaggtcgtcccggctgaggtgttcgaggatgcggagtggactgtgcgcctggttatggagggcgaacgccgactggagaataaccgcagcaagatcagccgtgactacgaggagttcgctctgtcctgcgatggcacagattggtgcgatgccgctatggtggacttcatggaggcagaaaacgctgagatgctggcggacgaggaactccggaagctgtatgccgccatgagcaagctcacggagcgtcagcaggaagtcgtccagctctacttttataaggggttgaaccagtacgagattgctgaggaacttggcattgctcgccgttctgtcgggaactgccttgagggagctttgaaaaaaatcagaaagtatttttaagaaagtacctcccaaacggcaaaaaatcgtgcgctttatgagaggacttcctctcacgaatacatccaaggaggttacaccccatgagtaacatcaagaatccccagagcaaccccttaaagagttcggccccggtgcggccgcccnnnnnnnnnncgcccggtggcgacaccactccgaagaaagtctatgtctgctctccgttccgtcctacggcggtatcgctgacagacagggcagaggagcagcgttccaatatcgagagggcactcaaagcctgccgaattctcgccatgatgggcatccaaccactggcaccacatctgtacttcactcgttttctcaaggacgatgtagcagcagaacgtgctgccgggatgcagtttggcctgtcatggctggaacaggcagatgagctttgggtgtttggcgacacggtgtcggagggcatggcacaggaaatcgccaaggcgaaagaactggggaagcctctgccatcaagtccgcgatggcagagcttggccccaatgaagtgaccaaccgcatcaagattgagcctctggcccagcagaagctggcggaatccctgaaccagaagtacggcgaggatgcggtgttcatcaataaggtggtcatcaacgatatggattttgaggaagcctataatacggccattcagcagaagtccatcgcccagcagaacgctgataagcagaagatcgagaacgaggctgccattgctaaggccgaagccgacaagcaggtggcgatcaccaatgcagaggcggaggcacagaagacctccattgctgcagatgcacaggccgaggcaaaccgcaagattgcagaaagcctgtcggagcctctgatcgagtaccagaagatccagaaatgggacggcaagctgcccaccgtcagcggcggcaatgcactggtcagcatcgacccggcagagtaagcaagtacacgaaccgaggacagggcggaggctctgccctttctacatgaaatggaggataaagactatggcagttacgaagaaaatcgagatcgatggtcagatggtggagttccgagccagcgcagccgtgccgcgcttgtaccgcattaagtttggccgggacatctacaaggatctgagatcccttgaaaaaagcgtggatgacggcaacgaggagagctccagccttgacctgttcagtctggagatgttcgagaatattgcctatattatggcgaagcatgcccatccggatcaggtgccggacaccccggatgagtggctggagaacttcaacaccttctccatctatcagattctgcctcagttgattgaactgtggggtctgaacgtgcagacggaggtagaggcaagaaaaaacctcgcaaaagtgagcgggtaatgaccaccccgctcttcatgctgcgctgtgtgcagctcggcatcagcatagccgacctcgacttgctgaccatcgggttggtcaatgacatgttcacagagcggcagaacgatgagtatccgtatcaggagctggcatcgcaggctgactttgaccggttctaaccaaactttcgtgcnnnnnnnnnnagcgaatgctgggcgggaaaatactgtgatagacagtcctattcgatttcaacatcatcaaaaccaacaaggtcatcttcagtgataccgagacgtcgaaacaactcttcttcggaaataaagggagacgcagtttgttttagagaattgatatcgtttataaagacattgtgactggccaaaattaattcagcgtcatcaacaacatgataatagctgtatgtacagagcaagtcgtaacattcggaaatatatccgagtatatcgtactttttgaatagttcagcacattcgataggtgaaatatgccatctggtctgtgctatgcgaaaaacccagcattgcatatctgctatgtcaatttctctttcggtcatgcggaactcctatgcagaagcagaatcggtgggcttgcgagtatcttcaaagacattgcggagataatccgggccctccatccaaagaccagtggagtaatcgaacagttccttataagcaggagagctcgaaaactcaaagaaagcctgattgaagggaacacctgtttcggtgcagtaatcttcgagcattgcacgcatgacgtttacagcacaggtttcgcgctgttcatcgctgatattataggtgcttgaagtcatagagatcactccttacaaattcgagggattggattgccttttcgttgcagaaacagaactggtcttccagacgattcggcagtagtgctttgatagcaaagctatcggcgtcttcggagcctggctcgccataagcgcgcgtggtgtaaagctgcaaggtacgagcagtttgatcatcggctattttcccaccgatgatatcaaacttggcataccgttcccggacatccgggaacaatgttcttctacggtttgaagccacaaaatgcagccaattcctatccgcagcgttgaataagtgaatagcaatgtcaggattcatatgaagtttgaaaacagaaatgtaaccaatcgttgtgccagtaggcagtctttcctcgttgacttgtttgttcacagacagcggaacaaaaccttgagcctgcttgtaggagcttgtgacgtagaaaccgcgtccgaaatcttttccttgcttgcatttgttaagatcgatttcggacacctgtgtgaaactaccgtgatagaggagcattccatttgttaatgtcagcatacggaaacacctcgattcttaagcatttcctcgacatcgtccaaggcgcactcatagctgctcaaatggagaaaatcatagcatctggcaataaatccaaacacatcattatcctgaaatatcttcgtgcaggcttcgggagactttttccacttggcttgagccatacggaaaacccagcactgcatatccgcaatgtcaatttgatgttcactcatagggcgtacctcctttgagtacaatttctcaatttaagtatagctctttttccggctcatatcaacgatagaattgtaaatttttaagcccccataagaagtaactcacgagttactttcctacgagtatcatatttctctcggcctattcgccttgtgcggatgggcctttacttataccccgaaggaggtggttatccgcatggcatccagaatcgcaggcattaccgttgagatcggcggcgatactacaaaattatccaaggcactggaaggcgttaacaagtccattaaaacaacgcaggctgggctcaaggatgttaacaagctcctgaaactggacccctccaacaccgaggctgtcacccagaagcagaagatgctgaaggaagccatcgaagccaccaaggagaagctcaccaccttaaagacggcggcagaacaggccaaccagcagcttgcggatggcaagatcacacaggaccagtacgatgcactccagcgtgagatcgtggagacggagcagaacctcaaatccctgcaggaacaggcggcggtaaccaatacgacccttgccaagatcgatgcggtgggggaaaagctccagacggtcggctctcaggtcgagggtgtgggcaaaaagttcttacctgtcacggcagccgttacgggcttaggtacagcggctgtcaaaacagcggcagactttgatcaggaaatgagcagggtcgccgccatttccggtgcgaccggctctgacttcgatgccctgcgtgaaaaggcccgcgagatgggtgccaagaccaagttttccgcctccgaagctgcctccgctatggagtatatggcgatggccggctggaagaccggggatatgttggacggcatcgagggcatcatgaaccttgccgcggcatccggtgaagacttggcgactacctcggatatcgtcacggatgcgctgactgcctttggtttgtcggctgtggattccggtcactttgcggatatccttgcggctgcatcgtccagtgattctaccacccagatgaaaacggatacctctaacgcatggtctggtgtggaggcagaagcccagaccgcatggtcgggtgtgtctgattccgtatcaactgcctgcaccggcatggcacagtctgtgacgagccagatcgacagcatcaaagcatccatgtcggcggcatggtccggtattgcatcggacaccactacggcatggaatgcggtcaagaccaacctcacggcagcatggagcggcatcacgacttctgtgacttccggcctgaacaacgtaaagaccgcagtcaccaatggctggacacagctccacacccttacaatatccagctggtccggcatccagtcgagcctgacggcaagctggaattctatcaaatccgccagcacaactgcggtcagtgcagtcaaaacggttgtcaccaatggctggactaacctgcgcacgttgacaacatccagttggagttccatccagacggcactgaacacaagctggaacagcatcaagagcgcaacgacagcctcggtcaacgcagtgaaaacttccgtcacgaccgggtggacgaatctgcgcagtttgacaacgtccagttggaattccatccagaccgtgctgaatacgagctggaacagcatcaagagtgcaaccaccagctcagtcaatgcggtcaagagttccgtcacggcggggtggaacaacctcagcagcctgaccagcagcagttggtcgagcatccagtcggtactcagttccagctggaacaccatccgcagcacggcatcttcggctgtgaacgcagtgaagtccacggtatccacgggctggaacggagtcaagtccacgaccagctctactttctccagtgtgcagtcggcggtgtccggcgcaatgtcgaacctgcgctccacggtttcttccggtgtgtccggcatcaagagcagctttaactctctcagctccattgcttcttcggcatacagctggggcagtgacatctgctcccagatggcggccggtgttcgtgcggcggctggctcggtcgtccgggctgcagagaatgtggcaagtaaggtcagaagtctgctgcatttctctgtgcctgacactggccctctgtctgatgcggcgttgtcatatccccagcggtag

SEQ ID NO: 62 - DNA, 7933 bp, unidentified
  source 1..7933: mol_type = unassigned DNA
ttatttaccctcgtatgctgcctgaatctcttttttgaactcttcctcgcccactctctgaagagtaagtctgaaacgctcaccaccgtttgcatgcttctcgaagaaactaattgctgcatctgtcactctgaaaagagtttccttgtcgcggataatcggaactagctgctctcctttatagatgtggtttccgaaaagtcctccaaacgataccatatatccaggagttcccttccatgcatctgtcggacagctctttacgcagcgcgcacagttgttacatttgtctctgtcgatgacaatcctgccatcctccatgctaagtgcaccctcgcggcatgccttcacacatacaccacactggatacaatcgtcatggctgcactctactgtcatgcctcccttgattccgacatcgttttcctcagcctttaagcagttgttctgacagcctgtgacaccaaacttgaacttgtgaggaagctctcttccgaagtacctttcatcaagttccttagccagagtgtatgtatcgatacatccgctaggacagatttctgagccctgacacgctgtgacagtacgtactcttggtccgcagacacctgttcctacaccgccctttgccagttcctcttttaccacattgatatcctcaaccttgataaaaggaatctcaataccctgacgcgatgtcatatgaacatatccgtgtccgtatttctcagcaacctctgctactgttttgatattttctgctgtaagatttcctcctacaaccgcaattctaagcgagaaacagcccttttgcttctgtctcatgaaaccgcccttttttagggccgcgtaatcaactttctccgccatttttaatctccttactgtgtaaatatgttaatgttttgttttatatgtaaatgcatatgcacgctctcatttgcatacacattgataccttattattatggcttaatcagctatatttgcaaaagcctgtgcaaaatcctccttgaggtcatctatatcctcgatacccacgctgactcttataagatcctcaaatactcctgcatcctccttctgcttatctgtgctgtgaagactgattgtggagcccggatgaatgacaagtgtctttgtatctccgatattgctgagtgtgtatggaatcgtcaggctgtctataaatttaaatgccttttccttgctgccaaccctgattgtaaggattgctccatagccgtttgtgagctgtttttttgctatttcatgccatttgctgctacaaagccccggataattaacctttatgtcaggataattgttttctatccatgatgcaagctcgagtgcattagagcattctctttccattctaagaccgagtgtctcaagtcctataatatttaagtatgcattcaccggagctaaacaggcacccatatttctgaaaagactgtttctcagctttgcgacaaatgccataggtccatacttcacataatctgcaaaacccggatatctgttcttgtcccatttgaacttacctgagtctgtcagaataccactgattgcattgctgcttccatttatatatttggaagatgaattgaccacgatatcagctccatgctttaaaacctgtatcaggtaagctgtcgatgtggtattgtcaactacaagcggtatatcatgtgcgtgtgctatctctgcaagcttctcaatatctgtgacatccagacagggattaccgatagtctctgcaaaaatcagtctggtatgctcattgatgctgtcctctatctgctgccagttgttgttctcgacatatctggttgtgatgccgaaggcctcaagatcatggaacaaatctattgtgccaccgtagaggctggcgcttgagatgagctcatctccactgcttagtatatttaagaaggtattcatcagtgccgccatgcctgatgcgcatgccaccgatactattcctccctcgagctttgttattctgttctcaaaagctgtaatcgtaggattggcaactcttgtgtaacagtagcccggagctttgttttcaaatattttttccagatctgccgcgctctcctgctcgaaggcgcttgtctgatataccggtggcagtgtagagccatttgtctcttttgtcacgccggcatgaagtaagcttgtattaaatctcattgttttcttcttctcgttaattcttacatagtctattgtgttactaggaattgatgagattattatacaaacgtgtgtgttgaaagtcaatgctatcagttatacaaattatttgtgcgtggttatatattttgtttatagccattaatgtcccttaaatactctgcggctgtcgttgcggcatttgctccgtcagatactgcggttaccacctgacgcagtgtcttggtacggacatctcccgccacatacagtcccggctggacgcttctatcatggtcaccattttttgttgcagcatatgtgatgccgtcctcacctgctactacatatcctctctcatcgagctgcaccagattctttataagctctgactgcggtactgagccatatgccacgaatactccgtctacagccagtgtcctgccacttttaagctttatgcctgtcggctttttttctccatatatttctgtcactgcttcgtttaggacaagctctacattttctttctgctttaagagctcaactgtgctctgtgcaccgcggaagctgtctcttctgtgaaccagatagaccttctcacatatatcggacagatataatgcatcatccaaagcggtatctccgccgcccagcactgcggctgtctttcctttatagaatgctccgtcacagattgcgcagtaagatactcccttaccggtatactcatcctctcccggcactcctgcctttctcggatatgctcctgcggtatagatgagcgctcttgcctctgctatcgtgtcatcatcgaatttcactctgtatatcactgattcttctttctcaccattttgcactgcttctatctgcactgcttctttttcgataaattctacatcaagagacactgcatgctccctgaatttttctcccaggtcgtatccgtttatgtttggaagccccagatagttgttcacatttccgctctcggctatctggcctgtcccatcgtattctttttctgctactgccacattcagattggctctctttgcatatattgctgcagacagtcctgccggaccactgcctattattattatatcaaacatggaattggtacctttcatcgtccattgaattttttcggtaacttattatatacattatctttaaaaaatacaataataccgcctgcttttataaaacacctttataaaaacaagcggtatcaattttatctatcgtatatacatcctggcctcataaggtctgagcactgacatatcagaggtatccttataatttgaaatcagcacctccatgccctcacactcctttgcaagcggcattggtatctccttgtcaaagaaattgcacacaacaatcatagttttttcttcattctttctgctgtatgcaaaaatattctcatcatcctcaagtaaaagtgtgaatttaccatcaacaaataccggataatcctttctcagctgaacaagcttcttgtagcagctaaagattgaatcagggtcatccacctgtgatttggcatttattttgtcgtaattgtcatttacctttatccaaggtgttcctgtggtgaagccggcatttgccgagtcatcccactgcataggtgtccttgcattgtcacggccctttgcgtaaatggacttcatgatttcatcctttgagtatcctttttcaaggcgctcatggtacatgtttatgatttcacagtccttataatcctcgatatcatactgtacatttgtcatgcccagctcctcgccctgatagatgtatggtgtaccctgcatgccgtgcagcaatatagcaagcatctttgcagattccactctgtactccctgtcattgccccatcttgacacgatacgcggcaggtcatgattgtcccagaacagactgttccaaccacagttgtagagctcattctgccagtgagccattatctttttgagctttttaaacggaagcggtgcaaggtcccatttctcgccgccctccttctggtcaagccctatgtgctcaaactggaacaccatagaaaactcgctgccatccggattgctgtaaagctttgcgcgctctgtgtctgcgccccatgcctcacccacggtaatcaagtcgcccttttggaaggtctccctgctcagttccttaaaatattcctgaagccttggtccgtttatggtgattctcttgtccggctcttttgctatctggtcgattacatcaagtctgaagccgccgactcccttgtccatccaccagagaatcatatcgtagattgctcttctgacctttggattctcccagtttaaatccggctgctccggtaaaaactgatggaaataatactgtccgatttccggcacatattcccatgcgcttccaccgaaacaagccttcatatcacttggcggcacgccttcatctccgtctctccaaatatagtagtcatggtatggattgtccttgctttttttagcctccttgaaccacctgtgctcgtttgaagaatgatttaagacaagatccatcataatccttatattgtgcttctttgcctcgtttatgagctcctccatatcatcgagactgccaaacgtcggatcaatatccttgtaatccgaaatgtcataaccgttgtccgcctgcggtgatttgaataccggtgaaagccatattgcattgattccaagcgtctcaagataatcaagtcttttgatgataccctgtaaatcaccaaagccgtctccgttagaatcctgaaagctctttggataaatctggtaaactaccgcctttttccaccatttttcgttattgtttttgctcattatgccctccttgtctcttcattatctcttttagttatctctttttgttatctcttttagctgtctctttttgtaaaaattcagcctcatttctttaattctgtatcaaattatgctattttacaagcaccaccaaaacctcacagctttcaagcttaagctcggatgctcccactgaaacagtgctcttttcagcatcatttgtgttggacaaaagcacctttttcacactgccatcaagcctgatttgtgcctctttactgccaaaatttgccacaaccagcacgcgcttattttcatcctctctgtaataagccatgatgccatctgtatcctcatatgccggaacgcatctgccgtaggtgaacagctccttaaattcatctgactttctgagtgccacaagccttctgtaatagttcaaaacagatgaaggatccttttcctgcgccgcaacattgatagccttatagttttcattaaccttaagccatggctttgctgtggtaaaaccggcatttgcctcatcgctccactgcataggtgtccttgcattatccctgctcatccttccacaggctgcaagtgcctgctcctttgataagcctgctgcaagtgctgccttgtactgatcctttgtgctgatatcgtcatactcatctatactgttccattttgcattttgcataccgatttcctgtccctggtatataaacggaatgcctcgaagcagtacgctgacagttcctaacatctttattccggcaggattttgagcatgctttggtaaaaatcttgaggcacctctcggctcatcatgattttctatgatattggccttaaagccgtacttttctgtctcaagctgtgaaccaagaatggcctttctccatgtgtcaaaatctatttccggtgcatcataccagccatgctctccatcacttaagcactgtgcacaaaaatcaaatattgttgaaaaatgcccattctcaccgataaactccggcagctcctcaggcttcatattgaatacctcgccaaccgtaaatgcatcatacttcttaaatgtattgttctttaattcctctaagagctctccgacaccttctgcactttcaaccatcttgtagcaggcagccagtccgtcctctgcatccggctcaaaatcagggaaatcaagatttttctttatattgattatcgcatctattctaaatcctgacaagcccttatcaagccaccagttaatcatctcataaagcttttgtcttagcttttcattctcccagtttaaatccggctgctccttcgcaaacatgtgcagataatacttgtccgtgcccggcaccttctcccagcagcttccgccaaaataagagcggtaattgctcggcggattgccgtttttaccttttctgaaataaaagtaatcagcatactctccatccggatccttaagtgccttttgaaaccattcgtgcttatccgagcagtgatttattaccagatccatgatgatgtgcatatcacgcttctttgcctcggcaaggagctcatcaaactcctccatagtaccgaactcttcagctatcgcatagtaatcagatatgtcatagccctgatccacaaatggcgatttatatatcggagacagccatatgatgtcaattccaagcgattttaaataatccagctttgaaatgatacctcttaaatctcctattccgtcaccgtttgtatccagaaagctctttggataaatctgatatgccaccttgtcatgccaccattttctctccataatgtgtacctcttatctaatcataaattttgcacctatttacatcttgagcactttgtcttgatgtattatactgctattatagaaagtggttagtataaattcttgcaatattttttcattttataacacaatactgctcttataattttaaagggtatagttttaaaagctatggagaaacaacaatatgaaaaacaataatcagcctgccctcgggcagaaagaaaacgcaaagcacggagaagtatttttccccgttcagaaatatataacaagacttgcagcagattaccctgtcatcactacacactggcacgatgaggcagagctcacactgattacaaagggctcatgcacctatcagattgatttgctcgaatatgaagcaaaggaaggcgatatcatctttatcccgccactgctgctgcattccatttcaataagggactgcgacgaattttactcggaaacgtatgtattccatatcaattttttaggtggaaacaataccgatatatgctcttcaagatatctgactccgctaatcaaccatgagtttaccatgccttacctgattgcaccgaagcatccggcatattcatccctttgcaaatgcttcatgcgcataacaaatctatactccggtcaggaattcggctatgagctggctctaaaggcatttctgcttcaggcaatatttctattgctgcaatacagtgaaaaaaatgctgattttggtgtcaacacatcctccgataagctcaaaaatgtgctcgattacatcgaggtgcactatgccgaaagcatccaggtttcagagcttgccgggctttgctatttcagtgaataccacttcatgcgtttcttcaaaaaacacatgaacatgacctgcgtgcagtatatcaacaatgtgcgtcttgaaaaatccgtggaacagttcgagcgcggcaacacctcaattttagatgtctcactgtctgtcggatttcacaatctgagctattttcacagggcatttaaaaagaggtatcatatgacacctctttcctttatcaaaagccttgaataa

SEQ ID NO: 63 - DNA, 13233 bp, unidentified
  source 1..13233: mol_type = unassigned DNA
  misc_difference 4201: note = a, c, g, or t
  misc_difference 4202: note = a, c, g, or t
  misc_difference 4203: note = a, c, g, or t
  misc_difference 4204: note = a, c, g, or t
  misc_difference 4205: note = a, c, g, or t
  misc_difference 4206: note = a, c, g, or t
  misc_difference 4207: note = a, c, g, or t
  misc_difference 4208: note = a, c, g, or t
  misc_difference 4209: note = a, c, g, or t
  misc_difference 4210: note = a, c, g, or t
atagcgcattagaaaaacacagctgccgcgctttgcggcagaacggaggataccgtgacagacaaaaaactgatctcatctttacaaggactgcgggcagtcgcatttttgtgcgtggtcatctcccattgcggggcgccgtggctgggtccgtgggcgatttcagtatttgtagcgctgtccggttttctgatggtctgcaactattacgaccgccctcgcgcagcaccggggctgcggtctgccatagctttctcctttaaaaaaatacgccggctgtatccgctgcaccttattatgatggctaccgccctgttatttgtactgaaggggcttctggcgcagccctctgcccgcggggttctctcctgtgcggcgcagcttgcggtaagcattttcctgttgcaaacatggatcccgtccagccgtttctggttctgcctgaatggagtggcttggtatctttcggtgcaggcttttctgtatgccatctttcccacgcttctcgccgtgctgaaaaaggccgatgcccgcagactgcgctgcattgccgcagcaattttctgcgtacagtgccttttctcccttgcggtctggaaagccgggctcagcggaaaggccgcattctacctgacctatctgtgtccgctgttccgggcaggcgattttaccatcagctgctgcgcgggctgtctttaccacagccgcaaacaggagagcacactaccgcgcagtgctttctccctattggaactgggcgctgtactgcttgcgggcggctgccttttcattgctgccaagcaggcgggggttctgggcgcagtggccttccggtacaatgtgctgttcactccctctgcggtgctgctggtctggctgctcgccatgggcaaagggttcatttcccggctgctatccgcaaagccgtttttgtggctggcacagctctccccttacggctttctgatccatcaggtactgatccggtatatggagtggactgcggacaagtttagccttacagtgcagcccgtggtctggaccctgaccgtatttttgctcacgctctgcctgagctggttttataaggcgctggaacgccgggtgcggcagtgtcatacaaaggctgctgcacagtaaacaaaaagacagcttcgatctctctgcaatgtgccaagttatttcatagattttagttgtgcgtgagaggttcttctttcgtaaaaagcctctcgtccctccaacgcttccagaaaatagagcaaaaagaaaaccccagaatcattcgaattagagaataattctggggtttttaatactgtcggcgggggcaaacccgtactctgtctccagaaagggattttaagtccctcgtgtctgccagccttcggcaaagtcgtttttttcgttgtatcgtcttatttctcattgcgagagagattttttcttcgtaaacgagagggattcgcactttttgataagataatattaccacctttttcgccccatttcaaccatgtaaaattgttttatcttttcgtgcttgatcttcggaacgtccggccgccggggcgttcgccctgcccagatgcgctccttagggtgggggtgatgaggggttggatgatggattgatgggtgtattgatggacggaattgaatgatacgatttttctgattctgatttttgaagaatacttttgaagtgattgaaggtgttttaatgtgctgacggattcgattacttcttatctgtgatgttcctttgctttgcctccgctcgcccctgctacctcttttgctgtaatttcaccggatgtaattttggactatagaataaaaaacaggtatgttattgttcgatatgaaacaattgttctattataaaaccgtatggatgggattttgtaaccacacccacacggtttgaggtctgaaaagtttatttcagctttgcgaggatctcgtctgcgctcacaccgctggctaataatttcttaaccacactctcggcttcagccttcttagctgcttcagcggctttagcatctgcctttgccttcttcgcttccagcgttgccacttctttttcggccttcttcagagcagtcttcttctctttcaggtcagccttcaaagtgtcaatgttggcggtgacggagacaatctccgtattcagagacgcaatagtctcctgcttctccgcgatctgggttgcgtagtcattgattgccttcggtttgttcttgctgcctttcgttctgggcatggtgataacctccaatatctatgacaaagctaaaaattacaaaaataagtggacatagaggattcgaacctctatcctccccttcataaacgtacaacttgcattaagttatgcgcttatgaagggggatgctctaccattaagccaatgtccatatggaattataccacaaaatgcgatatagattcaataagcctagagtcatttacattaatcggatacatctgggaaagaaaatttaatattcttgccttctttttttcctctgaatcattagaaagaataaagctattaatcttcgttctataattttctagaaccacatcccaatcatacttactatccttgtatattctgtcacaaatcgttcttgctgctcttgaaaataacacttgatcatcaaaattaagatttgtaaaatcgttgggtgcatttaaatgtcccctgatattggatattgctaaatcgtcagttaaattattcaactcagttttcgcttgtcttaactcgactctgcctgtaccacaatgtacaatttcattccttaccaacctgtaatagttacaaataaagtaaagttgctttacatcgtgtgggattcgattaccgtagcaaatatttagaatccacttcaaccggttaccatcatcttctgcgctgtaattttgaccacgagccggactccctggaaggagacggtattgtacgagaaagtgttccacacacgagtgaaccccaatgatatatccattagcaattcgcttaagataatcttccggcaaagtcgcgatcgatagtcccaccattcctgctcgttcctgcaagttatcatttccatgatccacctgaaaagtccttgctgccagctctatatattggtttgtgacattcgcatatccaagttcatttttcaattctgtaaggatgttcataataacaactcactaagttttttctcacatcttcgccgaccataagatcgttgcctgctgctcaccacggagaggtgtgtgatattattacgagcagcgtagggagctaccgctcccattatatcacaagtctgtaaataaatcagccttatacacgccatccgccaacattttcttgaagctgtctttcactgctgcaacatcttcatggtaggtcatgccgtaccaggtatcgttggtcttcagaaccttcacaaacatcttgccctgctccagcagttcaccgatgaagattggaatcagatactcggctttctgaggattgctcggtacttctttttcgaagaactctttgaatccgttctccaacacatctaggaactccggtgtcaatccccacatgttcatggaaaccagagaattcacatcaacagccacaccgtctgcctctgctccatctgcagtcttcatgatgttcttggtctccacaacctcagtcaaattgttatcctcgtccatcttacagataccacgagtcacaccgccattatcagacagggtattcttcagcacaaagcctgccatacaggacctgccaccattcaccagatactcgtgtacagccttgaagccttccttgccatagtaatcatctgcattgatgacgatgaacgaagttttaattacgtccttcgctgcaagcacagcctgtccggttccccacggctttgtccggcctgccggaagttctcccggaatatcgttaatatcctgaaatgcgtagtccacagttacattgtgggacttgcaaatggaggcaatgcgatcaccgatgacctctttaaactcctgctcaatatccttgcgaataataaataccacatggttgaaacctgcctcaatcgcatcgtggattgagtagtccatgatgagatggttagcatcatcgaccggctccaactgttttattcctgttccgaatcggctgccgattccggcnnnnnnnnnncggccgccatgataagtaatgttgtgttcatttttgtcactctttccacaccttgaagtgccccaatgtgccttccacaaaaatttgtgtgattattaaagcaacgctagtagcctattgctctcgttttcgtttatagtttttatagaaaaaaatcattccttcttcataggttctgaccccaagagttcgcagaagcctgttctgcctttatcgggcatgtcctttacctaggccatgctatgcaatatttacttttttctaatagttgctgctttcctttttataacgagtaaatatggtttagcatattttgcaaatatggtgttcgcaaatgtgtccttgaaaagtaacaaacagcatacataaatagtggttcctgcacaaacacaaatagcgaacgagaaaaaggaagtcctcatagttacatcaatccatttaacagtcataaacataaccactgaagccaccaatggcttcaaggacattatgagtaaagatttaggtttaacatattcttctctacacgccagcaaaaaaagaacggcaaaatctgtaaattcagacaaagctgttgttattgcccctccaacagccccccagtgggatataaaataaacattgaggatcaaattcgttacagcagtaattatatgcgcaatcgttggatatttttctttgccaatagagatgaacaattcattcccgaaaacacatgccaaaccacttgtaataaatctagtagacataatattcagtagtattggcacttccttatatccacttcccaaataccaactactcaaattttctgataatgccaccacgcctgctatcattggtatgcccaatgatataacataattacatgagaaatttatatgttccttaacctttgtgcgatttccaacagcataatcatgcgaatttcttgcaatcattattgaattcaagacaattacaaccacaagcattgcctgatttaactttaaagcttgattatagcaaccattttcgtaatcaggattgccacacaaatacccaatcatgagcttatctaacgaaccataaatggtcgcagcaagtgtcgggaagaaaataatgagtgagggctttaaatgtttccgtaaatcgaaattattatacgggatcttaatgattcttgtaatcaatctcggccacattagtgcatttgcaatcaagacagacaatgaataaatcaatgcataaatccaagtatccgttgacttacgaacaaacaaaaaaacgcaggcaaggcaaacaagttttaatgtgattgttcttatcgcaatcgatttgaaatcttcttgtccttgaaaaaaaaaattaacatcaaataatactgcaaagacctgaatagaaaaaagaaagattaatgtattgtatttttgtccataaatacccactgaagttgagattacaaggagtattaatgatataagagtaaaaatggctctaagaagaaacacctcacagaatacttttgtacggttataatcgtcatcctgatactttgcaatttctctttgaccatatgttgaaaagccaagattcgcaaacattgtaaaataagtaattattgtgtttgcaaaggcgatttgaccattgccctcttcatgaaaaacacgcgccaaatatggcgttgttaatagcgggattatcagtgttaatacttgacttgcaaaattgtaaaaataatttgcccttagagtaccttttgtaaatgccctattctttttcattcatcttctcctgtaaccttttcccacgcccaactttggaagttgaatcgtttaattacacgcgctggattaccaacagcgattgaatattctgggacatcatgtgttacgactgctcccgaaccaattatcgaccactgcccaacatgaacgcctgccaagatacaaaccttttcaccaatccaacaattattttcaattgtaacatccttgcttgttagtggttgttcaatatatttttcaccaccaggaatcataccatgatcttctgtggaaataaaaacatcacttgcaaacaagcaattatctccaatcgtcagctttccagcggacaaggctgtaaaattaaagccaatcatcgttttattgcctattataatagtcggcctagggcatttctcagttggataacaatctagtctacatccgctatcaattgatgagcatccaatatctaccatattcccataatttacatgttttggtttccggacaacgcttccttttcttagtagccaaacaaaactataccacctagagtatatcatcctgaaaattcctattccaaaatatcttacaattctttttatctttaacattctatactttgttccttcagatactttcgcaattgatctatatttgtttttctaagattcaatttttgtggagaaagtttgcaatcttccaagtcaagattttctccttcaaaataatgcattagtgcaaaaggatttccctcattttttttgatctttgctaatgcatcgtcgcacaaatgatatttcatggctaaaatcatcatataatcattcataaaataatcgattgcacgattgtattttttgtagtatgtattataaaaatcgacacatgctcccataatatcattatggatatgtgtagacaaaaaaaaggttgtatatgtaacgggatatacatctttccagagaatatctttttctatgctatcatgattaagactataaaatccacactgttgagcatattcatgaaatggtaaatattccacaaacaaaagtgttgaatcgatccatgtgccgccatatttatacagcaaattgaaacgcaagatatcagaaaatgtctgaatcgaaatctgccgatttttatatagttgctctatttctggctcaacatcaatgtattctttataattattatcgtctataataattatatcatactccttgtacagcattttcagtcggtttaccactcgtgtcgggatatatggcattttgtctgcaccttgcgcccaataaacaaaaatttttgtgggaaacaaatattcttgcggaatagagtattctttcgcattgtggttttggaaaatatatccaaactcgcaatccaacaaatctatcgccatctttctcatggccggttttaaccctttaaatacgcccgacaacaacacaaccgatgcgtactttaatccaaagttccccatttgatcatgaagatttcgtattttctctttgaacttactaattttcatcattctttacctatgttaatttcaaactttcatttaaattccgctgctcccattttgccatttctaaaatcagtaacagcttgtctacaatactttttctccatcggtgttccaaagaaaatctttctatatctaactaaaagtgccattgcataagtgcctatcagaaattctcttcgatactttttacaaaaataaagacggtttctattcaaatagtagacacgtacaaaggactgttttttccctgtcgaagaactcaccttatgatatagtagcgtatccggtgttacaagtattttaattccagcatttcttaatctcatgcaaaagtctgtgtcatcataatacaaaaaatagtcctcatccataaatcctatcttattaaaaacatcattatcaatagccatgcagcatgttggtgcataatcgcattctatatcatgatccaagcctgtatttggagcatccaaattccagtccttatttctgcccagcgcaaatgaaatttctccgccaaagtaccatgtttttttcgtatcccagtacaaaattttcggcgaaaccactttatgacattgcaatttctctataataacgcttaatgtgttttttaagatttctgtatcattgttcagaagcagagtgtattggcatcctatttcaatactttttttaattccgatattatttcccgcagcaactccaagatttacattattataaatggttataattctatcatcatcatatttatcaagcattttcatcgattcatctgtcgagccattatccacaacaataagataaaaatcatcataatcagactgaagtatcgaatcaacgcatgcattctggaactttgctccgttatagtttacaattactattcctaactttctcattatttaactcctctcttcgtaagccaaaatttatagcgaaaatgtagagaatcatccacgtcgaacagatatccaaatccggaatcgcaatcatttgacaaattaaaacagcaactatcatccatgaatactgtgaaattttcgaacttctcttaaaaataaactttatttgttcaaacatgaaaaacatatatgttgcaaatcctaaaaatcccaattcgcctagtaattgcaaaagtaaacttgaggcccgtgagttcttataacccaatccgattaacattgaattttgaaagccttccaatgcttttttattccaattggatctctcataaaaagagcctgtattaaatttatctattagcacactttgaagaacattgctagtagccaaaatgccaaaaacggctatcaatgccaaggctactgtattgagttttctgcgttgattttttctatcaagcaatacatacaatacaaatgtcaacgcaatgccgatataagctgttgtggaataggttccgagaagttccaacaataatataactaatagaacaacatctctattcgatttatttttctttaagtaatagtgtacaattaaagcacaaaccaccggtgcataatacgagggttccataaaagtcgagcatattctcttatagaagctatgattaaaagcaatgtttggattacttgtatcattatatattaattgaacaaccactggtaatttcggaataatgttcaatgtcattatcagttgcaaaacacccattgccagcaaaaaaacagccacctgattcattgctttgtccaaaaaaccagtatctacataacaaatttttttaattgtaagaaagcagaaaatatacgaaatcaattgaatgatttttaggactttttcaaatgacaagccaccatcattaactatcacagaaattataataactagtattaacgacatagctgccaatgatgatgaatccgccttcaaccgaaaatgtcgtgcgttccaaaatacataatacaaaatcatgaccatcgatgacaaaagctgtggtccgattccttgcccattaattgtaactacattcgtacattgaagggtcatacaaataatagtaacaattgtaatatattttggatcacgccttataaaaaccgcaacttcaattattaaccaaagtataccgaataacgacacactcattcacatcacctcgctatcttcatttggggtaatcgctcatatataaaaaagagcgcgctacttttatgtaggttacatcttgtattttttttcacttagtatttgtgcaatcttcttattatcaccccaaacagctttagaatcatacggacgatccgggaacgcaccatatttcaatttgatgctataaccattctccttaataaatcgctcaactcgatccgcaagtttttccggcttaccagagcagatgttaataattccattgatttcatcttgtccaactgctgccgcaacctgtgcgcaaaaatcttcatagtcaatgaaatcgaactggttctgacccattgtgaacgggaactcagctttgccttctttttcagctgccgtaatttttgagaaaatcgaacagccaaactcagagtgacccacaatataatagccacgcagccattgccagtttgtatgcttaccgttagtcatcattgccacgcaattacgaagcgcatctttaccaatgccataaagactcataggatgacagggagtattttcattgatgcttccttcaaagaaaccgatttcgtgcattgtacccataacgctaatctttgcaataccagcatcaaccatttgcttcaaaaaatgataatgcttcggcaaatcggcaatatggttttccgaataatgtacaaagccgtctctccaagccaaatgtaacagcacatccggctttccaaaatacatatatggctcctcgatagcaaagagatcacaggccttcttctctgctcgatcatccacatagtctgttttaaagtccgctgcaaccacttgatttccgttgtcgagaattgctttcacaattccctgtccaagataaccgttagcacctgttaccaagattttcataattaattattcctccgaattatattttaatgtcaatacgaaaatgcacatactaatcttcttgatctgttaatactttataaatatgttcaagccttcttgcattactatagatatcgtatttttcaattgatttttcatttgctttatagaattgctccctattagttcgatgcacatttagaatacaattcgcccaaagagattcacccctttctagtgacaagaattttgtgtttcccgcaatatccacttctctaggcactctatcggatgtaatgactggcagtccatttatctgtgcctcaacaaaaacgattcccagaccttcgtacttcgttggcagcacaaaagcatccattgcacaataaagttccgtaacattatccgtgataccataataaataatcctatctcgatacggatgttcttcaattttttgctttattttatcaagatttgggccgtttccaaccaacaaaaggacagcattatctctttttgaggctacttcttcaaatatctgcaacagatattcgtgatttttttggtcattaaatcttgcaacatcaccaatgacaaacttatccgtaatatttaatgatttacgcaccgtatttcggcttgattcatcaaaagcgaacttctctgtttcaaatgcattcgggagcacctcataaggactatctccaaacatccattttcctgcagcatcgctacatgcaaatccatgtgtataaagtctttttaatatcggttgaaaaatttgatgaatcaatgcatggtcacatgtaacattatgagagtgtataattctaactttgatgccaactaattttgccatcattagttcaactacattggttgcgctgttacagtgaatatggacgatttgatagttattttttaattctttccacatttctctatagtaagaaagcggattctttttttttgggaggaagtttaactatctttattccttcttgtttcaatttgtcctcatatattgattcaactggatttcctgcaattattgtcaattcaaatttgtcttttcctatgcgcattccataattcatgatcacattggttataccattcgccgccaaatttttagtgatatatgcaatcttaatcatgaatattctcctgtatgaaattccggatattctctataattactgatgtattacttttgtagttatcaaatgtatgtttgtaaacataatcaactgctttttcaagttcatttacatccgttattccacaaatcaaattttgattttcaaactgcttaataatctgaagttgatggtcgtccacatgttccccgtacttggctctacgtgctactgcaattactttttttcccttttttacagcaccgatgattgcacccgttccgccatgtgtaataacaatgtccgcctttccttccatcgctgcgaattcatctctatcaagaaattgtttgtagttataattagtgggtttatagtcactatatcctatctgtgcaaacacttcttcctttattattcctcgctcaacaagttcatcaactgtttttagtagtctattaaattgaaacttttgtgagcctaaagttataaatatcattatctactctcctatgaggcattaatatattccacccaaataaatagcttttggatatacttccaacattggcttccattgcacataaaactgatctgcaaatttataaagtaactttccagtttctgtaggagatgtaacttttgcgaaagattctatataaacaagttttttccccataatctttgaaattaaacaaatcgggatcattgccaaaactcctgtacagataactacatctggtttttctttcatgtaaatttttaaagacaaaaaggcattttgaatcattctccagataaaagttttctctttacggtttacctgatgcatataatatgttttttcgcctttcgcctttgcatcataatccgtcttttccgtcacaacaaagctttcatattcttccatcaaaggcttcaacatcataagttgctcataatgacctccggatgatgccgcaaaacaaattttgatttttttctcactcttcatcttctagtccaatccttaatctctctggaaaatatcccgcgtataaactttctctttcacatcatccaggcacttgtcataacggtttgcaataatggcatggctcatttccttgaacttcgctaagtcattgacaactagggaaccaaagaatgtttcgccatctttcaacgtcggctcatagataatgacagttgcgccctttgccttcacacgcttcataacgccctgaatagaactctgccggaagttgtcggagttggatttcatagtcaagcgataaacaccaatcgtaacagatttctccttgtcctcatcaaactcattctctgcatcgtagccatagtaaccagccaatttcagaacacggtcagcaataaagtccttacgggtacggttagattccacgattgcttcgatcagattttccggaacatctgcatagtttgccagcaactgcttggtatctttcggcaggcaatacccgccggccgatgtcaagtcttggacaacatttttcacaaataaatttgaaaaaaataaaaaaataagccctacaaggctttcagtcggtatcgaaccgatctgag

SEQ ID NO: 64 - DNA, 5459 bp, unidentified
  source 1..5459: mol_type = unassigned DNA
atgaaaaagggaaaatcaaaatggatcattctggctgtgattcttgtgggaatctttgtggcagccaactcatttctggtagtgacctatccaaatgaatataccgtaatcaagcagtttggaaagattgtggatatccggcagacaccgggcttaagtatgaagattccggtagtccagactgcggaaaagattgaaaacgaagtgctgctgtatgaccttgcggtcagtgatgtcatgacaaaggataagaaatccatgattgcggactgctttgtattatggaagatcgatgatccgtacaagtatacgcagaccttaagtgcacagaagagcaacgcagaattccgtattgacaccattgtttacaacagcctgaaaaacgtaatcagcagcaagagccaggaggaagtgatcagcggccgtgacggagagctggcagcagcgattgttgcaaatatcggtgacactctcgagcagtacggcatcacccttcttgccgtggaaacgaagtctttggatcttccggatgaaaataagaatgcggtttatgaacgtatgatttccgagcggaataacattgccgcaacctatcaggcagaaggtcaggaggaagccaagcagatttccaacaatacgaccgcggagatcattgtcatgcagtccgaggcagatgcaaaggctgccgagatcattgcaaagggagaagcagaatacatgcggatcttaagcgacgcctacaacgatccggataaggccgatttctatatcttcctgcgctccctggatgcagcgaagaaaaccatgaccggtaacaataagacgctgatcattgatgaaacatccccgattgcacagattttttattaagacggattcttgaaggaaaatgaaaaaaatgtaaatcgagagggaatccattgcaaaaataaataccctatgatataataattgcattggaaatgataaaaatttaacaatcattttcagcccgtaaattaaatgaaaacaacgaatatcggaggaatgaaaaatggcaaagaaagtagtcatcgccagtgcatgccgtaccgcaatcggaaccatgggtggttctttaagcacaacaccggcagcagaattaggagcaattgttattaaggaagcattaaacagagcaggtgttgcacctgaggctgtagatcaggtttatatgggctgtgttatccaggcaggtcttggacagaacgtagcacgtcaggcatccatcaaggccggacttccgatcgaagttcctgcagttaccatgaacgttgtatgtggttccggtctgaactgtgtgaaccaggcagcacagatgatcatggcaggagatgcggatgttgtagtagcaggtggtatggaaaatatgtccatggctccttatgcagttcctcaggctcgttacggatatagaatgaacaacggtacattagttgactgcatgatcaaggatgctctttgggatgcattcaatgattaccatatgattacaactgcagacaacatctgcagagaatggggacttaccagagaagaactggatgagttcgctttaaagagccagttaaaggcagaagaagcacagaagaccggtgcttttgagaaggaaatcgtacctgtaatggttaagaaaaagaaagaaatgatcgagttcaaggtagatgagggacctcgtcacggatccactatcgaaggacttgcaaagcttcgtaccattaacccggacggattcgttaccgccggtaatgcttccggtatcaacgacggcgcagcagcagttgttgttatgagcgaagaaaaggcaaaggaacttggagttaagcctatggctactttcgtagcaggcgcacttgcaggtgtaagacctgaggttatgggtatcggacctgttgcttctactaagaaggtaatggctaagaccggtatgaagattgaagacttcgatatcatcgaagcaaacgaagcatttgcagcacagtccgttgcagtaggtaaggatcttggaatcgatgtagacaggcagctgaacccgaacggtggtgcaatcgctcttggacatccggttggagcttccggatgccgtatccttgttacactgcttcatgagatgcaggctaagggtgccaagaccggtcttgcaactctttgcatcggcggtggtatgggatgctctaccattgttaagatggactaatcaactaaaaagaaaacataattccagggtggggatctcccaccctagaagcatgtttacacgtaactattcagcatcccattcgtaaaaccgttgctagcgcaacttgagttttacgaatgtggttacttcgccatataaattatgccaaatgtccttacgaatgcgagcattctacgtccatattgtcataatttgcatggctctgaatagttacataaaataaaaggtaagggtgtcagagacgacacagaaaggaaacaaaatggaattcatcgtatatgaacagaagggtgcatacggcatcatcaccatcagccgtgaaaaagcactgaacgcattaaactcccaggtacttgacgagttaaatgcaacacttgatgcggttaatcttaatgaggtaagatgcttaatcctcaccggagcaggacagaagtccttcgtagcaggtgcagatattgctgaaatgagcacattgacaaaggcagaaggagaagctttcggtaagaagggaaatgacgtattccgtaagcttgaaacattcccgatcccggttattgcagccgttaacggatttgcattaggcggcggatgtgagatctccatgagctgtgatatcagaatctgttctgataatgcagtattcggacagccggaggttggtcttggaattacacccggatttggcggaacccagagacttgcccgtcttgttggagcaggcatggcaaagcagatgatttataccgcacgtaatatcaaggctgatgaagcatatcgtatcggacttgtaaatgcagtatatacccaggaagaattacttcccgcagcagagaagatggcagcaggcattgcaaagaatgcaccgatcgctgtccgcaactgcaagaaggcaattaacgaaggcctggatgcagatatggatcaggcaatcgtaatcgaagaaaagctcttcggtgactgctttgaaacagaggatcagaagtacggaatggctttcttccttgataagaataaggaaaaggtaaaagagccttttaaaaactgctgattctggtttataatcaatgtaaatgacggcggaagaactgcctgcgggcagtaagccgctgttcagaataagatttaagaaaatttaggaggaaaagaaatgaaagtaggtattattggtgccggtaccatgggacagggcattgccaaggcatttgcccaggttgatggatatgaagttgctctctgcgatatcaagcaggaatgggcagaaggcggaaaagcaaaaatccagaagggttatgcaaagcttgtagaaaaaggaaaattaacacaggaagctgttgatgcaattcttgcaaagatcactccgggattaaaggaagacctttgtgcagactgcgatctgatcgtagaagcagcatttgaaaatatggaagttaagaagaatacctttgcagagcttgataagattgcaaagccggaatgcgtatttgcatccaacacatccagcctttccatcacagagatcggtaacggattaaaccgtccgatgatcggtatgcacttcttcaatcctgctgaccgtatgaagctcgttgaagtaattgccggtgtaaatacacctgttgagattgtaaataccattaagaagatttctgaagaaatcggcaagacaccggtacaggttaacgaagcagcaggtttcgtagtaaaccgtatccttgttccgatgatcaacgaagcagctttcatcaagatggaaggtgtatctgatattgcaggtattgacgcagctatgaagcttggtgccaatcatccgatgggacctcttgaacttggtgatttcattggacttgatatctgccttgctattatggatgttctttacaatgagaccggtgacagcaagtatcgtgcatgtcctctgctccgtaagatggttcgtggcggtaaccttggtgttaagagcggtaagggattctatgtttacaatgcagacagaacaaagacccctgttgatgcacagtaaatataattggatcaaatgtgattccaatatcatatataatggaggaaataaaacatggattttatgttagacaagcagcatgaaatggtaagaactcttttcaaagagttctccgaaaaagaagttaagcctcttgcacaggaagtagacgagacagaggtattccctcgtgttactgttgaaaagatggctaaggcaggatttatgggtattccgattccgaaggagtacggtggacagggagcagatgttcttacttatgcaatgtgtgtagaagaattatctaaggtttgtggtacaacaggtgttatcgtatccgctcatacctctctttgctgtgacccgattcttaccttcggtacagaagagcagaagcagaaataccttgttccccttgcaaagggtgaaaagttaggtgcattcggtcttaccgaacccggcgctggtacagatgcacagggacagcagaccaaggctgttttagagggtgacgaatgggtactgaacggttccaagatcttcatcaccaacggtaaggaagctgacgtatacgtgatcttcgctgttaccggtatgatcgagaagagaggcaagatgatgaaagagatctctgctttcatcgtagaaaaaggaactcccggatttacctttggtaccaaggaaaacaagatgggtatccgtggttcatccacatacgaactgatctttactgattgccgtattcctaaggaaaatatgttaggagcacagggcaagggatttaatatcgcaatgcatactctggatggcggacgtatcggtatcgctgcacaggctcttggtcttgcagaaggggctcttgacagaactgttgaatacgttaaggaaagaaagcagtttggccgtgccatcggtgcattccagaatacccagttccagttggctgatatggctaccaagaccaaagcagctcagctcatggtatatgcagcagcctgcaagaaggacgagtatacaaagaaccctaaggtatcttattctgtagaagcagcacaggctaagctttgtgcagcagaggttgctatggaagttactaccaaggctgtacagcttcatggtggatacggatacatcagagagtacgatgtagaacgtatgatgagagatgctaagattactgagatctacgaaggaacttccgaagttcagagaatggtcatttccgcgaacctgcttaagtaa

SEQ ID NO: 65 - DNA, 29117 bp, unidentified
  source 1..29117: mol_type = unassigned DNA
atgaattctaccagattaattagtacgctattcaagcccagacaaaaagcgacagccttgtatgcaactcaggctgaggtgctccaacataaagtgttttgccggctgatgaaggatgcggcccatacggagtggggattgaaatatggctataaagacataaagagatatcaagactttcaacgtgtacctatacagacttacgaagaaatcaagccatacgtggaacggatgcgtcatggagagaaagatgtcctgtggcgtggagaagtgcagtggtttgccaaatcttcaggaacaactaatgacaaaagtaagtttattcctgtcagcagggagggacttcatgatattcattatgcgggtggtatggatgcagtggcgctgtatctccaacaaaatcctgagagtcgttttttctctggaaaaggtctgattcttggaggaagccatgcaccaaactataatgtgaaacgaagtcttgtaggagacctttctgccatattgattgaaaatgtgaatccgttggtcaatctgattcgggtgcccgataaaaagattgcgttgctgagtgatttcgaggaaaaagtagaaaggattactcgtgccacaatgaatcagaatgtgaccaatctttcaggagtgccgtcatggatgatggctgtactgaaacatattctggaagtgaagggaacggataatttggcggaagtatggcctgatttggaagttttttttcatggaggggttgcttttactccttatcgcgaacaatataaacagcttattcgtagcgacaagatgcattatatggaaacatacaatgccagtgaaggttttttcggattacaaaatgatttcagtgatccttccatgttactgatgattgactatggggtattttatgaatttattccgatggaagatgtcggtactgaaaatcctcatattgttccgttaacagatgtggagttgaataaaaattatgcgatggtcatcagtacttcctgcggattgtggcgttatatgattggtgataccgtgaagttcaccaacaaacacccctataaatttgttataacagggcgtaccaagcactttattaatgcatttggtgaggagttgatggtggataatgcggaacaagggttggcaaaagcctgcgaggcgaccggtgcacagattattgattattctgctgctcctgttttcatggatgcacatgccaagtgccgtcatcagtggctgatagaatttgccgttatgccggattctttagagaattttagtcgggttcttgacacttctttacaacaaattaactccgattacgaagctaaacgccataaaaacattaccttgcagccgttggaaataatcgtggcgagacctaatctgttccacgattggctgaaagaaaaaggcaaattaggcggacagcacaaagtgccgagattgagcaatacgcgtgattatatagaagaaatgctaagcttgaaccaataagaacatgaattggaaaaaacataaattacctgctttgttgatgctgatgatcgtggtgtattcctgcgcaagcatgggaacaccggatggaggtccgtatgatgaggagccgcccaagtttatcagaagctctcccaagccgtatgcaacaaacaataagaataagaagattgccattgaatttgatgagttcatcaaattagagaaaacatcggagaaggtggtagtgtctcctcctcaattggaacaacctgatattaaggcaagcggcagaagagtattggttaacctcatggactcattgaagcccaataccacttataccattgatttttcggatgccattgtggataacaatgagggtaatccgctaggtaattatgctttttctttttctacgggagaagccattgatacactggaagtttccggaaatgtattggctgctgctgatttggaacctgtcaaaggtatgatggtgggattgcatgcagatctgagcgatagcgcttttgtcaagaaaccgtttgaccgtgtatcccgtactgatagccgagggcgttttaccatccgcggtatcgcacctggtaaatatcatatctttggtttgatggatggtaaccagaattatttgtatgactccaagaccgagatgattgctttttgtgattctattattattccttccatggaggctgctgtgcgtcaggatacgttgtggaaggatacagcgactatcgatacgattaaaacagtggggtatacccgttttctgccggataatattgttctaagagcatttaagggaataaataaccgccagtatctgtccaagagcgagcgtgataaagagaatcattttatattatctttcagtgcgccggccgatacgttgcctgttttgaaaggattgaactttgatgagaaggatgcgtttattatagaaacgactccacgaaacgactcaatttgttattggatcaaggattcgttggtttatcagatggatacgctggaggttcagttggattatttatatacggatacactaaaccggttggttcccaaaaccgataccatttatctggctaataaactgacaagagagcaacgggaaaaattgcagaaaaaagcgaatgaggaaaaggagaaggaacgtaaaaaaagggagaaaaaaggagataccatcagggtgaaaccaactaaattcctgactatgaacgtcgatgctccgtcagcattcgatatatacaggaatatctatctatcttttgaagaacctgtggcaagcatagacacggcggccattcatatggaagtaaaggtggatagtgtgtggcaaccggctcctttcttctttatggctgactcgttgatgccacgtcaatatcagatattggcagattggcaaccggagcaggaatatcagttgactattgattctttggcgtttattggtgtttatgggctgcatacggacaaagtccagcaaacggtgaaagtgaagaaaatggacgagtacggaactatcttgttgaatataaaaggagctgctccccatgctgttgccgagttgttggatgcgaatggaaatgtattgcgccaacaaccggtaacggaggaaggaacggcggacttctatttcttgaatccgagtacgaaatattatatacgtttgtttaacgaccataataataacggagtttgggatacgggagattatgataagaagattcagcctgaagaggttttctatttcccgaaagtttgggaaatgaaagctaactttgaatttgaagagaattgggatgtgaatgctattcctatagacaagcaaaagctggatgaaataaagaaacaaaaaccggaagagaccaaaaaggtgcaagatagaaataaagaaagagctagaaaactaggccgatgaaaaaaactattctcatattattgtgcggctggtttgccattatggcaaccagagcgcaatgtgcggcacaaaacgaagctatccaggcaggtgaagaattagtgtacgatttaaagtttaactggaaattcatttgggttgctgccggacaggcaaaaatggacatgcaggctattacttatcaggggaaaccttgttttcgtagtaacttgatttctgtcagtaacagacaagttgatttcttttttaagatgcgtgatacattgacttgtattaccagcagtcgtctggaacctgtttattttcgtaaaggagccgaagagggcgaccgctatacggtggacgaagtatggttcagttataaaaacgggaaatgtattgccgatcagcgtcgtatgaggagggaacgggatacggtgaaatcgaaagaccaaagtgatgagtgtatctttgatatgctgagcatattgatgagggcacgttcatttgatgtaagtgactataaagtcggcgataaaatattgtttgatatggctacaggtactaaagtagagcagcaaacattgatttatcgtggccggaagaattttaaggcggagaatggtgtgaaataccgttgtttggtcttttccttggtagagtataaaaaaggaaaagaaaaagaggtaataaccttttatgtaactgatgataaaaaccatttgccggtgcgtttggatttatatttgaattttggttcggcaaaagcatttctgagagagataaaggggaaccgtcatcctctaacttccattatagaaaagtagcggtttgtcttgatatagtaataccgccgggccttggcagatgccgggtcggcggttgtgttgttgtatattcattatgaatggtatgttattcatcgaacagtttggcctgtctggaaataagtttcaaggtctttccttcatttaatgcagtaagaatagtttcaccccctttgttcactttgcataaagagattttcggtcccatgatttcggtaatccgtatttcaccgattttggtttctatattatgtccttccagtatgccatcttccactacatcaaagcgtaatccttctttgataggatcatcatatcccaggttgatataaatggtttttgccttgtctcttttggtagataccactttcagtattgaaccgtatactttgaagtgattttctacaaaaagtcccatttcgtatggcacattgattaatgaattctctaaagcgctatattgggtggcatctttaccggatgctgagcctgtctcttcataattgcgtgtgctgatagttactccgtcactggtccgtattaaatcaaggcgcagggtgaatttctctttataactgttctcacggctgtggtaacgtctgtgagagcttccgtcatcggttgcttccctttgtatcaggtttccttttaacaggtactctgctctgaagcggcgtgcatcttccagcgggctcagactgagatcacttccagccgaaacggcgtccactacattgatgcggttggtgttgcggataccatcgataaatgcgagacgaatcaggttgatcgccctgttgggtattttgatctcactattgaagtcatccacataaatcgtatatttttgtccggatgcttctaaggatatgactgtcaaaattattaataataggatattacgtttcatggttatacgaatttgtaaggtttgtaatgtagttcttttacgaaaatacacagttcgctgtttatttgcaagtgaactgcgttaaaatagattgcgggcattgattatttattgccggtgtttattttttcatgtttaagtatttggtattgacagataatgattatcttggtgcataaattaaaaggtagcttgtatatggggaagattcaagagaatgatgcaaggttgcagcagcttgtatcaatggcacgcataggatggtgggaggtggactttgatgaaggagtttactattgttctgagtttgtagccgatttgttaggaatagaagggaataagatttctgctaaagatttcgcgaatctgatttgtgagaattatcgggagcgtattttggaggaatttcgctctttccggatgatggagatttatgagcaggtttttccgatacattccaaatatgggatgatgtgggtcagtaccaaggtcggtgagaagcgtattaccaaagaaggtcatgtccgcatcatgggtatgttgcaatgtatttcccggcaacggatgaatatgcaggagcagacggtagaccggttgaactctttattatctcgtttgaacggcatttccaagtcattgcttgattttttgcattctgatgatattaccttggttatcaataagattttaaaggaggtattgcgccaatttcaagcagatcgtacttatatttttgaattggacaggaaattgcatacggaagtctgtacctatgaaatagcagtggagggtataaaagaacgtaaggttttattgtcggaatcttctattgattatgcctcctggtggacaggacagatattggctggtgatccaatcattctttttacattaaattcttatcaatttgatggattaatttgaaagacaaacgcttatggaagttctgaaaagtctaaggtaacgatttggagattgtgctaatttcagtattttacagtctcatactcgtgaaacaactattctttaaacaaaggtaagaatattttttgattaaagaaaaaatctcgaaggaaaaataaaaaatgtttgggaagaggattggaaaaaattcaagaaagggaggttgagggattaagtgagggaaattgcataatcaatttgtggttaccgaaaaaaggtatattcggaatgcctgcatattgcttctaccagcgattgcacgaccagtaattatattaaaaaattaccccaatcaagaagaattttacgtttctcggttggggtataaaggttatttgaattgtaaccatacctcatatattcaagctggcttcattcaaaagaaagtcgaagatgtttattattattcctccattattttgacagacaaaagtcagggcactgataataattatctttggagaaccgttatttatatgcagtgacgatttcattccaaaaagatttcagtcatcttgtccttgtcgcaataccggtacaattgatggcggatcgtatggatgtaatttttacccaaaatggatttgatgatggaagcccgcaccaaggacgtgaactctccttcaacggtagtgtgtaatgtttcccaaagggattgctcttcttcagttcttagaccgattcttcgtgaggaacataacaggttttccaaacgttccttctctttagtcgtatatcttttctcggcagacaatatggacaaagcgtctttgagcatcatgtttagcagcccgttccaactgatatcaatgctgctgtcgctccctaaattgattccggcacctacaaacaggacaatcttttttttgtccttcagatcctgtcttaaggattcgatattcgcctgataagtatcgtgttcgaatatcaggtgtttggatttgtctatctgtcgttccatatccattcaaaacgttctacatctgattccacaagtagctctcctgactgtacctcgatgaatgtcaagtcggagatagccctgactgtatgtttaacacctttcttgatcgtaaccgtatcgcctctgctaacaaccgacctgatatcatcgagtaccagttctccttcgccgtcgataaacgtccagacttcattgcgatggcggtgtaactgatagctgatacccttaccggatttgattttcagttgcttggtaagggatttgtaaccgtcggaaaactcggcggtattgactactttgtattcaccccaacgacgttcctcgaacatcggccgatattgcagaaggtcggcgtaggtcttgatgttctcgcttttattcttgtccgaaatcaggattccgtcattcgatgccgcaatgaccagattccgtgtgccaatacacatgattggcagtccaagttcgttgatgacgtgggtattctcggattcttcatccatgataacattgcccatggtgtgttccgatagttcatcagtcaacgtattccatgtaccaaggtctttccactctccggcaaaaggtacgacggctaccgactgcgctttttcagcgacttcgtagtcaaaactgattttcggaaattccacatagcgagaacggatctccgcaaatgtgtcggcttcaatgtaccgggctacgatatccgtcatatatcccaacctgaaagcgaatacgcctccgttccagaaagcaccctccgaaataagtttctcagcagtcatcatatctggtttttccgtaaagcgtgatacttgaaatgttcctttgttttgtacatcattggctggcactacatatccgtattttgctgacggatatgtgggtttaattcccatcaataccagttcggctacattgtttttcactgcatccgctatcctgcgaatcgtatcaaaataaccagcttcagtataagggtcgcaaggcatgatgattacaatctcatcggtggaacattttcgttcgtaggccaaatacgagcttgcgagagcgatagctgggaatgtatcacgacgctccggttccgtaactacaggaatctcttctccaagctggttgatgatgacatcccgctgcaactggcttgttgccacggtaatcgaatcacagatgccggtttcccgtaattgccgtaccacccgttgcaccatcgactctttcgagccatcgggcgcagtcagcagtttaatgaattgctttgaccgtgtattattggaaagcggccacaggcgtttgcccgagccgccggataacagtatgatttgcatatagatctttgaaagctatatcagtaaatgaaaaatgaaggatttttttggtgggatccttcaaacccactggaagattagattttccaaacctcaagtagttcatcctgttctcgcttactttttaagttatcgtataatccatatacattcaactgtgcagcgaaccgctctgtttcatcctatgcgacataggactaatagacatcataagacatctatacagtagcaagggtaagaagtattgctaccatccattctgacagcctcgtcctccaacgtgagaggctgccctaattactaaaaatatttttcatatttcagatactttactattaataaaaaagaattatctctctttggcgattacctactcttccactaaatgtagtaccatcggcgcaaatagtcttcacttctctgttcggaatgggaagaggtgtattccctaccgctatagtcaccactttatgttattttttatctctccgcccgcatcggattattcaaaaaatcctcgtaggcaagacgtatgccgttttccaattcagttttgtaagtccaacctaaagcggttgcctttgacacatcgagtaactttctcggtgttccattcggacgggtcgtatcccaacgtatttcaccactgtaaccgataattttggccacaagttcagtaagggctttaatagtcagttcctttcctgttcctgcgtttacggtctcattaccgctgtagttattcatcaagaacacgcacaagttggcaaggtcgtccacatacagaaactcacgaagtggactgccatcaccccaacagatcacatagggaagcctctgttctttagcctcatggaaacggcggatcaaggccggtaatacatgactatgttcgggatgatagttgtcgttaggcccgtaaaggttagtgggcattacactgatgtagtccgtatcatattgacggttcaagaactcacaatatttcaggccggatattttggctagtgcgtatgcctcgttggtcttttccagttcgcttgtcagcagacaactttccgtcatgggctgcggagccatacgggggtagatacatgacgaaccgagaaattccaactttttgcaaccgtttttccaagctgcatgaatgacgttcatttccagaatcatgttctcatacatgaagtccgccaatgcagattggttggctatgatacctcccaccttggccgcggcaagaaacacatattctggcttttcctcagcaaagaaacgctctactgcttcttggcgtgtcaggtcaagttccttgtgcgtccgggtgatgatgttcgtgtattcctgaagttccagttcacgtacaatggcagagccgaccattccccggtggcctgccacatagatttttgcgttcttttccatcattttacgattcctttctccagatattcttccaagttggtgcgtacatgttctccggcacgctccacggccaccttggccatgtccgcatctaccatgattttaacaagttgctcgaaagtagtcttttgcggattccaccccaattctcgtttagcttttgccggattcccccataaattcactacatcggttggacggtaaaagtcgggagacacttctaccagcaccttgccggttttcgtatctatgcctttttcgttctctccctctccttcaaaacgcagttctattccggcatgccggaaagccaattgacagaactcgcgcacggaatgctgctcaccggtagctatcacgaagtcctccggcttttcgttttgaagaatcagccacatgcactctacatagtctttggcatatccccagtcgcgcaatgaagagaggtttcccaaatacaatttctcttgcttgccttgcgcgatacgtgcggcagcgagggtgattttccgggtgacgaaagtctctccacggcgttcgctctcatggttgaacaggatgcccgaacaacaaaacatattgtaagcctcccgatattctttcacaatccagtaaccatagagcttggccacggcatacgggctataagggtggaagggggtgttctcattttgagggacttcctccaccttgccgtaaagttctgacgttgaagcctgataaattcggcaagtatcagtcaggtcgcattggcgcacagcttccaagatacgcaatacaccagtcgcatccacatccgctgtaaattccggtgagtcaaacgacacctgcacatggctttgtgcggccagattatagatttcattcggtcttacttttttcactacttgcagaatactcatggagtcgcctaagtctgcataatgcaggtgaaaattgggatgtccttccaaatgggcgatacgctcacggaagtctaccgacgaacgccgtatcgtgccgtgcacgtcataaccttttgctaaaagaaactcggccaagaaggaaccatcctggccggtgatgcctgtaataagagctttcattttaaattatatcgaaatatgttatttattttcgttacaacgatttcacacaccttgtaaggataacgcatacacaggaatagaggattagaaaacaccctattttgcttcaaggctcttaaatgatcacgcatgatttgcctatggctatgaaagccagaagaagatgcacctcctatacgcatagttacaaaatctttggctatatagcgggtgcggatgtggtgtatgaatatcaggcgcaacagattttcaaaatcggcagcgactttatacgataagtcgaaagttccaaattcctcatatattgaacgtcggcagtagaaagacggatgtgccggcatgaaaccaaaccgcatccaacttcgatggaatggccgggatgtgtaataacggacgcatttattcaaatcacaatcgttcacataatgaacatctccaaatacggcatctaaatttgtatcagacattgctcttgctaccattgccaaaacatcagaagaagtgtaaaagtcatcactattaagtatgcccacaatgtcacctgtagccattgcaatacctttgttcatagcgtcatagatgccacgatcatgttcactaatccatcgtaaccttcctttatagattggctcatactctcgtactatgtcaatcgtgttgtcgtttgatcctccgtcaattatcagatgctcaaaatccatataagtttgtcctaaaacactttcaatggtgttacggagggtggaactgctattgaatgtagcagttataatgctgattttcataaaggatatatattgatttaaaaaaccgttcttattctgatttttttagcaggatttccttgataaatagaataagattccatgtcgtgattggcaaccgaagccactcctaagacagaatgcgagtgcaaagtaacaccaggacaaacaatggagtgtgccccaatccaagtgccgttttccaatgtgatatttccaatgattaaatcaaaagtagttttcttgtaattgtgatttccgcaaagtaacatagctccttgacttatgcaaacattatttccaatttttacatttgccaaattgtctatccacgcgttttcaccgatccatgtgtagttcccgacttccaatctccacgggtattttatgtttactttaggcttaataactactccttttccgattttcgcaccaaataatcgcaacagtcttacttttatgcaggaaaatggattcagagggtttataaaaaacaggacgtttataaaataccagacaattcgtatgaatcctccttttcccggattataccaagaattatcatagtgggataaatcagtattcatacacaaaattgggtttttctgatatatggagaatatattgatataattggctcattttatctccgagtacagttacagaataattttcttgaatcattcttttaccattgaggcccatttgtagacgttcattaggtggcgtttggatagccttgagtaatgtttggtttatagtttcttggtcattactaatccaccaaccacaatggtatttttccagttcttgccatggcatacctttggaagcaatgactggtattcctctcactaaagcctctgtgacaatatttccaaaattttcaaagtcgcttggtactgccaaataagttaatgaacttattgcgttgtctttttctacacccgccaaaaaacctgtaaagcggacatttgtcaatttaagtcttttgacttcatctttcaagaattgctcatattgttcatcatcagcaccaatgataagtaattcggtatcttgcatctcttttcgtaatatgctgaatgcgtaaatcaatctttcaatacgtttgcgtggatgtactcgtcctaaatacccgattcttattttatcactttggacaatagggcgttcaataattccgtctgtttctattggattgggtaaaactgctacagggttagtgaaacccatattacggtaatggtgcatttcttcaagacaagtagcttgtatgcaggctgctttttgtaaatcttcccgttgatacaacaacaaagacagttgttttatctgtttagagtgcgctaaggcctgcggataaagcatcccccttaatgtaatgacataaggctttttcttttttcgggcaaaatttgcaactccgtgtccaagatataaccatagcccttgtatatggtataaatcatataagggcatattttccaatgaggtctttagatatggaatgtatccaaagcgagtttccaaagtaggtgaagtataatgtatcttcacatcattggctattaaatctttcttgttggttagaggggccataagcatttctgcatttacctgattagcgtgtaatccttttatggtcagatatgtgcttaatgctggccctccgtattttatatcaagagttcctgaatgaagtattttcatcatatgcttaagagagaaaaaatattaatctaactgcgaatggcaaaagaatacaaaggaggcaagtagtgaaccttggagtttacagagatagagaaagaatagatctttcttaaaaggcgatgaaacaagcatatctaaaggatcaacttagtcctcatattctgtattataatggtatgattgaaatgcaatgcctataaaaggaagcatacctatcaggatacttcctcccatcattgaatacatgaaatttccaatcattgtgcagcagcctatgactataaaatagaatgatatatcattggatttggatttcttatataaagtatatacttgatatagcaaataaaagaaaaacaaatatccaatgaggccaaaatccactaagttcaggaccaatcccgattgaactggaatatatccgccactgaatgttagatttttgctatggaaagaatattgtcccggcccatatccgaataaatagtaaataggattattggattctataaaatcttttgttattaaaacctctgaccgtccatcctcgatttcattttgggcacgtccaaaagagcgttcataaaaagaattaataaaagagatttcggttttagcattagttggttgcgttttttgaatttctgaaaggaatagtccgaaagagcctatcactaatacggtactgatagtcagtattgcaactaacttattagttcttgataatattaaaatcactacaccaattagtccaatcgcaaattcaataaaagcggcagaagaaaacgtgtttaataaaataaataatcccaaagccaatatagttgccgctttcagatccaatttctttttgtagaggaaatttgttattagaaaaagtacaaatggagttaatgcgaaagccatattcttaggttctccacaaaggccatatatgcgaaagactgtatcacctccaaaaaaagtggctgcaacagcattggacgtacctacatcgcgaatgatgggagcaaatggaatgcctgctttaagaaagaaataatgtacaaaccctattcctatcagtgtacagatggcatacgtgtaccactttatgaccctttgatcaaaatctcttggaagccggttcatgaataataatggaacgactcctaatatgtaagtggcatcttgaaccaataggcgaatcaaagtgcgtgttccaacattttcaggaggcatgagtaacgaaaacagattactaagtaatagcatgataaaaaagtatgcaacaatccttttaagtacatccgaagtccgactgtttgctgggtgaaacagtatgcaaaaaagcatacctatggcaacgaccttgtacggattccatgtagttataagataaaaggcacagttttgaaatggaaatgtaaagaaatacaaccataaaagatactcatgtttctgcctatatacaaagaagcatgtcagacataaaaacaaggcaaatattccataacgtataatttcccaaatcataccattttatttatcaatttattataggcttctgcggctttcttatatgtaaattgccgggcatactggatcaacaaaggtgaattgctttctttgttaaaattcaatagatgaagaaaagcctctttgatttctattcgattattcgggtcaaatagaaagctgaagccatttgcaatttcgggcaaggaagttacattagaacaagcgacaggaacaccttgtgagtatgcttcaatgacaggtaatccaaatccttcgtaaaaagagggaaatataagtcctttactgttttttactaatgttttgagcacatattcttcctggaaaggcaaatggataatcttggcatttcgttccattaggggagttatctcttttttaagatgctccgctatatttccgatgataagcatatctggaacctcacatttctctttcaccaattcctcatacgctaataacatattgatcaaattttttctgcgggacatgaatccccaccaaataaaataggctcgattctggtattgattggtaagactgttttcgatatagtgattgtcaaaccaaaaatcatcaataccattataaattacattgatacgggtatttactctcttgaaatatctatgaatatcctgcttcgtgtattcagatatagaaaccacattcaaatctttcaatctgaaatagaaagattttgcaaatttgttttgtaacttccatatttttgcatgtggaatagatgcttgggaatggagtatggacaaatctgttatattggctatttgtacacctttgaacgctcggacatattccaaatagcttggatttataaaaatatcgtaactgttatctattggaaaatagtttgatagagtaaggaaacgctgtaaacctacgacatatctattccatttaaaatagcgtgtttttacatttgggagtgcatgtaattgctcaaaaaaagactttaacattttaggtcttggcctttgagtataaaatatgataaataaatcatcttgacgttgttttattagttcaagcagcatacctctgacaggatatgcactagtaaaaacactcaagcaatctccagatattgcgattttcatttttgtttctatttgggggttatcttacaagtttcatttatcttccaccattgagtaaactacagaattgtgggcataatttttttaacacgtaataagtaataagactcaatataatggttgttaatatacttagcatataagtcataacagctacggtatttgatgtcggttgtaaagcgagacaaagtccctttctcaaaggtgctacaaacaggccatgcaaggcatatacaaaaaatgttgtcgaagcgaaatgttctattaaaatcgtagattttccgatgcttagtcttaggattaaatcagcacatataaacattacaatcatgcctgttaaaatggtgatattatgtagcaaataatgataagtttccccacgggtaatcatatctgctataattacaatgacaaaaagaaacatagttgatatttttgcttttcttgatttaaaaatatcagctaaatcaaccttgttcatagaaaaataaccgcctaatgtgaaaaagaaaaatccagtcatatctatgccacaaaactcagggttaaagctcagccaaatacccccgattaatcctactaataatctgccacacttaatgagcctgtataatagaggtgaacaaagtactacaatcatcaaatctcttacataccacaaggggaaatctataggcatggatttagattctcctaatccttcaaatcgaaattcccaaaatgattttagaaaattttcaaacgaaattggaatttccgtgattccttgaaaaacgggacataggggggggtaatgcttcgctatgaaaaataaaaaggctatcagattccataaaagatagggtataagaagtgtgtatagtcgatgatgtaatttagatgcatactcattgtgtgttagtgttccattccgatagaataaaaatcctgaaattaaaaaaaacattggtacactaaatcgacctattatattgctaaagaaatacattacatcttgtgcccattgcccacgtaactcaggcacaagctggtcggatatgtcgcaatgaatcatcaccacacccaccattagtggaaaccgaagtaaagtaaaaaactttaatgtatttgtagtcatttctgtatgtaaaaagattattttagattcagtcgagttttaaactttctgcctaacaatgcggtggctattttaaatattgcatcttgaatggcaggtgtgaaatgtaaatagcagaataaaaacaattttccatttaaagaattaggaacgtaaaattgtttgaatatttcgacatgtttttttatcattcgtaatacatctaaacgatgttttttagtgaacgatgaaaaatagagtgaaaacacacccattaccatttggtttagaccaaatttttgaatacagaagcgtttatattcgttatctgaaactgtgatgtcatattggtaatagtccaataataattctgatgcaagaaaataggcatcagttgactgtaatcttcgagaaagggattgttctccataatgcatatagtgataacccgcatatgaggaaaaatcaaactgccttgcatatttcaagcattcataataaaatacatggtcttcgtgcaaacgtaaccgctcatcaaatcgaatattatgcaacttaatgattggtgtagcaaacatttttcccaaaatagcccctaagtgtaaaattcggccttgtttagggatttcctttgttgactccttcgctactgctcctacatagtccatgaaatacccttgaaagactatttggtcatctgcatatggaaattccataaagcgtaaaagatagctaggttctacccaatcatcggaatcaataaatgtaacatagtcgcctgaaattttgtctaatgccttgttgcgagctacagatactccgccgtttttttgatgatatactttgattctagtatctttctgtgcatattcatcacagacatctccacttctgtcggtagaaccgtcatccacaagtatcaactcccagtgggaatattcttgttcgataattgattctatcattttgcaaagatgtttctctgaattatagacaggaacgataatgcttattttccgctgacttagttgttgcataatttactcttttgatataatccttcgtatagccattaaattttcaaaacctaaaattttgcttacgaaccttatccggggcgattttttcctcaattgaaatccaacccctaagttctccacttggtctttcgctttcttatatagggctggatatttgttgccatatagataaataaaatacgtgaagttataactcaatgctttacgtactcgtaaattatctttatgaatgagtgcgttttctttataactgatatagctatcaagtaatgacactaatttattctcactgtttgctttgcttactgtggagtattcgcctatacgataataaactttagcattggatataaaatatgcttttgaggctatcattaatatgcgcgaaaaaaaatcaccatcttggttcatgagtagattttctttccaacctcctgattcgtagacaagctgtcgggataccatgtagcatgatgtttgtaacatactacctgtctcccataaatcaatcaaaagttggaaagggtctatatagtctttataaaaatgccgagatgggaatgtcgtttctgctatagaagatctaaatttatcccatttcccaaaacttatacatctttcatttgcatcgcataggcgtatgatatgttcctctacaaaggaaggattaataatatcatcagcatctaaataaacgatatactcaccggaacttttacggaaagcataattacgtgcagcacaagcaccggaattatcttgtcgatacactttaatgatattggattcaaaactttttgcgattgcaaatgagttgtcggttgagccatcatcaacgacaattatttcgatgttgcgataagtttgagcgagacaactatcaagagtttctgcaacaaatcgctctgaattgtaacagggaataagtattgaaacttttggtgacatgtaataatttatatgatagataattctattttttgtactactgttttattcgttggaatatgtttccccactaatgttgtattgtatccgactatcacattgttaccgagtgatgtacctttcaatatggatgatttttcaccaatccaaacatcatcacctattataacaggtgctgttttgggcttttcatattcagcgccaaaatttgggaacttctcacgtgttaattttcttcttttttcagaaggatagatgcagtgtgtatttgtatcccaaatcctaagattataagaaagcatacaataactacctatttctactcgctcatcggaacggatttcactgccgttatttatatttgtatattgtccgatgtgaataaatcccccaaaacggatccacagtctttgaagtcgtaaataaacatgatgatccactattagtttcccttggctaattgtgtacaatggacatgcaatattatttccctgacttaggcaagaatactcactgatatgaacatgcgatccttttgttacaaaaatttttacgccaattaattgaacatgactatctaaaattaattcagaagtactgtctacataaatggtactcttttgaatccttacattttttccgacccggaaaattcctcctgtttgtattcttacttgtgaatgtttttttctataggaccaatgagtttccacaagtttgcgataaattttgcaaagtagattcatcatttcttatttttagccactgtgtttttgattaaagtttggcagattacatatccattgtttttcgcccacatattatatcctacatatgtgcataaaaaataaatggatttcaaaaaaatgtcaataaaatgattcctacttgaatagtctataatctgccatagtaatatagcaaaaatgaaaggtgccacatatcgtacaatagtgtatatttgtgatgctacaggtaattgtatgcaggtgtttgctgcaaaaaagtaaggaattaaattaattcctgatgcaattgatacactccatatataagcatgaaaaccataaataatcccaaagggtatggctattaataaaatcatattccgaataattcctatccataaatataaactcatacgatttactactgaaataatagcatcatagactacagggaggcaaattgtaatagaaaacaagcctaaaatcttaaatatctcaattgctccttcccatttatttccataaagtattataattaaatcgtcagcgcacatatacataagacctgcaaataaaaaggtcaggaatgaaatcacatgaatgagctttataatgctattacgtaacaattccacatcattttgaagtttgctgaatgttggtaacattgtactccggatagcagaaaaagaacattctataaccaaattatttaaagacttagcccgattgaatagacccaaagaggccgcactgtataatttaccaatgataaatgtgtctaattgtctaaatactctatttataatagtggtcaatgtcattttccatccaaaattccaaagttctttgacttgagaaggttgaaaaagcattttgggatgccaagaagagattatccatagtatggtcgaattaaaaagccaacctgcggtatttgaaaaaactaatgcccatacgccaaaatctaataaggccaatattatacctccaattcctgaaataaggccagaaattagttttgcaataaagggggctttaaagtttaactttttctgaaaaagggctgtttgtaaagttccaaatgaactgataaggaaagaaaaggaagtaattcttacaatattacctaattgtggcatttcaaaaaagtactcaaagagaggggctgaaagaaaaacagtcaatgtacaaaatcctcctaacagaatattaatccaaaagactgtggataattccgtttccgtaattttctctttgcgtataactgcattccctaatccaaaatcaacgatagagtcaagtatggtatttaagaccaacgccatactaatcaaaccgaaatcagaaggcattagtaatctggcgagaaccaatgaaacaataaagtttctcgtttggttgacagccatattcaagaaattccaagcactacctttgagtccttctttttttaaaacggaaatgtcgctcatgctaaaagtttttcatcccacacatcaaaacttatcaatccctgctaaaaatatctcttgtatatactttcttttttgcactattcaaacaatcatcgtatctattggctataataacctgagattttgatttaaatagttcaatatcattcacgactttacttccaaagaaagtactaccgtcctccagcgtgggttcataaataatgacttctgctccttttgccttaatacgtttcattactccctgaatgctgctttgtcgaaaattgtcactgttggacttcatcgttaggcgatagactccaataacgcatcgtttctcgtcattaggattaaaatctccacggttatagtagtcatagtaacctgccatatgtaacacacggtcagcaatgaaatccttgcgggtacggttgctctctacaatggcttgtatcaggttctctggtacatctgcataattggcaagtagttgtttggtgtctttgggaaggcaataacctccataaccgaatgacgggttgttgtaatgagtaccgattcgtgggtcaaggcttaccccgttgatgatggcctgcgtatccagcccttttatctcggcgtatgtatccagttcattgaaataacttacacgcaaggccaaataagtattggcaaacagctttaccgcttccgcttcggtaagtcccatgaaaagggtgtctatattttctttgattgcgccttcttgtaacaaagcagcaaaagtatgggctgcttcgtccaagcgtttatctccttccggtcgaccgacaatgatacggctgggatacagattgtcatacaaagccttgctttcgcgcaggaactccggtgagaatatcacattttccgtatccagtttcttgcgtatattctcggtatagccaaccgggattgtacttttgataaccataatggcacgaggattcacgcttttcaccagttctatgacttcttccacatggctggtatcaaaatagtttttcactgggtcgtaattggtcggagcggctattaccacaaagtctgcatcttgataggctgttttaccatcaagggtagctgtcaggtataattccttttcagccaagtatttctctatatagtcatcctgtataggtgattttctctggttgataagggctaccttctccggaatgacatctaccgccgttacatgatgatgctggcttaatagcgtagcaatacttaatccgacatagcctgttccagctactgcaatcttataagttttcatatattctattatttagaaaggtctttcaatcgttccaagatatttttttgcattttctttcttatcatttcttcgtaaagagcaaggcgatgtatatcgctacccattaaattataaaaatcgtttttcaacaaccattcggctttcttttttgtttccacgccgtatgcaccgactaaagaaaagagattgagttgaaacttcacccctatgccttttaattgtcgataatccgattcacccatataaacataccgctccggatgagcgagaatgggatagtagcctttggccttgatgcggagcagaatgttgtttaatcccattggagggctgaagtaagaggtttccaccagcagacggtcgccgctctcacccaaaggcagcaggtcgttcttttccaaccgttcctcgaagaggttgtcgagcatattctcggaggcaagatgtagttttatccgtccgctataggcggcttgaagttcagcgtaacgctccctgagatgcgttgtggtgttgggcatatcttccatgatatgcggtgtaagccatatggattttatgcccaactcttcatacaggcgcagtatttccaacgcttcttccacagtccgcaccccgtcgtccacacccggcaggatgtgcgagtgccagtcggtaaaaccctcgaatatgccgctatctttcagcgggatgcgttttctgaaaggccacacaatgatatgaagattttatttgaaatacttatttgataattatttgacaaccaactgtttatcacccaacaccaacacgtttctcatcggagccgtagtggtatcccgagccgtagccgtagtggtaaccataccgatagccgtaacggtatccgtagcggccaccgcttccctcggttccattcaggatcagggacatgttcttgtattttttctccccgtagatcttctccaattcagcaagcatactccgttcaagtaatcctgcacgaactacgaaaatggtacggtctgccagcttctcgataatctgcgtgtctgccactaattcgatgggcggacagtcgatcagcacatagtcgtattgcccccttacggtatctatcacctgcttcaggcgttcgtcgaacaatagttccgttgggttgggaggaatcgttcccacgggtagtatatccatagatttatgcctaggatcgggtacgataatctcatccagattgtcgatacgacctcccagatagtcgctcaatcccttggcaggagagtcgatataggatgacgcagatccgtggcgcaggtcaccgtcgattaccaacactttcttccctttgatggcaaagctcacggcgatgttcatggtcaggaacgatttgccactgcccggattgaacgaggtcatgatgatgacattcgatgtcttgtccttgccggtcataaactccagattggtacgcaatacacggaacgcctcgttgatgatgtcacggctgccctccttgacgacaacggtcttgacttcctgcggctttttcccgaatattcttttcttctttcttgtaaacagcggaatttcaccgatgaacggcacggtcacactctccaggtctttccttccccgtacacgggtattcatattctcgcgcatgaagataatgactatcggaatgagcagccccagagcaaacgcggccataaagatgtttttgcgtacaggagatgtcggcaacatgctaccgtgcggcggggtgacaatgcgggtattgtaagccgtgaatgcctgcgagagttcattttcttcacgtttttgcagtaagaacaaataaagagcctcctttaccttctgctggcgttccaccgaaagcaggtatttggcctgtgtagggttggccgctatacgtgatgttgtctgttgctccgtctgccgcaaactttttatctgcgaattcaaggttactatctgattgtcgatagacctgattatcgccccacgcatggatgccagagcctgatccatatccatgaccagcggattttctgcgctgctgttcgcaaccaggctgttacgctgcaacagttgtttgttgtattcggcaatctgcgattcgatgttggcactctctataccggaattggccggaagcagttgggtacggttggcatcgttggctaaatagttccggatgtaacgggtcatgtaaagctggttgttcaaggccaggatctgtgcgttggtcgcactgctttgggccatgtacatgctcgatgccgcctgcacgtcgggtaacaggtgttctgacttgtaggaggaaatatcctcgtccacgttccccaactcctgttcgattacgcccagacgctcattgatgaacattgaggtactgacagcgatctggttcttatccttcacccagttctcgttataaacggaaatcaacatgctcaatacatcttcagcccgctgtgtggagttatccttgaatgacaagtctataaccgacgctttctcgttattcaatgaaacggacagattggatgagcaggagtttacagcgttatacaaattggatttgcctacatataatgtatatgccttgcctttcacgtaattgggtgttgtattgataatgatttttcccaatggtgtaggaatggagtcgaacaagcttccctttatatccttttcgtcaagatccgtcccgttacgtataaagtcagacaggaataatgtgccgtccggctgcacttccaacgtaaaaccggctgattcattttcaggcaagtcatttatcgttacatccactggtaatgtcagcccataggccacctgacggtggaattttcccggaacgaagtaattcatatccaaacgcaaccgtttaactacctcggtcattaaagccggtgactgaaaggtgatgagctcattattcacatttgtaccggattggaacaacccgaactccgagaaggattccaaatccgaggaaaccgacttgcctttggaatcctccttgatcaataccgaagcggtgcgtgtatatacagcaggagtacgcaacagatagacggtagcgacaccgatcgttgccactaaagacaagacgaaccacttccaccttgcgagacacagatacaacagatcctgtatccgcaggaaatcatcctgctgtcccggttttatattcttttgatttatggccatatctgattttatatttatttcacaattaacacggtaatggtagtcagcagcgaggccaacgacatccagaaagaagcagaacggacgttattgccgttgacagtcgcctgccgtgctttcattgagttaggttccacataaactatatcgttctgctgtaaataatacacgggagaggcataaaggtcgtatcctgaattcaggttaatctgatacaaggtctgtttaccgttttcctcccgttgtaccagcacattctcccgtttcccgtagacggtaaggtctccggccatgcttaaagcatccaaaagcgtcagcttgtccttatcaatattgaagcgtccggggctagcaacctcacccaacacggaaacggtcaggttcatgaactcaactgtaacgacagggtctttcacgagattcttcgaaaccagttcctcttttatatacgaggcgatttcctcgcgtgtcattcccgccacatggatatgccccaacactggaaaatcgatatctccatccttgttgatcgtatatcctgatatcccctggctattggatgttcccgatgtcgtaccgatctgtctggatatgatcggaaggttgaaaaggttcatcaacaaggggtccttgctgttgaccagtattgagatcttgtcttcgggacgcacccggatttccagcgggttcaagacttgttctgcggtaccccgtttcaggtccgtgaaataagcgactttcggcgtggcacatgatcccagcaggaaagccacggtcaataagaataaaatgtatctgattttcatatttcattgatttttatttgttggttttctgttccgattgaagttgtccgatagatttcgtcagcctgatgttggcaagagtccatatcaggatatcgcccagcacgatccagttcacattgagataaagggacagaagaatattgagcagtatgaatattgttgatacggaaacaatgataatcatggcattgcgctgctttattccgagagcaagcagcttatggtggatgtggttcttgtccggcaggaacgggttcttcccgttgcgtacccgatgcaggtagacccggaccacatcgcagcatggaaccagcaagggtgagaaggccagcaccatcggatgtacatttcctgtattatcgtctagaccgcacatggtcagtttgagactgaggaaacagagcatcatgccaacggtcaaactacctgtgtcacccatgaagatcttccttccgtgctcggcgttcccgaaaacattgtaatagaagaacggtaccaacactcccaatgtggcgaacgccagcatggcatagacatgctggtggagcatgaaaaaagtcagaccgtaaaacaggcagacgacactgcatagcccggaagccaacccgtcaatgccgtcgatcaggttgatggcattgatgatgaagaccacgattaaaatggtcaaaggataccccagccataacggaaccgcatgaatacctaggatgccgtgcaggttattgatatatattccaccggcgataagcatcacgccacacaggatctggatgacaaacttggcacgataacggataccaattaggtcatcggccatgccgaccagatacagtaccatgatggagcagaaagcaaaagctaaaggccgtacattgtttccgatttcagacaacatttccgaatgccccagtgccatattgattcccagcaacaaagctatggtgaaaaacacgaccggtttgaacgcgataccacccaatcgtggcaccgcacaatgatgtatcttccgttcatcgggaaggtcgaacagctgtttgcgaaaagcgatcagcagaatctggggaatgacgatacccgcacagagaacacaaagcaaaaatgccagtgaacaatttacaatccaaaaatacatatattcagatattgttttttatttgcgtaaaaccgtgaataaggattccagacttttccatatcaggaaatgacttcaatcaaatcgggatgaacctcagccgatatccccataatcccctcaagcatcacgaccacccggcggttgcgtttcccttttacccgcataaacacacccttaactccatcaagcttgccgccgtggatacatacacgggtacctttccgtacgtcgatttcatccggcttataataggccgtatccttctcatacagggaagctatttggatgaaactgtccatctggtcgtctggcacggtgatatattccatacccgtgctttttttccacatggcgaattgcaggaagttgtaccgtttcttgaattcggtgatctgcgagtggctggcgtggacgaaaaccagactcggtatgaccggcaccagccttgtcgacttcatcccgtgataggtctttacggcgtaatgtttcggaatgaaatattccagaccgtattctttgtccttcagcctgtcctccgccattttctcattcttgtaggcgcgcatgacgaaccagcggacctgctttttttcttccaccgtagaaaaactcatacccatattgccgggattattttataggtgaggatatacccctagttcatgccaattcgtatattggtatgtattacaacggattacatttcctttattcataatatccactatcagtcccatacttttgacaaagtgtacagacctcatttccgaggcttctgccgctacttctcttggcaagagaaatatccggggatcatatttcacgtaactggttgacgaacagatagaaatacggaacggcattatggtacttatccaacatatgttaagcaaatacactctgtatgaatgttttggttaattttatcacccgttttctattgttttttcaatattttacgtaattttgcgcattgtaatatttctcttgccaagaaaacgagccatatgctcaacaatttttattgtattacaaaacgccttcaaaaatccttttttaaaaacatccggttttaaattgtcaataagaatatctccaacggtatcctgccgctatattgacagttcatggatcttttctggtacttttctttttaagagaaataccggaaagggatagttctgataatcagatgctatatatggaacctgacaaggatttgtttgacaattaaaccggaatttgaaacattttctttcgaagaaaactgttttttatcatacaagtggatattttcctatattttacctatctttgcaatgtgtaatatttctcttaaaaagagaagcaggaacggcacagccttttgt

SEQ ID NO: 66 - DNA, 27683 bp, unidentified
  source 1..27683: mol_type = unassigned DNA
cggaagccccaattttctaccgctgggtgtccaacttgaacttgcaatttgcgtaaaattttcaatatggctttctggaacactcaaatagctaaatggctgataagcatcatcctgctttatcacatagaagcaagtttgctcatttgccaaatcatcttcatcagcatatttactgtcatcagtcaaaaacttgttttgaattgcttctttaatgctttctcggagccttcttttgaagccatcagtttcatttggattgccttcatccaaaacaaatcgctttactaactgctctccatctttcataactatgtatatttcaaatccgaactgctcattaagcactttgtttattgctgttgtaattctttgtttaggcatttttacccatcctttatcatatatcttcatatataagaaacacattatcagatattttctgccttttaatgctgtgtcctacgctgaccgtgccccttgtgattccgatacattcttttccactatactccgttaactgtgtcgtttcaaatttaaaggaaaaaacttcatatcccaacacggttaacactggattttggtaatacaaattcgttttccacattagcgcaaatagcattaccattaaaattccaaatacaataagtcccttccatgtgtctaaatcatccattgccatcggaaggacatatgtcatgaaaaaagtcactccggaatcggatatcttttcaatatcaataagtgattctccttcactaacaaaattagcccgttgcgatttttcaaattttcgtacactatatattgaataaataatccacaataaacagaaaagttctaatatcaatgtaacaaatgccgaatggtttacaacttttgtcaaggcgtaaattggattatttagaactatatcagaaaacttcttacataaatgaaacaatttaagatcaaaatattttatcaacaaaatcagaaataatggcgcaaatgactgcataatcaacgctcttttcattgctggattatcagtcataaattcaccttcttcctatttttctcacatctcagccgaccataagatcgttgcctgctgctcaccacggagaggtgtgtgattcattcgagcagcgtagggagctaccgctcccagtatatcacaatttcagccagttttacagacgctttcttaccttcatcaccgcacagtacatcaatccgcctagcactccgccgactgtgttatagaagatgtctgataattgaaacgttcccaagcgaagcaataattgcaacatctctatgcttatcgaaaagataaatgctatctttccgctttcccacagtatcttcttccagccgtttcctatcttttcttcgaatgtccacatcactaccgctgaaaacggtaccatcatgattacgttctcgatgcactcggtggtcagttgctgttcaccattcacggtctcccagatgccccagccacccatgacatcggataaaggattcatccacagctgacggtttaacagggttcggaacagaataagtgaagtcaaaaaggccaaaaagaatagttttctgaagaacacgctctctttaaacttctgataccatgtcactatggcatttttccaacctttgccagcatgtattggctcataagcataaagatagaaaaacatggccaaaaaggaaagaagaagcgaaaagccaaacggctcatatagcgcagtcaggatgtttgtgatgatctttccgagtaaatcaatcgtttctttcatcgtcgtttacagatcactgaacaagtcagccttatacacgccgttctccagcatctccttgaaactgctctttacggctgcgacatcctcatggtaggtcatgccgtaccaggtgtcgttggtcttcagaaccttcacagacatcttgccctgctccagtaattcaccaataaaaattgggatcagatactcggctttctgcggattgcccgggacttctttctcaaagaactctttgaagccttcctccagcacatccaaaaactccggtgtcaagccccacatattcatggaaaccagggaattcacatcaacaaccacgccatctgcttctgctccagttgcggtctttataatattcttggtttccacaacttccgtcagattgttctgctcatccatcttgcagataccacgagtcacaccgccgttatcggacagcgtgttcttcagcacaaagcctgccatgcaggacttgccgccattcaccagatactcatgtacggccttgaaaccttccttgccgtagtaatcgtctgcattgatgacgataaacggagtcttgatgaccttcttcgctgcaagcacagcctgaccggttccccacggctttgtccggccttccggcagagttcccgggatatcattgatatcttggaaagcatagtcaacagttacattatgagaagagcaaatggaggcaatgcgatcaccgatgacctctttgaattccttctcgatatccttacggataatgaataccacatggttgaatccagcttcaatcgcatcatggattgaatagtccatgataatatgtccagcatcgtccaccggctccaactgcttgattcctgttccgaagcggctgccaattccggctgccataataagtaatgctgttttcataacttcttcctcttactaacttttattctactgtcacactctttgcaaggtttctaggcttatccacatctagtcccttggctacagacacataataaccaagcagctgcaacgggatcactgccaaactaccaacaaagtgctcgtccaccttcggaacatataccgtgaagttcacctgatcttcgatttcatacttgccataagtagtgagccccatcagataagcaccacggctcttgcactccaacatattgctgatagtcttttcatagagttcgctctgggtcagcacaccgatgaccagtgttccctgctcaatcagactaatagttccgtgcttcagttcgccagctgcatatgcttccgagtgaatgtagctgatttctttcagtttcaaactaccttccaagcagacagcatagtcaatgccccgacctacgaagaacacatcgtgtgcattggcatactttgctgcaaaccactgaatgcgctctttatcttccaaagttttctgcatcttctccgggagagtcaacagttcagaaatatagtagctgtactgttcttcagtgattttttctctaacttttgcaaactgaaccgccaggcagtacatggctgcaagctgtgcgctgtatgccttggtcgtagcaacagaaatttcagggccagcaagtgtgtaaaacaccttgtctgcttcacgggcgatgctactacccaccacattgacgattgccattgtggtaatgcccttctcttttgcaagtcgcagtgcagccaatgtatctgccgtctcaccagactggctgacaacgatcaccaatgccttctggttgagcggcatcttccgatagcggcactcagatgcgagttccacacgcaccgggatatccgctatatcttccagcacatactgagcagccatgcccacatgccatgcagagccacaggcaacaatatagatctgctcaaagtttttaatttcgtcctcggtgatctccacactggataggtcgatagcgccgttcttgatcacagagttaagggtatcctgaacagctttcggctgctcatggatttctttcatcatgaaatgctcaaagccgcctttttcggcagcctcggcatcccacttgatttcagtggtctgcttctcgatctcatctccatcgagattataaaaatgagcctcgcctggaacaagttttgcaaactcaaggttaccaatataatatacattgcgagtgtatttcagaattgccggaacatccgaagccacataagtttcaccatccgcaataccgataatcatcgggctatccttacgcgccacccagatctcgcccggataatcacggaacatcagctcaagcgcataggagccacggacacgcaccatcgtcttagcgatggcatcaataggaccgaggttgtactttttataataatagtccaccagcttgatgaccacttccgtatccgtctgactatagaatgtataaccgtgcttcagcagcttttctttcagttcggtatagttttcaatgatgccgttatgtacgccaacgactccagactccactgtaccagaaccagaacgggtacagttacctgaaacatgcggatgtgcattggtttggctcggctcaccatgagttgcccaacgagtatgaccaataccacaggttcctttcaatgccttgccgccatctgttttctcgatcagattggacaggcgccccttcgctttcacgacctgtgccagattttctccgtcacggacagccagtccggccgagtcatatcctctatattccagttttgacagaccatccagcaggatcggtgctgcctgtcgatttcctgtaaaaccaacgattccacacataggtttatccctcccgttatttaatctattatactttcccttttatgcaaaacgactccgggtaactgccagagtcgtcattgactttacgccttatatcctttttcgcagatcacattgaccacttcgtcaacatacttctggcaagtattatggtcagatgcttccaccatcacgcgaaccaccggctcagtgccagactcacgcaccagaatacggccggtatcgcccagtgcttcagcaactttagacactgcttcctgcacggcaggatcattctgcgcggtcttcttatcggtaacacggacattttccagcacctgcgggtagatcttcagcggtgctgccagctcactcatcggcttcttcttagccagcatgacttccatcatcttcaggctggtcaggataccatcacccgtgctggcgtacttactgaagataatatggccactctgctcaccgccaatacggcagccgttcttagccatgtactcatagacgtacttgtcacccactgcggtcttggcgtagccgatgcccttctcatcaaaggccttatacaggccaaagttggacatgaccgtggtaacgacggtattggtcagcagtttgccccgttccttcatgtagcagccgtagatgtacaggatatggtcgccggtgatgacattacccttttcatccacacacaggcaacggtcagcatcgccgtcataggcaaaaccgatgtccagtcccttctctaccacgaacttctgcagaccctcaatgtgggtagaaccagcattgttgttgatattcagtccgttgggctgtgcattgatgacgtaggtatcggctcccagagcatcgaatacagactttgcgatgttccaggaactgccattggcacagtccagaccgaccttcaagcccttgaaagagtagatgcccagagaaatcaggtagcccatataacggttgcggcctgcaacgtagtccacagtacagccgatatgctcacgatgggcaaagggcagctcaggccagtccttatcaaagacgtggagtttgccgtcaatgtagtcctctaccagcagcagagtttcctcgggcattttctcaccgtaacagtcgatcagcttgatgccgttatcgtagtagggattatggctggcagaaatcatgatgccacagtcgaagtcgtccacacgggcgatgtaggccacggaaggagtggtagtgacgtgcagcaggtaggcatctgcgccggaagcggtcaaaccggcaaccagactgtattcgaacatataagagctgcggcgagtatccttgccaatgacgatacgggcaggctcgttattgccgttgcgctcgcgcagtgcgttgtagtaccagcccagaaaacgacctactttgtaggcatggtctgctgttaatataataccagcttcaccacggaagccatcggttccaaaatactttcccattttaaatcttcctcctaatattattcttctaatttaaaaatatcaacgagtgcctcgttttcactaatctacaaatattcagtttttcaataatacaccacccttctcagttattgattacccgctaattgctgttccccatacactgtcatcacaattttcttaatcgctccttgtacatccagataattcgtattatggcttgcatgagacttatttgcttcgcccttgaccacgaacttgtcgcagtttaaattgcggttgtcagtagccgcgcgtaaatagtgacccatattctcactacgcaagcgctcatcacgtgttatcaaagtctcaaacaaatcatctccatgacgagcgccaatgatattcgttcaagtatcaccaaagagctactgaatagcctttgcaaggtcgtcgatggtaaaagcatccaccttctggacaaacaagacgctaaggtttgcatcttggaactcaagtataaatataatcacattggggctgatcccccaaaagttttcgacaagccttgaattgttagttttcagtattctaggctcaaattgactctactggttatctttcatttttttcaaagccactaacgcaatttttattcctgcaatcatcccaatgcaaattaatacatatcttaacgcagtataacgatacaatactaaaccgaacaacgcagctatgatcgttagtattgccataaacaatactgccttatcattatataccgatttattcccagcttctttaaaatgaacctttcttgcgaatatcacttgtgcacctgctaacactatatatgctaccagtgtagtatatgcagctgccatatagccaaaaatatttatacatatgtaattcagtataagatttacaatagctgcgatagtcgaagaatacattatataattagtttttttatggtatataagtaaattagaatacatatttgatacagaagtcaaaaacactcctgctgcaataggtggcataatataaattgcttcataatattccttagtagctaatattctaactatttctggcgctaaaaaagtaagcataactgcaataatagcatacgctcccattaaagccaatgataattctctaattctattatcttttttacttatattctgatataaatacggtataaatgatgaattaattgcactccaaactaataatgaaattgagctcacagtatataaagtactatatattccaaccgcatcatttcccaccattttgcttatcatcattcgatctgaaacacttaaaatctgtgctgcaaaagcataaccaataagaggaacgcttagctttaaagagtatttccaatactttatgtttactattgttttcccttttgcatatattttaatccatataaccgccgaaataactattgttgctatgttagttgcatacaatcggcccaccacaacttgatccgatcctgctttatttaaatataaaacaactatcacggagaatattgttgatgctaaagccgatcccattgtcaatgcaccagctaatttatatttatactcatatctctgtcttaacagccaaaaatcctgcgccggtgcaaagaaaaacattactagcatcaaaattatcagcacagaaggcaaccctataattctattccaaatatcaggtatgaggaaataaatacatcctagaacaattgccatcattgatgttaatgtcaaaacagccgattgatattgatccctttccccctcaaagtctttcatcgctgcctgaaatccacctgatgttaatgatagtgttgcaattacgctcaacaaagaataccaagagttatataaattaaccattccaatttcgcttgtagacattattctcgtgaaaattggaactgtaatcattgataatcctcgtgaaaaaacagatgccatggtataaaccactgccgcttttacccccaaaggaatattttgtaacctttcctttagcattttattctcctacactgtatttgcgggtaaccccacagcatccagccgtgttgctatccaacttattgcctaagctgtagaataagaacgtagtagcctgacaccgttttatctgggcttacacgtccgctaaggaatcagtcagccgtagttctaattcgcagcattcgatttacgcaggtatctggaattccacccagaaccatatttctgttcaactcaaacgtaaaaaaggaaaaagcatagcaaaaaacatctaatatcaagaatccttctgtagcatgatttctggattcttataagaatcctcctctccagatccttctttcaatcccttcttcctgattttctgtttggacaaagagcagtccctagatgtttcacattcagtactagactttatagcactatttacattcaaacgcagactcacttacacttattcaaaaatgcattaaattgttctatatatttatcaggcgtaaacagttcatttgctgttgtcaatgcattattttttatttcttcaatttgttctcttgacaaatcgataatactaagcaatgtggtttctaatgtattcaggtcattatttctaacaaggaatccattatatttatcttttataaatagatccgtgcctcctacagatgtacaaatactaggaacccctaacatcattgcctcgcaaaactttgtcgaaactcctgctttcgcatatcttttattcatccgtaataaaaccgacaaatctgccttttccactatacttatcgtcttgtcatgtgacaatcttccatgacagtaaattccatatttttctaattcatcgttccctaccaatttctgcacttgcatcttatcggggccaattatatcaatgacaacacgtacttcatcagtatttagccgaattatcgcatgtaatagagtatcaatataatcctttgaagccaatgcgcctgcataaacaattttcagcacttttctattatctgaattttctcttattaattttttctttttatcagcttctgggaaaattggtggtaacagaatagtattacagctttgctctaaataatgttgatacaaatatttgcttattgctatgacattgccaacttttttatcgatatattttttttgtaagtctttttctgtattaataactctcggaataattccccgataatctttagggtttctccattccgtagtttctattaccaacttaaatccttcttttttggaaagattcaacatttttaaaacatataatatcgaattcggctcatataaaatgattatatcaggttttattttatcaagatatttttgtgtttgcttaaaataaaatttcccaaatacttgatctaaattccaaaaagcacctcttacctttcctcgtcccggataaggatccatatattggtatgtcacttcatctacttcttccattcttttgccatcagaagccaactcacataatacatgaacttcatgtccacaagatttcataaatatagctctattcctgacatgaattgatgaagcagtgtctggatatccgacatttccaatatataatattatcatgaattgccatcctctctttgctagggtgtaagatttacaatacatctaaaagctttaacttaatcttcaaataatttctcccattcctttgctattttctttacatttagttgttctctcaactcacttgcttgctttcccagtctttttgctttttccggattttttagtaatcctattatttcatccgcaaatattctatcatcaccaacaggtgtaagtatgccattaatattattttttataaccattctagcgccacctatcggacaatctgtacataccacaggaagtcctatcgccatagcttccagcattgaattagacattccctcaaaatctgatgatgatacaaaaacactagcattcactatacatgtttgaacatttgctttttgtcccataaatttaacattatcagaaatatttagttctttagcgtatttttccaattcctctcgttgctcgcctttaccatatatttctaatacatactctgggaacacatcaaggactcttttcattgccctgagaagcatgaatatatttttttgttgacttaatctatttacagctacaattcttttttctctttctccatcatatggatccggaattgacgaggtaataggatttgcaattacttttgactttttctctaggctcttaccataatactgttttgcatcttcggtttggaaaacaactctatatgctttttcgtaactatactttacataaatcttctgataccaattgtaataatactgcggagcgtttctttccgataaaataaatttatatttatttagcaaattccccaatatcaaatattgatatcctaagcccaacgaaattacataatctggcgcttgatttttcaataatttttttaattcttttattctcaaaaatattgcacattttcctgtattctcaggcaaataatcaattttaattttcggattaatcctataattattatttgcctttgaaaacacaataaagaaaacttcataaccgctttcacaaaaataatcggctaaggcaactgtaactctctcagcaccgcctccgcctaagctacctattaaaaatgatatctttttcattaatttatgatctcccgtaatatttttctcttaatgcttttccaataagcatcattacaataatgccactatatcccaactcaatctgataatatgtagaaacgcccatatacgctagtaatacaaaaaatccgacaaattttgctgctcgaatcactattctactttgttcattataaatcttactgccttttaaagtagatgcatatacacacaaccatgcaatcactgggaagattccataatggaacatgacaaacataaactgattatcgaaataggtataattcgcattacccaaatatctataagaagcatttatacccaatccaaagatcaaatcttcccatgaatgctgcgcaaaaaagattacgtattgtccacttctggtatcttccattcctctattgaataaattccctgtaatctctggaaaaatataagaaactcccaataccgcaataataaccagcaaaaatccaattaaaatcttaacagatctattcctattacccagaacagaaacaaatataaataatagtattaatgtctgtaatacccatgctcttgactgtgtaataaacgcagcggcaataataagcaacaaattacagtatatcagctttcttttatcctttttggggaaatctataaaggtcataatgcaagcagatgtaaaccaacatgaaaatattcctttatatgacgcattcataggccatttaattccataattagcccaaaaagaaaaaacagcaatataaaaacaacagcagaagagtatatttatatacggcaatttgttttccaatatattccatatattatcatcaaaaccaagtagcactgacactggcagcaaaatcactgatgtagaaatcgattcaaaaaaaacagattgagcaggcgctttatctaaagctaatacagtccatatcaaataatataaaatcgaacttataatcacaattcttattcctgcatggattttttttatatattgtgcaaagcatctaaatatcagcacaagaataataacacttgaaaaacttaaaaagagagtcccccatcttcctttactaacaaacgtgtatgtatcatatatcggctcccattcacccaacatatttcttagcaaagaccctaaaatcacgcatatcaaatatatcttaaataaaagctcattgattgtgtattttgttctcatattaaaatcaccatttggatttttcttgcaatatatttatatgattttctaattcttcgttcgtaaatctttcagaaacacgtctaccgggtactcctacatatatgccatagggatgagtacttttagttaacacagtccccgctccaataacacatccctctgctacagttactcccttaagaattgttacattagcccctatccaaacatccttctcaataatgacatcctgatcgttttcgtcatctttttcttcatctgttacatcagccatgtactttcctactgcattcatcttgtgatcgcctgtgatgatactaagtcttgggccaataattactttctctttaatgataatatttgctcgtgttgtccacaacaatgcatgagggccaatcgtaacatcatctcctatactaatgttgccaattcccttaatatcacttttttcagcaatatgtacatttttaccacagcttccaaaagaagatttaattacactttctcggagaatcttataaaacaccttacgcacaaattcttctgatctgtatacgaggcttccgattttattgattccattaccccccccatttttatatagatttcttctgtcatagcttatcatttctcaatctctccacttccgtataaactctttcaagtttatcaatgttttgctgtagagaatatgattctcttataacatcaacactttcccgtccagcttttaatctcttttcatcatctgtaagatactcaataattgcacaagccatgcttttactatcacctggtttatacaaatatccattaattccttgtcttacaattttaggaattcctccaacatctgtactcacaattggaagaccacaccccatagcgtccaatattgccataggcattccctcattatacgaagggaggagaaaaatgtctgcctctctcaaatattgtcttttttgctcatttcggatccatcccggaaattccacattatctttatatttcgcactaagtttttgcttgactttttcgatttcaccacttccaccaagaataaaccgagcatccggtattttgctacatacttggtctacaatagctggaatatcaaagcatccttttctttcacatataaatcctaaaaaaagaatcagcttattattcgattttgtaagcttctctttgatcaaatcttcttgcaaaataccataattctctacaactctaattgtctgttctggcacaatttctgcaagattcttcttccattcttctgacagtgcgatggttctaatgcatttgttgtaaatcttttctatggttttcttctttttctgagatttttttcgatagaactcatcaaaatctgcaccatgaacatgattgacaaccggaattttagagagagaggcaatctcaattattaaagcctttctataaaaacttcctccaaaagaggtatggacatgaacaagatttggtttccaaaacaaagctgtataaataaatttcaaatacgcgcttaatgctttagaagttttttgaattacacttccatcgcaataagtctctataaatcgcacatcgtaatcttctgtcaattgagagttccggtaaccattgactacagatgtaattccaccctttgctgtgaagctcggaactaccatgcagacctttttcttcattccttttttccaaccttttctcttatcagataaaaaacaaacttcgaattagtttctacataccgcttaaataatctctttggttccttactccaccgatacagccattctaaactgtgatcctgcatccactgcggtgcacgtggaatcactccagaaataacattaaatgctccaccaacagctatccaaacggcctttgtatttttgctgagttttgcacagaacttttcttgacgtggcgcaccgagtgcaacccatacaaaatctgctttcgattcgttgattctatcgcacagcgctgtttcctcttgtaccgtcaacggcctaaacaacgatggctcacaaccggcaatggataattgtggataattcgcctttaagtattcaagtaatgcattcagatttttttgcgttgttccataaaaatagtggcgagcatcacttttttctgtggctgcaatcacttgctccataaaatcaggcccggtcactcgccccatttccgaatacccgcgacgaactccaacgctagataagggttttccgtctggcaaagtcataaatgaattgttttgaaccgcttgatagtccaaattctcatgtgctgttacagtagtatgaacattacaagcacaaatatatcttcctcttgctttgtccatgttttctaataaatattgaatcgcagtttctttgttaacagccgaaatttcaacgcctaatatattcactcgtcgcatagctttctcactttataactcagtatttcctccacaccatcttattgaccacattcacatagccctgaatgatacgaaccaccttcatggacacggtctcgtccacatagtctgggcaaggcttgcccagaacgcccttctgcttcatctcaatggccatatcggtggcgttgagcagctcccgggtggtaataccagccagaatgaagtcgccggcttccagtgcctcgggacgttccgtactggtacggatgcacacggcagcgatgggatgaccaatggacagatagaagctgctctcttcgggcagggtgccggagtcggagacgattgccagcgcattcatttgcagcttgttgtaatcgttgaagcccagcggctcattgacccggacacgaggatccaacaggaagccgctcttttccagacggtgcttgctgcggggatggcaggagtagagaatgggcatatcgtacttttctgccagtgcgttaatggcggtgaacaggctcaggaagttcttttcggagtcgatgttttcctcccggtgggcggacagcagaatgtacttgtccttctccagtcccagacgctccagcacatcgcttttctggatcttctccagattcatgtgcagcacctctgccatgggagaaccggtctggtaggtgcgctccttgggcaaaccggtatctgccagatacttccgggcaaactcggaatagcacatattcacgtcagaaatcacatccacaatgcggcgattagtctcctcaggcaggcactcatccttgcagcggttgccggcctccatgtgaaacagcgggatgtgcagccgcttcgcagagacggcagacaggcaggagttggtatcgcccagcaccagatagccctccggctgcaattcgctgagcagctcatagctacgccccagaatgttaccgcaggtcacacccagattctcgccaaccacaggcacaagaatgtccgggccatattccccgaaggtgttcttcagttcgaagtcttcccagaaaacggtggaaaggtttctgtcccagttttgattgtaatagaccacgcagcagtcaaagtattcacggcagcgtttgataactgcagccagtcggatgatttccggacgggtaccgcagccaatcatgaccttggtgcgcccgtcgtttttccatttaaaattgtgttccatatcattctcctattgacaaccagtatcttctcttataccggctcgaaaaaggtgtccgggtgattggggttaaaaatctcgttgcaggtcattaccgtcaccagattctccgtctcagacaggttgataatattgtgcgtccagccgggaatcatgtggacagcctcaatcttgtccccggaaacttcaaactctaccgtttccccggtgttaatgttccgttcctgaatcaagccatgaccagcgaccacaatgaaaagctcccacttggagttgtgccagtgctgccccttggtaatgccggggcggctgatgttgatgctcacctgtccgcagtcagcggtatggaccaactcggtgaaggagccacggttgtccacgttcatcttcaaagcatacttgaatttgtcggtgggcaaataggtcagatacagggagtacagcttcttggcgaaggagccgtccggcattttgggcatcatgagcgtagtcggctgtgccttgaactcctgcagcaagtccacgatctcgcccagcgttaccttatgggtaacaggcacacagcagtagcgaccatccgctttcagaacagtctccacgccgtcaaattcacagtgctgctccttgccttccagcaggtcgaacatcccttctacaaggtcgtcgatgtacagcagttccaactcagtgctgcggtcgttgacggtgaagggttcgtcattggcaaccgcccagcagaaggtgctgacggcactgttgtatttagggcggctgtgtcccatcaggttgacgaagcgatagaccgccaccgttgccccgctctcccgagcatactggaagaacagctcctcgccagcctttttgctgcggccgtactcactgttgccgaagcgtcctgccagtgtcgcctgaatggaggaggacagcatgatggttgccttgttgttgtgttttttcagacagttcagcaggtcggatgcaaagccaaagttgcccttcatgaaatcttccgggttttccggacgattcacgcctgccagattgaacacgaagtctgctttctggcagtatttgtccagctcctccggtgtggaatccaaatcatattcgtagattcctttaatatccaatgccgggcgggttttgttcttgccgtcccggatgtttttcaggttgttgcacagggcggttcccaccatgcccttggcacctgtgactagaatgttcattctttcacctcttaatgtactgcagtgcagtccggaatatctacgtcatccggcacggctgcattattgcagattgtgcagttgctgccgatgcgggcaaagttccccaccgttgcgccggtgcgaactacactgttggtgtaaatcagggcgtagttccctaccgttgcatcacagtggacttctgttccggcattcagcaaaacaccgttaccaacggatgcaccgttctggatgcaagcgttttgcagcaccacacagccgcaacccaacttggcgtatggactgatataggcacttgaagcaacgatgttgggaaaagcaaattctagggtttttgccatctcatacacctgcgcccggagctgattgtttccaatgctgacaactagcaggtcatagtttttccgcaactctggtaaatcggaaagacctccaaccaccggaatgccacagatctcagtgtccacgtcttgtccatcatccacaaaagcacagtcgtattggagcatcgcctgttccgccaccatgcgcccgaagccaccggcaccaaccagcaacagctttttcttagacattcgggatgcccttcagtgcattctgaacatactcggtggtcagaatcttcttcacagtgccctcaacatccagacgctcggtgttgtggctggtgtaggactcgttcgccatggtatgtacctcgcccttgaccacaaacttgtcatagttcaggtcacggttgtcagcggcaacacggaagtaatgacccatatcctggctgcgcagacgctcctcacgggtcatcagggtctcgaacagcttctcgccgtgacgagtgccgatgatgttcgtaccggtatcgccaaacaactgctggactgcctttgccaaatcgccgatggtggaagcatcagacttctggatgaacaaatcaccaggatttgcatgttggaaagcgaataagaccagatccacagcctcatctaggttcatcagaaagcgggtcatgttggggtcggtgatggtgatgggattgccagccttgatctggtcaatgaacagcggaatgacggagccacggctgcacatgacgttgccgtaacgggtgcagcagatggtggtgccgccacgttcagcagccacacgggcgttggcgtagatgacatgctccatcatagccttggagatacccatggcgttgatagggtaggctgccttatcggtggacaggcagacaacacgcttgacgccagcatcaatggcggcgtgcagcacgttgtccgtgccgatgatgttggtctgaaccgcctgcatggggaaaaactcgcaggacggaacctgcttcaaggcagcagcgtggaagatgtagtcaacaccgggcatggcatcacggatagactgggggttgcggacatcgccgatgtagaacttcaccttcttggcagtctccggatgcttggcctgaagctcatggcgcatatcatcctgttttttctcatcacgggagaaaatgcgaatctctttcaaatcagaatccaagaagtgtttcaaaactgtagaaccgaaagaacctgtgccaccagtaatcataagagttgcgttatcaaatgtagacatattttttctccttttttacaaaacaattatgttaatcacgctgaaaaatatcgcgtgtataaaccttattcctcacatcatccaaacacttgtcatagcggtttgcgatgatagcattgctcatttccttaaacttagtcagatcattgaccacaaggctaccaaagaaggtgtctccatccttcagagtcggctcatagatgatcacagttgcaccctttgccttgatgcgcttcatgaccccctgaatggaactctggcggaagttatcgctgttgctcttcatcgtcagacggtaaacgccaaccacaacttctttttccttgctctcatcccagctatcatttgcttcataagcaccagcaatttcaagcacccgatccgcaataaaatctttacgagtgcggttgctctcaacgattgcttcaatcaagttttccggtacatcggcataatttgcgagcagctgtttagtgtccttgggcaggcagtacccgccgtaaccgaagctgggattattgtaatgagtaccgatacgcggatcaaggcagacgccgttgataatctgctgagtattcagccccttcatctctgcataggtatccagttcattgaagtagctaacacgcagagccagataagtattagcaaacaacttaaccgcttctgcttcggtaaagcccatgaacagagtgtcaatgttttccttgattgcaccttcctgaagcaattcagcaaaagtatgtgcagcttttactagccgagcgttttctacatccgtaccaacgatgatacgggaagggtaaaggttatcatacagagccttgctctcacgcagaaactctgggctgaagataatattgtcgcagtgatatttttcgcggacacttgctgtgaagccaacaggaatcgtggactttatcaccataatggcttccgggttatactcaattaccagtttgataaccgcttcaactgcagaggtatcaaagaaatttttcttgctgtcatagttggtaggagctgcaatgacaacaaaatcagcatcagaatacgcttccttggcatccaaagttgcagtcagatccagcttcttttctgccagatacttctcaatgtactcgtcccgaatcggagatttcttattattgataagttctactttttcaggaataatgtctacagcggtcaccttgtgatgttgagacaacagcgtagcaatggaaagaccaacgtaacctgttccagcaacagcaatctttaaatctttaaactctctcatgtccattcctcccgtacatattttcctaaccatctatttgataagaaaaatttactcatatcaatttatttttgttccaatttagcccgccaccattactaactttatgggctggcacaccagctacagctatattttcttcagccacattcttattaacaacagcattagcgccaattgccacatttcgtgccacgtgcacgtttcctaaaacaactgctccaattccgactacaacaccatcttctaagtacggaacatcatcactcgttccgccagcaactaatgctgtatttatatggaacgaacaatcttttcctactgtaactcttccattcattaaaaccggacctatatgcataattttaagtcctcgcccacaagcattgattggaatatgtaacgcatatttattttgaattctatataatttaatcttacaaattatcgccctaaccttatgttggcaatttgtatgatattctgtttttcttaaaagcacttgatgttttctaagaacatcattttctgatattggaaaaacctctcttattacacttgctgtcccccatatttttttcgctcatattcaatccaattttttaagtcgtttttagtattaattctattttcatataaaagcatactcgttcctttctttactgctgtttatctagaaaccatgcttttcacatactcataattgttaatcgtcaatatctccaatttcataccgctagacacgcattggaatatgcttgctcaatcaaaccgtaaggatgcctgtgcatcgtgttttccttatttataaaactcagcgtaccactcagcgaacttccgcaagccctcgcgcaaactggtagagggcttatatccgaagtcgcgctccagcgcactcgtgtctgcataggtcacaggtacatcgcccggctgcatcggaaccagttccttgtgtgcttcaaagtcataatcttccggcagaacacccgcgcgaattagttcttcctgcaaaatctgtacaaagtccagcagattttccgggttctggttgccgatgttataaactgcatacggaggaacgggaagaccatcttcaccatttttgcgttccggtgcaccctgcatcacacggacaacgccttcgacaatatcatccacgtaagtaaaatcacgcttgcagttaccgtagttgaaaatctgaatcgtttcgcctttcagcagcttgttagtaaagccgaagtacgccatatccgggcgaccaacagggccgtataccgtgaagaagcgcaggcccgtagaaggaatgttgtacagtttagaataggcatgtgccatcagctcattggacttcttggttgctgcatacagtgataccgggttatcgaccttatcatccgtactgtacggcacttttttattgctgccgtatacggaagaactcgacgcataaaccagatgctccaccggagtatgcccttcatcgtaagaatggcggcaggcttccaaaatgttatagaagccaatcaagtttgcttccacataggcatcagggttcgtaatggaatagcgaacccctgcctgcgcaccgaggttcacaacgatttccggtttatactgctcaaagatagcttcaatcacagacttgtctgccagattaccttttacaaaactgaaattttcaaactgttccagttcgttcaaacgagcttctttcagatgtacatcatagtagtggttcatgttgtccaaacccacgaccttgacatcctctacggtggagagcagtctctttgcaaggttagagccgataaaaccagctacacccgtgatgaaaacgctcttgtttctcagattgattttcgttttatttccgtcattcatgtacattctgcactcccactttttctatataaacagcaacaaacccacggcgggtcgcacaaaggcaaaactctccttcaatctttatttgctgctccttttgtgggtcaaaacagagcttccaaaagcctcctacatataacccccaggatttcccgcttcttgcagtcttttcaacaaataaaacttttgaaggacaactcaagccgtcaaaaccctttagttatcgtagtttttcttggttgaccctattatatctctagccccagttccagcaactgcaatcatacaatttttttacatttttattcctccgtttttgcatgtattctaatttctatccgatatttatacttataacttatccattttcctgtgccccaacctttcaaagatcaaagcacatattttttctttttacatagagccatcttttttcagaactaccattattgttttaaaaaatatttttatatctagcccaatcttccaatttgtgatatactctttatcaagacgaacgacttcttcaaaatcggtaatatcacttcgtccgcttacctgccacataccggttattcctggcttaatcgcaagtcttgcacgatggtgtagctcataaaaatttgtttctgaaatcaaaggtggcctggttccaattattgacatatcacctttcaacacgttaaaaaactgcggaaattcgtcaatgcttgttcttctgataaattccccaataccagtcttatgtgttccatctggaagaatcttatttccaataactcgtgggtcaaaatccaatttgaacatcttttcatcacccagtttgttatctttcatcagttcagccttacgttcttctgcatccatatacatgcttcggaacttatacattttaaatctctttccattctttcctacacgttcctgtgcaaagaaaatcggtcctggtgatgctatgtaaattgctggagcaacaaatataaacaagattccagtaatcaagcatcctaccaaacctccggcaatatccaccagacgtttcagcatcaaatctcttgtagatgcatagttaatactggtagtcagtactgtataatctccgactttttctacaagctgctttttccccggcacgctttgtacctttgcaagatttagatgtactgttactccggtttccgtaaactgctcaatcagttcttttggatatggaactacaccggatgtcacaatcagaacttcatcaatccattctttgcagacatattcggcggcattttccatatttgccactactttcacaccattaatatactctcctgtcatttccttatctataacagcaattccagcaatcttataccgggcataattatgctctttcatgctctctactactgcactccctacatctgctgaaacaacaagaagcaaggaacgattttcaccatcttccatttcctttctaagcaaatgtttccacagctctcgtaccagataagtaagtagaatatagataacgatattcagtatcaatgccagtctggaatatgcatgtccttcctgaagcataaacaaataaagcactaaacatgctccaagaattactccatgctgtgcagttacaacaaaatctttatagtactctcttttcaaaacgttttttagtgttcccattgcaaacagcactaccaaatctgctacttccataacgacagccatattcctgtaaagaattagctgatatggattagctccgtatccgcttaacgcatacgccagaacgaacgccacctgcaagcagatcaagtccaagatgataaaatccacatgttttatccatcctgtagaatcctttctatacatactttctttcccctttattcatttttcagattccaaagcttaatcagccgcaaaagcaaatcgtgtttgaacttggacatgaaacctctcctttattagttcaatattaaatccctcaattattctaaatatcactttttcactttttcatagaaaacattcatcacaagcgcctgcaaggcgtcttcatcgggatagaattccatgtattcctgccctaccttggcttcaccgtctatggtgcggatctcggaaacatcgcttttactgagtaagtccgcgattttagaaagcttttcagctgtgcagtcggaagtaagataatcgctgacctgcagaatcgcattcgtagcgaaccacgcatcgctgtcggctttttcggttagcttcttttgcagtgctataaggtactggcgctggcgctccattctgcgcagattagagctatcctctagcccgccacgtgtgcgcacataagttagtgcatgattacccattaatgttacggtctcgccttgtacaagcgttgagtcaatggaggaaaaatcatccatcacttccacctcgacgccaccgaccagatcatttaaaattgccacaccatccattgtaatggagatgtagtggtcaatatcaacgccatacagcagattggaaacagcctctgccgtgtttagacagctgtcccgctcacccgaaccgtatgtatgcgccaacgcaagctgaccggtaaatgtaccggccacatcgcctcgaacgcccaagatctgaatcttcgtcatcgtatcgcggttcagctggatcggcgtgcaggcgccggtctctttgttaatcacgagcagcatcagaaagtcggattgttcattatttaaatagttgctttcttctgtctccgcatatttatcgagacccatcagcagtacggtctcaagatcattgcggcgcgcataccacccgccgttataatacgtcagctcccgcgtatctccggcttcctcaagcgcagaggaactgcttccctctgcgtttgaggaaacatcaggggcagtatcctgtccctgattttcatccaaattccggagtaaaagagcggctgtcatcaaaagcatgaggacggataacccgattgccatgccttttaagacgcgcatatttacccgcagcttcataaattagcccttacgcttcttagaagcaacaacagagccgatcacagctgcacatccgagacccagaacagcaacgcctgctacacgcagaacgccgttgtcactggtctgcggagaagacggagcattggtgctcggcgtcgttgtgtcagcagtttcctgcttgtctacaacaaaagcgaccggggagaagctgtcaaacgttacgtcgaccgtaccgtcagcattctgctttacgcgatccttcgggataatctcccagttggagccctcatagttgcgcagaacgatcagcgttgcagactgggaaaggcccagattgaagcgaacggtgatagggctgctctctgctgcggcacccgtgacggaaacgtcgaacaggtcacgaacaacaagatcttcaacagaagcctcgctgccgatctccttcaggtaatcgccgatggacggtgcgatgtcggtgagcgttgcagcagccttaatctgctcgtaagcagccttcaagccgtctgcaatagccgcatcagcgctgtctgcagcggaaaccggagttacaataacttcgccgtctgcaaacgcgttaccgtcggcatccgttgcggaaacaactgtcggtgcacccttctgctcaacgctaggggtaaagctggcagcaaaagacggcacagcaagagcaactaccagcaggattgccgataagattactacgattttcttcatggttaaaacttcctttcctaaatgggtgattagacaccatttattattcgacctcatcgacgcattttgcaacgacgagaaatcgtctgtgtgaattgccctggaggcaagtggacaggataagcaatttatcctctggagtaacagacacatttgtactgtgctgcgcaccgatctcacgcacatcgaaaatgctgttcaaaaacgcattgtatcggcgcttgctcgtgaaatcatacgtgtacaaaatgtggcggttatcatatggcacagctgcaaacaccttgtagtgcatttccttttccggcagatacacggtgatatcgccgtgctccgtcagcgcattcgattcggaatagacctgctgcagcttgccaaacatcgtgccggcaagcatctggtgtccgtaaagcaccgtagcggggtcgtccatttttccgtcgttataagagctttcggaaaagattgcacccatggagttatcgtttccgtcgctgtcgtgcgtcaggtagtaatcatcgtctccagcgcgctgcaagatcggaaaatcaaactctgtatccggaatgcgcagccaagcgtaaatatccgggttttctttctggagtgacgcaaagtcaatcggactcacatacggcactgcggaatcttcggatgcggaagattccgcttccggcgttgctgtcggtgtaaccgtagccgtggcttctggtgtggggtctgccgtttccggctgttttccgccgcgaagcagaaaaataccgagcacaatgcaggtagcgcccagtatcgcgaccaaaatgatcagtgcgcgctgtttcacaggcgttccccctttcctgaaagatccggcaggtttcgttgaaattcgcgccatacatcgcgctcaacggacttttgaatcacttgtattgcttctccgagtctcggaggtcttgtagtcatgttgtggcagtcggagcccagcacatcaatctcgccgcgctgcagcatcttcactgcttttcgctttgtcctccagcttaaaaagaacgaagcgttgcattgcattttcacgccctgtgcccgtaacgcctgcaatgcgtcactgttgtgaaacggcaggtagcgctcaatgtgtgccaataacacctgtgtgtcccgtcggttttgaatctcggccacttcattggccatgcggcggctccactttgcaaaaggcatttcaagcagcagtatgttcgtgttttgtatccatagcgcttccagttcgtcaatacggctgacgccgtcaaagtaacaaacctctgcgccaagataaacacgcggcaaatccggcgttaaagcttcctgcagccgcgcggcacaggcagcccgccgctccaaaaacttctgcgggctgtactgcgaagcgtaaaaatgcggcgttgcagcgatttcggtgatgccctgctctgcggagatccgcaaaagcttcaggctctcctccacactgctgctgccgtcatccatcttcggcagaatatgggaatgaatatcgagcatgcgttatttctcttttccggtcttatttttctcaccgtaaccgtagccgtagccatagttgtaattcttatagtattttttctttccctccaacgctgcgttcgtcatcacgaagcccaagatcttcgcttccgcaaagtgcagctggcgcacggtttctgcgactgaacggcgtgtagcgtaattctggcgcacaacaagcagcatgccgttcatgagctttgatacaacgagcggatcggaaacagccgttacaggcggaagatccaacaggatataatcgaaatcacgactcagaacatccagtgtaatgcgcatctgctcggagccgagcagctcagacgggttcggcggtatatcgcctgcgggaattacccacatgttcttgtgcagctcgcagcggctgagcacatccgcgcccgtacattggcctgcaagcaggttggaaatacccttctttgtctgaatgttcagacgctttgtgtacgtaggcagacgcatatccgcctcaataacaagcacaagcttgccggcttccgcaatggaatacgcaaggttcagtgtggtggtgcttttgccttcgccgcgcatagaactcgttattccgataattcggcatttctgctcatcggaaagcgcaaagtcaaggttcgtacgcagaagcttgtatgcttcggaagctgcaaagtttaggttttcaccgagcattgcgccgtactcgtagtcggaggctgcattcctatattttctcat

SEQ ID NO: 67 - DNA, 7979 bp, unidentified
  source 1..7979: mol_type = unassigned DNA
tcagatgtgctgcaactctttcaggccgtctttcaggccgtccagcagggcctgcacatcttcgggggtgttgtccccgcaaaagctgacgcgcagcgccgtgcgcacggcaaggtccggcgcgcccatcgccatcagggtgtggctcggctcgcctttatcgcaggcggagccgccggaaatataaatgtgccgcccgctcaaatattcaataaaggtctggctgttgacacagttggtggaaaagttcagcacctccggcacggcatccgccggggagttcagggtgatgggtgcttgctgggccagctcttccagcccggtgcgcagctgggcgttcagggcgcggatatgcgcattgcggtcgctcaggtttttggccccctttgccgcagcaaggccaaggccaacgatataaggggtattctcggtgccggggcgcaggccgcgctcctgatggccgcccaggtagggcgggcaaagcgtctggcgcacgctgtcccggatgaacaaagcgccgattcccttgggggcatgcactttatggccggataccgagagagtatccacgttcttccactttttcaggtcaatggggatgcgcagccatgcctgcacggcgtccacatgcaccgcacagcggctgtttttggccttgacggctgtggaaagagcggcaatatcctgcaaagtgccggtttcattattgaccgccatgcagctgaccagaacggtatttttatccacctcggcagccagtttggcaacatccaggtgaccgtctgcttcgggcaggatttccaccacctcaaagccgcggtctttcagtgcacggatgggccgctgcacgctggggtgctcaaaaccggaaaccacaattttgctgccccagtttttgcgtgccatggcaaggccctgcacggcaaggttgttgctctcgctgccgcaggaggtaaaatacagatctttggcctggcagcccagggtgcgggcaatctgcccgcgggccgtggtcagggcttcatgggtttctaccgccggttcgtacaggctggaagggttcgcccaatcctttaataatgcttcatggatggcacccgcaatctccgggtccaccatggtggttgcggcattatccagataatgcagttcagggtccaacagcatgagaaagcctcgtttcgctacgcgtaaaattaaatcaaattaaaaaagaataatgaataaagaataatgttggtgcgccgcccgcggcggcgcagataaaacaggcagcaaactctggcatgcaacagccctgccagagcgccgaacctgttttcaatgtgatgccgtgggcatcacacagccattattcattattcttttttctttattatttttcttcgctcttttccatagtaatacatagtaaattatacacaccacacccgtaaaacacaagtagcgccatacaaaaaaggcgtgcggggttggccgcacgccggagaggcttcttttgtgttatcttgtgtgccggtcctttacttcgtgggcgtggccgattacggcgctgcgcttatggaacagcaggcccaccacggcaaacataccgccctcgatcaatacagtaaacagccagtcccccgttaccaggtagctgcctgccaggcaggtcagcagggtggggatcggcatgctgatgcagatagccgcaaagaactgtttcggcttcatgttggcgtgagcggcggcatagggaatgatgccgttgggcagccccggtgtgataaacgccagaatggtataaaaccaggggttcttgctgttgcgcacgctgttcagcaacttattcgccttggggctgtttgctgtgagcagttcaatgacttttgccaggcggcgcgccagcagaaacaccagaaagtttgccgccaccgatgccgaaaagctggtcacaaagcctttccacggcccataggcgatccccgccgccagttggaccggcatggccgggattaccagcgataccacctgcacgaacgccaggaaccacagcgtcaaaaagctgcgcagccgcccctcgcttgtcaaataattgctcagagcctgttcgtccccgctggaaaatgcagtccataaccccggcagcagcaggcggaatgtttcaataatcagcagcaccataaccagaattacggctgctgccgcaataacggccaggcgcttggtgcgttcggggggctgttgtttcatgcaggggtactccttaattctaaaatataatgtttattcgccgaaatcctgtgccacttttttgagcatatcccggatgggcaagttatacgggcagcgggtctcgcacttgccacagccaatgcaggcaccggctttcaccgtcagggtatcgtaccgttcgtgcgcccagcccgcaaggccataacgctccaggtagccatggaacaagaaacagctgggaatctggatgcccaccgtgcagggggcacagtaattgcagcggcggcagaactgggtgccaagggtatcccgcactttctggcaggcggctttctcctccggggtcagcggggcggtgttggcgctgcccgccacattctgttccaattcttccggcgcggccatgccggggatggatactgtgactgccgggttggaaagcacataccgcagcgccaaccgtccatcctcaatggcaccaccggccagcggcttcatatcaataaaggccttgcccttttccgcacagcggtcgatcagctctttgccctgctgctccacaatattataggggaacataatggtttcgatctcgtccaccttcagcgccttttcaaacgtctggctcaggtgggcggtaatgccaatgtgccccacaacgcccttggccttggcttccagcagggcttccatggcgccgccgggggccaggattttatccaggttttccgggctggggttgtggaactggtacaggtcaatgtgatcggtgcgcaggtttttcaggctggcggcaagctcggcttccatctctgccttggtcagcgcacggcacttggtggcaaggataaattcatcccgcaggcccagttcctccagcgcctggccgatccactcctcgctgacggtgtaagcgcgggcggtatcaatgtaattgatgcccgtctcatgcgcggctttcagcatggcgcgggtgccaggttcatcaatgcgctgcaccggaatgccgccaaagcccaggcgcgaaacccgcagcccggttcggccaaaatcaacatactgcatatttcattctccctttttgcggcgggggtgccctgccccgtctggacggttgtacaaagtatcactattatagcaggcaaggctttacttgtcacgttttttggcagttttttattgactttacacctgctgtgcgttaggattagactattcatcgggtatttgttggtacattataaaggatatgcacgttatagtagagggaggaaattcctatgcgttatggttttatcggctgcggcaacatgggcggtgcggttgcccgcgcagtgtgccgcggcgttgggccggaaaatgttgtgctggccaaccgcacccccgccaaggctgaagccctggccgaagcacttggctgccgcgccgccaccaacgatgtggtcgcgcaggactgcgatgtaattttccttggcgtaaagccgcagatgatggccgatatgctggccggcatcgcacccatcctggcaaagcgcagcgggcgttttgtcctggttactatggctgccgggctgagcatggcccgcgtgcgcgagatggccggcggtgcatatccaatcatccgcatcatgcccaacaccccggtttcgctgggggccggtatgacccagtactgcgctgacggcgtgagcgatgaccagatgttcgcctttttgggtgctatggccccggccgggcggctggatgccatcccggaaaatttaatcgacgccgcttgctgtgtttccggctgcggccccgcgtgggtataccagtttattgaagcattggccgacggcggcgttgctgccggattgccccgcgccaaagcccaggaatatgccgcccagacccttttgggcagcgcccgcatggtgctggaaagcggcagccaccccggcgtactgaaagatgctgtgtgcagccccggcggttccaccattcagggtgtgcgcgtgctggaagagcacgcgttccgcggcgcagtgaccgatgccgtcctggccgcctatgacaaaacaaaggaaatggggaaaaactgatgcgcattgttgtcaagatcggcaccagcacgctggcccatccgggcgggcggctgaacatccgccacaccgaagcactggtaaaagtgtggagcgacatcaaaaacgccgggcacgagctgattattgtatcgtccggcgcaaccggccttggcgtgggcaagctgcagatttcccgccccaaagatatggtgacaaagcaggccgccgcagccgtgggccagtgcgagctgatgtatacttacgacaagctgtttgccgaatacagccacaccgttgcccagctgctggtgacctgggaggactttgaccatccccaccggctgaacaacctgcaaaacacgctggagcgcctgatccagctgggcgctgtgccggtcatcaacgaaaacgacccgatttccaccgaggaatactccctgggcgataacgaccgcctgggtgccctgattgccaaatacacccacgccgacctgctggtgctactgagcgacattgacggcctgtacaccgccgacccgcatacccacccggaagccacgctgatccaccgggtagagagcgttacccccgaaattgagcaactgggcggcggctccaacagcggccttggcaccggcggcatgtccgccaagctgaccgccgccaaaattgccaccggtgccggtgttgacatggtcatcgccaacggtgccaacgccaatgtgctgtacgacattgtggacggcaaggatgtggggacgagatttgttggaaaaaataataaataataatgaataaagaataatgttggtgcgccgcccgcggcggcgcgaataaaataggcggacagctccggttaggatattggtttaccggagaaatagccctaattgaaatgtgacgccgcgggcgtcactcaaccattattctctattctttattcattcttaattacaaccaaaggagttctgctatgactacgcatgaaattctgttagcggcgcaggcggcaaagctgccgctggcgctggcggataccgataccaaaaacgctgcgctggaagccatggcagttgccctggtggaaaacagcgatgcaattctggccgccaacaagcaggatctggccgccgcacgcgggcgcatcagcgatgtaatgctggaccgtcttgccctgacccctgcccggctggccgccatggccaagggcatgcgtgaggttgccgccctgccggacccggtgggtgccgtactacgcaaaattgtgcggccgaacgggctgctgattgaaaaaacctcggtgcccatgggcgtgatcgccattatttatgaaagccgccccaacgtgacttccgacgccgccgcgctggccctgaaagccggcagcgcctgtgtgctgcgctgcgggcgcgatgcctgggccagctgccatgccattgtcaacgctctgcgctgcggtctggcccgtgccggcctgccggaaagtgccgtcagcctgattgaggacactacccacgcttccgccaacgagctgatgacggcaaacggtctggtggatctgctgattccccgcggcggtgccgggctgatccgcgcctgtgtggaaaacgccacggtgccctgtatccagaccgggaccggcatctgccatgtatatgtggacaaagccgccgacctgaacatggcggtggatatcattgagaacgccaaaaccagccgccccagcgtgtgcaatgccgaggaagtgtgcctggtacacaaggatgttgccgcagggtttctgccgttgctgaaagcccgcctggtggatgcccgcgcagctgccgggctggttccggtggatctgcggctggatgagcgcgccgccgccatcattcccggaacacccgccggcgagcaggattttgacactgaatttttgaactacatcctggccattgccgtggtggatgatgtggatgctgccattgcccacattgcccgccattccacccaccacagtgaggccatcatcacggcggacgataccgccgcagaccgctttaccacctgtgtggacagcgccgccgtgtatgtcaacgcctccacccgctttaccgatggcggagagttcggcctggggtgcgaaatgggcatcagcacccaaaagctgcatgcccgcggccccatgggcctggccgagctgtgcagctacaaatatatcatccacggctccggccagacccgcggcggttccgcggcaaaattgcagaatccgtgtaattgattgtagcacaggatacaacattcgcagaagacggtcttgaccgttccctacagagcattttattatgtgctgcctgccaataaatgtgctgtagggcgggatgccctcattctgccgcggagaaaccttgctgattgcaacaaacgatgcaaaccatttgtaggggacgatgcctgcatcgtcccgcatgtcgggccctgtctaatccccccacctcaaactccgtcgcccgcttaaatttccatcatcacaaaaagcatatgcccgcgcattccgcgcccggcatatgctttttctgttatcgcactataaacttattccccctgcgccatcggataataatactccaccaacaaattcacgcaggccccatagcttttcatgcccagggtctggtcatacccgcgcaggaaaccggtatacaccgtgctgcctgcctctttgaccggaccttcccacttggcccaataggtgtcgttgtcggccaggtcggtgcgggcagcatcgcacagggtgcggtaattttcgctggcggcctgcgggtcagcgctgtaccaggcgttggaaaggtacaggtagcccatcagccagccggaatattcatatgccgcatcaccacaggtggtggaagcccggatcgccacaaagtttgcttcctgctcagccgccacgccgcgctggtggctgaactcgtgcgcaatggtggcgggcaaaaacaccgccgggcagtccacattcagggtgctctcgccaaacagggggcacaggtagccggtaaagcctgccgcgctcatcagcttggaataaaacgccggtttggggctgcggtgcggcccggccaaaaagggatattccgccacaatgccgtcatacacatggccggtgttcagcaaaattttctccttgctcacggcgaacagaccggtttcgtcccgtgggacggtatcagcggcggcgttcacctgctcggcaaaccacacggtggtggcggccagctgttccacgctcagggccggggcctgcatgttggcctgcgcggcaaagctgggtgcataatactgggtgccccacaaagcgcacaccccggcatagatccacaccgccgcggtgcccacatgcagcacccaggcggcaaagcctgcctgtttgcggtgcatagcccgcacaatgcgctgcaccagccgaaccaggcagatcagaatggccgccgtggcagccagctcacaaaagctgaagggtagcggctccaccagcgcagaaacaaaccgcttgaccggcatggaaacatactccacccaccactgcatggccgcggcactgcggcgtgcggcccagaacacccccagcgccgccaccccgccgcccagcagggccagcccggctttgtgggcgcggccaaacgcacgcacggtggctgatacttttttctgcat

SEQ ID NO: 68 - DNA, 11188 bp, unidentified
  source 1..11188: mol_type = unassigned DNA
atgaaaaagatattaatcacaggagcctcgggcttcatcgggtcctttatcgtcgaagaagcccttcgccgtgggctggagacctgggccgcggtgcgccccaccagttcgctccgctacctccaggatgcccgcgtccatctcctcacgctggacctccaggaccccgcgcggctcatggaccagctccgtccccatcgcttcgactatatcgtccatgccgccggggccacgaagtgtcaggaccccgccgacttcttccgtgtcaaccgcgacggcacgcgccacctcttccaggccgtccgggcgctgtcgatgcccgtggagcgcatcgtcttcctgtcgagcctcagcgtctttggcgccatccacgagacccagccctacacgcctatcaccgaggccgaccagccgcgccccaacacctgctacgggcggagcaaactggaggccgagcaggcggcgctggagagcggactgcccgtcgtcatcctccgtcccacgggcgtctatggtccccgggagcacgactacttcatgatggcgaagagcatcaagggccacaccgacttcgccgttggcttccagcagcaggacatcaccttcgtctatgtcaaggacgtggtggcggccgtgtttctcgccctcacgcgcggcaccgtcggacgcgcctacttcctcaccgacggggctgtgtatcagagcgccgcgttcagcgacctcatccacgaggccctgggccgcccgtggtggatccgcgtcacggcccccatctgggtgctgcgcctggtctgtggcgcgggcgagtggtatggtcggcgcacgggccagctgatagcgctcaacaaggacaagttcaatatcctccggcagcgcaactggcagtgcgacatcgagcccgcgcgccgggaactgggcttccagccgcagtacgacctgcggcgtggcgtggaggaaacgatccgctggtatcaggaccacaagtggctgtaggacggggtgacaagtcggtcgagaggcgcttgtttcgactgcccgtttgatatgtggaggtagcaaatttcatagcgaaagtggcgtttttcgattctttaaccgttcttcgccgtagattgatactttttttaacgttcatcctttcccaagcaaaataaaatgcgtaattttgcattcgaaacaaaacaggtataataccgctgcgggaattcccgtggcaccaatttaaggcaaaaagagactattcatcatcattaaataacattcacaaagcaatggcaaagtttgatcaaagcattttgactcagtacggcatcactggctctaccgtgatcgcccacaatccttcttacgagcagctcttcgaagaggagaccaaggctggccttgagggctacgaggttggtcagaacactgagctcggcgctgtaaacgtaaagactggtatctacaccggccgttcccccaaggataagtacatcgtcatggacgagaactccaaggacaccgtttggtggacttccgaggagtataagaacgacaaccacccgatgagcgaggaggtctggaagaccgtcaagaacctggccgtgaaggagctctgcaacaagaacctctacgtcgtcgatgctttctgcggtgccaacaaggacacgcgcatggccgtccgcttcatcgtcgaggtggcatggcaggcccacttcgtcaccaacatgttcatccgtccgaccgctgaggagctggagaacttcgagcccaacttcgtcatctacaacgcctccaaggccaaggtagagaactacaaggagctgggtctccactctgagacttgcgtcgccttcaacgtgacgagccgcgagcaggtgatcatcaacacctggtatggtggcgagatgaagaagggtatgttctccatgatgaactactacctgccgctccagggcatcgcttccatgcactgctctgccaactgcgacatggagggcaagaacaccgccatcttcttcggcctctccggcacgggtaagaccactctctccaccgacccgaagcgccgcctcatcggtgacgacgagcacggatgggacgacaacggcatcttcaacttcgagggtggctgctacgccaaggtgatcaacctctccaaggagaacgagcccgacatctacggtgccatcaagcgcaacgccctgctggagaacgtgacggtagataaggacggcaagatcgacttcgccgacaagtccgtgaccgagaacacccgcgtctcctacccgatctatcatatcaagaacatccagccgggttcttccgctcccgctgccaagcaggtcatcttcctctctgccgacgccttcggcgtgctgcctcccgtctccatcctgactccggagcagacgcagtactacttcctctctggcttcaccgccaagctggctggtactgagcgcggcatcaccgagccgaccccgacgttctctgcctgcttcggccaggccttcctggagctccacccgacgaagtatgccgcggagctggtgaagaagatgaacgtctctggcgccaaggcttacctggtcaacacgggttggaacggcaccggcaagcgtatctccatccctgatacgcgcggcatcatcgacgccatcctcgacggcagcatcctcaaggctgagacgaagaagatcccgatgttcaacttcgaggtgccgacggctctgcccaacgtcaacccggccatcctcgatccgcgcgacacctacgccgacgcttccgagtgggaggtcaaggccaaggatctcgccgcacgcttcatcaagaacttcacgaagtacacctccaacgaggcgggcaagaagctcgtcgctgctggtccccagctctaaggtgtcctgactccgaaacgcttcggagatagaagagccaacatctgccgccgctccttaggcttcaataccaaggggcggcggcttcttttcccgacccaaatctatcacaacgcaaactatggaatacttgtcacaagagtgctacgaccggctcacccaggagctcaacgaactggtcagcgtcgaactgcccaaggcacgaaacgaactggaggaggcgcgcgccaagggcgacctcagcgaaaactttgagtatcatgcggccaaacgggcgcacgggaggctgctgagccgtatcagctacatgcagaagacgctgcgcttcgcaagggtgatggacacctcgcggctggacaacgacaccgtgggtctgctgcgccgggtggagatcaccaacctggcgaccaacaccaccatggcctacaccatcgtcaatcctcacgaggccaacgtcaaggagggaaagatctccatcaagtcgcccatcgccgaagccctcctcggcagaaaagtaggcgacgtggtcacggcccacgtgccctgcggcgtcctacgactccgaatagagaaaataacggtgtagcaagcccattgcttccaccatgttttgcgaggccggctttatctgaacaggtctgccatcgtcacctgacattgaatgtcgtcagaatagccgcccggcgcaagtccaaaggaggtgatcatggtgagaagtaccgttttctcagtacctgtctccctgatgaaagtctccctgcggttgcggatgcggttgtcctcttcttctgttatgacgtaaggagcgttggtgtatttcatctcacagagattgatggtgtcgtcgtttctgtcgatgagcatatcgatctgtgctcccttggtcagcgtcttgccggtgtcagggtctttcgttcccttgtacgtccaggagtggacgctgctcacaacggctgagaagccgagggccgccttgatttggctgacgtgctgcatgcagacccgctcaaatgctcttcctgcccagctataatggatgggtgatcctgcggaggaggaccagaaatgctcatccccattggtgttctccgatatgaaatcgaagtagaacagggtgtagttgtctatgagctggtatgtcgcctccttggtcttcttgccgatggcagtaaacttgcggatgaacccgcattgctccagttcctgcagcgctttcgaaaattcagcattgtctgtgagtttcgacgttttcagcagctcttccctgagcagcccctgcttcttcctggcaagcgcggtgatgatggcaatgtggcagcgtggtttcttgaacagagaagcatagagggcgtcaaactcttgtgtgagttctccgcctggctggaagaatatgcggtcgaaattctgcgccacgctcattccctttttcaggaaactccaatagtatgggattcctcccagagccatgtaggcttcgaggatctgccggtccttgtagcccaggctctttgcttcgcaatactgcttacactctctgagggtgaatggttgcagcagcaccttgcaggtaaggcggttgtgaagcccgccgtagttcatgaccacattgtcgataatccacgacgtggcacttccgcagatgaccaggatgaggtcttttctcgttgaagcccaggcgttccagaaatggtcgagcgaacgtacgaagttggatttaggcgtgtccatccatggaagttcgtcgatgaaaatgactttcttctcttcgttttcaggaaacgctttcaggaaagcccacagcagtccaaatgcctcggaccatgtcttaggcattgcgcattttcccattcctgcaagataaagagactctcggaagtcgcttagctgctgcctgcgcgtggctccgtaagtaccggtatgctggaaaacgaaatgggtcttatagacctctcggatgagaaaggtctttccgacgcgtcgccttccgtaaacagccacgaattgtgattcatcagaagtcatcagtccgcggagtgttgctatttcatattctcttcctattaacatatcgtatcctttctttatttcttggaatgtaacgatagtgcaaagatacaaaaaaagttcgataagccgtggaaatgtgccttttttaggccgatttccacgacttatcgacactttcttgctgatagcggaggactttttattgacaaagctgcaagttgggggccctgttgaatatgaaaaacaacttgaacaacttttacaacttgtaacaacgctttcgataagccatgggcagaaccgagctcgctcgggttatgccatggcgagaaagggtaccatgaaatggaacctacacgcttcgcgtgtcacaatcctgctgcatggtaaacaacaaaatacaacgctttcgataagccatgtgcagaaccgagctcgctcgggttatgccatggcgagaaagggtgccatgaaatggaacgcttcgccttggacattcctgccgattgtccttgcgaagcgttgttcatagttgtttcccttgcagcaacctttggtcaacacgggcctcgaagaggcgatgtccccgcgaagcgttgtttaaagttgtaaaagttgttcaagttgttttcctatatgtccacgtgtcagtccccgcgaaagcattattgtaaaagttgttcaagttgttttccctactcagcaggccgtattggaaacaactcaaacgtccctctcactcaaatatcggatgaaccttcctaatttatgaatgaagagctgagcctttacttcgccacaaacttcttgccgttttggatatagacgccctgcttgggaggctgctgcaggcgaacgccctggagggtatagacgcggtggtcggtagcgaggcggttgtcggtgtgagcctttacgctatgctctatggagcaggcttccgaaatattcattccacggaaagtgacctcgacgccccggaattgtcctggaagcaaagtggaattgagcacacttgtgccactgccaatcaactcattgtagctccattccatgccatccacagaatagtggaccacgcgataataggtgccaccaaagcacaaggagtccaccttggtcacttcggcacgagcctccctttcagaatcgacatggacgaggtcgccgacttggcagtcaaactcatacatgattctcggctctgcgtcgtcgggatagtaaaaataaatgttgcgtccctcctggtaggcggggaccgtcccgatctcggtctctacgagcttgcaggttctgccccttacgatggtgtcgcccaggacgctataccgtgccgagtccttaacgaccaacgcgccttcatatcgggcatcatagttgaacaccgtccatgttttgccatccgccaaaaacgggatgcgatcctgcgcctgtgccttctgaggcattagcgcgctcattgccaaagccaaaagagccatggctgagatgttctttcttacgtttttcatcatgacatgtttttttaaatttgttccactctgttttttcctattgcagaagcctgcgcttctacttcaccacaaacttcctgccgtgctggatgtaaatgcccttgggcaagtggcgcacgtccatgcggcggccctggaggtcatagacgcggtcgtcggaagcgaggcggtcggaggtgactaccgtctccacgccagcgacaatggcctcataggctttctctcgcgtgttgacatagacgcggtggccttcggcatcgtagtagttctcaaggagcgagaagtcgaagaacgtgttcggtgcattgtcgtggcacaggtagtcgaacggcgtgccttgcatattgacgcagcccacgccttctatcaagcggtggcccgacgacagcaccaacatgcggcggctctgcccgtcggagagcgtcgtgtcgccctcttgtacaacggtgtactgcgtgccaaggtaggcgtcgcccacatgcgcgtcgtagtcgtagaggatgtattcgccctcgtcgttcgtcgggtaaacgttgctcgcctgggcaaaggctgcacggtagctgtcggcatcggccagcacgcggccgccctcacggcgcatggcgaaaagatatttgttggaataaaccttctgatacgtctttccgttcagcgtcgtctcgccagcacaagcgtagcttctcctgccatgtctcagaaaatacaattcgtgggtctcaatgttattcgttttcctatagtcggcacaaatccattggcgatcgcaatgcggaatacgcaaaaaatcattgcttgtgaaaagcaacttgccatctactttgcaagaatcaaacgtcatataggacgaagtgacccaatcaaatccagggccaggatcgggaccgacgtcgctccctatgccctcgacccaatattcctgcgtgtcaccatttgagtaatccgtgccacccccataatagctgtaacaaccgattcccaaacggcgatagggctcaccgtccaccaagatcgtgtcgaccgtattcacattgaggcggaagtaatcgtgagacacggtcgtgtctcctttgccaagggagaaatcataaacgagatgactactccagtcggaggtgtcgtagagggaacccactttgcccaacaccttgccgttctcctcacgcagaaatccttctaccacgtttccatcatacaatttcttgtaggcgactccgtccaagatcgtatcaccctcgatccgctctgtgtgaaaaaattctccaagaaaatagtggacacaccgagtgtaccactccttgccctcctggaggaaaggcttagaggtttgcgctgcggaggcccgaagacccgtctggccaacagtctctcttccggtttgcgatacttgttgtgccatgccggggagcagggggcacaaggtcataagaatagataggtaaatcttcttcatacaccaacaatttatagtttataatagtcttaacgcttgcaaatttacgcactttttattataacgccaaatatttttagcattattttatcctgcatgccacattaccccccccgaatcaaaaatcatcctttatctacttatatatcaataagttacactccaacctccccttcgaagttttttttcggcaaatgtgcagaaaagccagtagcctgaccgaagtttgagggatacgcaaaggccaccgggagtcaaaagagcgttgcctcttggtcccggtggccttattgcattttttaattaattaaagaagagacgcttctacttcaccacaaacttcttgccgtgctggatgtaaatacccttgggcaagtggcgcacgtccatgcggcggccctggaggtcatagacgcggtcgtcggaagcgaggcggtcggaggtggctaccgtctgcacgccagcgacaatggcctcataggctttctcgcgcgtgttgacatagatgcggtggccttcggcgtcgtagtagttctcaaggagcgagaagtcgaagaacgtgttcggcgcattgtcgtggcacagatagtcgaacggcgtgccttggacattgacgcagcccacgccttctatcaagcggtggcccgacgacagcaccaatatgcggcggctctgcccgtcggagagcgtcgtgtcgccctcctccaccacggtgtactgcgtgccaaggtaggcgtcgcccacatgggcgtcgtagtcgtagaggatgtattcgccctcctcgttcgtcgggtaaacgttgctcacctgggcaaaggcagcacggtagctgtcggcatcggccagcacgcgaccgccctcacggcgcatggcgaaaaggtagctataacgcgggccggggtccaggccagcacaacgcgacttggtgcagttgtagatcttctgataggtgcggccgccgatctccagctcgccgacggcagcgtaggtgcgcttggcgtagttgatcagatagggggtattggccggatagatacgatagtcgccctgcacccattggcgctggctttgaggcacgcgcaagaagtcgttgcgggtgaaaagcaacttgccgtccaccctgcaggagtcaagctcgtcgtgggggccgatgatgaacatgccccaaatgggatagaggccataggagctgccgatgccctccacccaatactccatcggagaggcgaagcgggactcttcgtaatacgagtcaataggcgcgatccccagacggaaatagcgctgcccgtccaccaagatggtgtcgctcgtcgatacgacgacgccaaactcatccttgagcgtatcattgagctgaaggttgaagtcgaacaaacctcctgccgagacgctgctcaccttgtgtccctcttcgtgtaggccatcaagaaacttgccctgccagttgaccagtttccaataggaaacatcacgcacgagggtgtcgccacttatcttgcggtagtagttttcgtcagctccacggggggcatagacgctgcggtaataccactccttgccctcttggagcatctgttgactgttttgcgcaacagagggaagctgaccccaaaagacaaacagcaagactaaaagacaaaaaataaatcttatattctttcgcatgactatcattttttagttataactcgcattgcaccacctttgaaaactttgaagtcattttttataatcgctccattctttgtttccaaaatggcctgacctcttcttattgttacacttcctgcaggctgattgctatcaacatgactgcctgctattatttccgttcctgttatctttgcatcggaatcaatgttccgattttgcaaatacacaagatctccgtccaatacatacatggtgtaaggtatatagccatactttgtaatacataccgttacatcatttggcacatctgccaaatcaactactttgtcaaaattcacaattttataataaaccaaattgttgttctcgaattttgaaaggcaaacctggcacgagtcaatgcctacgccaatcttcaagttcccattgccataatcaatttgaacattgttgaacctattgggagtttgcaagtatggatgcatttctggatcagcaagtggatttaaagtacgaatattccatccacacctatacagcgaatcattaaagaatggcatatactgattcttggcaaagctaacagcctcgcctatgctcatcttgtacttcattatgccaagataaaacttttcgaataacgacacctcgctgttaggcgagtagtttccctgataccaaccctcacgacaattaccgacaaaggccaacacattgctatttttgttcaacataaaaccttcacctaagcaaagtgaatccggtttagtatcaaagcaattaacataacaagaaatagttgttataaaagtatagcccttgttttgcaactcttgtgcctgagaaaccatttagttagaccaattgtcaagaaatccccactgctgtttccaaccatgacacatcatgtcaacgaaaagataaccattctccagctgactttgcagattttcaggatttacccgatagtgcgtatcgccttcaaaatctgtcttggtgttataaaaacgaaacattcgcccattccagtatggttctatgtttttattatatagagtttctcctgactgctgaacaccactaagtccaatgccgctcattagcattttgtcagacagcatttcttctttgggcgatttctcataatctacaagacgatctaccatgtcaatagcatcggacaaggtagttacggacaatcgggagatggccacgtctgccatggcattgaccatgtctccactggtaccatcttcagcaaagaggccattctgatttttgtcccaatctaaatctacaaagctagcgtaatacaagtctgtaggcgtatcatacgtcacagagtcgctaagcggccctaatggacaaatcaaactgggcacaacctccacgtcgccacccagcaggacatattccacctgacccttgtattccatgatagcgcgcttgatacgcatgggcatgatggggtcgctgtacttttggcttatctcctctacagtcagcaccttacttttaacgcctttggtggttttccaattcgccagacgctgaaaggcgggcttcagctcctcgttggtgataaccaaatacttgacagggaaactgttcgcaatagaattttgtcgggcagctgtagggtaaagtgcgtcgatatcatccgaattatacaccaa

SEQ ID NO: 69 - DNA, 25879 bp, unidentified
  source 1..25879: mol_type = unassigned DNA
gcagatgacctacgccgccctgagcagctttggcgagaccatcaagaccgagggcaaccagaacaatgagctgggcatgccccgcaccctgatgcggctggaaagcagcaccgagtatgcggtcatcgagatgggcatgagccatgcgggcgagatcgaccgtctggtgcgggcagcacgcccggatgtgggcatcatcacctgcatcggcgtgtctcacatcggcaatctgggcagtcaggagaacatctgcaaggcaaagctggagatctgcaatggtctgccggagggcgcaccgctggtgctgaactacgacgaccccttcctgcgcaaggccgtgctccccgcccatgtgcgcccggtgtggttcagcctgagcgatgaaaacgcagacgtctgcgccctgtccatccggcaggagactgacggcatgagttttgtgctggaggatcaggagcacggcacctttgtggtgaatatccccgccatgggacgccacaatgtggcaaacgccctggctgcctactgcgccgccacccgtctgggctgtgacgccaagagggtcatccggggcctttccaactttgagcagaccggccgccgccagaaggtggtggacagcaacggcgtgaccgtcatcgaggactgctacaacgcaaacccggacagcatgaaggccgcgctggcgatgttcaaggacttcccctgcaagcgccgctttgccctgctgggcgatatgctggagctgggcgagctgagccgcgaagcacatgaggaactggggcgccttgccgccgagagtgggctgtactgcctgatcacctacggcgagcaggccaagcgcaccgctgtggtggctgcggccaagggggtagagaccctgcacgcggacagctaccgcgaggctgccgatgccctgctgagccgggtgcagcccggcgatgccgttctggtaaaggccagccacggcatggcactggaaaaagtgctggatatcttctacgcagagcataaagaagcggaagtataactatttggcgaaatggagtgtctgagttatggagcgtttcgccttggcagcggcggtggtgctgggctttgcccttacggcagccctgtgcagcctgtttgtgccgctgcggcgggtgctggaacgccgcgaacaaaaccagcagccggtacagcctgagcagccccggcctgcacctctgcacgccccgctgtggggcgggctgtgtgcggcggcgggcacggtggctgcggtgggtgtgggctggcttgccgcctgcgtgggtcagccggagctgctgggcagcgaaggccggttgatgacacggctgctcacggcgctggccggaagccttgcctttggggcagtgggtcttgcagaagatcttgcccggatgcgcagcccggcggcgctggggctgcggcgggacgtccgccttttgctggaggcactggccgcggcattcgttcttttgctgctgcgggcagcgggctgtctgccacggggactgggcgtgcccggggcggggtatgtgctgctgggcagcgccgtgccctttttgtgggcggtgctcatggtggcgctggccgagtgcgcccgcatcgccgagcgggacgaaggcacggtgtgcggcgcggcctttgtggctatgctggcgctgatgatgtcagaggccggcttgggcgtgcccgggctggcggtgctgcccgccgcgcttgccggggcactggtggcactgctgctgtgggcgttccccccggcaaggctgggggtgggctgctgcggcagcctgctggcggcgggtgccatcggctgcatcccgatcagtctggatatgaccagcctgactgtgccgctggcgctgcccttctgggcggcaggcggttttttggcagcgcagctgctgggtgcaaaacgcaccggcaagcccttgcgctgctgggtaaaaaagcataaaatgagcccggagacggtgttcctgtgcagctttgcactgagcgctgtcggctatgtactggcgctggcgctgctgcgctggtgctgaccgggcacagagagggaagggagcgcagatggcgactatccgcaaaaaacacagagcgccggtgccggtgttccagcgagacccgggcccgtggtcccggctgctgatcgactggctggccacgctggccgttattatgatctttgggctggtgatgctgttcagcgccagctacaccaccggttacctgcgcatgggcgacagcttccactacatcaagcagcaggcgctgtgcatgatactggggctgggctgtatgttcctgataagctatgtggatcaccgttttctgcgcaagatggtggtgccggggtacttcatcgtgctggccatgctggccgtcaccctgaccatggcacccctgaacggctgccgccgctggatccgctttgcaggccttacgctgcaatcctcggaggtggcaaagtttgagatgatcctgttcagttcccatcttgcagccaaggcaccgcaggtggagcggctggacccggagcgccgcatcctgcttaccccccgggagtggctgcgggtgcgggtatggaagcagctggtggtgccggtgctgccccttataccggtggtcattctgctggcgatggagccgcacatgtccggcatcgtgctgacggtggcggtggtgggcaccatcctgctgctgtccggcagcggcggtgtgctgacatgggcgggtgccatcacggcaggcaccctgctggagaccctgctctcccatgtggactctatcccctacctgcaaaagcgtctggacggctggacgcaggatctgagccagatgaccgaccagaccgtgcagagcctttatgctatcggctccggcggactgaaggggctggggctgggcaacagcgtggaaaagcagctctggctgccggaaagcaccaacgacttcatcttcagcgtggtgtgcgaggagctgggcttcatcggcgcggtgctcattatcgtgctgttcgtgctgttcatcgtgcaggggctgctcatcgcctataaggcggaaaatctgtactgcaccatggtaggcatcggcatcatggcacagatcgcgtggcaggtgttctgcaacatcgccgtggtcaccaacaccctgcccaacaccggcatcagcctgcccttcttctcctccggcggtaccagcctgatcctgctgctggcagagatgggcgtaatggtgaacatcggccgcaacggcgagcgggcagcgcagcagcgggagcagatgcgtgcccagcgggaggccgcccgcgccgagcgcgaggcagaacttgcacgtaagaccattgacttggcctctgcccgcgcagcccgtacagaacagtaaaacaaaccgcaagcccgcccggccgcaggccgggcgtttataaggaggaatcaccatgcgtgttctcatcgcagccggcggcaccgccggacatatcaaccctgcactggccattgccggtgctctgaaaaaggccgaccctaccgccgagatccactttgcaggccgtaaggagggcatggagtaccgtttggtaacacaggcgggctaccccttccaccatattgagatcaccggttttcagcgcaagctcagcctgcacaacatcaagcgcaacatcattaccctgtggaatctggcgctttccggccccaaggccaaggccatgatgaaggaagtaaagccggatctcgtcatcggctgcggcggttatgtgtccggcccggtggtgcgctgcgccgccaaaatgggcattcacaccgccctgcatgagcagaacgctttccccggtgtgaccaacaagctgctggccccggatgtggatatcgtgtttgccgccgtgcccgccgccgtggaaaagctgggtgcaccggacaagacccttgtggtgggcaaccccgtgcggccggaggtgtttgcacaggccgccaaccgcgaggccatccgtgcacagctgggtgcgggcgaccgcaccgtcatcctgtccttcggcggcagcttgggcgcacgccgggtcaacgaggtggtggcagacctgtgcgcctgggaacagcatgagcacaagccggtgctgcacctgcacgccaccgggcagtacggggtgcagctgtttgagcagctgcaaaagcagaaggattttgcccccggcgacagccttgtggtaaaggaatacatcaacaatatgccggagctactggctgcggcagacctcgttatcagccgcgccggtgcgctgacgctggccgagctggaggccgtgggacgcgccgctgtgctgatccccagccccaatgtggcggagaaccaccagtactacaacgccatggagctgcagaaggccggggcggctgtggtcattgaagaaaaagacctgaccggtgaaaagctggtgcagactgtttctgccatgctggcacagcccggcaagctggccgagatgggcaaaaacgcccgcagcctgtctgtggacgacagtctggaccgcatcactgcggcgctgctcaagctggtaaagactccgtgatgcagccccggaataaacaggaaagaaggtgcgaatgatgcagcagaaccgtgaccgcaacggcagaccccggaacaccagaccctatgatctgaaccgggatgtggcgcgcacctctgcgccttcgcaggatcatacgccccggagcaccggcagcagccgctacggctacaacggcgagccgctcagccgcccgccctcccgcagcgccaacggcagtgtgcgctcctcccgggcagataacagcatccagttccccacccagacccaatcccagccccgccgcccggcgcaggggcaggggagcaataccacccagtatcccgccggtaaccgcccggcgggcagcagaccaaaaaacgcgaagtccggtggcaaacagcgccgcccggcaaacaatgcccgcagcgggcagagcagccggaaaaaccagaacgcgcaaaaccgcccgaaccggcagcacccggcaggcagccagagcgccccgcagcaaagccctgcccggcgggaaatgcgcaaaaagcgcaaggtgacccgcgccacattgcggcgccgccggatgctgcgccgcctgaccgcctttgccatgctgctgtgcgttattggcgcgggcatctacctgaccatgaccatgctgttccgcatcaactccattcaggtacagaccccggacggcaagcaggtgaccgaaatcgctggctactccgcagacagcattttgcagcggatgggcgtgcagctggaggaaaacatcttcagctttgaacccggcgaaaaggccgcggtgctggagcagaacttcccgctgctgggctccatcaaggtgatccgggactaccccaacaccgtggtggtgcaggtgaccgaggccgtgcccgcctacgcggtgcaaaacggcagtaagtggcttgtgatctcggacaaatggaagattttgtccgaggaaagcacccagcccgaggggctttgcaccctgtacggcggcaagctgcaggatagcaccccgggacagggcttctggttcgtggacgatgcggacgcggcaagcgcctccgggtcggaaaccgccgaaagcgaaagtgcagtgagtaccgagaacatccgcatggaagcgctgcgcacactgcgcagcaagctggaggaatacggcctgtcgcaggatgtgacacggctggaagtggcggacaccgagcagatcgcgtttttgtatcaggaccgcatcagtgtgctgctgggtacgctgaacgatctggattataagctggaccgcgcccgctatgtgctgaccaacgccgatggcaagggctgcggccccaccgacaccgggcggctggatttcagccataccagcgccagcagtacccgcaagatctattttgcacagggcgagcctactctgccctccggctatgtggtgccgcccaaggccgaggaacccgccccggcagaggacgccgccgacagcaccgacagtgcagaaagcacggaaagcgcggatactgccgacaccaccgaaccggcagctgacgcggacaccgagcagctgcccctgacccaccctgaccgcatgacggccaacgaagaagaaaaccccatgtaaagaagctctttggaggagactgtatgaagctggaacaactgatggaaggcgtgccctttacccttgtgcagggcagtctggatactgagatcgcggatatcatctacgacagccgcaaggctgccccggggcttttgttcgtgtgcatcgtgggcacccagcgggacagccacgcgtttgccgccgactgcgccgccaagggggtcagcgcgctggtcatccagcacgacatcgacctttctgccctgcccggggtgaccgtggtcaaggtggagagcagccgctatgccatggcgctgatgagcgccaacctcttcggcaatcctgcccgccagatgaccatgatcggcgttaccggcaccaagggcaagaccactaccacccacatgatcaaaagcgtgctggaggccgcaggccgcaaggtgggcatgatcggcaccaacggcatctactatatgggacgccacaaggacaccgccaacaccaccccggaaagctacgagctgcaaaagaccttccgggagtttctggatgccggctgcgataccgcgctgatggaggtatccagtcagggcctgatgatggaccgcgtggcgggcgtgcactacgatgtgggcgtgttcaccaacctttcgccggatcacatcggccccggcgagcacaagacctttgaggagtaccgcagctggaagggacagctgttcaagcgctgcgatgtgggcgtggtgaatatcgatgacgagaacaccgccgccctgctggaaggccacacctgcaagctggtcacctatggccgcgatgaaaaggccgactaccgcgagaccggctacaaactgctgcgcacccacgattttctgggcgttgccttccacgttaccggcaaggacgagatggacgtcaaggtgaatatgcccggcgagttcagcgtgtacaacgcgctggcagcgctggccgtgggcaaggtgctgggtctgccggatgccgccattcacgatggtctgggcaagtgcgtggtgaagggacgtgtggagctggtgcccatcagcaaaaagttcaccatcctgctggactacgcccacaacgaggtatccaccgagagcctgcttaccaccctgcgcgcctacaagccccaccgtctggtggtggtgttcggctgcggcggcaaccgctccaagctgcgccgttacggcatgggcgagatctgcgccaagatggccgatttctccatcctcaccgaggacaacaaccgctttgaaaaggtagaggatattattgcggatatccgcgagggcatgaacaagagcaacccggacgcaaagttcgtggagatccccgaccgtctggacgcgctgcactacgcagtggatcacgcacaggagggcgatctgatcgccgtcatcggcaaggggcacgagacctatcgcgaccgcgagggcgtcaagacccccttccttgagcgggaactgctggaagagtacgcacagcagatcgggctggaataagaaaataatattattattgcgggaaaggccgctgcacaaagtactgtgcagcggcctttttgcgtctgtgggagcccctatataaagaggaagcaaactgtgacagaaatgtaaaagataaaaatttttaactaaaaccattgacttatccaacggtttgattataatggtcgtgttcgatacctcataaattttaggtaaataattaaaaacaaacagtgaacataaaggagaatactactatgactttcgaggaaatgaagaagatcgttgtcgataccctgagctgcgatgaggacaaggtgaccatggaggccagcctgaccgaggatctggaggccgacagcctggacgctgtggagctgaacatggcactggaagaggcctgcggcgtgtccatccccgatgaggagctggcaaacctcaagaccgtgggcgatatcttcaactacatcaatgcccatgtctgaggctgaccgaggcgaaacgagatgaacagtatcaaagacctgctgccgggcagcatgcgggagcgcaccttccagctgaaggcccggcgggatgcgggtgccgtgtggaacgacccgcagttcgtggaatgcaaaaagtgcggacgccgcgccacccgccagatctggaacaaggcacagtacgtctgccccaattgcggggtgcacctgcccatcggcgggtactaccgcctgagcctcgtccttgacaagggcagcttccgggaattggacgccgaccttgcaccgcaggatgtgctgcagtttcccggctacccggaaaagctggaagcacagaccggcaagaccggcctgaaggaggctgtcatcaccgccacggggcgcattgagggcaccccggtggtagttgcagtgctggacagccggttctttatgggcagcatgagcaccaccgtgggcgaaaagatcacccgcgccgtggagcacgccaccgcaaagcacctgccgctgatcatcttctcggccagtggcggcgcccggatgcaggagggcatcttcagcctgatgcagatggcaaagacctctgccgccatcgagcggttctccgcccggggcgggctgtacatcagcgtgctgacccaccccaccaccggcggcgtgaccgcaagctttgccagccttggcgatattatgctggccgagcccggggcgctgatcggttttgcgggcccccgggtcattgaacagaccatcggcgaaaagctgcccgcaggcttccagcgcagcgagttccagtacgagcacggctttgtggacaaggtagtgccccgtaccgagatgcgcgaaacactggcgcagctgctgcggctgcacgcctgaggagggagcgccttatgatcaaggacatcttacaacagctcgcaccgttggatgaaaagatcgccgccctgcgcggcgacccggcggacgagaacatgaccgatatcaccaaccacgctgccgaactggcagagctttccgcgcaggaggacgctttgctgtccggctgcggggcgctgaccgcagaggacagggtctttctggcacgtcacccggagcgcccccacatcgatgagatcgtggatgcactgttcaccgacttctttgagcagtgcggcgaccgccagtgcaaggaagatgccgccattctgggcggtgtggcgctgttccacggccagccggtcacggtcatcggccaccgcaagggcagcacgctggaggaaaacctgcgctgcaacttcggtatgcccgggccggagggctaccgcaaggccttgcgcctgatgaagcaggcggaaaaatttgaccgtcccatcattaccttcatcgacaccccgggcgcataccccggcaaggacgccgaggagcgcggacagggcgaggccattgcccgcaacctgatggagatgagcggcctgaccgtgccggtgatcgcagtggtcaccggcgagggctcctccggcggcgcgctggcgctgggtgtggcaaaccgcatcctcatgctggaaaacgccgtctactcggtgctgagccccgaaggctttgccagtatcctgtggaaggattcctcccgcagcggcgaagcctgcgagatcatgaagctgaccgcacaggatctgtacaaggacggcatcgtggaggagatcatcccggagccggtgggcggcgcacagcgcgcccacggggtactgttcggcaatctggacgaggcactgcggcgtcagctgcgcagccttgcccgtatgaacggccgtcagctggccgagcagcgctaccagaaattccgtcagatcggagaaatgaggaaagcatgaagggtttgcgtctgatcgccaccggcggggctttgcccggccgcacggtcaccaacgaagagttgagccgcaccgtggataccagcgacgagtggatcaccacccgcaccggcatccgcacacggcactactgcaccgagggcgaaaacgccgccacactggccattgccgccgcaaagcaggcgctgcagcgcagcggccttgccccggcagacattgcctgctgcgtctgcgccaccctttccgcaccggacgccaccccaagcgtggcctgtcaggtgcaggcggcgctggcactgccggaaaaccgccccgcactggatgtgaacgccgcctgttccggctttttgtacggcacggcggtggcgcgcggcctgctggctacactgggcgggcggtacgcgctggtcatcggtacggaggcactctcccggctgatggaccccgccgaccgctccacctgtgtgctgtttggcgacggagccggtgcggcggtgtttgaactgaccgacacctccgtgccctttgccatcacgctgggtgcccggggcgatgccgccatccatgccggcggccccagccgcgcaggctcggcacccatcagcatggacggcagggcagtgttccgctttgcagtggatgccctgcccaaatgcctgcacaccgtgctggacgagaccggccttacgctggacaatctggactgggtggtctgccatcaggccaacagccgcatcatcgaccactgcgtcaaggcgctgcacgccgatggtgcaaagttctacaaaaacatggaccgccacggcaacaccagtgctgccagcatcccggtggcgctgaacgagctggctgaaagcggccagctgctccccgggcagacccttgcctgcatcggctttggcggcggcctgacatggggcggcatgatcgtggaatataaaggataaagaccatgaaacttttaaacgagatcctggggacgaaataccccatcattcagggcggcatggccaacattgccaccggcgagttcgccgccgcctgctccaacgccggtgcactgggcatcatcggtgcgggcggcatgaatgccgataccctgcgccaggacatccgccgctgccgggaactgactgacaagccctttggtgtaaacatcatgctcatgcacccgcaggcagatgagtttgcccagatcgtggtggaggaaaaagtcgccgtggtcaccaccggcgcaggcaacccgggaaaatacgtttccatgtggaaagctgccggtatcaaggtgattccggtggtggctgctgccgtgctggcacggcatttggagccgctgggcattgacgccgtcattgccgagggcaccgagagcggcggccatgtgggcgagatgaccaccatggcactggtgccgcaggtggtggatgcggtcagcgtgccggtcatcgccgcaggcggcattgccgatggccgtcagctggcggctgcgctggcgctgggcgcttgcggggtgcaggtgggcacctgcctgctggcaagcgaggagtgccccattcaccccaactacaaggccgcgctgctcaaagccggggacagtgacaccatcgtcaccggacgcaccgtgggtgcgccggtgcgtgtgctgaaaaaccgcatgagccgggagtatgtccgtcaggaaaaggcgggcgcggataagatggaactggaaaaatacacgctgggcagcctgcgccgcgccgtctttgagggcgacacggtaagcggcagcctgatggccggtcaggtggccggaatgctgcacgaggtacgccccgtggccgacatccttgccgatctgtggcagggcgggaggcagcgcattgccgcgctgaacaccgaatgctgacccttggcggcaagcccctgcaagtacccattttgcagggcggcatgggcgtaggcgtctcgctgggcgggctggcaggtgcggtagcagcctgcggcggcatggggtgcatctccaccgccgatgcaggctaccgcgagccggattttgcccgcgacccggcggctgccaatcatcgcgccctgaccgcagaaattcaaaaagccaaggccatcgccgggggcatgggtctggtagccatcaacgcgatggtagccacccgggactatgtcgaggctatccgcaccgccgtggcggcgggggtggatgccgtggtctccggtgcgggtctgccgctggagctgccgggcatcgtgggcaccaaagaggtggccattgcgcccatcgtgtccagcgcccgggcggcaaagctcatcctgcgccgctgggcaaagggctttgaccgcaccgccgattttgtggtcattgagggctgcaaggcgggcggacatctcggctttgccgaggaggacctgctggcagaccgctgccagactttggacgagattctgcccggggtgctggccgaggtaaagccttacgaggaacaatacggccacgccatcccggtatttgtggcgggcggcgtgtacaccggtgccgacatggcacattttacaaagcttggcgctgcgggtgtgcagctggctacccgctttatccccacctacgagtgcgacgcttcccagacctacaaggatgtgctgctggccgcaaagccggaggatgtgcgcatcatccacagcccggtgggaatgcccggccgcgcgctgaacaccccgctggtgcaggcgctggccgagggcaagcgcttcccgcccaagcactgcgcccggtgtctcaagacctgcgaccccgccgccgtgccctactgcatcacccacgccctcatcgaggcggtgaagggcaacgtggaggaagggcttttcttctgcggcgaaaacgtgggcaggctggaccggatgcgcaccgtgcgcgagctgatggacgaacttgtgaccgaatggaggcagaacttatgaagcttgccgtactttacgctggtcagggtgcacagcaccccggcatgggcaaggaattttatgaagcatctcccgccttccgggcggcctttgacagcgcagcgctggattttgacctgcaccgcgtctgttttgaggacccggacggcgttttgaaccagaccgaatacacccagccctgcatggtggcctttgcctgcggcgtgaccgctgtgctggccgaaaagggcgtaaagcccgcctatcttgcggggctttcgctgggcgaatactccgcgctgcaggcagccggggtgttcaccgcaaagcaggccatcgagctgaccgccttccggggcaaggccatggcggaggccgcaaagggccttgcctgcggcatgaccgccgtgctggggctggacagagaaaaactgtctgcctgctgcgaacaggcggcggagacgggctgtgtgcagatctgcaactacaactgccctgggcagctggtcatcggcggcgaaaaggccgctgtggagcaggctgccgcgctggcaaaggaagccggtgcccgccgctgcatcccgctgaaggtcagcggccccttccacacaaagctgatggctcccgcaggggatgcgctggcacagcgctttgcgggcgaaaacttcggcaccatggagacgccggtgctgttcaactgtctggggcatgaaaaggccgagaccgacagcatcccgcagctgctggtaaagcaggtgcagagcagcgtctacatggaggacactttgcgccgtctgggcgagctgggtgtggaccacattctggaagtcggccccggcaacgccctgagcggctttgtgaaaaagaccctgcccggggtggtctgcaccgcagtggagaccccggaacagctggatgcagtgctgaccgcatggaaggatgcagaatgagtgaagaaaagctgacccgcgccgccattgttaccggcggcagccggggcattggccgcgcagtgtgcgtggcactggcaaagcagggctgcaatgtggtggtgaattactgccacggcgcagagcctgcggagcagacggcagcgctctgccgcgccgagggcgtgcaggcggtgaccgtgcaggcggatgtatccaccgccgagggctgcaaggcgctgttcgatgccgctgcagaggcctttggccgggtggatgtgctggtgaacaacgcgggcatcacccgggacaacctgattttgcgcttgaccgagcaggattttgaagcggtgctggacaccaacctgaaaagcgcctttctctgctgcaaggaggccgcccgccgcatggtgcgccagcgctatggccgcatcgtgaacctttccagcgtggtggcgctgcggggcaacgccgggcagaccaactacgccgccagcaaggcggggctcatcggtctgaccaagagccttgcccgggagctggccgcgcggaacgtgaccgtgaacgcggtagcgccgggctttatcgacaccgacatgactgccgtgctgccggaggcggtgcgcaccggcatgacgcagggcatccccgcaggccgcgcaggccagccggaggatgtggcacaggcagtggcgttttttgccgcagaacaaagcagctatctcaccgggcaggtgctctgtgtggacggcggcatggcaatgtaaaggagaacccttatggaaaaacgcagagttgtgatcaccggccttggcacggtgaacccgctgggcaacaatgtggcggacagctgggcagcagcccgtgccggtaaatgcggcatcggccccatcacccagttcgacaccaccgacttcaagtgcaagctggctggtgaggtaaaggattttgaccctgagaccgtggtggacaaaaaggaagtccgcaaaatggcacgcttcaccctgctggcactgggcgctgccgctgaagccattgcagacagcggccttgataccgaggccgagggcaaggacatcggcgtcatcctgtccagcggcatcggcggtctgcccacgatcgaggagcagcacgcccgcggcgaggaaaagggcatggagaaggtaagcccctactttgtgcccatggccattgccaacatggcagcggcacaggtggccatccgcttcggtctgaagggcatgtgcacctgcccggtcacggcctgcgccggcggcaccaatgccgtaggcgacgccttccaccgcatccgggacggctacgagccggtaatggtttgcggtggtgcggaaagctgcatcagccccttgggcatcggcggctttaccagcatgaaggcactttccaccgccaccgacccggatgctgccagcctgccctttgacgcccgccgcggcggctttgtcatgggcgagggcagcggtgtgctggtgctggaagaactggagcacgcaagagcgcgcggcgcacacatctatgccgaggtggtgggctacggtgccaactgcgatgcctatcactttaccgctccggctcccggcggcgcaggtgccatcgactgcatgaagctgaccttggtggatgccgacatcgcaccggagcaggtggatcacatcaacgcccacggcaccggcacccacatgaacgatgcctgcgagactgccgccatccacgccgtgttcggcgcacacgccaaggagatgaccgtggtcagcaccaagagcatgaccggccatctgctgggcggcgcgggcggcatcgaggccgtgtttaccgcgctggcactgcgggaccagttcgccccgcccaccatccactacgcccagcccgacccggagtgcgatctggactatgtgcccaacaccgggcggcagcaggagatgcagtacgcgctgagcaacagcttgggctttggcggccacaacgcctgcatcgccctgcgcagatgggagggctgacccatggcagagccccgtaccgtgcgtgaaaacgccaacaccctgagcagtgtacagatcgcggagatcctgccccaccgctacccctttgccctcgtggaccgcattctggactacgagccggggcagtgggccatcggccgcaagtgcgttacccgcaacgaggaatttttcaacggccacttcccggcgcagccggtcatgcccggcgtgctgctgctggaagcactggcacagaccggcgctgtggcggcgctgagcctgccggaaaacaagggcaagcttgcgctgttcggcggtatcaagagtgcccgcttccgcaaacaggtcacccccggggacgtgctcaccctccactgcgagctggtacagcagcacggcgctgtgggcgtaggcaaggcctcggcatgggtggacggcaagtgcgccgtcaccgcagagctgacctttgtgctgaccgacgcagcagaataaaatgaatgaaaaagagataggcgatccctttcgggaaagcctatctcttttttgtgtctgttccggtcggtttactctgcggcagctgtcccggcgtctgcttcagcagtgggggcagactctgccgtggcggtttctgttggggcggtcgctgcctgttccttctccatccactcccgcacgcggtcggggcggttggtgatgtaggcatcggcgccggtgcgcagcaggctgcggacggcatcctccgtgtccaccgtccacaaagacaccttgatgcccatctcgtgcagtttgtcaatgaaaccggcgtttttgtaggcggtgtggtactcacagctgacccactccggcacaaagtccagactgcggatgtaggcgggcagatcccgctgcgccatcaggtttttgtagatctcgttcaggctctcgccgggaaagtttgcccgcagcatacttaccttgtcgctcatccagcgggtcatccagctgcaattttcctcgtcggctgcgctctccggcagggcggcatccatggcttccatgtcctccatgccgttggtcagtcccagatccttccagatgatgggcggcggcagcagcatgctttccagctcgccgtataccagcgcacccacccgcaattcgggcatcaactgctttgcctgccgcagcagcgcgtggttgaaggaaacaaggatcacctgatccacgatctccgtctgccgcagcacctccagcacccggggcacaaagtccgggtcgttgttcatggtggatttcagctccagatgcacggtgcattccggcatctgcttgcacagctccatggcttcctgtaaggtagcaatcttttcgtcctgatagatggcatccttccagctgccaaaatccagctctttcagatcgcccatggtcatatcgtagatcttgccggaaatatccgtgtgcagatcgatcatatagtcgtggtggatcacaagcccggcgtcaatggtctgctgtacgtccatctctacgccgtccgcgccaatctccatggcttttttaaaggctgtcagggtgttttccggtgcaagataggaagcaccgcggtgtgcaatgatttgtggtgtcataaattttctccgttatcggttcttcctcacacttttacgccccggcgctgccataccgcaaacagtgccggggcgcttgctcaggtcaggtcctcgccgtccgaggcaatgacctttttataccagtaaaaactgtccttccggctgcgggcaagggtgccgttgccgtcgttgtccttgtccacatagataaagccgtaccgctttttcatctcgccggtggaggcgctcacaaggtcgatgggaccccatgtggtgtagcccatcagcggcagaccatcctcgttgacggccttttccatctcctcgatgtgtgcccgcagatagtcgatgcggtagctgtcgtggatggagccgtccggctctacggtatccaccgcacccagaccgttctccacgatgaacatgggcttttcgtaccggtcgtaaatggtgttcagggtcacccgcagacccaccgggtcgatggcccagccccactcgctgactttcaggtaggggttcttcaccgatgcagacacggcgttgccttccgcattctctgccgccatcagctccttatccaccgtgatgcagcggctggaatagtagctgaaggacacaaaatccaccgtgccctcccgcagcgtgcggtcgtcctcggactgtgtgtgcagctgcaccccggcgcgctccatccgctttttagcccacacggggtaagcgccgcgcacctgtacgtcagtaaagaagtagttgtcccggtcggcctcctgcgccgcccgcacatcctccggggcgcaggtgcgggggtagaactgccctgctgccagcatacagcccaccatggcatccggcattttttcgtgcgccagctttaccgcctttgcgctggccaccagctcgtgatgggcagcctgatacttgacctgctccacattttcgccgggatagaataccagccctgcgccggtaaaggacaggtgcagcagcatattgatctcattaaaggtgagccagtacttcaccttgcctttgaagcggtcgaacagcacctcgcagtagtggacataggcgtccaccatgcggcggtctttccagccgccgtattttttgatgagggcaatgggagtgtcaaagtggcagatggtgaccagcggctcgatgccgtacttatggcactcgtcaaaaatgctgtcgtagaaagccagtcctgcctcgttgggctgagcgtcatcgccgttgggcaggatgcgggtccatgcaatggacagccggaagcacttgaagcccatctctgcaaacagggcgatatcctctttataatggtgatacaggtcaatggcctcgtggctggggtagaaatgtgcgtcatcgcagcccagcatttccatatagcccgttgccaccggaaaacggtccgggccgaagggggtcacatccaccgtagccagacccttgccgtctgcctgccatgcaccctcgcactggttggcagcggtagcgccgccccacaaaaagcccttgggaaatttgcccatactctttacctccttgtttacttttgcgcccctgcggagcgcagatatactcatactataatgataccgcaaccggcggcgcttgtccatgactgcattttgcaaaggtgcgtgtatttggggataaagtacgacttttatcgtcaaaacgccgaaatttcctgctgctttttgcgcacttttcacgataaaaacacaaaacttgcctgtttttcttttattctgttccttttaaaccgcgcggcagtatggtagaataatagggtaagaactgcgctgcgctgctgcgctgctgagaacatggaaaaaatggagtgtttgattatgactgagttcaaacccatcaaagaaggcaaagtccgcgagatctacgacaatggcgacagcctgatcatggttgccaccgaccgcatttctgcgtttgacgtcatcctgaaaaacaaggtcaccaaaaagggcaccgtgctcacccagatgagcaagttctggttcgattacacccgcgatctgctgcccaaccacatgctgagcgtggatgtgcaggatatgccggagttcttccgccagccccagttcaccggcaacagcatgatgtgccgcaagctgaccatgctgcccatcgagtgcatcgtgcgcggctacattaccggcagcggctgggcaagctaccagaagaccggcaaggtgtgcggcatccagctgcccgagggtctgcaggagtccgataagctgcccgagcccatctacaccccctccaccaaggcagagatcggcgaccacgacgagaacatctcctacgagcagagcatcgacgtgctggagaagcagttccccggccacggtctggagtacgccaccaagctgcgggactacaccattgctctgtacaagaagtgcgccgagtatgcactgtcccgcggcatcatcattgccgataccaagttcgagtttggtctggacgaggacggcaacgtggtgctgggtgacgagatgctgaccccggactcctcccgcttctggccgctggagggttacgagccgggtcacagccagccctccttcgacaagcagttcgtccgcgactggctgaaggccaaccccgacagcaactacgacctgccgcaggatgtcattgacaagaccattgccaagtatctggaggcctacgagctgctgaccggcaaaaagctgtaagcgtatcccgtatccataaaaaccaaggctgctgcggaaaattttccgcagcggccttttttgcgccccgccctcttgacaaggggcggggagatgggtaatatatgtatcgcatcaaacagttttacatcgaacaatttgaacagaggaaaaacattatgtgtacacagcaccctattgaagagccctgcaagctggacccgccgtgggaagggccgcaggtcatccctgcccagctgcaccgggtggataacctgatcttccgcaggctgaaccagttttcccgcgccaacggggtagagcagaccacccccatgcacgggtggatcatcgagtatctctaccgccaccgggacgagccggtgttccagcgggacatcgagcgggagttttccatcacccgctccacggtgacgaacattttgcagctgatggagcgcaagggctacatccagcggttgagcgtgccgcaggatgcccggctcaagcagctggttttgaccgaggagggcatccaacggcacgaaaagaccctgctgtccttccaccagaccgacgactatgtggccggactgctgaccgaggaggagaacgcagaactgctgcggctgctgaacaagctgcgggaagcactgaaataacgatcttttccgtcaaagcgccgaaaaaggacttgataaattagcaattatgaacatttttcgaaagctattgacattcagatcgttttgtataaaattgttttgtaccaaacaaataacttcaatgggagggaaattcagatgatcaaaaagcttgtgtcacatctgggcgagtataaagccgcctcgatcaagacaccgctctttgctgcgctggaagccattatggatgtgctgctgcccaccatcatggcctttatcatcgatcagggcattgaaaagggcgatatgaacgccatcatccgctacggcctgcttacctttctggtggcagccattgcgctggtgctgggcgtgctggcgggcaagtacgccgccgaggcatccaccggctttgccggaaatctgcgcgatgccatgtatgaaaacatccagcattactctttttccaacatcgacaaattctccacggcgggtcttgttacccgtatgaccaccgacgtgaccaacgtgcagaacgccttccagatgattttgcgcatgtgtgtgcgcgccccggtgcatctggtgtttgcaatgttcatggctgtggtcatcggcggcccgctgtcgctggtgttcgtggtggcaatggcctttctggtggcggtgctggctgccatcatgatccccaccttccgcatctttgaccgggtgttcaagaactacgataacctcaatgcctcggtgcaggagaacgtctctgccatccgcgtggtcaagagctttgtgcgcgagggcttcgaaaacgaaaaatataccgccgcctgcgagagcctgtacaagcagttcgtcaacgcggaaagccgcctgagcttcaataaccccgctatgctggtggcggtgtacggctgcaacatcgcgctgagctggttcggcgcaaagtatgtgctgcacggtgccattaccaccggccagctgaacgccctgttcggctatatcatgaacatccttatggcactaatgatgctgagcatggcctttgtcatgatcgctatgtccgccgcctctgccaagcgtatcgtggaggtgctggacgagcacaccgacctgtccccggcaaagcagccggtgcagcaggtggcagacggcagcatcgagtttgaccacgttaccttcaagtataagcacggcagcggtcagccggtgctgaacgatatcagctttaccatccggcccggcgagacgctgggcatcatcggcggcaccggcagcgcaaaatccagtctggtgcagctgatcccccgcctgtacgatgccgagagcggtaccgtgcgggtgggcggcgtggacgtgcgagattataaccttgacgtgctgcgccgcgaggtttccatggtgctgcagaagaacgtgctgttcagcggcaccattctggataatctccgctggggcgatgccaacgccaccgaggaagagtgcatccgcatggcaaaactggcctgcgcggatgaatttatccagcgcttcccggataagtacaatacatggatcgagcagggcggctccaacgtgtccggcggccagaagcagcgcctgaccatcgcccgcgccctgctgcgcaagcccaaggtgctgattttggacgattccaccagcgccgtggataccgcgaccgatgccaagatccgcaaggccttccgggaggagatccccggcacgaccaagatcatcattgcacagcgcatttcctcggtgcaggatgcagaccgcattctggtgctggagaacggccagatcaacggtctgggcacccacgcagagctgctggcgaccaatgccatctatcaggaggtctacaacagccagacgcagggcggcggcgattttgacaagcagggaggtgcgcagtaatggcagtaaaagaagtacatggccccggcccgcggggcgcacgggggccgcgccccaaggtggaaaacccgggcaagctgctgaagcgcatcatggatgaggtgttccgcaactatctgccccactgcatccttgtgcttgtctgcatcgtggtcagcgcgctggccaatgtgcaggccagcctgttcttgcagactttgatggacgattacatcgtccccatgacccgccagcagaaccccagctttgcaccactggccggtgcattggtgcggatgtgctgcatctaccttgtgggcattctggctgcatgggccaacgcccgcatcatggtcaacgtaacgcagggcacgctgcgcaatctgcgcaccaagctgttcacccacatggaaagcctgcccatccggtattttgacacccatccccacggcgatatcatgtccgtgtacaccaacgacgtggataccctgcgccagatgctcagccagagcatcccgcagctggtgtccagcgtcatcaccatcgtatccgtgttcttcagtatgtgtatgctcagctggcagctgaccatcgttaccatgctcatggtggcgctgatgctgttctgctccaagcagatcgcaaaaagctcctccaagtacttcatccagcagcagcggggtctgggcaaggtgaacggctacatcgaggagatgatggaaggccagaaggtggtcaaggtgttcactcacgagcagcagacccttgccggcttccgtgagttaaacgaccagctgaaggaaagcgccaaacaggccaacgccttctccaacatcatgatgccggtcaacgcccagctgggtaacatcagctacgccatctgcgcgctgactggtgcagccatggccgttggcggcgttggcagcatgacccttggcaccgtggtggccttcctcagcctgaacaagggcttcaatatgcccatcagtcaggtgtccatgcaggccaacagcgtcatcatggcactggccggtgccgagcgcatcttcaagatgatggacgagcccagcgagaccgacgagggctatgtgacgctggtgaacgccaagtacgaccgcaacgaccagctggtggaaactgccgagcgcaccggtctgtgggcgtggaagcacccccaccacgacggcaccgttacctaccacaagctggcgggcgatattacctttacggacgtagactttggctatgtgccggaaaagacggtgctgcatgacatcaacctgtacggccgtccggggcagaagatcgcctttgtcggctccaccggtgcaggcaagactaccattaccaacctgatcaaccgcttctacgatattcaggatggcaagatccgctatgacggcatcaacatccacaagatcaaaaaggccgacctgcgccgctcgctgggcatcgtgctacaggacacccacctgttcaccggcacggtgatggagaacatccgctacggacggctggaggccaccgatgaagagtgcatcgccgccgctcgtctggccaacgcagatggctttatcaagcgcctgccggagggctacaacaccatgctgaccggcgatggcgccaacctctcgcagggacagcgccagctgcttgccattgcccgtgcagccgtggcagacccgccggtgctgattctggacgaggcgacctcctccatcgatacccgcaccgaggcactggtgcagcgcggcatggacggcctgatgtacggccgcaccagctttgtcatcgcccaccgcctgtctaccgtccgcaatgcagactgcatcgtggtgctggaacagggccgcatcatcgagcgcggcagccacgacgagctgatcgccaaaaagggcaagtattaccagctttataccggtaatctggccgagaactaaacaatttcccaccttctcacaaagccgccgcacagccatgccgccgtgcggcggctcttttttactcccatgaagaagcaattctggaaaatccgcagattttccagaattgcaaatataaaaataattttccgctgaagatggccaaagcacacgcggcggccattcaaaatcgtccgctccacggtatacaaatgccccgggctgtgctagaatggagcaaacgagaaaaaggctggtgagtgtatgcaccctctgacggaatatccccgcccggctatgcgccgggacagctacgagaacctgaacggcctgtggcagtacgccatcactgcctcggcgcagcgcccggcgggctgggatggcgagatcttagtgccctacgcgccggagtgccgcgcctccggggtggggcgcacattacagcccgggcagtggctgcactaccaccgatattttgcgccgcccgccgggatgggcggacgggtgctgctgcatttcggcgcagtggactacgcctgcgccgtgcaggtgaacggccatctggtgggcggccaccggggcggctactggccctttacgctggatatcaccgcgcagctcaacggcacaggccgcaacagcctgtgggtggcggtgcaggaccccaccggccacggtacacaggcgcggggtaagcagactttgcagcccggcgggatgttctacccggcgcagagcggcatctggcagacggtctggctggagcgcgtgccggaaaattacatccagtctctcaccgttacgccggactatgatgcctgcaccgtgaccgtgaaagcccatacctctgcacccggcggtgcggcgaacctgtgggcggtagtgcgcgccgggggtgtgaccattgccgaggactggggcagcgatgaggccgaccaggacggtgaggtgacgctgcatattgcagacgagtatttcttcccgtggagcccggacacgccctttttgtacgacctgaccgtgggcaccacgcagggagaggaagaacagttcgacaccgtgcacagctactttgccctgcgcaagtggagctgcgcaccggacgcaaggggcgtgctgcgcttctgtctgaacgacaagcctatcctgctcaacggcctgctggatcagggctactggccggagggactgtacaccccgccctcggatgcggcggtggagcgggaactgagcgaggtaaaggcgctgggctacaacct

SEQ ID NO: 70 - DNA, 6935 bp, unidentified
  source 1..6935: mol_type = unassigned DNA
atgaaagcaagtctgccttataagtacatcacttccgtgaagaacggaaaacagtatgttgtctttgatttcaaggataaagtgggaaagcgtaagcgcaagtgggtgtcaacgggactgcctgagaaatgcaccaagaaatctctcaacgaagctgtcgaggagatcgtagctgagtttgcagagcagtggaacaataatcaggtcgtgctcagtatcaaccgcaagaacgatagtgacgccgaaagtgatgaaaacatcatcgttaataatgaacttaacagtttcttttccgattggctcactgcgatcaaggcgaattctgccagaaccacattccagtgctacaagagaaatgcagagcgttttgtaaaatacatggctgttcattatcctgatgtgacgcttgccgacctgaaccatacacatatccaggcttacctcaaccataaaatggacgagggcgttaagggaagtacagtcaagcagtattaccttgctttgcattcggcttttgcctatgcagtaaaaatggaaatgctgacacagcaccctatggacaagatgagcgtaccgagagcagacagacatgaggctgtcttttataatgtagacgagctgaatgaattgtttgaggtattcaaaggtcacaagctggagcttatcgtgcatatcgcagcatactacggtctgagaagatgtgaaattcttggattgaagtgggattcaatcgacttcaagaaaggtactatcactatcgaacgcaaggtcgtaagcgattatgacgaaagtggacagcccaagctctttgtggagacaagactgaaaacaaactctacaagaagaacacttccgctgattcctcatatcagagatatgcttctcgaaaagaaggatatggataagcatcataaaaagctctgtggtaaagattatattacggagtttgaaggctttgtatgctgtgatccttatggaaagctcatcagtccaaacacggtcactcatgattttcatcaggtgatcaagaagaatggaatgaagatgcttagattccatgatctgagacatagctgtgcgagtcttttgcttgcaaatgatattccaatgaaggcgattcaggaatggctcggtcatgcaacatttaatatcacggcaaatctttatagccatttggagtatcatgctaaggtcacttcggctgaaaccattgcaagggttctcagcggcaaaaaggaagatgctcccaccaacacaaaggagactgcgccggaagaagcatctaagaagtcaaacagcagaaaaaagaagaaagatacccctgcggacaagtcacagaccgcagccgtgtaattatataatatactgtgacaaaaccgaggacgaaatagaaagaatcgaaaaagagcgattttggtagaaaaattggtagaaatttttggtagaagtcaattatatgatttcacggaagcttcgcaaatgccgtaataccgaaagaaaaagcgtataaaacgaaaaagttcatataatgcgctggactttgtcccgattttatggtataatgtaagtgtaagaaaaaacttgacatatttgggaggtaaagaatatggcaaaaatactcgttacaggcggagcaggatttatcggaagccacacctgcgttgagcttcttgaagcaggctatgaagtagttatagttgataacttttcaaactcaaagccggaggctcttaacagaataaagaagataacaggcaaggactttgctttttatgaggcagatcttcttgaccttgcggcgctcgaaaagatatttgaagaaaacaagatagacgctgttatacattttgcaggtcttaaagcggttggcgaatctgttcagaagcctgttgaatattaccataacaacatcacaggcactctcatgcttatcaaggcaatgagaaaatacggctgtaagaagatagttttctcatcttccgcaacagtttacggccctgtaaacaaagctccttacacggaggatatgcctacatcagcaacaaacccttatggctatacaaaggtaatgatagagcagatactgagagatgtttatgtttccgacaacgattggtcagtttcacttctgagatacttcaaccctatcggcgcacataagagcggccttatcggcgaagaccctaacggtataccaaacaatctgcttccttacatttgtcaggtagcagtaggaaagcttgaaaagctcggtgtgtttggtgacgattacgatacccctgacggaacaggtgtaagagattatatccacgttgttgaccttgctaagggtcacctttgcgcagtcaagtatgtaatggaaaacaagggtgttgaagccgtaaacctcggcacaggaaaaggctcaagcgtttatgatgttcttcacagctttgaaaaagcctgcggaaagaagctcccatatgtagtaaagccaagacgtgcaggcgacctcgcaacctgctatgctgatacagcaaaggcaaagaaggtctttggctgggaagcacaatatggtcttgatgaaatgacagcagatagctggaacttcattaagaataatcctaacggactttaatacataagcatagaacataataattttcctaggcagggacacacaaatgtgtgtccctgttttttatgccctttttccattcatgcaataatgcgacaaaaaaatcccacagtaagtgataatatattttcagcggataaaacgaaaaaatgaaaggaatgataaagcatgaatgtggagataaaaaactatccgtcagccagaactcttgtggcagagatatgcggcgatatcgaccaccatacagcaaaatatttcaggggagagatagataaagccattagaagccataaccctcttacccttatcctcgactattctcaggtgacttttatggatagctcaggcatcggacttgttatgggcagatacaggataatgtcagaaatgggtggcgaggtgatagtggcgtcgcctcctgcttatatccgaaaggtcttgcagcttgcaggtatgcacagactcacaaagatagtcacggatattgccccgtatatacaagagaagaaagcagctcaggaacagaatgaaagccccgatgacaaaacaaaggagagtgataaaattgaaacgaaaaccccttaatgaaatgaaagtcagttttcccagctattctgaaaatgagcgctttgctagagttgcagtcagcggtttccttactcagcttgaccctcagatcgacgagcttgcagatgtcaagaccgcagtgtcagagggagtcacaaacgccattgtccacggataccgaaacaccctaggggagatattcatgcagataaggatattcgagaacagacacgtctacataaaaataagggataagggctgcggtatcgctgatatagagcaggctatgcagccgcttttcaccactgcgcctgaggaggaaagagcaggccttggctttgcggtcatggaaagctttatggataaagtgaaggtgcgcagcaagcttggagaaggaactacccttatccttgaaaaaaccttgaaagaaagagtataaaatgagcagcatagtcgagacccctcttgcagaagaaaatctggggcttgttcacctgtgcgcaaaccgcttccgcaaccgtggcatagagtatgacgacctctacggtgcaggctgtataggtcttgtaaaagctgcgaaagcctttgacagcgaccgtggtgtgaaattctccacctatgcagtgccagtgatattaggggagataaaaaggcttttccgtgacggtggcacgataaaagtgtcacggagcataaaagagctttccatgcgccttgtaagagagcgtgagcgattttccatacagcaggggagagaacctacagtaagcgagctttgtgagctgtcaggagaaagcgaagaagccgttactctagccatgaacgtcgccctgccccctgttagtcttactgaaagctcagatgaagacgaccgccacggacaaatagatatccctgttgatgctcctgacatagaaattgctgacaggctctctctccgtcaggtcatagcttcccttgaagcggaggatagaaagcttatatacctgagatattttcagaataaaactcagatggaaacggcaaaacaacttggtatgtcgcaggtgcaggtgtcaagacgagaaaaaaagctgctcactttaatgcgtgaacagcttaaataatatcattacagtgggcggcttttggtcgcccattttttacaaataagatctgagtatctcgatagtttcttcatgtgagcaaacagcgtcagaatctataaagtgctgaaaataatcccagaaagcctgaacaaggctcgtttcgcttatcttcaaataagaaaaatcagagaagcagttgtttctggcaatgatgttaagacttgtgttgtcagaaatgttgatacaaagatttttcgacaccgcaaaatagtcgttctttattatcctgtagtctgccatgccgttttcacaaagcgatatcattatctggagcattatcttgcgttctgcaagagtgggaaaagtatatgaatttctcggaagctcaaaaatctctcccgtcgtcataaactctgcaagacccttttcactgaacagatttacaaatttgtgttcagaaagagccttcttgcccatggtgagctttgcttttacaaatttctttgcgtcagctggcaaaagtgcatgggcgttgtatatatcctctgtaagacaaagcatggtgcatggctgaaaatctacgccgatgaaatttgcgttgtcatcgtaccaaaagtaaacatattccaaaatatccacggcgtggtcgagaagctttgcacattttgtcttgaacttttcaaactgccgcatataaaattctaccataggcttagatctgtatataacgccctcgcaataatcgctgtctgttctgatcagaaaattattcgttatcattatgtttggcatgatgttcgtggagttgaaatatgccgacgcaccctcataataataaaaagcctcatatttttcatgcttttgtgcaaggtgacatatgaacggaaaaatatccagattgtattttgcggtgtttttttcacctgaggtgttgtcaaagaagaacagatggtttatggtagactcgctgccttctgcggcaatggacagcagattggtaagaaactctgttggctgagcgatgacctgaatgtcagaaccgttatgaacatcgctgcatataagcacctgcaggttttttctaagctcacgtttgtcggtgtagatggatatctcaggcacagagtcaatatcaacttctgtcttgaaagtcagagcgtcaggctcttccatgtttgtgtttgccatatcgtgtattatctttgacacctgcttgcggcgattgtagacatcttcccccatctcagaaatgttataaagctccatgagcctgcttttatcctctgtggaaagcatgagctgcaagcttatattttctacaaaatctacgcttggcactttcctttcccctttgagtatcttatgaagatatgttctgtcgataccacatttttcggcaagagcttttatagtaatatcttttttctttatgtattctctgagaagttccgaaaattgtgacattggcatcatatcctttctgtagaaaacaggcatttaaagtatatttaaagtatatttttacataccgatacctatattatatcctatttacgcacaattgtcaacctttgataattttatcttattaaggcaaaaaacgtatatttttataaacagctgcaaaaaatacaagcgtaaaatggaatactttaaaatttggaggagttttcatgaaaataatattctatgacgcaaagcagtatgatatagattcatttgaaaagcagcgaaaaaactatcccgatatagaaagcgtttaccttgaagccgacttgacggaagacacagcaaggcttgccgagggctgtgaaggcgtgtgtgcctttgtaagctcaacgataacaggctcagtgcttagacggctccatgaacacggtgtaaagcttcttcttatgcgatgtgcaggctataataatgttgatataaaagccgccgataaatacggcataacagtgcttagagtgcctgggtattctccggaagccgtggcagaacacgccatggcgcttgcgcttgcagtaacaagaagaatacacaagggctatataaaggtaagagagaacaatttcagcctgaatggtcttatgggacttgatttccatggcaagaccgctggtataataggcacaggcaggataggtgcggcaatgtgcaggatatgccacggctttggtatgcgtgttatagcttatgacgtttatcagaaccccgaccttgacttcgtgaaatattatccccttagcgaagtcctgcgggaaagcgaccttatctcgctccattgccccctgacagaatcaagctatcatcttatcaatactgaaactatctcccttatgaaagagaatgttgtttttgtaaatacctcccgaggtgcgcttgtgaataccgaagaccttataaaaggtatcagaagcagaaaattccacggagtgggtcttgatgtttatgaggaagaaacggagaacgtctttgaaaaccgacaggaggatatcctagaaagctccgtgaccgcaaggcttctgtcttttcctaacgttatcgtcacctctcatcagggctttttcaccgaagaagccctagccgccataagccgcacaacgcttgagaatgcttgtgcttttgagcgtggcaggataataaaagaaaatcaggtcaaatag

SEQ ID NO: 71 - DNA, 5149 bp, unidentified
  source 1..5149: mol_type = unassigned DNA
gaattgcagccggagggttatctggtgttgggcgataccaactcctgcctgtctgccatctctgcgaagcggctacacattcctttgtttcacatggaggccggcaaccgctgcaaggatgagtgcctgcccgaggagaccaatcgccgcatcgtggatgtgatttctgacgtgaatatgtgctattccgagttcgcccggaagtatctggcagataccggcctgcccaaggagcgcacttaccagaccggctctcccatggcggaagtactgcgcatgaatctggagaagattcagaaaagcgatgtgctggaacggttgggtctggaaaaggataagtacattctgctgtccgcccaccgggaggagaacatcgactcggaaaagaatttcctgagtttgttcactgccatcaatgcgctggcagaaaaatacgatatgcccatcctgtactcctgccatccccgcagcaagcatcgtctggagaagagtggcttccagctggaccctcgcgtccgggtcaacgagccgctgggcttcaacgactataacaagctgcaaatgaacgctctggcaatcgtctccgactccggcaccctgcccgaggaaagcagcttctatctgtccatcggtcatcccatcgctgccgtgtgcatccgcaccagcacggaacgccccgaggcactggaagccggtgacttcattctggctggtattaccacccgggaactgctcaacgccaccgatatggccattgagatgaagcagaagggtgttctgggcaagccctgccccgattatgtggacgagaccgtgtccatgaaggtggttcgcatcattcagggttatgtaaatgtcgttaataagatggtgtggagaaaagggtaagggtgataaaaatgggtaaaacagtattcattaccggtgcatccggttttatcggctccaaccttgccaaacgtatcctgaccactgagccggataccaaggtcattggtctggacaacatgaacgattattatgacgtccgcatcaaggaggctcgtctggcggagcttcagaagttcgagaactacacctttatcaagggtaaccttgcggacaaggcacttatcaacagcatttttgagcagtaccatccggatattgtggttaatctgggtgctcaggctggtgttcgctactccatcacaaacccggatgcctacatcgagagcaacatgattggcttctacaacattctggaggcctgccgtcattatccggtggagcatttggtgtatgcatcttccagctctgtctacggcagcaacaagaaggtgccctactccaccgatgacaaggtggacaatccggtttctctgtatgcggctaccaagaagtccaacgagctgatggcacatgcttactccaaactctacaatatcccctctactggtctgcggttcttcacggtctatggccctgctggtcgtccggatatggcatattttggctttaccaataagctggtgaacggcgaaactatcaaaatcttcaactacggcaactgcaagcgggactttacttatgtggatgacatcgtggaaggcgttgtccgtgtgatggcgaaagctcctgaaaagaagaatggcgaggatggtttgcccattccgccctatgcagtctacaatatcggcaactccaacccggagaacctgctggactttgtgcagatcctgtcggaggagctggtgcgtgccggtgtactccctgcggactatgactttgaggctcacaaggagctggttcccatgcagcccggtgacgtgcctgtgacctttgctgacactgagccgttggagcgtgacttcggttttaagccccataccccactgcgtgaaggcctgcggaagtttgctgagtggtataaagagttttatatggaataaggcggtgggaggaattatatgcgctgcgaggaaagattctacgaaatatatggaaaagatcccgtgggcgtcagcttttgcccctatcggatttgccctattggtgcccatagtgatcacaacctgggaaagatcacaggacttgcaattgataagggaatccatattgcatataagcccaagatgaatggcgttgttgagatgtgcagtcttcaattcccgaaacgtgcccagtggcatatccgggagatcggcgaaaaaaccggcgactgggcagactatctgcgtggcgctacctgggcgctgagcaatcggtatccattgacagtcggactcagtggcgtcattgagggctctttgcctatcggagggctttcttcctctgcagcggtgatactgtccttcctggatgcattgtgccaagtcaatggaattaaactggagccgtctgaactgatcagcattgcgtttgatgcagagaaaaactacgtgggcgttaatgtgggaaccctggatcagagttgtgaggttctgagtaaaaaagaccacttgctgtatctggactgtaaggataacagctacgagctgattcccacgaatcccaatatgaagccctacaagattgcggtgtttttcagtggattggagcacagtctgactggctctaaatataatatgcgggtggatgaactgcgatccggtgtttacgctttgcaggcttttgcgggtctggagtacggaaagtttaatgaggccaatgcccgtgatgtttcgtatgaaatctaccagacatacaaggacaagctgccggcacaatgggcaagacgttgcgagcactggtatacagagttcaagcgtgtggaagctggtgcgaaagcatggcggcgaggcgatttggaagagtatggacgcctgtcctttgaatctggctggagcagcatccacaactgggagtccggtgcgccggagcagatcaaactctacgagattatgagggagaccgctggcatttatggtgggcgcttcagcggtgctggctttaaggggtgttgcatggcattgattgatcccagcaagacagatgtcattcgggaagaagtggagcggaaatatctcaccgcattcccggagatgcgtggcaagtacagttttcatctgtgcgagagtgcggacggcgtagggcataagacggaggactaatatgaagtgcttgattttggccgcgggatacgcaacccgcctgtatcccttgacggagaactttcccaaacccttgctgaaggtaggggataagaccatcttagattggctggtggatgacattgatgccgctggtttggtggatacctatgtggtcattagcaaccacaagtttgcccaccattttgaagactgggcggcaaccaagaaacagaatatccgggtggtggacgatggaacaatcagcaatgagacccggcttggtgctgtatgtgatgtgcaatttgccattgaccagttggggctggatgatgacctgctggtgattgccggtgataacgtgctggatttctccctctccaggtttgttgcctatgccgacgagaagaaaacctcttgcatcatgcgctattatgagcccagcgaaaagaaactcaccaaatgcggtgtggtggaactcgacgaccaagatagaattctgtctatggaagaaaagccagcccaacccaagagccactggtgttgccctcccttctatgtctacacccgagaggatgcccaaaaggtcaaggatgcaatttcacagaagaagtgtggtactgatgctccgggtagctttattgcatggctgtgcacggtagcggatgtgcatgctatggagatgccgggcaagcggtatgacattggaaatctggaaagctatcagcaggttcagcaggagtatcagggaatcaaggcataagtcttgctaaggatggaagaatgtatagaaagggagaaagactatgaaaatcgcagttgcaggtaccggttacgtcggtctgtctattgccacgttgctgtcgcagcatcatgaggtcatggcggtggatattatcccggagaaagttaatctcattaaccagcgtaaatctcccattcaggacgagtacatggaaaagtatctggcagaaaaggacttaaatctgactgccacgctggatgctgaagccgcctataaggatgcagactttgttgtcattgcagcacctaccaactatgacagcaagaaaaacttctttgatacttctgcagtagaagctgtcatcaagctggtgatccagtataatcctgatgccatcatggtcatcaagtccacgattccggtcggttttacggcatctgtgcgtgaaaagtaccactgtgacaacatcatcttcagcccggagttcctgcgggaatccaaggctctgtatgataacctctatcccagccgaattattgtaggtactgacgtggacaatgcccgtctggtgaaggcagccaataccttcgccggattgctgcaggaaggtgcaatcaaggagaatatcgataccttgattatgggctttacggaagctgaggctgtcaagctgtttgctaatacttatctggctctgcgtgtgtcctacttcaatgaactggatacctacgccgagatgaagggactgaacacccagcagattatcgagggtgtctgccttgatccccgcattggcagccattacaataaccccagcttcggttacggcggctactgcctgccgaaggacaccaaacagcttcttgccaactatgctgatgtgccggagaatctgattgaggccattgtggaatccaaccgtacccgtaaagactacattgctgatcgtgttttggagattgctggtgcatacgaagcaaacgaggcttatgaccccagcaaggaacacaatgtggtggttggcgtatatcgcctgaccatgaagtcgaactccgataacttccgtcagagttccattcagggtgtcatgaagcgtatcaaggcaaagggcgcaacggttatcatctacgagccgactctggataatggttctaccttcttcggcagcgaagttgtgaataaccttgaagaattcaaaaaccgcagccaagccatcattgctaaccgctatgatagctgcttggatgatgcgcaggacaaggtctacacccgagacctgttccgcagagactaa

SEQ ID NO: 72 - DNA, 12297 bp, unidentified
  source 1..12297: mol_type = unassigned DNA
atgaaatatcaaattgcgattatcggtggagggcctgccggctatactgctgccgaagttgccggaaaagccggcctcagtgttgtgttgtttgaaaagaggagtctggggggcgtgtgcctgaatgaaggttgcattcccacaaagacattgctctattccgccaaagtgtatgattatgccaagcacgcttccaaatatgcggtcactgtgcccgaagcttcttttgacttgggaaagattgttgcccggaaatcaaaggtagtgcgtaagctggtgttgggcatcaaggcgaaactgactgcccatcaggtgaatatagtgacgggagaggctactgtcatagacaagaatatggtgaaatgcggcgaggagatttacgaatgcgagaacctgttgctttgtaccggtagcgatacatttattcctcccattccgggagtggatggtgtggattattggacacaccgtgatgcattggacaataaggaagtgcctgcttcactggccattgtcggaggtggcgtaatcggaatggaatttgcttctttcttcaatagtttgggcgtacaggttactgtggtcgagatgatggatgaaatcctcggtggaatggataaggagctttcggcaatgctgcgtgccgagtatgccaagaaaggaattaagttcctgctgagtaccaaggtggtaggagtggcaaaagaggagaacggagtaacggtctcttacgaaaatgcagaaggggcgggaagtgtttcagccgaaaagttactgatgagtgtaggccgtcgccccgtaatgaaaggtttcggattggagaatctgaatttggaattgacggaacgtaagtgcgtcaaggtggacgaacacatgcagtcctcggttcccggtgtctatgtgtgcggagacttgaacggtgtctcattgttggcacatacggccgtgcgcgaagcggaagtggctgttcatcatattcttggaaaagaagatgcgatgagttaccgtgccattccgggcgtagtctataccaatcctgagatagcgggtgcaggcatgagtgaagaagctctgcaggctgccggcattacttatcataccataaaactaccgatggcatattccggtcgctttgtggcggaaaatgaaggagtaaacggggtttgcaaagtattgactgccgacgacggaacggtattgggtgcccacatgctgggtaatcctgcttccgagttgattgtgttggcgggcatagctatcgaagaccgcaagaaagtggatgattggaaacgatatgtgttccctcaccccacagtaggagaaatcttcagagaactgtaaacattctcaaagagtatcctgcctagcattccaccacccggtacacattccccttagcggtatgcacccgctcgcccggctgggtggtggaaaggctctgcacctcctgcgaatggtcctcctccgtggtaaagcggaagcagaggcattttagacggacccagcttgtcgaattcatccaagtaggccgtaggcggagagtccggcttcggcggatgccggtgagctgaggtcgtaacttctacaccaagcagaatgtcatcacctaatgtgttggcaaatgaagagtaagtgtcccaaacagacttgagaactttgttcttcgcttttttacattcagcacggtcaaaccaaagatagcattcactgccttattcatccattttcgaactctcttcatggttatagctatttaacagatttccccataatttccatcctatcgctttttatggtttcagtaccctaaactcgcactgagacgtgcctatgttcccgattccatccgttccttctaccacgcccacaaagcttgtattgatgtccgaacagaagaattctacttcggctactcctttctcatcggtgacaatgtccggtttccacagcaagacgttccgcgcgtccggtagcgggctttgcatatccagctcatcgggttggtagaactcacgcgtgccgtaatagcctttcacacgccacaggttgttcatgcggagaagttcttcttcggtaaattcctcacctttccaaataatctcgtctagtttcgttagaatccatttgttattctctccttttggctcatattttatgagataatatttccgaccgataacgggggagcttatttttccaggaggaggtaccggacatcctataggatgatgtgaataacctttataatcattaaggtactctatattacctccccccgatatacacccagagcatacccatgctgctccaaccttcatttgtgccaagctatctaaccttcccatcatcttatcccgaaatactcttcctttcttacctgtaactgttatctcggataaaaggatactattatcctgactaataacaggataatcaagctgcaattccgaaaacacttgcgaaggattcatatatgggaaataagactgacaagacttccgcaagctatccaccttactgaaagattcttctatcacaatggaaggcttgtattcatctttatccagcatcggcttcaaataaacatatccgcctcgcaatccgagcatcaagtccgtcggcaccacgaactttcccaaagagtctataaacacaaaacggttttcagtgttcggaccggaaacttgtagcaactgctctccatttcccaactctttccgcttctttttcttaccgataatctgccttcctctgatttcatccgaaaggaaacagtccgccaacattgccgtatcagctttttcccatacatacctgcgccacccttgggtaagcagcaacaggtcgagagcagcctggcggtctttgttgttgctatcaaagtaatacgccggattatggatattaccctttatctcggtggaaaggtagcaatacgaaagcatattctcaggattcagttcattctgataagcacggtcgaaaatgctcagccccagatgcgcctgtacaggattgcccttctcgtccgttacctttacgttcagtttgcccttgccacgggtaaagtagcgcgcactgtccgtgttcaactcgatgtgcaatttccgttcgggatggacatacaccaagcgttccgccatgggctgaccatcggcattgtataaagtaaactcggcaatgccctgcatcggaaactctttcaatgggattcggattttcaatctctcgctcaaggtgcctgttgccgtgcagcaaagcccgccgcgcattttgccttccagcttgattgcctgcgccgctgcccctttcggttgggaaagaagaaactccagatactcatccgtctgtttacgcaaatggacggacaaccccgaagataccacttccgcaaatgggaactcccttccatcggacaacaccgccttatatgaagctccttttatcggaaggataaacacaaaacccataccgtcgtgcacggactctaatttagcaatgtccttaccattctccagcaaccggcctgccacttttgccggcattcctttggcatccagtgctttaaaagccaccttggtgggaattccgtcaaccagataaccaccttcggggaagaaggaaaaccgggcaacaggttggtctttttcctgtggggtgttcgttcctttgtaggctatgctctttataacacgtatcttcttgggatagaccggacgcaacgtgtcattcagaaaaaaaaagcgggtataggcatggatgcggtaatcgccctctttcaagtccttgttcacataaatatgccctccagcaatgccggaaaggatggggtatttctcctgccacacgatgctgtccttggcattgagcatttccacaaacagcgtcttgcttcggtcggaaagggcaaggctctgagcgtccagagtgtaagtcttgaaccaaaggtcttcaccggtctcgtaaatccccttgtctgtctggaggtatagaagttccctgcactccgaaggcgtttcttcctgcgaatggcaagtaaacgtatgaccaacaaacaaatacaggagaaaaaataataataaccttatattataaagccgcatttccattatttttttatgataaagattactctttatgctgttgttttaatagtttctccaaattataaagagcagaagtcagtcttcctccctcaaaagtccgggcagccaaaggacggcaagcaatggcaaacaaaaagaagacaagggacagtaaagacatgaaaaatcgtttactccctgaaatattatttatatttgttgttcccttcataatctttaacaaagatatgccttttaaagaccgggtgtttttatcttaccatcaattatgtattgttaaactattttatactactacggtgactggcaagtccgcaaagcctggttacccattgattttacgttgtttatcaggcatttatccggcatgaacaagcctaacgaaccgctgataaagcttccactattgctaatacgattccactacccggtacacattccccttggcagtatgcacccgctcgcccagccggggcaggatgcggctcaggctgtagacggtcatgcccctcatgaccgaaggatgggtggctttcatgcgttcgaataattgggtggcggaaagggtcagcacttcctgcggatggtcctcttgggtggcaaagcggaagcaaaggcggaacacttcttcttcgggtatgtgtttgtagaacagggcgttgtgttgctgtatggcctgttcctcttccttgttgaaccagcttcgttcaccggacaggagttccgctttgagctgggcgtacagctgctcatgctctacaggagtgacgcagtcaatggcgtgctccaagctgacacagagaaagcggcgtgagccggtgcggtccaccagcaggtcttcccggttgctggtgccgatgaacgaggcgatgcggggcagtgccgacgcactgcgtttgtaggccttgcggatgttcagtgcggaggcttgcatcaggttcttcagcaggggcattttggatgcgctgagtttgtcgaattcatccagattgatcagaccgcaggcggcagaacgtacttttccctaatccttggcggctgctcaccagcaggggggccacgctgttggtactgttggtatccggccggaactgcatccattgggcggagagtcccagcatccagcggtggaaaccgttcacccataccgggtcgtcggacacccggcgggcaagtgcggatacgcggtccttgccgtcccattcgggaagttgttcaaagtaggctgtaaagggatggtatttgctgatgtggcgcgagcgcacaaagcgttggatatccctgtctcagcagtctatgcctgtttcgatggcttctatgctgagtgtgttcatccatcgttcgtccactttggtgtagcgcaggtgggtgccgggcatggtccgacaaagcggcatcagtccgttgagggcggatacgaggtcacggcgtggtgttccgtcggagggaacaggagctgacaggaatttgcttccgaagaagactgttttgagagtggcgaatacattcatgagcactttttttagatttgacgaactacaaatatacaacataaaaaagcctttgtcaagagagaagacaaactaatccaatcccggcacagaatatgacggagcctgacacaatgacatatatacgtgcaggctcatgcgtacgtacgtgtaggccgatgcgtacgtacgtgtgggcttatgccaccgtatgtgtagaccgatgcctacgggggtcaaaatgtggataatgctgtcgtttcgtgcgtaggggcgaggtttgctcgcccgaaaacggtttgttttgtgtcttcgggcaggcgaaccctgcccctacaactgacgatgggatagcccggtttcgttttgacacacttcccatgctgcaaaaaagactttgatgttttccaaaaagaccttgatgtttaaaaaaagcctcaaagtctttttaaaaaaggtcgttgtgttttcagaaaagctcggcatctttttaataaagctcggtatgtttttcatgtaggggcagattgcatcatcccctcattaagccggtcatccttcttttccgttcatccttacattttaattaaaatactcacataatcagtcgattaagaatgacagcacatcccctcatcctcccttcagccgcgcttcccgagtcccttcacaatcccttgtgtactttctacacctcttttcagcctgcccctacaagcaaaatgcaagaaacgtgacaatatgattgaaatgtatacttatttctcataaagactatggtttgtccgcttttaacaaagaaaaaacactgataaacaacaaaataacctctttcaagagcacaaattcggggtcacaaaagcataaaggtggtccctggacctagtgagcctaaataagacagtcaacacactgttattcaacactttgactacatcaccactttgcaaacccagcaccattttccaactagacagaaacaagtatccaaagcattgcttatcaacacattaagatcgtttttcagcactataacgcccctccaaaaaggccttggagtttaaaaaaaagactaaggtctttgctaaaaactccttaatcttttgataaaacactttagtcttttagagcctgttcaagtttcattcgaaagctctttaattttggtgctactttataaatcatttattatcaatgcatttaaaaaaatcatacaaccagacgcagtattttacattctgctgcattatataaaatacaagaaaaccattattaaccttttaatcaccacctttatgaagaagattttaaattatttattcgtgttatgcctgctcgttggagcatacggttgcagcgatgatgacagagatgtaaaacggatttatccggaggaaaaacaagaaccttttgaaagagagaatttgaaaggatatttaaggtatgataattcccttaaaagatggataatctatcctgttgacgaaccggaattccgaacaggagatgaagatagtatatcttttttaattgaaaacatgaaggatgaatacaaggcttatgaaggtgatgttaccttcagtggcatccttttatatttatattatgaagcgagattgcctataacaggttgccatggtggtacttacatttactctctccatctaaaagacattcagaaaagagaaccggcagaaagtccctactaattgatacgaaacaattaattttaaatgcataatactatgaacaaactttttacttatctgcttgcattatgcacggctacttgtctatatggttgcagtgaagaactagaggaaatgacttctacagaagaatctccttcaaacattgtcagccgttcaatccctgaaagtttttcttgtggaacgatagaaacagacccaccggcatggtatttcaatactcctcgcgtttttaataacaatagcatttataccttaaatatttatatccatgtcattagaagttctagcggagtgggattttataatggttattatagacacaaattctctgcagagcaaatagccaaaatgcgcagcatcattagccaaagagaagaagtaagccccactattcatcaaaaacagattatcggtcccaaacatttctccaacagcggtacctactcgctgagtgtattaaatgccgatgaaagcgtgagatgggaagtaacggcctacagtgaaaacggttctaccaaaaccacctataccacttctacattgactttgtcttccacccagccaacctattacagtatcgtggcttccatcacatcgcctgccggaaccaagtctgtcacaacccatgccacttgcaatgaaccatctccctacatcggaagcttgtattgggaaaccaaccaagggcaatacagcattaccgatgccacaaactatggcgaaccctctatgtatccggaaacatcaacctgagcctggaatatagagacaaggcaggaaacacatcggatgctcttccgggagctgactttatgtgtaccacagcaagtaatcgccttgtgcgtggcaaaacattttcgttgacacccgccgactgcgaaagggatttgtatattcgggccaaagatgcctgtggcacggcagaatcgtttttcgtcattccttgccaagtgacgaactattattatgatgtcaatgtagctttgggtgaagttgccattggtgtagtgaaaaccgacaatgcagaagtaaacgccattttgactgcccaaaaagcaaaacaagctgttgtctttaatgcagcaacagatgtcaaaatcaaatcggtagtagtttacacagaaaaccggcaagtgctttattccaaagaatacgccatgggagtttctgaaataaagatagatgcagtctcatgggcttcgggagtttatcacttaagcatttcgaacggaacggaagtgcggcatcagaaaataatgattccataaaaacataccaacacaataaagaaggtgtctcgaaactctcataagtcaaaaggggttgtgtcaaataagttattggggtcattgggcggacacatgggtccgcccctaccgtaaagtattatcgaaaaagttcaaaagccggaagaagtattacagatgaaaggaggctgaaacgacaatacggaatgtccatttactaccggaagccccattaacagggcgtttcaacgactaatgaaaggaggaagggagaaacagattttcgctttctttcttgcaggttccatgcttttgttatatattgccaccctgttttaaacaggcttagaatgaattttattcttggaaatacatctatcaatgaaacgagccgtattatttttattactgaacttgactatttgtgctatttatgcccagagccaacctgtttcccaaaggctggatgctttgctgaacgacgaaatcctgaaaacttccgaagttggtatcacggtcttcgacctgaccacgggtgaatctctttatcggtatcaggatgagaaactgtatcgccctgcttccattgagaaggtgattacttctgtcacagcgcttgcccgtcttggggcagattatacaatggatacccatcttcgctataccgggaaaatagagaatgatacactgaaagggaatctttatctgatagggggctttgacccggagctgatggatgaagacctggatagcctcgtggcggcggtggaagcgcagggcatccgctatgtgacggataccattgctgccgatgtatcgatgacagattccgtatattggggaccggggtggtcgtgggatgatactccttattcattccagccttatctttctcctctgatgctgaatcgcggttgtgtggatgtgtctgtttcgcctgctcagaaagattttttgccggcagtactttgtactcctgtttcagattattaccgcgtttgtaatcgggcagtgagccgtaacccgcaggcagggaaattggaaatcacccgcaactggctttccaatggcaatgtaataacggtttcgggcaatgtgtcccgaccctatacaggacaggtgaatatttatacttccaaagactttttcttccatacgtttatccaacggttgaaagagaagggaattacctccggtgtgcatacttatgcagattgccccgtcatccatgacagcattgcaaccttttgcaccatcagaagacccatcagacaggtattggaacgtgccttgaagaagagtgataacctgtgtgccgaatccatgttttatcaccttgccgcgcaacatgccccacaccatcgggtgactgccgatgacgggacggatgccatcgccgattttatgaagactgtgctcggttttaatcccgataactataaaattgtagacggcagcggcgtttccttatataattatatctctccgcgattgttgctggagtatttgaagtatgcctattatcaccgggatatctttttgccgctgtatgatgcccttcccattgccggagtggacggcacgttgcaatatcgcatgaagcaaaccaaggcgcgggggaacgtccgtgccaagaccggttcggtgacaggagtaagttcgttggcaggatatgtgaaaggggccgacgggcatcagctggcttttgtcatcattaatcagaacgtgctgaaattaagccgtgcgcgtgttttccaagataaagtttgcgacatcctttcccgatagcggcgatgagttgcccggagtgtgacgtatttgggaataagtgaaagtgattttgctgtaaactggacaaaatttacaccttttctgaacgattactgtatcttgaagtggtggatgttttgtaattttgcccgaacagaaaatcaaatgaataccatcaaacacatataaatagcgtatgaaaacaaattatgaaattcgctatgccgctcatcccgaagatgccaagcattatgatactgcaaggatacgccgcgactttctgatagaaaaggttttttcggacaatgaggttaatatagtgtattctatgtacgaccgtatggtggtagggggagcccggcccgtaggtgaagtactgaagctcgaagccatcgagcctttgaaagctccttattttttgacccgtcgcgaaatgggtatattcaatgtgggaggtcccggtatggtaagagccggtgatgccgtgtttgaattggattataaggaagctctttatttgggagcgggagaccgtgaagtgacttttgaaagcaaagatgcctgcctgcccgccaagttttatttcaattccactaccgcacatcgtaattatcccgataaaaagattaccaaggcagatgccatcgttgccgaaacgggctcgttggaaggctctaaccatcgttgcattaacaagatgttggtaagtcaggtgttgcctacttgtcagttgcagatgggaatgacggagctgaagccgggaagcgtgtggaataccatgcctgcacatgtgcacagccgccgcatggaagcctatttttattttgaggttcccgaggaacatgctgtctgccattttatgggagaagtggacgagacacggcatgtgtggatgaaaggagagcaggctgtcctgtctcccgaatggtctgttcacagtgccgctgctacgcataattatacctttatctggggaatgggtggtgaaaatcttgactatggagaccaagatttctgtctgataacagacttgaaataataaaaaagcgatgtaaaaaagagttttattaaatgttttgtgtacgataacggaagatttttattacctttgggcatcgtaatggataagaaaatacaagaaataaattattatactaataacattaaattaattactatggtgaatttttcattggaaggtaaggtagctcttgtaacaggcgcttcttacggaattggttttgctattgcatcggcttttgctgcagcaggtgccactattgttttcaacgatatcaagcaggaattggtagacaaaggcttggctgcttatcaggaaaaaggtatcaaggctttcggttatgtttgtgacgttaccagcgaagaacaagtgaacgctttggttgcacaggtagaaaaagaggtaggtgttatcgatatccttgtaaacaatgcaggtattatcaaacgtattccgatgtgcgacatgagtgcggcagaattccgtcaggttatcgacgttgacttgaatgctccgtttatcgtgtctaaagccgttatccccggcatgattaagaaaggtcatggaaagattatcaatatctgttctatgatgagtgagctgggacgtgaaactgtatctgcttatgcagctgccaagggtggtttgaagatgctgacccgtaatattgcttctgaatatggtgaatacaatattcagtgtaacggtatcggtccgggttatatcgctactcctcagacagctccgttgcgtgaacttcaggctgatggttcacgccatccgtttgaccagttcatcattgccaagactccggctgcacgttggggaactcctgaagatttgcagggtcctgctgtgttcctggcatcagatgcttctgatttcgtcaacggtcatgtgctttacgttgacggcggtattttggcttatatcggtaaacaacccaaataa

SEQ ID NO: 73 - DNA, 5715 bp, unidentified
  source 1..5715: mol_type = unassigned DNA
atggcaatgcatacatggtttgaatgtaagatccgttacgagaaaacaatggaaaatggaatgaacaagaaggtgaccgaaccgtacctggtagatgccctcagttttacggaagcggaagcacgcatcatcgaagagatgacgccgttcatttcgggagagttcaccgtatcggacatcaaacgtgccaactatagcgaattgttccccagcgaagaggaagctgccgaccgctggtttaaatgtaaactggttttcatcacactggacgagaaaagcggtgcggaaaagaaaacctctacccaggtattggtgcaggctgccgacctgcgtgatgcagtgaagaaactggatgagggcatgaaaggcacaatggccgactatcagatagcatctgtagcggaaaccgccattatggatgtatatccgtacagtgcagagcccgacgacaaaccggaagtttaatttaagttatgagttataagttatgagttattattgcgacccataacttataactcataactcataactcaaaaaaaagatgattgcagagaatttaaaacaagtactgagcgaactgcctggaaaggtacggctggtggctgtttccaaatttcaccccaacgaggcgatagaagaagcatatcgtgccggccagcgtgtgttcggagaaagtaaggtgcaggaaatgactgccaaatacgaaagtctgcccaaagacatagaatggcatttcatcgggcatctgcaaacaaacaaaataaaatatatcgttccttacgtagcgctgattcatggcatagactcctacaagctgttggccgaagtggacaagcaggctgccaaagccggaaaaaccgtcaactgcctgctacagctgcacattgcccgggaagagaccaagtttggattcagctttgacgaatgccgggaaatgctggcagccggtgaatggagagagctcaagcatatccggatatgcggattgatgggcatggccacgaatacggacaatgacgaacaaatcaaaactgagttttgttctttaagtagcttcttcaatgaagtgaaagccaagtggtttgccgatgcagagtcattccgggaactgtccatgggaatgtctcacgattaccacgaggccattgcagccgggagcaccttgatacgtgtaggaagcaagatttttggagaaagaaactattaaccataaaaaatcattatcatggcaacattagaaactacttttgcagggctgaaactcaaaaaccccattattgtcagtagctccggactgacggacagcgccgccaagaaccagaaactatctgaggccggcgcaggtgccattgtgctaaaatcactctttgaagagcaaatcatgatggaggctgactggatgggagacccgaacatgtaccccgaaggcagtgactaccttgtaggatatatccgcgaacataagctgggtgaatatctgaacctgattaaggaaagcaaaaaggtttgcaatatccccatcatagccagcatcaactgctatcagaatgccgactgggtggaatttgccaccaaaatagaagaagctggtgcagacgcactggaaatcaatatccttgcactgcagacggatgtacagtatacgtatggaaccttcgagcagcgccacatcgacatcctaagccacatcaagaagacggtcaagatacccgtcatcatgaagctgggtgacaacctgaccaatccgatagctctgatagaccagctgtatgccaacggtgccgccgcagtagtgctgttcaaccgcttctaccagccggacatcaacattgagaaaatgatacaagtatccggtaacgtattcagcaatgaatccgatttgtctaaagccctgcgctggataggcatcgcttcggcagccgtaaacaagctggactatgccgcttccggtggtattcactcgcccgaaggcgttgtcaaggcaatattggcaggtgcttcggccgtagagatatgcagtgtgctttatcagaattcagctaccatcattgaggagtatatccgtttcctcaacttgtggatggaccgcaaaggtatggaaaccatcagccagttcaaaggtattctgaacgtaaacgacccgaagggggtcaataccttcgaacgtacacagttcctgaaatacttctcttcacatgaatgagacaaaagactgacaagaagacaataaaattgaaagggtgataacactacaatgacgttatcaccctttcattttatactataccgctatctttttatttcttcttatccagcgcctcaaagcaggaattcttgcttacgaactccggaacaatatccttcatggcagcaacaattttcatctggtcataggtgtaacttacatcaatcagtttctggatacgctccttcacctcgtcatagtcatactcacgcaccgtagcaatcataatcttctcatgataggtgggctttgtaagctccttcacattcaagagttcttcgtagagcttctcgccatgacggagaccggtaaattcaatcttcacatccgtacgtccagaaaggctgatcatacgcttggcaaggtccacaatcttcaccggcttacccatgtcgaagatgtagatttcaccgccgttgcccatactgccggcctcaagaacaaggcggcaagcttcgggaatggtcatgaagtaacggattatctcaggatgggtcaccgtcaccggaccgccacgctgaatctggtcgcggaaacggggaatgacagaaccgttggaacccagcacattgccgaaacgcgtagtgatgaactgagtggcatggcctccctccttctgcaacttcttcgcaagagactgcacataaatctcgcaaatacgcttggaacagcccatcacgtttgtagggttaacagccttgtccgtagaaatcatcacaaacttctcggcaccgtatttcacggcaagatcggcaacggtgcgcgtgccgaatacgttcacctggatggactcggaaacgttgtcctccatcatcggcacatgcttgtaggcggccgcatggaaaatatactggggcttgaactccctgaagatatcctccatgcgcgtggcattggagatgtcggctatgatggtctcggcatcgatgtcgcgccaacggtcctgaagttccagacggatgtcgtgcagaggggtctcggcctggtccactaaaataagtttatagggattgaacgaagccacctggcgcatgatttcactgccgatggagccggcggcgcccgtaatcatcacacgcttgccctccagatgagaggcaaccttatggatatctatctcgataggattgcgctgaagcaggtcctcaatctgaatttccttcaactgtgtgcggctcagcgcctgaccgttccactcgctcaaaggaggcgcagtcatcagtttgatgttgtgcaccagcaggcggtcagccatgtcggacttcttcagttcctccatcttggcaggagaaatgatgatggtctgcacatcgcggtcgttcagcacatcaatcagcgtatcatcgttggggaacaccctgacacccatcatcaccttgttgataagctcaggttcgtccgcaatgaatccgcgcagacggtagtggttgcgcagattgacacgcaatgccttggcaatgttgaccccggcttccttggcaccgtaaatgaacacattggcactatgggtgccgtcgaagttcagcgcctcgaagaaagtcttgacaatcacacgggagcatgccatcatggcaaagctgatgatataagacatgaacagcacgctgaccggagccaggttgaactccaaatagctttccgtcaggacgctcgttatcatcagcagtgcatacgacaccgtcaatgacacaaaaatgcgcatgatatccacaaaggaagagaagcgcaacacattggaatacgtacggaaaacacggaagaaaatcaagttgacaacaaccgtccataaaatggtcttgtcaatggtagaggattccaaaaaaatgcttctgaaatcatatcggagagcataggccaacagactggatatgacgatgataaatacgtcaattaatagaatagtccatatcggaagcactttcgcggaaagataccgatgaaaaaaatttcgcttcatttcgcttgacagttttgttttaggcgaggcaaagatacactattttagtcaaaacggacaagaaatcgataaaaaaatgttataataattatttatcgtctataaagaaactatcccgcctccctcgttttaacagttggaaagcgggatggaaataattttaccccagaaaatgcggtatccgctacatcagattacttgccaactcgctcaactggctacgttctcctttcaccagattgacatgggcaaacaagttctggtccctcatacggtctatcatataaacaagcccattggactgactgtccagatagggttggtctatctgctgaatatcaccggtaaacaccatttttgtgccttcaccggcacgggtgatgatggtcttaatctcatgcggagtcaagttttgggcttcatcaataatacagtaggtctcgctcaaactgcgcccgcggataaaggctaatgcctcgatgaccaattgttcacttttttgcatatcctccaagcgtttcacttcagaggaattggcagcgaactgatgcttgattacattcaaattatcgaacaaaggctgcatgtaaggagccactttctcattggcatcaccgggaaggaatccaaggtctttattggatagggccacgatgggacgtgccaggagaatctgcttgtagtcggtaagttttcccaatgcggcggccaatgccagcagggtcttgccggttcccgccttgccggtcagggcaaccaacttgatgttcgggtcgttcagcacctcaaaagcaaagctctgctcggcattgcgcggctcaatgccataattctttgtcttgtggacccggcaaatcgaatgggcaaagggattataacgcgcaagcacactgctgcggtcactcttcagcacaaaacattcgttgggacgaatgatgtccttaaaatcgaactcgttgatgtccagtccttctttggaagaataaatgcggtctatcagcgcagggtcaataccctcgaacacttcattcgacttttcgaatatatccacattgattaccttatcattgatgtagtcttcgcacagcagaccgatggaacgcgccttcatgcgcagattcacgtctttcgtgacaaggatggttttcattttaggctttttggtggaaagccagtccactaccgacagaatctgatggtcggggatgcgttcgggaaaggaatcacgtactcggggagagtccaccatgcctgccaccacaaacagacggcctaagccctctcccaatggcgcccctttggtgaacagattatcatcggtaatcaaatcaagctcacggacgaactcacgcgcattgaaattaatctgctcattacctttcttgaatttgtccagttcttcaaggactacgatgggaagataaatgtcattctcttgaaaattcttcaaacagttataatcgtgaagaatcacattcgtatcaatcacaaaatttttcttagctcccat

SEQ ID NO: 74 - DNA, 14313 bp, unidentified
  source 1..14313: mol_type = unassigned DNA
atcattcaggggtatgtaaacgtggtcaataagatggtgtggagaaaatactgatatataggtggtggtcatgaaaaaaaagaaagttttaatggtgcacaatttctatcaaatcggtggtggagaacatacagtttttaaaaatgaagtcgatttgttgcggcagcatggtcatgaagtgattgagtatactcgcaataataatgagctaaaacagaacaaattaaagctggtgttgcttccattcacaacaatttggtcttggaagacttataacgatatacgcaggataataagagataatcatattgatatcgtacactgtcacaatacgtttccgttgatttccccatcagtctattacgcggcgcgaagcatgaaagttccggtgatacagacagttcataattttagattattgtgtcccaatggatcttttttttgcgatgggaaaatatgtgaaaaatgcaatgaaacggggagctttcgcagtgcgttacagaataattgctatcggaattctaaaatccagacgcttgttcttgtagcaatgctgaaatttcataggtggatcggaacttaccaaaagatatcatatatatttttgacgaagtttaatcgagaaaaattttcaaaattgattgatgtgaattcagaacaggtctttataaaacctaatttcgtgaaagaaagtaattgctttgttaatacagtagcaaaaaaaacttttgtttatgctggaagattggaggtaaataaaggaatcctatctttgattgaaatgtggaaaacgcttccagaggattttgctcttcatatctttggtggtggaacaatggaagaacatataaaaaaagaaataaaaagcaataaaaatatttcgttttttggattcaaaccacaaaaagaggtgtttgaggattacaggaatgcggttgctacaatcattccgagcgaatggtacgaaacatttggcatgggaataccagaatgcttttcgatgaaactcccagtgatttgtacagatattggcaatcctggagagatggtaaaagagtccaaaggaggtctggtttatccaataggagacctttcaaaatttcaagcggttgtcaaggaaatgattgagatgcgacaagtatattcggagaatgcatatcaatattatctaaacaatctaacggatgaaaaaaattataaagagctagttgaaatctatgataaatcaagaaatattaaataacattccgcagcgcgtaaaaatcattgacgtgccaatttcggcagtaaacatgaatagttgcattgatttcttgttttcaaattggaatgcagtgcatggaaattatatatgtgtttcaaatgttcataccacagttatggcacatgataactcggagtacttcaagattcaatcggcatcattgctgtctgtcccggatggaaagcctttatccgttatcggaagaaagcaatacccagaaatggatagagttactggtccggatctaatgaggcgaatgtttgaagaatcgaaaaacaagagaattaggcactatttttatggaactacgcagaaagatttggatgcgttgctttgtaaagtaaaagaggtgtatccgtgggtagatgtcgttggatatgagccatctgtgttccgaccgatgagtaaatccgaagaaaacgttcttgttgaaagaatcaacaaaactaatccggatattgtatgggtcgccctaggcgcaccacgccaagaagaattttgctatagaatgcagggaaaaatcaacggtttgatgattggcgttggtggcgcatttaatgttgtttctggtgtcatcgatgaggcccctcaatggatacaggatattagcatggaatggttttatcgactcatgaaagaacccaaaaggcttttcaaacgatacgttacaacaaacagcagatttatttggctgaatctgctacacagataaaggaagaatcatgtacgaattagtgatatatgataccagtaattatgaggattttcccattggaggtcagctgacaagtgttcggaattttttaacatatattgccgaatatcaaaaggattattgttcaaaaattttgttggttggtttgacaacttcggtcacaaatttgggaaagaaaaagatagttgatattggtggcaaacagtttgattttcttccagttgtatacagaaacacaaatttaaaggaggtcaagaattctcttcggctggaatttttgaagggactatttaagtataaagacaaaattcctcacgaaaaagaaatcttgcactatatccatacgccagaggcattattcaagtcaagttatgtcatccatttgccagaacagcgattttttctcacggaagttttttcaatatggttcgaggatttcgtttttttcaaaacaataaaattgtaggaagttgctttgaagtcttcattaagtggatgttgagaaacgcaaacttgatatttgttttggatgacgattccctgaatcaatatataaattataacaaaaatgtcgtcaaggtcaacaattcaattatattgccagaagaggactattctgataagcaactgcacaatcccattcgcctgttatttgttggtcgattatcgaaggttaaacgaattgacgaaatcatcaaagctgtcgaaaactgcaaagaagatgtagttttaacaattgtaggcgatggggaagaacgaactcatttggaatccttagtagaaacgaaccgagtaaaatttactggtgcgttaaaaccagatcaggtcaaaaatgaaatgattcgtggagatattcttgtgatgaactccgttttagagggaaagcccatgactatcattgaggcaatgagttatggcatgccgatcattacaacaaatgttggtggaatttctgagctggttgaatttggcggaaatgctattgaaacagatggaacatttctccaaattatatgtgccattaaaaacataacgagtcaatatacagaaaaagttgcgttgagtctgtgtagagcaagagattatgattttaaactagtgaatgcaaaagtattttctgaacttcggagaatcaaacgatgaaattatcaataattgttccgtgctacaatgttgagcacacagtgaaaaagtgtatagattctttgttgaatagcacttatgaggataaagaaatcattttagttgatgatggctcaagtgacgacactagttccattataatgcaatacgcacatgattataggaacattttcgcttactcaaaagtaaatgagggtttgggaaaaaccagaaattatggcatcaaacactccacaggagaactgattacatttatcgattctgatgattatattcaacctgaagcttatagtaatatgattgatcggctgaataaaacaaatgcggatgttgtctattgtggattccgatatgtatacgaaaatagagaaaaaacggatgtttttgattgcaaagaactatatacaaacatagcggaattaatggagtatatcctaaatgagcatcgatgctttgctggattatccgcctgtaccggaatttataagagatcgataatagaaaaaatatcagatgggccgttcttgtcagaaagagagtttttgtccgaagataaactttttaatataatctatcttcaaaatgcaaacgctgcagcaataataaatgcatcatattattattatgttcagcatagtgtggggtcaataactactacttttaaagagtataaaatacaagcagcgtacaacatgtgtcaaaaaatgcttgaaatcaataaagtgagtgagttgattccttttattttgactgattacttggttaatctatcggcatgttttcatcaaatctgcgcagatgacgctttagatataaagaaaaaattgagcgaaataagtttagttgttaacaacaaagattatcaagggtgtttgaaaaatgtcaatactcaaatgttgagtgccaaatttcggttggtatattggatgattcggttgaagatggaggggggcagctgtttgctatattcagcaaattgccttgtgagaaattggaaaaaatcatgactatcaattccagaaaatgcagagaacttgtaatttttcaagtgtattttattttaattgttcagcttctgattgatgcattaaatgccccacagtatattgtctttttgactgatattataaatgcacttctatgtctatacatgctgcgttttcccaagactctgttttacaaaaatgacacgaagctattccatcagatacttgagatttatattgtatacttgtttatagatgcattactcaatctcgttccacttccaatgtttatatggggttgcagaaagttattgcggggattgttttatttttgcgcatgtataagatttttagaatttgaagattacataaaatttttagacaatatgtttgttcttcaaattgtgaatgttgttttatctctataccagttttttgttttaggcttagtacaggataatttagggggaatattcggtactgcatcaggatgcaatgctctttctaatttgtttttttgcgtgctagatacatattacatttgcttgtatcttagagacaaacgggcattaaaaaaattagtgttcgttttggttagttcattgcttttggctgcactggcagaattaaaagccttctttctggaatttgctgttattgtcatactcgtgttgcttgttacaagattttcttttaaaaaactacttctcatagttggatctatttttggattatccctaagtttgaaagtctttgctaagtattttccggatttttatcgtagaatgactaccttaaaggatttccttcaaattgcaagcgatgttggaacaggatataacatcagtcgctccggtgcatttaaagaaataaacaattatttctttaatcattctatgagatatgagctgctgggttacggccttggtggatgcgaaacgtcaccgtttgagtttttgacaagtgatttttacaaagcgtatggaagtttcaactatgtgtggttgggacatgcaattacatatctcgagaccggcgcattaggcactatattagcactggcattttttgtattaataggttgttattcattgaaattaaggcgtcagtacaaggaatttgagtacgaactttgcttttcatttgtcttttccatgattgttatagtcaatttcttttataataattttataagagctgacatccagtattttgtatattttatacttgcttttccatttgttattgcgaggagaaaaaaagatgtttattaaggaagcagtccgaaaactcatttatcatgagcggcgttcatctaaaagttatatccaacacttacgagataaaggagcatcaataggtaatggatgcgagattttcaatcctgaaacggtaacaattgatggtacaagaccgtggcttataacgattggaaacaatgtgcaaattaccagaggtgtcacgattcttactcacggctatgattggtatgtcttaaaaggcgtttatggtgaggtccttggttcagggggggtaacaataggaaataatgtttttgtcggtatgtatgcgactattttgaaaggtgtgcatattgggaataatgttattattggagcaaattcattggtaaacaaaaatataccggataattgtgttgcggcaggaaacccatgcaaagttattatgagtttagatgagtattataaaaaaagaaaatcagcacaattaattgaagctaaagaacttgcacagctatatatagaacggtacggaaaagaaccggacgaaaaggcatttcatgaattcttttggctattttctgatgcaaacgatgaacttcctgaatgctggagtaatatgatgaaacttggtgagaactacgcatatacaatggagcgctttagagaaaacaaaaagcaatttaaaaatatgagcgattttttgaataaacttcagatgggagataatcaatagtaaaatagattttatagaaattataaagcaggatatcacagttgatttcaaaaaagatgcttgtaaaaaggtagttcgaaagctcatgtgaattcaggtagatggctcaagtatatattagcattcacaactcatttatcataagctgcgtttatctacaagctatatccaatacatccaagataaaggcgaatctatcgaaaagcagatacaattcaaagtcaaaaaccgcaagcaacagtttgtggatcaaaaaagaatattgtattgtagcatagcacaatgcacacagttgatttttggctactataaaaggaaggactaattttatgattcccaaggtgattcattattgttggtttgggggaaatccgttgccagagttggcacagagatgtattgcttcatggaaaaaatactgtccaaactatgaaataaaagaatggaatgaaaataactttgacttgagtgtttgcgactatgtaaaagaagcatatgatgcaaagaaatgggcgtttgtaagtgactatgctcgtctggatatcatataccataatggcggtatatatctagatacggatgtcgaactcttaaaaccactggatgagtttttggaggcttcagctttctttggagcggagtccaccggatttgttgctacagggttaggctttggtgcagaaaagaagaataaagtggttaagcgtatgttggatgaatatacgaatattcatttcaaaaagttggatggcacttttgacacaacaccttgtccacggcggaatacgaaaccgctcgaagaagaaggttataggttctcagagaaagaaatatggaaggcaaaggatgtgattgtttttcctccaaaatatttttgtccaatcgattacagaactggaagaataatgattacagataggacttattccattcatcattattccgcattgtggttgtctgacgaagaacgatattatggtgaattagcacaaaaaatagcatgtgcttttcccaaatttccccataagattggttcgctgatagcgcgggctattgccactgcaaaattcaaagggattaaatctatgctggcagaaacatgtagatggttcaaacgtcatgggaaatgagggattgaaacacagcaatcgtgaaataatgcacataaatgatataaaaacatgatttgaaaatgcttctttcactcgataaaaactaatgaaaattgataaagtgaataggtaaaaagataatggacacgtttgacaaggtatatgttatgatgtttggaatttcgaatatcgtagctggtggaccgatatataatgcaaataaaattcgctttttggagagtaaaggatggaatgttgttgtttttcctgtggattctggaaaagtttacataaaaccgttggagaaatataataataattcatatgattttatacatttttcaccatacatttttggaaagagaaaaacggaaaaatttgtagaaaaaatggcaagtcttattccacaaagcgatgaaataattgtcgaaaccggaactgattatactgcattatggggagaacttctagcaaaaaaactgaaggctcggcatattgttatgttcttggacgaacgaaatgaaaatattaacagctattcttcgcctttttatgaatttaagtacagacgaaatgaattgtattcaatttcacaggaatctctaatacatattttttctccgtattttaaaatagaatttccccaaaaaaatgtttggaacgcttggtgcagcaactctgtggaaaatttcgagtctaatataattacattattgccgaaagcagattatatgattggctctattggaagattggataaatcttttgtttcaaatatcattggtggagtatgtgctttttctgataagcataaagaaaatagtatagggttatgtttgtttggtggggctgacgataaaacgattcttcaaataaagaaagaaatccaggcacaccgtaatgtcacactgtttataagtggttatatttggccaataccagcggctgtattttcccgattcgatgtttttgtttctggggctggagcagctatagtatcagctaatatgggcatccagacagtcaatatggatgtgataacgaatgaaccaacgggacttattgataacccgtctgaatttcattgcgttccgcttaagggggcgaataaagatgtacaggactatttaactgcagttctaattgaaaatgataagattgaaattcataatactgtatccatagaaaaaaatgggaaataatatgtaaagatttttgtgatcagttaaggcatattgaagcaatagatgcgccactgatatattttgataccagtaagatttgggatcacagaaaaattcataaaatacaaagttatcttgcacatttgctcgattataaaacgtttttaactgttcagaaattatatagctggtttaaagtgataggtttgtaatatgaacaatactaatgtgcttaaaagttttttttggcgttttgcagaacgatgtggagcacaacttgtgtcatttgtggtttctattattcttgcacgtattcttgcacctgaagattatggaacgattgcactaataacagtttttactgctttccttcaagtttttgttgatagtggtctggggacagctttgattcaaaagaaagatgccgatgatttggacttttcatctgtattctattttaattttgccgtttgcctaatattgtatgctgggacgtttgttgtggcaccttgcatagcggatttttacaatgatgtaacgctgacgcccgtaattcgtgtcctcagtttgacgattgtgatagcaggtgttaagggaatccagcaagcatatgtttccagaaatatgctgttcaaaagattctttttctcgacgataggaggaacgattttttctgcttttttgggtataggaatggcctatgcaggttttggagtgtgggcgttggtagcacagcaactgtctaacacaatgattgatacactgattctttggattactgttagctggagaccgaagaaagcgttttcttggaaacgtttgacagcactattggcctttggatggaagcttttagtttccgctctacttgaaactggatacaataaccttcgaaatcttataatcggtaagatgtattcgcctgcagatctggcgtactacaaccaaggtgacaagttcccaagtgtgataacaagcaatatcaatgcatccattgatagcgttcttctgccaacgatggccagcgtgcaggatgacgctagtcgagtaaagtccatgactcgtcgagcaatcaaaacaagtacgtatattatggctccgctgatgatggggctagcattctgtgcagagccgattgttcgtctagtcttgacggataagtggttggcatgtgttccgtttttacgcattttctgtattacctatatgttctatccgattcacacagcaaatctgaatgcaataaaggcaatgggacgtagtgacctgtttttaaagctcgaaattgctaagaaaattgttggtatggcgttgttactttctactatgtggtttggtgttatggcaatggcttatagcttactggtcagcagtgtaacaagccaaattatcaactcctggcccaaccgtaagcttttgaattatcgttatctggatcagttgaaggatatactaccgggcattgctttagcaatctttatgggatgctgcgtaaatcttgttgccctgcttcacctgtcaaatactgtgactctgctgattcaaatcccgatgggtgcggcaatttacattggagcatcggctgcattgcatttggaatcttatgaatatctgattgatctgattcgaaccgcatggaaaagattcacaaagagatgaggataaaaaaatgaatgttttacttacatcggtaggcagaagagcctatatggtaaagtactttaaagaagtgcttggaaatagtgggaaagtatatgtgtgcaattcagatgacaagtcgattgcgtttaagtatgcagatgaaaaggttatttcaccgttgatttatgataaaaactatattccatttttgattgattattgcaaaaaaaatgcgattgatatagtgatttcattgtttgatattgatctccttgtgctggcaaggcacaaaaaagaatttgaagaagtcggcaccaaagtgatagtgtccgagccgcagattatagaagtgtgcaatgacaaatggaaaacctataatttcttgagggataacggttttaatgcaccattatcgtttttgaaaatggatgagattatagacaagattgctgttggtgagttaagttatccgattgtcgtcaagcctcggtatgggtgcggttctatatctgtttcaattgctcatgacgaggaggatttacggtatctgacaaaaaaggcaaatgaggatattgcaagctcatatctaaagtatgagtcggcaatgacggaggaaaaagttatttaccaagaatgtctcaagggacaggaatacggtgcggatattattaatgatcttcacggcgaaacgcagaatgtaatcgttcgaaaaaagctcgcaatgagatccggcgaaacggatattgcacaattggttgatgagccgattatccaagacgaactccttcgacttggaaaaattacgaagcacattgctaatatggattgcgatgtattcttagtagatggtgtgccctatgtacttgaaatgaatgcgcgttttggtggtggctatccgttctcccatatggggggatgcaatttgccaaaggcaatagtagattgggctagaggaaaaactgttgataagggtgtgatttcggctaagacgggtattactggatataaggaaatttatataacagaaatctgataaattcgatgaactgagattaaaggataaacctttgattaagcaaaacttatagaaacatatgaaaacataaaaggggaaaacttgtatggatagtaaaattttggtgacgcgttcatctatgccggatttagatgaatatgtggaagaaatccgtccaatctgggatagccattggctgaccaatatgggtataaagcataaggagttacaggcggaactggaaaattacctaggggttcgtcatgtggctctttataccaacggtcatctggctctggagaatgctattgcagccctgaatctgccggagggcggcgaggtgattaccacaccgtttacctttgcttctacaacccatgcgatagttcgcaataggcttgtcccggtgttctgtgatgtgaacgatagagactataccatggatgtgacgaagattgaaagtcttatctcagaccgcacagtggcaatcgttccggtacatgtatatggcaatgtttgtgatgtggaagctattgaaatgatcgcaaataaatacggtctgaaggtgatttacgatgcagcgcatgcctttgctgtgaagtataagggcgtgtctaccgcttgctttggcgatgcgtccatgttcagcttccatgctactaaggtgttcaacaccattgagggcggtgcagtctgctttaaggatgacggctgggttcagctgctgaacgaccagaagaattttggtatccatggtccggagtcggtttgctttgttggtggcaacgctaagatgaacgaatttcaggcggctatgggcatctgcaatctgcggcatctggacgaggaaattgctaagcgcaagaaggtcgtggagcattaccgtgagcgcctttccggcgtggaaggtatcaagcttagcgcaattcaggaaaatgtagaaagtaactatgcatatttcccggtcgtatttgatggatataagtacacccgcaatgaaatctatgcgatgctgcaggagcagggcattacggccagaaaatacttctatccgctgaccaatagctttgagtgttatcggaattatccgactgccggaactgaaaaaacgcctgttgcgcagcatctggcattgcgtgtgctgactctgcctttgtacgcagatttgtctctggacgatgtggatagaatctgtgatgttattctgggaaagaaagactgataagaaagattttttgtgtgaggtttgaaaatgaacgaaattgcggtaaaggccaataaattcgggggggggtaagaagttctaacattgaactttttcgtatcctttcgatgctgatgattgtggcgcatcactatgttgttaattctggtttaataaactgtattgacgcacaaagcaccttgcgctttcaggattatttcctgctattgtttggctggggcggcaaaacaggaatcaattgttttgtattgattacggggtactttatgtgtacctcaaatatcacaaaaaagaagcttgtcaaattgctgggtgaagtatatttctataccgttgggttgtggtgcatattctttttcactggctatgagatgttttctatcaaaggtttcctgaaaatgatattcccattttttacagtggcggacaatttcacaggttgctttctgctgttctatctgttgattccgtttctaaacaagttgattcatgcactgacagagaaggaacatttcttgctgatggcatggtgcataggcgtttatgtcttcctgccttcctttgcaaaagcaaatgttgtgtttaactacattacatggttcagtattctctatgtgattgcatcgtacattcggctgtatcccaaagaatggtttagcaacgtaaccgtcactggtttgatagctggggtatctttgctgctttcaggggtaagcattattgttctggctatgtttagtcgcatggttggaaaaggaataggactctgttactttttcgtggcagattctaataaagtattcgcattgatgactggtgttagtgcgttccttttcttcaagaacttgagaattggatatagtaggggaattaatactatcgcagcagcaacatttggcgttctttgtatccatgctaatagcgatactatgcgtcgctggttatgggtggatgtttgcaataatgttggggcatatcaaggaggcaatgtgataatccatgccgtcgtttcagtggcggcaatttataccgtgtgtacgataattgatatggttcggattcggttgattgaacaaccattaatcagacggaactaaaacctatcggccatgcaccagcatggctgtgctgctcaagtgtgctacctctccgtggtgagcagcaggcaacgagaattccctctcggctaaagcatataatcgttaatttactctttaaacgaggaaaaaactataatgggaaaatattttggaaccgatggcttccgtggtgaagctggtattgatctgaccgctgaccacgcctacaaggttggtcgttttctgggctggtattataacgctctgcgtgagcgcaatggtgataccgaccctgctcgcattgtaatcggcaaggacacccgccgcagttcctatatgttcgagtacagtctggtcgctggcctgaccgcatccggcgcagacgcctacctgttgcacgttactaccacgccgtctgtggcttacatcgcccgcgtggacgacttcgactgtggcatcatgatttctgccagccataatccctactacgataacggcatcaagctgatcgactgctatggcgagaaaatgcccgaggagatcctgttgctggtagaggactacatcgacggaaagctccatgtgttcgacaaggactggccggagctgccctttgctcaccgtgagcacattggctgcactgtggactatgtttctggtcgtaaccgctacatgggctatctgatcagccttggtatctactccttcaagggcgtcaaggttggcctggactgcgctaacggcagttcctggaacatcgctaaatctgtgttcgatgctctgggagctgatacctacgtcatcaatgcacagcccaacggcaccaacatcaacaacaatgcgggctccacccacattgagggtctgcagaagttcgtggtagagaaggggctggacatcggttttgcctatgatggcgatgctgatcgttgcctgtgtgtggatgaaaagggcaatgtcatcactggcgac

SEQ ID NO: 75 - DNA, 5185 bp, unidentified
  source 1..5185: mol_type = unassigned DNA
tcactccgtcagccccaacagataatcggtcgacacctgatagaattgggcaagctggatcagatggagaatctcgggacatttgtcgtgctcccatgcgtagactgcccggcgggtcacacccatggttcgggcaagctcggtctgggtatagccgtgcgtcaggcgcagatgctgcaaacgttctgatataatggtcatagctgctctcctttaaataatgggcgtcctctcacagcccggcggatctctgtctttacgggtgcatttttaaacaacgtcaagggtaatggtgccgctctctttggtgatgatctcatactcggtggtctggatatcccgcaataccagcttttcgatgctcaggatgctggcaagggggatggaaagcatggtgtgtccggccatgaaatgcagctctgatttgttccggtgcgtgtgtagctggatgtcttggaacgcgatttctgccccggaaaaacggcgcacccactggctttgcactcggatgtctcggcaagaaaggtgtcaatagcgattttataagtatccatgaggagcctcctgtttttatatatagcactactctcactcgtgcccttgctctctgtcctgctatgatttagtcagccttcacgaacagctccatgcagtccgcacagatgacccgcacttccttggtgctccggatgatggtaccgcacttggggcatacccaccgccgggtgctgctctttgctttgggaggcttcggggctccggtctgactgctgccgggtgccttgctgcctgctccggtgcctgccatatccgaccatgccagccgctcacccatctggatatcctgccagccttggaagatgataaagtccaacagctcttcggacgggctcgtgatggtccagccgtacttttcgtggtggtcgacagtcaagccgtgtgcctcggcctgctccttaaagcgccggttgtggtagaccccgttgttgctggtgtccttgatgccggtctccatgcagcactcatgcaccatctcatgcagcagggtggaagcggtctcttcgatgggacggtcaagggtagccgacgaaatattgatctcgtacttgttctcgccgcctgcctgccagaccttagagcaggtgatgtgaccatacgcggacggggtctttttcaggctgataatgggctcgggcagcttgtctgcaaagtagtgcttgttgagctcgcggaacatcttttccaactgaccagcagcgcgggtggttttgacagtctgtttcatcttatgaactcctattctctttacaaaaaagaggggagcggctataatagtcttgtaatctgaaccgctccccagcggtctttactggctcttgtaaatgcagtttcctaggcggtatttgcaagggcttttctttttcaggtgatgctcaggcgggtgccggtgaccgttttgctatactggtcgtacagatcgggagctacggccttgatggctttgctgtctagtcgggtgctggagaaatcggacaggcggactttgtggcagcctacttccagatagttggtggagcgctcagccagtgcttcgcgaatctggatcttcagctgttcctgttcagcctgtgcggcctcgatcagttgggcggcttccttgtactgctcgacaagggtcagtaaaacgttaatgctcatgtgcgtacctctcttcaaatcgttgggtgaatggtcggatgtgagaaccggtgttcccgatggcatgagtataccagttaactggacttgcgtctattgacataataaacaacgttaactggtttatctctgcggaaaatgtacaatgataccaattaactggtattgcaaaaatttactataataggtgtatttatggcaacaaaagaagcgcacagcagggcaaatatagaatataatcggcgccaggacaacatcatgattcgaccctccaaggagatgggggcaataatccgccagtctgctgcagccgaaaacatgagtgtgcaggggtatgttttgcagaccctctacgcaagaaccggcgcaacagggggcggggtgattaaaaacccggagacgggctccctttccttagaacagcggagttgtcttatctccccagaccgggaaaaaatcttgcgggacattctgcaggatatcgtgctgaacacagctccgggcgaacgaactacgctttcagagatgctggtgcagattataaatgagagcgtagagcaaaatgcggacagcgtttatcagacgatgacggattcattgctgtaaaatcggcctctgtctttcacagaaatgtgatcggcaggggcctttttagcgcaaaaatagcctgacccagagcaggtggtagctgcagtgacgggatgctgattgtacctatatataaataggggcagcaggggagaggataaaaattgtgtagtactgtgcgatatacctcgtcagaactcctgactgatgtgacggcatgaactggcttttccgcgcgaggggcgcgttctatttaacggctgtcattacatcggagcggctatcacacctgactgcactctccagcgccttggacaactatatgaccacacattttgtccatcgataatttcatctggagctttcatgcgaaactgggcaatgtgcaaaaaagttctggctgaatcgcatttttttctaaaacatggatggatacatttcctcggatttctattgattcccagatataaccatgatagaataataaaagaattcagacggccacgtagaagaactggtatcttccgttttgagatggaaggatacgccttgattgcggtaagtaggtgaatcctgtgggcttatgtctgtttgcgaataatcatgtgatagatcataaggaaacccgaatgatagaccaaaataaaaagcccactgctgtttcccttgctggcgtgatgcgcaaaggtgaaaatgaagtgggcttgttgaggttctacaaaaatgtgaaatattgcatactggaagcaatacacatgcggcgcttgagctgcagcatgacgttctggctttcattacggccacattgcagttgaaatgaccttgggcgaagctgtcgtccgagggcttttgcttacccggagatcaggaataacggtctgccggttttaggaaaagaggaacggttatctaaaaggaaggtgcttgcgggaacggtgtgagttaaagggattactttatagcagtttgtgtttttaaggcgcaagcagcatccgcaaactgcatatcgcaaatatgccgtgttgatagggcactatttctgaaaattgcgataaaacgaatgacgataagaagtgcatagacaaggatttatgtgaggagaaaaaatggctacgaatactgttggaatcgataaggaagttgaagttaaccgcaaggaaaatctgcgcgaccatcgcctgtactggattgggcgtcggacgcaggacgtgatcctgtcatcgctggcactggtggtactgtcgccggtcatgctggctacggctatcgcaattgtggtggacgacccgtctgcgggtcctgttttcagtcaggaacgtatcggccgcaacggtaagcccttcaagttctataagttccgctccatgtgccccaacgcagaggcaaagctggacgatctgctggatcagaacgagatggatggtcctgtgttcaagattaaggacgacccccgcattacccgtgtgggcaagtttatccgcaagaccagcctcgatgagctgccgcaactgtggaacatcctgaagggtgatatgagcatcgttggtccccgcccggcacttccccgcgaggtggaacagtacggcgactacgaaaagcagcgtctgtatgtgacccccggcctgagctgctattggcagatcgccccgcaccgcaacgacctctcttttgaggagtggatggatctggatgtgaagtatgtcaaggagcgcagcttctgggtggattggaagattatctttaaaaccttcaaggtatgcctgctgggacgtggggagtaaaagatcgcgataccgcctttcgggatgagtacatagatattggaaaattaggaatatggaggaaatttaaaatgtctgcatttgataacgcaacccttatgatcactggtggtaccggttcttttggctctaccgttctgaagcacttcttggattctgacctgaaggaaatccgcattttctctcgtgacgagaagaagcaggacgatatgcgccacgagcttcaggccaagcatccggagaacgccaagaaggtcaagttctacatcggtgatgtccgcaatccccagtccatccgtgacgccatgcccggtgttgactacatcttccacgctgctgctctgaagcaggtcccctcctgcgagttcttccccatgcaggctgttcaaaccaacatcatcggtactgataatgtgttgcacgccgctattgacgctggcgtcaagcgtgttgtctgcctgtccaccgacaaagctgcttaccccatcaacgccatgggcatctccaaggccatgatggagcacgtcatctacgcaaatgcccgtgtggctgcggagcgtggcggcaccaccatctgctgcacccgttacggcaacgtcatgtgcagccgtggctctgtcatccctctgttcattgaccagatcaaggctggcagccccatcaccatcactgaccccaacatgacccgcttcctgatgaacttggacgaggctgtggatttggtcatgttcgctttccagcacgccaaccccggtgacctgttcatccagaaggctgatgcttctaccatcggcgatttggctaaggctgttcagcagctgttcggcgataccggtacgaatatcatcggcactcgtcacggcgagaagctgttcgagaccctgatgacccgtgaggaacgcctgcgcagccaggatatgggtcactacttccgtgtggctgcggataaccgtgacctgaactatgacaagtttgtggtcaagggcgaagtacatacaatggctgacgagtcctacaccagccacaacaccgagcgtctggatgtggaaggtactgttaagaaaatcctgaccaccgagtatgtccagaatgagctgaagggcatcccgaatgtctaa

SEQ ID NO: 76 - DNA, 12543 bp, unidentified
  source 1..12543: mol_type = unassigned DNA
atgagaatcgtggtcgtcggcctcggcaaggttggccgtgccctgaccgcccagcttacggcggaaaataacgacattgtcgtcatcgaccaaaaccctgacctgatcgaggacattgtcaatatttatgacgtgcgcggtctggccggcaacggcggctgctatgacgtgcagaaggaggcgtttgaggacggcgcagacctgctgatcgccacaacgtccagtgatgagagcaacatcctggcctgcctcgtcgccaaaaagctgggcacgcagcacacgattgcgcgtatccgcaacccggagtatgagaagcagctgcgctttatgcgcgatgaccttggtctgtcgatgttcgtcaacccggaaaaagccacggcgcgtgagatcgcccgcgtgctgcgtttcccgtctgccatcaagcgtgagcagttctgccgccagcggtttgagctgatcgagtaccgcctgaccgacgacaacccgctggtgggcttgcagctgtcggacctgtaccgcaacatccgggtcaaaattctgatctgcgccgtcgcccgcggcagcgagacgatcatccccacgggtatgtttacgctgcgggccggggacaagatctacctgacggcctcggcccgggatctggaatccttcttccgcaagctgaacctgttcaaggccaaggccagcaacgtcatgatcgtcggtgcaagccggatgacctactatctggtcaaggagctgcaggacatccagaagcgggtgaccgtcatcgacagcgatgcggcccgctgccaggagatgagcgagaagttccccggcgtgctggtcatccacggcgacggtgcggatgccgagctgctgagcgaggagcgcatcaccgatatggacgcctttgtggcgctgaccggcctggacgaaacaaacatcattctggcgatgtacgcctcccagatgaactcctgcaaggtcgtggccaagatcaaccgcgagtccttcgccgagctggccgctgccaaggggatggtggacagcgtcgtctccacggcgtcggtcacgtcggagtccattgccatgtacgtccgcgccatgcagaacagctttgagtcggagaacatcaagacgctgcaccgtctggtgggcgggcgcgtggaggcgctggaattcaacgttgcgccgggtttgccgttcatcggcgtaccgctgaaggatctgaccctgcgcaaggggctgctggtggcgggcatcgtgcgccgcaatggccagacggtcatcccgtccggcaacgattccctgcaggagggcgacgatgtcgtcatcgtcaccactgacacaacgctgcactcgctgcgcgacattgtaaagtgagggcgcagccatgaactataaaatggtagggtttgtgctggggcgcatcttcctgatcgaagcagccctcatgctctttcccatgggctgcgccgccatctacggcgagtggagcgttgtgctttccttcctgtggccggcgctgatcgtgctggcgctgggcctgatgaccagcctgcgcaccccccaaaacacgaaaatctacgcccgcgacggcctggccatcgtggcgcttgtctgggtgctgatgtcggttttcggcgcactgccgtttgtcatctccggcgagataccgtcctttgccgatgctttttttgagacggtctcgggctttacgacgacaggctcgacaattctgaccgacgtcgaggcgctgagccacggcacgctgttctggcgcagcttttcccactggatcggcggcatgggcgtgctggtctttgccatggccgtgctgcccatgaccgatggccgtgccatgcacctgatgcgcgccgaagtccccggcccgacctgcggcaaaatttccagcaagctgagcgacagcgcaaagattttgtatgccatttatctggtcatgaccgtcatcgagacgattttgctctgcgcgggcggtatgccgctgtttgacgcgctcattcatgcgttcggcacggcgggcacgggcggcttcagcaacaaggcgctgagcgtcggcgcgtacaacagcccgtattttgagatcgtcatcggcgtgttcatgctgctgttcggcattaactttaacctgtattatttcctgctgctgcgtcatttccgtgaggcgttcgcctccgaggagatgcacgtctacttaggcatcgtcgcgttctcgacgctgacgatcacggcgaacatcgcgagtatgtacgacagtgtcggcacggcgctgcgcacggcgttcttccaggtgtcatccatcgtcacgaccaccggctacgccacggcggacttcaacctctggccgacctactcccgcatcgtgattgtgatcctgacgtttgtgggcgcatgcgcgggctcgacggcgggcggcttgaaagtatcgcgcgtcatcatccttttcaaggcggcacggcaggacctgaacaagatgctgcacagccatgccgtgacgacggtccgctttgagggcaaaccgctggacgaaaagacgctgcgcggtgtgcacaactatttcaacatttatatgctgctgctgacgctgtcggtgctgctgctctcgctggacgggttcgatctggtgacgacgtttacatccgtcgcgacctgcctgaacaacgtcggtcccggccttgagatggtcggcccgatgggcagctttgcggatttctccgctccggccaagctgctgctggcctttgacatgctggcgggccgtctggagctctacccgatgctggccctttttgccccgcgcctctggcgcaagcgcatcaatgcgatgcacgaggcaagagcgaagtaaggggcgggtgttctttctttacaaagaaagaaccaaagaaattccaaaccaatacaatcatagaaccgggcagctgccatctttacggcagccgcccggttttggtttatgtatggacgtttcgggggtagagtgtagggcggccagccctctggccgccgcaaggggcgtactgccttgcgatgccaatctgtttttaaagggggctataggcgggaaaaatgtgagtatccccacaagctggaatttgacactttgtatttatcgagaatactcttgaaaccattttgcaaagcgtgatttattgaaaataatgaatttatatagttctccatttttcatattaactgttgcaattggaaagactacccacttccaagagatttcttttatttcctgcatcggcaaaactaaatttctgtattttttgtcaactgtaagcttgtttgtcttgtaagtaagcgactgactatcgaggtacagacctcctccaagtatgccattgtgacacaaactgcaaacaaaagatttcatagaaacatccctccattaaattgcgatttaccttattataccacaccccgccgctgcgtgtctatttcccgccgtgcccgcataccctgtaccaaaccacaacaggggaggggcttgccatgcggcgggatgcagacagagaggaacgaaacgcaagattgctggcgggcgtggtgctggcggctatgttggtgctgctgtccggcatcatccatctgctgtaccaccgggagtacgccgagacggacacccccaacgactgctttgcggtgtcggcggcgacgggggagacggcgctgcccaaaatcgtctgcctgacctttgacgacggccccagcaaaaacacccggccaattctggaaattctcgataaggagcaggttccggctaccttctttgtctgcgcgcaggacgccaacgaaaaatatctgccccttgtggcggacatcgcggcggcgggacatcagatcgcgctgcacagcgcgacgcatcaatactccaaaatttatgcgagcaccgacgcattctggcaggacatcagaacgctgcgccaggcgttggagccgtatgtggatgtggcggccatcgactggctgcgtttccccggcggcagcacaaacacagtcagccaccgctacggcggaaacggcatcatgaaggccctgaaggcccaggccgaggacaagggctaccactggatcgactggaacgtctgcgccgaggacgccaccgccagccacccggatgcagcgcagattttgcgcaacattcgccgcgatgccgatggtcaggacacctgtgtcgtcctgctgcatgatacaaaagcaacaggtcagaccgttaaggccctgcccgatatgatcgcctatttccgggaacagggctacaatttttgtacggttgcacagatggatgccttgcaatgtgaaacaaaatagggtataatgtacaagaatcgaaaaacggtgggaggcggaacgatgcgcaaaacggaaagccagaagatagccctctgcggtatgctgggggcgctttcggtggtgcttttgctgctgggcagtgcactgcagatcggcacctatgccgcgccgatgctggcggcgttcctgctcatcccggtgctggaggaatacggcacgcgctacgcgctgaccctctacgtctgcgtggcaattctggccgtgctctttgtgccggagaccgaactggcgctgttttacgtgctggtcatggggtattaccccgtgctgcgcgtcaagctgaacggcataaaaagcacgctcctgcgctgggtgctgaaattcgcggtgttcaacgcgggcacggtgctggtgtatcttttgctgtttgcgctgctcgggcccgccgtgctggacgagctgctggccgacggcgtcgggatgctggcagcactgctggccgcgggcaacctgtcgttctggctgtgtgaccgcgcactggcggcactgacgcggtattaccacgtcatactcaagccaaaactgaaaaagaagttttaattcggggaggaaaacaacatgtggtacgatgaggcagtagtttatcagatctatccgctggggctttgtggcgcaccgctgcaaaacgacggtgaccaggcgcaggcgggcgagcaccgcattctgcgggtgctggactgggtggagcacatcaagcgcctgggcgcgacctgcgtgctgttcaacccgctgttcgagagcgacgcccacggctatgacacccgcgactacaataaggtggactgccgcctgggcacaaacgacgacctcaggcaggtctgcgcggcgctgcacgcggcgggcataaaaatcctgtttgacggcgtgttcaaccatgtgggccgtggcttctgggcgttcaaggacgtgcaggagaagcgctgggacagcccgtacaaggactggttccacatcagctttgacggcaacaccaactacaacgacggcttctggtatgaagcgtgggagggctgcaacgagctggtcaagctgaatctgcagaacccggcggtgaaaaactacctgtttgacgttgtgcgcggctgggtgcgggactacgacatcgacggcctgcgtttggatgttgcctactgcctcgacctcggctttctggccgagctgcgcgggctggccgacagcatcaagccggagttcgcactggtgggtgagacgctgcacggcgactacaaccgctggatgaacgaccacgcctgccacagcgtaacgaactacgagtgctacaagggcctgtattcgagcttcaacacgggcaacatgcacgagatcagctacagcctgaaccgccagttcggctccgagcagtggtgcctgtacacgggcaagcacctgctgagctttgtggataaccacgatgtaacgcgcattgcgacgattttgacggacaagggctgcctacgccccatctacggtctgctgttcggtatgcccggtgtgccgtcggtctactacggcagtgaatggggcatggagggcgacaagcgcaacggcgacccgacgctgcgcccggcggtggagaagcccgaggagaacgacctgaccgcctggatcgcggcgctggcccacgcccacacgggcagcaaggcgctgtgccggggcagctaccgcaatgtgctggtccagcctaagcagctgatttttgagcgctacgccgacggtgagcgggtgctggtggccatcaacgccgacggcaatccgtttgacgcccactttgacgcgggctgcggccgcgcggttgacctcatcacaggcgccggccacgactttggcggcggcagcacgctggagccgtacagctgccacttctggaaatgtgagcgataatacgatataaaaaggcacctgtccgtgtgggcaggtgcctttttgtgctatgctgtatgttgtagggggcggcgtcctcgacgccccgcagggcagtatgtagggcggcctgccctcaggccgccgcagcggggtgagggtgccccgccctacaatgtatgggttaaaggggcagcccctgtaaaccctacggggcggcccatgtatgggttaaggttttaaagtttctttgcctactttcttttcaaagaaagtaggtcacaggttcgtatatcccatcagcttttcatccacgacggcggcggtgtcgcggccctcgcgcagcgcccagacgacaaggctctggccgcggcgcatatcgccgcaggcgaacaccttcgggtcggcagtggcgtacttcacatcggccacggtgccgcgcttcgtgcgctcgacgccgaacgcatcggccacatagggctcgcagcccgtaaagcctgccgcgatcagcaccaggtcgcagtccacggtgaactcctcgccggtgggcaccatctggcggcgtccgtccacgacctcgcttttcagcttggagatcagcgcgccgcagacctgcccggcctcgttcttgtagaactccttgaccgtcgtctggtagacgcgggggtcaaagccgaatttggcgatggcctcctgctggccgtagtcggttttcagcacgcggggccactcgggccagtcgttgccgggggcacgggttgcgggcgggcagggcatcatttccagctgcatgacgctctcgcagccctggcggatggccgtgccgacgcagtcgttgccggtgtcgccgccgccgatgaccagcacgcgcttgcccgcggcggaaaccgcctttccgtccgcaaagttggaatccagcagactgcgggtcacgctggtcaggtaatccaccgcaaagaagatgccctgcgcgtcgcggcccggggcctggatgtcgcgggcctgcttcgcgccgcagcacagcaccacggcgtcatagcgggccttcagctcctcggcgctgaccgtattgccgacgtcggcgttaaaaacaaactcaatgccctcgtcctgcaaaattttcacgcggcggtcaatgacccacttttccagcttcatgttggggatgccgtacatcagcaggccgcctgcgcggtcctcgcgctcatagatggtcacgcgatggccgcgcttgttgagcaggtcggccacggacaggcccgcgggacctgcgccgatgaccgccacggtcttgcccgtgcgggccgggggcggcacggcatgaatggcgccgctctcgtaaccgtattccacgatggcacgctcgttttccttgaccgtgaccgggtcacccgtgacgttgccgcaggtgcaggccgcctcgcacagggcggggcagacccggctcgtgaactccgggtatcggttcgtggcgatcagccggtgcacggccagatcccacttgccctgatagaccaggtcgttccactcggggatcaggttgttcagcgggcagccgctgaacatgccgcccagctgaacgccgctctggcagaaggggacgccgcagtccatgcagcgtgcgccctgggcctgctgctcgtcggtgtgcagagggacgtgaaactcgttaaaattccggatgcgctcctcgggcggcagctctaaactggtctgccgcgtaatttccataaatcctgtcggtttgcccatggtactctgcctcccttactttgtgcttttcatggcgtagaacgcctcaatctgggcctgctcgctgtcctcgcccttttcctccatctgggcgatcaggcgcagcattttgtcgtagtcgtgaggcaggaccttcttgaacttgggcagatactcgccgaagttgtcaaggatttccttgccgcgcggcgacccggtcagctccacatgctcacggatcaggtctttcaacagcgatacatcgtacttgtgctccacaggctccagactgaccatgtccttgttgacgcgctggtagaagtcccagtcctcgtccagcacgtaggcgatgccgccgctcatgccggctgcaaagttcttgccggtcttgccaagcacgaccaccgtgccgccggtcatgtactcgcagccatggtcgcccacgccctccacaacggcagttgcgccggagttgcgcacgcagaagcgctcaccggccacgccgttgatgaacgccgtgccgcccgtagcaccgtacagtgccacgttgccgatgacgatgttctcgctgcggtcaaaggcggcgtccttcggcggatagacgacgagcttgccgccggacagacccttgccgatgtagtcattcgcgtcgccgaccagctcgagcgtcaggcccttggggatgaacgcgccgaagctctggccgccgtagccgtggcagacgacatggaacgtgtcgtcgggcagcgtgttgccgaacctggcggtgatctcgctgccaatgatcgtgccgaacgcgcggtccgtgttgccgacgtccagcgtgacggtgctgggctttggctcggcggagtcgaagctctttttgaacttcttcatcaggatgcgcatgtcgggggtcttttccagctggaagttgtaaacatctttcgcgttgaagtgtacgttggagttctcgaccagcgggttctgcaaaagcgcggtcaggtccatctcgccggcgcgggagcctgcgggcgcggctttgaccttgagcaggtcggtgcggcccaccagctcatcgacggtgcgcacgccgagctttgccatgtactcgcgcaggtcctcggccatgaagcgcataaagttcatgatgtactcgggcttgcccttgaaccgcttgcgcagctcggggttctgggtgcagatgcccatggggcaggtgtcaaggttgcagacgcgcatcatgacgcagcccatggccaccagcgggccggtgccgaagccgaattcctcggcacccagcagggcggcaatggcaacgtcgcggccactcatcagcttgctgtccgcctcgatgcggacgcggctgcgcagaccgttcatgatcaggcactggtgtgcctcggcaatgcccagctcccacggcagacctgcgttgtggatggagttgcggggggctgcgcccgtgccgccgtcaaagccggaaatcaggatgacctccgcaccggccttggcaacgcccgcggcaatcgtgccgacaccggcctcgctgacgagcttgacgttgatggctgccttgcggttggagcacttcaaatcgtagatcagctgcgccaggtcctcaatcgagtaaatatcgtggtggggcgggggagagatcaggccgacgccggtggtcgagttgcgggtcttggcgacccacgggtagaccttgccgccgggcagctggccgccctcgccgggctttgcgccctgtgccatcttgatctggatctcactggcggagaccagatacttgcttgtcacgccgaagcgggcggatgccacctgcttgatggcggagttgcgctcggtgccgaagcggtcttcggcctcgccgccctcgccggtgttggacttgccgcccagacggttcatggcgatagccatgcactcgtgggcctcctcggacagcgcaccgtagctcatggccgcggtcttgaagcgcttgacgatggagtcaacgctctcgacctcgtcgaggggcacgccctgctcgggatagttgaagtccagcaggctgcgcaggtgcatcgggtcgccgttctcattggcagcggcggcggtgtactgcttgaaggtatcgtaattgccggtccagcaggcctgctgcaaaaggtggatggtctgcgggttgtagaggtgctgctcggcagcggggccgccgcggaatttgtgcgcacccaggctcggcagctcgcggttgatgtccagacccagcgggtcgaatgcttcctgatggcgggcttccagatcattctggatgtcctggatcgtgatgccgcccacgcgggagacggtgttcgtaaagtatttgtcgatgacctctttcgagatgcccagcgcctcaaagatctggctgcccgcgtaggactggatcgtggaaatgcccatcttggacgcgattttgacaatgcccgccagcacggccttgttgtagtcgctgacagcggcgtagtagtccttgtcgagaaggccgtcggaaatcagctcaccgatagtctcctgcgccagatacgggttgatggcagctgcgccgtagcccagcaacgtggcgaagtcgtgtaccaggcgcggctcgccgctttccagaatcagcgccatggcggtgcgcttgcgggtgcggaccagatacttgctgaccgcgcccacagccagcaggctgggaatggcgacgtggtactcgtcaatgtcgcggtccgacaaaatcaggatgttcgcgccgtcgcggtaggcgcggtccacatcgacaaacaggcgctcaatggccttttccaggtcggtgttcttgtagtagcagatggacagcgtcacgaccttgaagccgggcacgtccatggccttgatcttgagcagatcggtctcggtcaggatcgggttctcgattttcaggaccttgcagttgtcggcgtcctcctccagaagattgccctgcgcaccgacgtagacggtggtcgaggtgacgatcttctcgcgcagcgcgtcgatgggcgggtttgtgacctgcgcaaacatctgcttgaaatactcgctcagattcgggcgggtgtggctcaaaacggccagcggagtatcgctgcccatggccccggcgggctcgccgccgttcttggccatcggcagaatgatcgtggagacgtcctcataccggtagccgaacgccttctgcagctggacaagctgatccttcgtgtagctgggcaccttcttgttgggcaccttcaggctggacagcgggacgaggttgcggtccagccactcgccgtagggctggcggctggcgtagtcggccttcagcttttcgtcgtccaccagctcgcccctgacggtatccaccagcagcatcttgccggggcgcagacggtccttgcgcacgacctcgtcagcgggaatgtcgagcacgccgacctcgctggaaaggatcaggcggccatccttcgtgatgtagtagcggctcgggcgcagaccgttgcggtccagcactgcgcccatcacgtcgccgtcgctgaacaggatgctggcggggccgtcccacggctccagcatcgtggcatagtactggtagaagtcgcgcttcttcgggtccatcgacttgttgttgtcccacggctcgggaatcgtgaccatgacggccagcggcagatccatgccgttcatgaccatgaattccagcgtgttatccagctgggcagagtcggagccgccctggttgacgatgggcagaaccttcgtcatatcgtcctttaaatagttggaaccgatggtttcctcgcgggcaagcatcgtgtccacgttgccgcggatcgtgttgatctcgccgttgtgcaggatgaagcggttggggtgggcgcggttccagctcggggatgtgttcgtcgagaagcggctgtgtaccatgccgatggcggattcatagtcggcgtcctgcagatcgggatagaacaggcgcagctccttgacgaggaacatacctttatagacaatggtgcggctggacaggctgcaaacgtaggtgtcggggctggactgctcaaacacgcggcgcgccacatagaggcggcggtcaaaggcaatgccggcctcgacgcgctgcggcttgcccacaaagccctgccagatgctgggcatacaggcaatggccttgtggccgagcacctcggggcaggtgggaacctcgcgccagcctaagaagggcagaccctcctttttgcagacgatctcaaacagcttcttggcctggttgcgcttgagctcatccttctggaaaaagaacatgccaatgccatattcccgctctgcgcccagggtcagcccctgctcggcagcggccttctggaagaatttgtcgctgatctgcgtcagaatgccgacgccgtcgccggtcttgccctcggcgtccttgcccgcgcggtgctccagatgctccacgatctgcagcgcgtcgtcaatggttttgtggctcttgcgccccttgatgtccaccacagcgccgatgccgcagttgtcatgctcaaaccgggggctgtacagcccggcgggggtcttgcgctcggtaaagttttccat

SEQ ID NO: 77 - DNA, 16981 bp, unidentified
  source 1..16981: mol_type = unassigned DNA
tattaagtcggtttggtttcgtaaccaaaccgattggcgaacgaggttcgccgctacaaacgctacaaggaatatgctgtaatcaaaaaataatttgcaagaaaattaaataaacttgcaaaaattaaatttgtgccgtagcttagatttatgacctgttattgtaaactgtaatttaaaaaacagcaaaaaactttaaaaaatattcaaaaaagtattgacaatcggttgataaggctttataattcaagacagtaaggcaaaggtcttacggagttttcggaaaactgaatataaaaaggacaaggaagttcactttggtttcttctgattttgcaacaaattttttaaaacttgcaaaatcggataaaacattgtgagctttatttttttgcttcggcaaaaacggtttatgtggaggttaaaaatggattcaggaaatataggctttgttctgctttgtgcggctttcgtatttgtaatgactccgggtcttgcaatgttttacggcggtcttgtacgaaagaaaaatgttgtaaatacaatgatgacatcaatttttattatcggtgtcggaattgttatgtgggtgcttttcggttattcgctttcgttcgctccttcgggaaatgcttttatcggtgatttccgttggctcggtcttgagggtgtttcactcacggagggctacacggatgatgcgtcaattccgaatatggtattctctgcgttccagatgatgtttgccgtaatcacccctgctcttattacgggtgcggttgcaggcagaatgaagtttaagtcgattttcgttttcacaattttctggtcgcttatcgtttattatccgctcgctcacatggtgtggggacagggaggacttttaggtgcagacggtatcggtgctctcgactttgcaggcggcgatgttgtacatatcagttcgggtgtttcggcacttgtactttgcatactcctcggcaagcgtcacgattatgaacattcaatttacagaattcacaatatcccgacagttgtactcggtgcgtcgctccttatgtttggttggttcggctttaatgcgggttctgcacttgccgccgacggtcttgcggctcacgcatttatgacaacaggtgtttcagccgcagcggcaatgctctcgtggatgctctgcgatgttatcaagaacaaaaagcctacgcttatcggtgcaagcacgggtatggttgcaggtcttgtaggtatcacgcccggtgccggctttgttccgatgtgggcggcagttattatcggtttgacaacaagccccgtttgctatattatgatttcatacggcaagaaaaaattcggctttgacgatgcgcttgacgcattcagctgtcacggtacaggcggtatctggggcggacttctcacaggtgtgttctcatgcacggcaatcaacagcagtgcaggtaatggtcttgtgtatggtgagtttgcacagttcggtgctcaggcggcaggtatcggcatcacaattgtaattgcggttgtcggaacactcatctgctacggcatcacaagacttcttacaggcaaaatcagggttgacctcagagatgagcttatgggacttgatgtttcacagcacggtgaagctgcttatccgtcatttaacggtcttgacaactaacggaggttttaaagtatggaaaacaataacgatattcagcttataaaaatagaggccgttgttcgtgaagaaatgtttgtagatgtcaaaaaggctctcacggatatcggcgtaaacggaattacagcgtatcaggttgtcggctgcggaattcagcgaggtatgtcggagtatgtaagaggacagaaggttgatgttcaggttttgccgaaaatcaagtttgaaattgttgtttcttccgaagaatgggagagaaaaacaattgaggcaatcagaaaaacagcctttacgggcaacccgggtgacggtaaaatatttacctactatcttaaacaggcggttaaaatccgtacgggagaaacaggctacgatgcaattcagactcccaactttgacgactgatattttcctatttccctatatcaaaaaagtgcgtaccgaattttggtacgcactttttgctacataaaaattatttgtatatgttcgactcgtgtatatcacatatttattctaatttggttaatgctttaatgaccttttgctcaagctctttttgttgtgaagcagtaagttcatttgatgttcttaccaagacggtaccaattacagtatgtgttccatttgcgaaaatagttccatcgtaagtggcaagatattcttggcgtttttcggcatcttcttctttagcataaacttcaattgcaccacctgcatcagtgcctttatcaatcaatacatcatcatactcacctgatgtataaaccttactttgatttacctttttactttcaaaataaatagtagcagtatagccaccttctttatgcaaatttccgtttggatcttggtcttctgttactgctcttgcatcaacaatatcatcaactgtcagaagcctttgtattacaaattcttctgttggatttgttacttgtttgtattgctttttgctgttttctaaatttgtatatgcatctgataaagctgttattttatctgaatagtctattggaacgctaagttcctttgctttgtttagaatatcttctgtgccttttggcatttctcctactacaatcttggatgccccagcatctttgattgcttctttagcagcatcaacagtagatttatcaagaggtttatcggtattatctactaatttttggagcttttttatttccgtatccagctgcttatttttctctttgatattacttataacaacattatatgtatctacagcctcgttgtgtggtttgaaatatccgaaatatgccccacaccctcctgcaatcaatacaacaattgtaataactgctataattattatttttgttcttttcttcatttgattttgctccctttttattatgttttgtaacaattatctgcaaaatttattaatatctataattgtgcaatcctaatatttgttgtaattatatctatcagatatgggtacacttatacatattctttacacacaataaaagacaattgtttcctttatctattaattacatattttaccacattaactgttataattcaatactctatgacaaatatatagtgatttttatatgagtgtagtacttcaatgcctttgttgtaagtctttgattttatgttttggaatttttttgccattaactcgaaaaaattgtaatacataaagatgtatcgcaaaaactaaaagatgataataactaccttcctttgtttatactattatttaaattaaacttaaaaaactcgaaatccaattaatccgaatttcgagtttttctacagactgaagtgcgtaccgaattttggtacgcactttttgcttgtaaaattgtttatcttcttattgtaatatcttccgggctgacagtgttgtcacgaagccgattgtaataatcgggatttgaatgctttatgcttatcggttttagctcgggagttgcaaaacagtgtgttgttctgcctgttgcagaaagttctccgtttttattgttgaagattttatagtcaaaaatcattcttgaacccgtaaaaaatacaaggcttacttcaacggaaaactcatcgccgaatttaagcggctttttgtaacgggcatatgcgtcaacatttggaatatacaatccttttgactgcatttcggcaacatcacaaccgatgtcgtgcatatactgaattcttgcatcttcaaaatatctgatataatttgagtgatgaacaatgttcatacagtctgtttcatagtacgaaacctttgatttgtataattttttggtcatattttctccattacatatatacggaaaatccgtaattattttttaagcaacaaaccgtttttaaggtcctctgctgcctgtttttttattacaaaatgctgtttcttgcctgtagcggtttgcggaagatcgttgacaaaacggtaatatctcggagcctgatattttgaaatattcggtgatctgtcgcagaagtcaataagctctgcaactgtaaggctttcgtcggccttgattacatatgccgcaacgcactcgcctcttgttgaatcgggaacacctgttacgatacattcctgaactttcgggtgtgagttgagaatttcctcaattcttgcaggataaatattttcacccttgctgataatcatatcgtcttttctgcctgcaactgtaacaaactgctcgctgttccaagtgccgatgtcgcctgtgtacatccaacccttgtagaacttgtcttttgtagccttttcgttatttacatagcagtaggtagttttgttcggacatttgatgatgatttctccctctgttttgttatcgcaggggactgtgtcatcgggctctgcttttctgtcgtcataaacatttacaagtcttacctcgtcatctgtgcatgatctgcctgccgaacctgccatttcaggaaggtcatacggacgaagaaatgtattccagaaagattccgttgtgccgtagccgttgaaaatgttgggggagagaagttcctgatagcggatgcaagcggctttttcaagcggactgcccatggtaataatgcccttgagcgaagaaaggtttttctgatgtttttcctgacggtttgcaagcatctcaagagttgacggaacacctgtgatgaatgtaatgccgtatttttcgataaagtccatgcagcttctcgggttgaatgttctcataatcacaagacacgcacctgcataaagggtaggtgtgggaccgcccgaatgaataccgccacggtgaaaccacggcgtcatattcatcgtaatgtcaacgggtgagagcggaaagtgcataattacatcgtgagccgaaagaacttcgttgattgcgttaagcggaacgccctttggagtgcctgttgtacctgaggtctgaagtcttaaaacctcgtcataaatatgcggtgcatagtcaacaggcggattttcgtaactgctgtccttgatgtaatcgtcaaagaaaatgtgtccttcgggaagagttacttcctttttggaattattaacgcagagaatcaattttggcttatgctcgcagatttcaagagcctgtacggctgtttgcataatgtctgcatcataaacataaacaacaggcttgttgtgtcccataatttctgcggtttcgcccggtgataggttaaagttagcgggatttgagattgcaccgagtttctgcggcgcaatgtaaccgaacaaaaactgcggtgagttgtaaagctgcataaacacgatgtcgtttttcttgacgccgtcttttttcatagcgtttgcaaatctgtttgcatcggcattaagctctttgtagctccatgttctgccgctctgaggatcaattgcggcaggcttatccgaaaagcgtcttacatttctcataaagccgttaagccatgtaaattcactttcaaatgtttctctgaacatctgtgaatcatatgttaaattcataatatccccctgtcctattatgtatgggtgtacattattttatacacacatatgtgtgttgcttgtatgttgttttgtcggcagattatttgccgtatttacctacgataatacttgagttctgaccgccgaatccgaatgcgtttgacatggcaaagttgatttcggctttctttgcggtatttgcaacaaagtcaatgccggcacattcgggatcaacctcattgagattgattgtaggcggaactgtgcctgtttcaatagccttgacacaggtaattgtttctgtaataccgcctgcgcccatcatatgacctgttgcgccctttgttgaacttacataggggagagtgttgccgaaaaccttcttgattgaagatgtttcaactgtgtcacccttgtttgttgcagtaccgtgagcattgatgtagccgatgtcggaaggattgattcctgcctctgcaattgcctgtttcatacaagcgattgcacctcgtccttcgggatggggagcagttacatgataagcgtcatctgtgttgccgcaacctctgatttctgcataaatcttcgcacctcttgcaagagcgtgttcctctgtttcaagaacgagcgcaccgccgccttcacctattacaaaaccgtcacgggtaacatcaaacggacggcttgcagtgcttggcgaatcgtttcttcttgaaagagcttttgcgttggcaagcgaataaattacaagaggacagagaacggactctgctcctactgcgagcataatatcagccttgccgctctgcatacacatacaagctgtgttgattgcgtcaccgcctgacgaacaagctgtgcttaccgtaaagctcggtccctgaatattgtagtcgattgcgatatttgcggcggcaatgtttccgagaattttgggaataaaacgaggacctacctttttgtgtgatgcgcctgtgagtgcctcctgagtatatgcgattgttgcaatacctgccattgcagtacccataacaatacctgttctttcgggttcaatcttgattccgctctgtttcatggcttcctcagccgcaatataagcgtattgcataaacggatctgtttttctgattaaatcctttggaagatagtcggacggattaaagttctttacttcgccggcaatctgaacagcgagttcagacggatcaaaagtcttaattgtgtcaatgcccgatgcacctgctgtgatattattccagtagttttcaacaccgatgccgacaggtgttaccgcacccataccggttacaactattttcttcattcgttaagctccttgttttaaaataagttatttacattttgcatattattatgctatacttgaattgtaccaaatatggaaaaattattcaataccgttgattatgcaaaaatgacgatttggcagtcttaaatttacagttttgcataatattgaaaaaaaccgacaaaatactgcgggaaattgtcaaaacggaggttattatggatataaatcagctcaattgctttataactgtggctcagacgctcaacttttcagaggcggcaaggcggaactatgtttctcagtcaaccgtcagcagatatgtaagcgaccttgaaaaggagtttggggttcagctttttacacgctctcaccgtgatgttatcataacaagcgagggcaaggcacttttgccctatgcgattgaaattgttgaaactttaaagaaagcaaaaaccgttatcaagcagatgcatgacggaggtcagggtaaaattacgctcggctgtgatgttacctcgctttcgttcccgacaaaatgtatagccgactttgcggaaaaatatccgggaattacaattgatgtgcgacagcttgacgaggctgaccgcacacttgcaatcacaggcggtgaatacgacttctgctttatgccgagagatatggttcccgaaagctcaggtattgaatcaatcattacacataatgaaactttgtctgttgtaacagcgaaaaattcaaaattcagcggaagaaaaagcgttaagctttctgaattggctgacgaaagtattctggtactttcggaatcggttgcaccgattgtgtatatggaaattatggatttgttccgtacatttcacataaccccgaaaattgaaaattcatttgacgatctcgtttctatatatgtatcgtcctcttcgggaatcggcgtgtctgtcgtaccaacctcggttgccgcatacacttctgacgaatacaccgattcataccttattgatgatgcggacacaagcatagcctatgttatggcatgggaaaagaatatttcaaatcctgccgcaaagctttttatggaggctgttaagaaatatgccaagggcgatgacaacatttacgggctgtaactgagcatatttctcaatataaattccaataaagaattatagtgaaattttcacaaaataaacacacattattttcaaaaaaggtatttactttataaatcttcggtgttataattacggtagtcaaggagaagttgacaaaatatcctttaaggaggtaattataatgtacagatttactttaccgagagatctctatcatggtaaggatgctctctcaagtcttaaaaatttatccggcaaaaaggctgttgtagttgtcggcggcggttcaatgaagcgtttcggttttcttgacaaggctgttgactatcttaaagaagcaggtatggaggttaagcttatcgagggcgtagagcctgacccatctgttgaaacagttatgaagggcgccgctgttatgcgtgaatttgaacccgactggattgttgcaatgggcggcggttctccgattgatgccgcaaaggctatgtgggtattctatgagtatccagacacaacctttgaggaaatcatcactccgttcagtttcccgacacttcgtacaaaggctaaattctgcgctatcccgtcaacatcgggtactgcaacagaagttacggctttctcagttatcacagactatgcaaagggtatcaaatatccgcttgctgactttaatatcacacctgatgttgctatcgttgatcctgcacttgccgaaacaatgccggctaaacttactgctcacacaggtatggacgctatgactcacgcaattgaggcttatgtttcaactctcaactgtgagtacacagatccgcttgcactccacgcaattgagcttattcacgacaacctcaagaagtcttatgagggcgacatggcttgccgtgataaaatgcacgatgcacagtgccttgcaggtatggcattctcaaatgctctgctcggtatcgttcactcaatggctcacaagacaggtgcagctttcacaggcggtcacattattcacggctgtgcaaacgctatgtatcttcctaaggttatcaagtataactcaaaagatcctgttgcagctgagcgttatgctaagattgctaagttcatcaacctcaagggcgaaacaacagaagaacttgttgacgcactcatcgctgaactccgttcaatgaacgatcagctcaatattccgcagggcattaagaactacggtccgggcggtgttaaggctgacgagagcattatcgacgaaaaagaattcctcgaaaagctccccgaagttgccaagaacgcaattgccgatgcctgcacaggttctaacccacgccagccaaatcaggaagaaatggaaaaacttctcaaggcttgctactacgatacagaaatcgacttctgattcgtttgacaaatctatttgtacttatcacagctctccgttttcggggagctgtttttttaataaaaaatccgcattaaaaagcacttaaaaggcataaaaatcatatggacaatattgctttgttgtgctaaaattgacttgaaattgatgaatttggtgacataaaatgaaaattgcagtaataaacggtcagaaccataaaggctcaacctatcatattggcaagcaggttgccgataaattaggcggcgaggttacggagttttttcttccgagagatttcggcgatttttgcgtaggttgtacgcagtgttttctaaaatccgaaacactttgtccgcattatgagcgactgaaaaagattaccgaggctatggacgaggctgatgtactcatcttcacaacgcccgtgtatgtttatcattgcacaggctcaatgaaagcatttcttgatcattacggttatcgttggatggttcaccgtcccgaacagaaaatgttcacaaagcaggcggttgtaatttcgacagccgcaggttcgggtacaaaatctgccaacaaggatatcgccgacagtatgttcttttggggcgttccaaaaacttatcgttacggtgtcaatgttcgtgcaacaaattattcaggcgtcaccgatggactcaaaaagaaaattgacaaaaagactacctcaattgccaataaggtaaagaaaaataacggcaaagttaaggcagggttaaaaacaaaaggctttttctttattatgagaatgattcagaaaagcggctggaatgaagccgataaaaattactgggcagaacgaggttggaacggtaaaaacagaccgtggaaaaatacataaggagatgttttaaatggcaaaaaatactgaaatcagcttgagaaacaaggttatttattcgatttatgtccgtaatcacacaaatgacggcacatttaatgccgttgcagaggatcttgaccgaataaaatcactcggcacggacattatttggtttatgccgattcatccgattggcgtcaagaacaaaaaaggctctctcggctgtccttatgcaaacaaggactatcgcacaacaaatccggaatacggcacaatggaagatttcaagagccttgttgaaaaaattcacgcaaagggcatgaagtgcatcattgatgttgtctataaccacacttcgcccgactcaaatctttcagttgaacatcccgaatttttctacagaaagtcggacggcaattttggcaacaaagtcggtgattggagcgacataatcgaccttgattattctaacaaagaattatggcagtatcagattgattctctcgttatgtgggcgaagattgttgacggcttccgttgcgatgttgcatcattcgttcccgttgaattttggaaacaggcgagagaggctgttgcaaaggtaaatcccgactgcatttggcttgccgaaagcgtacacagctctttcaatgtgttctctcgcaagagcggtatttatgccgcaagcgactatgagctttttgacgcttttgatatggaatatgactacgatatccgtgaggttttcgacaaatatttgaagggcgaaaccacactttcaaattatatggatatgctcaattatcaggaggcaatttatccgcagaattacgataaaatgcgttgccttgaaaatcacgatcagccacgaatttgccactatgttaaggaaaagagcgaccttgaaaattacacagcttttctgtatttcttgaagggttcaactctcatctatgcaggtcaggagttcggttgtgacgaaactccaagcctttttgacaaggatgttttcccacgcaacacaggcattgatttgagcaacctttttgcaaagctcgatacaatcaagaaaaccgttcttgatgatgacgattatttcaaggctgatgcagacgatgaaaacgatattgcaattcttgagcgtgacaacaacaagagcaaaaaagtcggcattttcagccttaaatcaaagtcggcagatgtaaaagttgaccttcccgacggcgactataaaaacgaaatcagcggtgaaacagttacagtttcaaacggaaagattcattgcaacggcaaagcaataattatccgcaagtaaaataaaattccatataagaataatacaacctccctgcaaagcatttcagcttacggggaggttgttctttatataaaaatccgtgttgcatggttacaacacggatttcttggttttatttaatcgaaccgtcgccacccataagagcggtcatttcttcaatgcgttccaaaggaaacggtggttcgcaaagcagttttttacatgctcacttagctttctttttattactgccgaaaattttagtaggaataatacttccgaggaatgcggcgagcaaaatccacggaataactcttgcgtcaaagcagagcaaaaggagcattgttacggcaagcggttttttcattgtgacaccgagaagtcctgccgttacgactgccgcacaaaatgccgtgtcaagtccgccgagcattgcaacaccgtagccgatgctcactccgcagaagattacggggaagaagtgaccgcctttccaacccgactttatgcagatgtttgtgagaacaagtttaagcacaccgctgataatgagaatccacggtgcaaattcggcaaagctttccttgacaacggtaatgctttcttcgcccgaaaacattgtgagggggaggtatgtacccataacaccgaggataattccgccgagagttgtgctgataataatgccgagtttgccctgaatgagtgcgaaaaattttccgaaaatctttgaagatatgataaacagaaaaccgcatacagcacccaaaagtgcgagaggaattccccacaaacgctcaaaatttgtaatgttataacccccgagtcgtggaagtcccatacttccgccgaaaatcgagttaagcaaaaacagagttcccgccgcaaaaagtacggcaatgatgtttgaaataagctttgttgaacggatatcggtaggcttttcttcgctgtcaagcctttcttcattgaccgatgcaagaccgaaaagcggtgcgtagaataccgcactcagggttgcgcttatgccgatttgcattagttcgggaattttacttttagcgtctttcatatgacttcctgcccagtagcaaagtcccacgataacgcctgtcaagcctgcctcggggccaagacttccgccgaaaacaaggggcaaaagtgccgaaatgcagagcaaaagcaccttgttgtacgggtaaaatttatctttttttacctttttcataacctcgtcaagttcatcgggaacggcatttgtcagcttttgccatattccgagaataattccgcccgccgtacagacgataatcggataaaatttgaaatcaaaatttgacggaattgtatcccacacaagaccgattcccaagcccataagttttagaaacagccatactatcagcgaagtaaccgcaccgctgaatccgcaaaaaatgtagtataaaaaattgttggcaacagtccgtttagtcattgtcgcacctccgtgtgtttataattggattataacataaaacacagcaaaaaaacaattattcagcacaaaaagtacggaataattgctttttattatttttttaattttagagcctcttctaaacaaaaacagctgacaccaatgccgatgtcagccataaaaacctatttgattttaaatttcaaaagcggcgcttacttttttgaattctctttttctgatgatgaagtaggcaatcaaaacggatgtgcctgtgataagccatgaaacggggtaaaccataaggagcatatcgtaggtgtggtatgccttgaatactgtgaagagccagatgattctgaacacaacagaaccgaagattgtgagaattgcagggaggagtgaatgtccgattcctctgagcgcaccgccgctgatttcgtatgaacctgtcataagctcaaggagcataacaatcgccattctgatgattgcgtacttgataacagtggggtcggttgtgaagaaggtgatgaaaaatccgcttccgagcatgaatataacgctcacacagcctgtgaaaatacagctgaaaagcatacaaagcctaaacacctttttgcatctgtcaaactgaagtgcgccgtagttctgacttgtgaatgtaacggctgcctggctgaacgcacttactatatagaatgtaatgtactcaaagttgagttcagccgatgagcctgcaaccgcctgtgaaccgaagccgtttatggctgtctgaatgaatacatttgaaattgagaaaaccataccctgaatacctgcaggagcaccgattttcaaaatcataataagatgttctttcttgaatgaaagtttttttggattgactctgattgactcgtcttcgttcctgatgaggaacatcataacaagtccggcgcttatgccgtcggcaattactgttgcaatgccgactcctgcaacgctcatatcgcagacgattacaaagaagaggttcaaaagaacatttacaatacctgaaattacaagacagtagagcggacggcttgtgtcgccgacacttctcaaaattgccgaaccaaagttgtagagcattacaaacggcatgcccataaagtaaattctcaggtatgttgccgcaaggtcaattacatcatccggtgtgttcatcagccttaacagcggtgctgcaataacctgaccgagtatcagaagaagaaatccgcatataagtgaaagtgttattaccgtgtgaacagcttccgaaacctttttacggtcattttgaccgatatatcgtgcaatcaaaacatttgtgccaaccgaaagtcccgtgaataacagcacaagcatattgatgagcggagcgttgcttccgactgcggcaagtgcctgactgcttgaaaatctgccgaccaccgcaacatcggttgagttgaaaagctgttgaagaatactggatcctgcaagcggaagtgtgaaaagaagaattttttttacgagcggaccttccagcatatttatctggtgtgagcgccgtcgtttttcttttacagtattctgatctttgtttcttttaaacagacttgcaaacgcaagtgagggcatttttttgactttccccattaatttctaacctcttcaatcacataatctttgtaaacaataccattcttttccattttccacaattattgtaatcctgttgcctgaaataaacaagcaaaataccttataaacataaagtttactttgctcacaattttagttacaataactacctcgtcaaaattcttctttttatgcctttataatatggtaaaaactgcttttctgcatattttcagaccgatttttctcaataagcaaggctttgaatttgtatgcaatttgtgcctcttcaacaaaagtaaaattgctgtcttgtaagcattgacgaaaaattttttaacctacaaataactgattttaaaattgttgtatatgccgattaaattataatgatacaattatgatacaagcttaatataatatatgtttaaaggaataagcgaaaaggagtgaatgttatgaagaaaaagattgctgtaattgtggttgcaattgttttatgcgttgccgccgcagtatttgccgtgccgaaaatcagtttctatgcgtgtgagcctaccgtgtattttgatgttgagtactgcgacaaggttgacgctaagatgtctgccgaagatgccgaaaccgtgaagaaaatgtttgagggcaaatccgcatattttgattcaccgtcttgtggtttttccgaaaaggcatcaataagaataggctgtaatacatatatgcctgcgtgtgacggtgatgaaattgttaagcacggatttatgtattttaggctttcaaaaagcgaaaataacgaacttcgcaagattatgaaaaagtacgaagcagatatgaaaaaagccatctaaagccgttgacagacgcatttccgtgtgttaaacttttctcgaaaaatatacggaggtgttttatgaaaaactacaactgggcaacactcggttgcggagttatcgcaaatgagcttgcaactgcactcaaaagcagaggacagaaactttattccgttgcaaaccgtacccatgaaaaggcggttgcgtttgccgaaaagtacggcattgaaaaggtttacaacgatattgacgagctgtttaaagacgaaaatgttgacataatttacatttccacgccgcacaacacacatataaaatatcttcgcaaggctcttgcggcaggaaagcatgttttgtgcgaaaagtcgataacgcttaattcagatgaacttgacgaggcaatctctcttgcagagaaaaaccatgttgtgcttgcagaggcaatgacaattttccatatgccgatttacaaggcacttcttgaaaaggtaaattcaggtgaccttggcgagcttaggcttattcagatgaatttcggcagttacaaagagtacaatatgaacaaccgatttttcaaccgcaatcttgcaggcggtgcaatgcttgacatcggcgtgtatgcgctttcgtttgttcgtatgtttatgagctcatgcccaaacgatgtgttgtcgcaggttaaatatgccgaaacaggcgttgacgaacaggcaagtattcttttaaagaataaagaggaggaaatggcaactgtcattctttcgcttcacgcaaaacagccaaagcgtggcacaatctcgtttgacaagggttatgttgaaatctttgaatatcccagaggcatggaggcaaagattacatacacggctgacggtcattgtgaaacaatctcggcaggtcagacaaaggacgctttgctttatgaggttgaagatatggaaaaggcgatagagggcgacacggctcttatgcaccttgactacacaaaggatgttatgaaaatcatgaccgacatccgcaaaagctggggcatgaaatatcccgaagaagagtaagttttttgaatttaatttgatactaaatacaaaactccaccgtgaaatgcggtggagtttcctttatatatttgattaaatcagaattagtagttttctgcgtgaatttcaaaatagctctgtgggtggttgcagacggggcaaacctcgggagcttctttgcctacaacaatgtgaccgcagttacggcattcccaaaccttgatttcgctccttttgaaaacttctgcagtttcaacattgcggagtaatgcacggtatctttcttcgtggtgcttttcaattgcggcaacaaggcggaacttgtgtgcaagctctgtaaaaccttcttcctcggcagttttagcgaaatcttcgtacatatctgtccactcgtagttttcg

SEQ ID NO: 78 - DNA, 24449 bp, unidentified
  source 1..24449: mol_type = unassigned DNA
ttatacaaccgtcacaacacctatttcaacttgattattgattctggggatgaatacggtgttgctcagacctgcgcagacaatcatttttgtgccgtcaaggtcaaattcgcctttgtcatatttcggaaaaagtccctgattcggagcgattactccgccgatgaacggcaattgaatctgtcctccgtgggtgtgaccgcagacgattaagtctatgtcggttttctttgcatcctcggcaatgtattcgggctggtggtgcagaagaattgtgaaattgttctttgctttttcggcaaattcttcccacagcgttcttgacggaacatcgtcatcgggagtgtagaactcgtaataagggtagtcgctcattccgccgataagcacactcttgccgtttttggtgaattttatgtattcattatcgagcaatacagcgcctgttgaatttgtttcgcttttaaaatccgttccgaattcggcagcattgtcacgctcatggttgccgagacagcagtatgtgggtgcaatttttgaaagcttttcaagcacatctttcatctttgttgtgtcgggatcgccacggttgaccatatctccgcaaactgcaataaaatcgggattttgttcttttacaagctctgcaaggtctgcgttcttttctccgtattccttgttgtgcagatccgtgatgacaacaaatttcagctttgcgtcgttcttagtattgtttacacagtaatttgtgattgcaattgtgttgtcacagtaaacgccccatattacgagagtcacaaacagcacaagtattattgctccgaggattatcgaaaaatttttcattcaatttaccgcccatattaagtatggtattattttaggctcgttttgtgcggttgtcaacaaatgtgtgtcgaacaagtctgattattactgctccttgtgctttgattgtcggattttaagttgatttaggaattgctttgtttgacattccttttgcactgttgtataataaatcataattgtatttatatgttactcgggaaatttacacaaagttaaacagaagaggtatgggttatgaagaagattaatttgcgtaagatgtttctggctctcgcagatgtgtttattatcgttgtcagcggtattcttgcaaattatattctcttgcttgtcggctacataggtactgcttcaagcaaaggcttgttgagctatattgttattgatcttgtcatgtgtctgtttacgctttatataagcggaacatattcaaaattgtggcgatactttaacgcaaaggactatattgtgtgcggaactgccgtcttttcggggtttacgctcggctttgtaatctcgttgtttttgcagattccgcagagaaagattttttgtgtagtacatttcgcaatagcccttgtcggaattcttgcattccgttttgttttcagaagggcttttcttgaccttaccgaggcaggaagggcagagggcggagagcgcacccttattgtgggcgcaggcaatgccggcagaatgattgttcgtgaaattcacaatgcgaaagagcagaatgatgttaataatccttcaaaaagcatcattccggtatgctttgtcgatgatgatttgaaaaagctgaatcagaaaatcgaaggaatccccgttgtcggaacctgtcccgaaattgttaaaatatgtgatgaataccgcatagacaatattattgttgcagttccgtcatgtgaggaagatgagaaaaggaagattcttgactactgttccgcaacagagtgcaaaatcaagattattccttatctcggtgagcttttgtttgatgacgggcatacacagcttatttcacaggcaaaggaaatcaagattgaggatcttctcggaagaaaacccattgagtttgaccgaaaggagattcatgaccttatcaacggaaagatttgtcttgttacaggcggcggcggttcaatcggcagtgagcttgtaagacagattgcaaagaatgatccaaaacaaatcatcattgttgatatctacgaaaacaacgcatatgacattcagcaggagcttgtgcttgaatacggcacaaagcttaaccttgtaacgcttatttcatcggttcgtgattacgataagatggagcttatcttcaagacatatcgccccgaactcgtattccacgctgccgctcacaagcatgttccgcttatggaaaccgttcccgaggaggctgtaaagaacaacatcttcggcacattcaatgttgcaacccttgcagaaaagtacaaggcaaagaagtttgttatgatttcaaccgacaaggctgttaatccgacaaatgttatgggcgcaacaaagcgtgcgtgcgagatgattattcagtacaaggctcagcacagcaccgataccgaatttgtaacaacaagattcggtaatgttctcggctcaaacggctcggttattccgctgtttcgccgtgagattgaaaacggtgcgcccgttaccgtaacacatcccgatattatcagatattttatgactattcccgaggctgtttcgcttgttcttgaggcaggtgcaatggcaaagggcggtgagatttttgttcttgatatgggtgctcccgtcaagattacaacccttgccgagaaccttatcagaatgtacggtaaggttccgtacaaagatgttccgattattttcacgggacttcgtccgggtgaaaagctttttgaggagcttcttatggacgaagaaggtcttaagtcaacacagaacaagaaaattttcataggaaatcaaattaaaatagacgaaacagatatgctgtcaaagcttgaggttctcaaaaagaccgcagaaaacaatgacagtgaaaagacagttgaacttttggcagaacttgtacctactttttgccacaaggtcaatgattaaccgaaaaggagaaattttatgtgcggtattgtaggttatgtaggacctaaggattgcagtgaggtgcttgttaatgctctcacaaagcttgaatacagaggctatgactcggcaggtattgcggtttttgataacggagaaatcaagaccgtaaagaccaagggtaagcttcaggacttaaaggataagcttgcagaggtcggcactccgaaaggtcatgtcggcataggtcacacccgttgggcaacccacggcgagccttcggatgtaaactcacatccacacagcggtacaagggttacaatcgttcacaacggtattattgaaaactatatggagcttaaagacttcctcatctcaaagggaagaacttttttaagcgacacagatacagaggttgttgctcagctcctcgactataaatacaacggaaatcctcttgaaacaattgacagtgtaatggctgagcttaagggttcgtttgcacttggaattatgttcaaggatttccccgacagagtttttgcggttcgccgtgaaagtcctcttatcgtaggcgttgcagaaggcgagtgctttattgcgtccgatgttcccgcaattcttcagtacacaagggattattatcttcttgaccatgatgaaatcgtaacactttcatctgacggtgtttcgttcgttgacgaacaccttgatccgattgaaaaggaacttcagacagccgactgggatatggaggctgccgaaaagggcggttatccgcactttatgattaaggaaatcaacgaacagcccgaggctatcagaacaacgattatgccgagaatcaaagagggacttccgttccttgaggagtgcggcatcacaacggaaacaatcaaggatttcaaaaatatcacaattgttgcctgcggtactgccatgcatgcaggtatggtcggcaagtatgttattgaggatctcgcaagagtttccgtaaatgttgacattgcgtccgagttccgttacagaaatccgattgtaggcgagggcgaccttgtaatcatcatttcacagtcgggcgaaacagccgacagccttgccgcaatgcgtcttgcaaagcagaagggtgcaaaaactcttgcaatcgtaaacgcaaagggcagttcaattgcccgtgaggcggatatgctcatctacacactcgcaggtcccgaaatttccgttccgtcaacaaaggcatacatcacacagctttccgttatgtatctctttgcctttgagcttgctcttgcaaaggaaacaatcagcacagccgagtgcaagcgacttgtttcggctcttacaaaaatgcctgaggcagttcagtatgtaatcgacaactgcgaggatacctgcaagttcgttgccacaaagcttgttgcaaccgacagcttgctttacataggcagaggtcttgactatgccctttcaatggagggttcgctcaagctcaaagaggtttcgtacattcactcagaaagctacgccgcaggcgagttaaagcacggcacaatttcgcttattgacgaggatgttccggttatcgccgttgcaactcagacaggtattatccccaagacaatcagcaatgttgttgaggttaagtcaagaggcgcaaaggttattcttgtttgtacagacgcctgtgcaagagaactcaaggacggtgttgcggattatgttatcgaaattccgcatacagacgagcttcttatgccgattacagcggttgttccgctccagattcttgcttattacacatcaatcaacagaggtattgatcccgataagccaaagaaccttgctaagtcggttactgtagaataaaatgtgatttcgttcgggaagagagttcgcaaaatgcgagggttaagttgcccgaacggcagtcttgtttttaattgaaaattgaaaatggaaaattgaaaatttcggttggcggtgtgccaccgcagttaattcgagaagatagtcagataaagaaattgcattgatgcccgatacggcattgatgcaatttttgttttatatgaaagtgaatgtttatttatataattttaatttgtacaaatctttgcgtggttatctgcaggcggataatatccgcacatacagttttgcaacaacttccgtatataccgaaaatatacaaaaacagtcgggcgacaatgttttgtatttttgcgaattgtcttctcgaccataattttccattttacattttcaattttcaattttatgcacgctcgggcgtaatatgttctttaatatcatactgtattcacgaatagggtactcttgttttcaaatttcagcggtaaaaaccttgtatttttttgacagattatgtataattaattagatatacattctaaaaagcagtattgatgaatctaatttagtttcgggggaatatacggacatgatgaaaactgtttttaaaagagctgtaacgcttgcaatttgtgccgtaacggtattttgcggtatttttgcctgttcaggcgcaacaaaagattacgagattccgcagattgacgatatgacgctttcaatgcctgacggtatgagcgctgttacaagggacagtaaaagcacagataaatatttttccgttttcggtcttgattatgacacaacaatgaaaacctttcagaacggaaatatctatcttcagggtatggataatatgtcatcggttattctgaccgtgacaatgacaaaaaatgagagcagcgagaatgtcggcaactatgctcagctttcttcaagcgagctttcaaatatacgcaacaattttcttaattccgacgagtatcggagctgtactcccgaccaaaaagaaaaagttgtgtggcttgtgtttgacgcaactgctcagagcagtaagggcgatgtgaaaacctttattgccaacacggtttatgacggtatgaacattaatatcacaatgcagagaacagagggtgatgttacaaccgttgactacgatactttttccaaagttgtatcttcggtaaaattcagcgacctgccgttttcaaagggatttattccgtacataatcatcggcggcggtgttattatccttatcttgattgttctcatcataatttttgccgtgagaatcagaaagcataaaaaggctaagaagaataacgctattcttgaggagcttgcagtcaagtataaactcggtgaaaagggtacggactacgacattgacaattttgacgattctcccgaaaagcccgataaacactcaaagaaaaagcagagatatgcggaagaagttgaagaagaaccggctttgccgggcagaagatatgctcccgagccgataatcgaaaatatggaagaaccggaagaaattacaagtgagtattcaaactttggttatgatacggatgatgccaaggaaaaagaaattgacgagataatcaactccgcaaaggcttacaagagtgagcttgagcgtgaggcatataaaaacaactacggttacgaggaaaacagcacggaggacgaaaaaaaaaaggagcctaccgcagcagatacctcagagactgaacccgaaaaaattgacgaaaacgaaaaagataacgcagaaacacctgaaaaacacgaggacataagctcttcgtcgggtcctacactcgttatccccgaacccgaacacgatctttttgaaacaagcgagcctgacgatatcgaccgtgaggacgatgccgatgttgaagaaaccgaggaggtttccgaacaaaagcatccgcttgaaaaaaaggttgacaagtacgcaaacatcattttcggcagtgacgatcccgaggagaaaaccggggaagatgttgatgatgaggagcttgtaagggcaaaggctaagaaaaacaagtttgacagcggttatgacttttttgacgaagctcccaaaaagtcaatgggggttatcaaaagctcagacctcagagatgccgaggacgttgatgttatcggcgaggttgaaagaaaagcagaaaccgtaaagcagaacgcttttgaaaaagagaataataaagaaaccgagggtgaaccgaatgataaacggtcaacggaagaggttcttgccaatgtaggcaaaaacatcggtaacgctctcaggggctttgcaggcggagttaagaattttggcattcattgcggatatttctgcaagaatgtttcaataatgataaagcgtaagcgtgcaattgccaaacgcaaaaaggcagaggaagagagaagagagagagaaagacaaaaggcagagcgtgcaagaatgcgtgccgaaagaggcgagagtgacggacttgttcaggttcacagcagaaccgaccgccgcccacagcagaatcaccgccctgcaaacagaaacaagagaagataatttcttttcttaacggaggaaaaacatggaaatgctaattaaaaacgcagtggttgtttcccctgccgacaagcttaacgaaaaaacagatattctcataaaggacggtgtgattgccgaaatcggcagcggcattacatcagacggggagattattgatgcagacggtctttgtgccgttccgggatttgttgatatgcacgtgcatcttcgtgatcccggtcagactcacaaagaggatattatcacgggatgcaaggcggctgccgcaggcggtgttacaagcctgcttgcaatgcctaacaccaacccgacaaccgacagccccgaaattgtaaagtatattcttgacaaagctaaagacgccgacagccgtgtttatgttgcggcaagcgttaccaaggggcttaaaagcgaagaacccacagacattgacgctgtgaaaagtgcaggtgcaatagcacttaccgatgacggcagacctgttgaaaacacaaagtatttgagtgacgcaatgaaaaaagctccaaagctcggcatgacaattgttgcacattgcgaggacttgtttcttgccgacggcggtaaaattaacgagggcgaggtttcggaaaagctcggagtcaagggaatccctgccggtgccgaggactgcggaactgcaagagaaatcgcacttgccgccgctcttaacgagcctattcatatctgccatgtcagcaccaaaacaagcgttgcacttatccgtgatgccaaaaggagaggtgttaaggtgaccgccgaaaccgctccgcattatgtttcgctcacggatagggagcttttaagaggtgacgctgattacagaatgaatccgcctctcagaactcaggctgatgttgacgagattatcaacggactttgtgacggcacgcttgatgccatagcaaccgaccacgcaccgcacacacccgaggaaaaggctgattttgtaaaagcccccaacggttcaatcggcatggaaacctcgtttgcggtctgcaacacatacctggttaagacaggcagaatgacgctttcacagcttgttgaaaagatgagtgttaatcctgcaaggattttgaaaatcaacgcaggcactctttcagtcggtgcaaatgccgatgttgttcttataaatcccgatgaagaatggacagttgatgctgataaacttcacggcaaaagcaaaaacaccccgtttaaaggcagaaccctcacaggtaaagtcaaaaagacaatcctcggcggtaaggtagtttttgaggattgagtttgttttaattgtagatgttgatacgattaaaattgtgcaaacggtagctgtactacgctcgggcataaatgttttttatttgtcaaactgtctgcacgaattggggacggcggctcgccgtgttcgctcaccaaataaatttaatttaatataaactttaacatgaaggagtaaaattatggcacagaaaggcgacctcctgtcggtaagacaggatatcagagtagtagacgcaacaatccgtgacggcggtctttgtaacgatttcagatttgacgacaaatttatcaaggctctttacaatgcaaatgttaaagccggtgttgattatatggaattcggctacaaggcatcaaaggaaatctttaacgaagaagatttcggtaagtggaaattctgtaacgatgcagatatcagaaaaattgtaggcgacaacaagacttctcttaaaatcgctgttatggctgatgtcggcagaacagattttaagaaggatattatcgcaaagaaggacagcccgattgacctcatcagaattgcaacatacatcaacgcaattcctgcggctgttgaaatgattgaggacgctgcaaagaagggctacgaaacaacaatcaatattatggctgtttcaaaggcaagaaccgaggatattacagcggctcttgaaactctcggcaaaactcccgtaaacgctttctacattgttgacagctacggcgcactctatcccgaggagtcaagacgacttgcagacctttactgctcaattgccgacaagtacggcaagtcggtcggtattcacgctcacaacaaccagcagcttgcttttgctaacacaattgaggctatgactcagggcgtcagctaccttgacgcaaccgttgacggcatgggcagaggcgcaggcaactgtgcgcttgaacttctcctcggtttcctcaagaacccgaagtatcaggttgctcctattctcaaaatcattgaggagtacacccacaagtttaaggctgagggcgttaagtggggttacgatattccgtaccttctcacaggtcagtacaacacacatccccgtcctgcaattcagttcgtaaaagaggacagacaggattattacaagttctcaaatgaactttatgatattattaacagctaaaaataataattcgtatgggcgaacaacagcattgtaaaaaagatattgcagtcgggatatgaattgtttgcccgaccatagaaagaataacaaaaaatgaggagaatcactatggcatttgacagacttatcgaaaatattgtaaaaatgcagaatcctacggttgcaggtcttgatcctaagcttgactatgttcccgaatcaatcaaaacaaaatgctttgaaaagtatggcaagacgcttgagggtgcggctgctgcactttttgaattcaacaaggcgcttattgacgcactttatgatattgttcctgccgtaaagccacaggctgcatattatgaaatgtacggctggcagggtgttaaggctctttgcgacacaatcgcttatgcaaagtcaaagggtatgttcgttatcacagacggcaagcgtaacgatatcggcacaactatggaggcatatgctacggcacacctcggtcatacagatgttgcaggcgaaagtattgacgcattcggtgcagacgcactcacggtaaacggctacctcggaacagacggtatcaagccgcttgcaaaaatttgcgattcggacgacaagggcatttttgttcttgtaaaaacttcaaacccaagctcgggcgaacttcaggatatgaagcttgaaacaaatgagagcgtttatgagcatatgggcaagatgtgcgaaggctggggcgaagaccttatgggtaagcatggctattcggcagtaggcgcagttgtgggtgcaacatatcccgaacagctcggtgaaatgagagcaaaacttccgcacacattcttccttgttcccggttacggtgctcagggcggcggtgccgatgatgttaaaaacgcatttgacgaaaacggtcttggtgcaatcatcaactcaagccgcggcattatgtgcgcatggaaaaagcaggggcttacagaagatgattttgccgttgccgctcgtaaagaggctgagcgtatgagggatgaaatcgttggctgtatcggcaaaattaagcttgactgattcatttgcacaacagaatcacgaaatttttcgatttttatgctttagtgctatgaatttgttgactttagcgtgctaaaagcgtataatttaggtgtatttatttttacaactatatttttaaattttctttaaaaagggagatatcagaaatggcaagagtatataatttttcggcaggtccttcaatgctgcctgagtctgtgcttaaaaaagcagcggcagaaatgcttgactacgaaggcagtggtcagagcgttatggaaatgtcacaccgctcaaaaatttacggtacaatcatcgagggtgccgaggctcttttgagagaggttatgaacattcctgacaactacaaggttcttttccttcagggcggtgcgtcaacacagtttgcggctatccctatgaaccttatgacaaagagcggtaaggctgattatgttatcacaggtcagtgggctaaaaaggctcatgcagaggctgcccgttacggtcaggctaatgttgttgcttcatcggctgacaagaccttcacatacattccaaagcttgatccttcaacattcacaaaggacgctgactatttctacatttgcatgaacaacacaatttacggtactgtttatcacgagcttcccgacacaggtgatgttccgctcgttgcagatatttcttcctgtattctttcaagaccgattgatgtttcaaagttcggcgttctctatgcaggcgcgcagaagaacatggctccggcaggtcttacggttgttatcgttcgtgaggatcttatcggcaacgctatggatatcactcctacaatgcttaactggaaaactcacgctgacaacggttcaatgttcaacacaccgccttgctacacaatctacattgcaaagcttgttcttgaatggattaagaacgaggttggcggtcttgataagatgtatgaaatcaacaagaagaaggctgaccttctctacggtttcctcgattcttcagagcttttcaagggtactgttgttcccgaggatcgttcgcttatgaatgttccgttcgttacaggtgacgctgaccttgacgctaaattcgttaaagaggctactgaaaacggtcttgttaatatcaagggtcatcgcacagtcggcggtatgagagcttcaatttacaacgctatgccttatgagggcgttgaaaaactcgttgagtttatgaagaagttcgaggctgaaaacaagtaattattgaatattatgatataacgggcgaacgctgttcgcctgttattgtaaattcttaaaataaaaaattaaaaaggattgattttgatgtataacattcttacattaaacaaaatcgccgctatcggcacaagccgtctcggtgataactataaatacggtgacgatgttcagaaccctgacgcagttcttgtaagaagtgccgcaatgcacgatatggaatttgccgataaccttcttgcaattgcaagagcaggcgcaggcacaaacaacattccgaaggataagtgcagcgagcagggtattgttgttttcaatacaccgggtgctaacgcaaacgctgttaaggagcttgttatcgcaggacttcttatttcaaaccgtaaggttattgagggttatgaatgggcgaagactctcaagggcaacggtgcagctgtcggtaagatggttgaaaagggcaagagtcagtttgtcggtcccgaaatcaagggtaagactctcggtgttatcggtcttggagcaatcggtattcttgttgcaaatgccgctgttgctctcggtatgaatgtaatcggctttgacccatttatgtctgttggcaacgctctcaagcttgctcctacagttaagctcatgaagagcgcagaagatgttatggtaaattgcgactacctcacaatccatgttccgcttactgacgacacaagagatatggttgatgccgatatgattgccaagatgaaagacggtgttcgtattctcaatttcagccgtgacggtcttgttaattcaacagcagttcttgaggctgttaagagcggcaaggttgctaagtatgttacagacttcggaacagacgatatcctcggtgaagagaatattatctgcctcccacacctcggtgcatcaactcccgaaagtgaagaaaattgtgctgttatggcttgtgatcaggttaaggagtacctcgagaacggtaacatcatcaactccgtaaactatcctgcaatttcacttgcaagaacaaatgctgacgatacccgtttctgcgttgctcacaagaatgttcccgagcttctcaagaaggttctcacacagatcagcggcaatgttgaaaatatgctttcaaagagccgtggcgactatgcttacacaattattgatgttgcaggcgccggtgcagatgaccttgcaaaaatcgcagcagttgacggcgtaatcagagttcgtgcaatctgatttcgattttaattgagctttaatgttgtaaaaaattatccgagcattgttttgatgctcggattttttgcgtttatttgtacaaatggttacaatgctacactcgggcatgatatgcctttaatattacaaactgtctgcacgaacggggagcgatggtacaccgaccaggtggtattttttggcattggcaattataaatgttacggaaattgcaacggcacacaattctgcaacgggcaatgccgaccatacaccgtttatgcctataaacatcggcagaatcagcattgcggcacactcgaaaacaagcgttcttgcaactgaaattacggctgaaatcttgccgttgttgagtgcggtgaaaagtcccgatgcgaaaatattcattccgcacaacagataatttattgcaaaaattctgaatccgctgagcgcaatctgctggattttttcgtcgcctgccgagaaaattccgacaagcggttctgcaaaaaattcagatgccgtaatcattgcaactgaaattatcagcgtgatttttatgcataatttgaacagcttttgcagtttttcgtggttttgtgcgccgtagttaaagctgatgacgggtgaaactcccgaagtgaatccaaacgaaaccgcagtgaaaataaagtgaatgtacaaaatagcacttatagccgcaacgccttttgcgcctgcaaagtgcatcatctgaatgttgaacagtgctgttgtcacggctgttgaaagatttgtcacagcctctgacgagccgtttgccattgcaaagaggatttcacttaccttgaattcaggcttaccaaagtgcagagtttgcttcttgttgaaaaagagcaaaagcggaattgcacccacagccattcctataatggtgccgagtcctgcgccgattattccaaaatcccacactgccataaaaagaatgtcaagcacaatgtttgtgcaacccgacagtatcgagaaaacaagcatgatatgtggcttgtctgctgttacaaggtacgattggttgagcatttgccagcacattacaaagccgtacggaatcataacgctgccgtagtcaatgcagtaggggagaattttttcgtttgagccgaacatcatgtacataggttcggcaaaaattgtgaacagcacagcaatgataacagaaatgaccgttgccgtgattgcaacaccggacataagtcggtttgcttcctcctgtttgccttctcccattttctttgcgattatagcatttgagcctgttgaaaacattaagcccacagccataaatacgagcgtgaacggatatacaatattgattgcagacaatgcgtcacttccgacacagttcgcaacaacgattccgtcaacaaccgtgtaaagtgacataaaaaccatcataagaacggttggcagagtgaacttcagaatcgtttttgctttgataggttttgcataaattgatgttgccataaaacttccttaccctcaaatttatatttttcacagaccatttaaatgattgtatcataactttgtcgcaattacaactgatttgtctttttttgtaaaatatgctattatatacagacttaaaagcgaaaaaaggggcggttttatgtttaagggcgcagtttttgatatggacgggcttatgattgacagcgaaaggcttgtttattcaatctggcaggaaatgcttgatgaggacggcaaagagtttaatctcgacattttcaaaaagacaatcggacttcgcagtgaggattcctacgaatattacaagtcggtttacggcgatgattttgactatcctgcttacaaggcggagtcgagaatccgctattttaagcgtatcgaaaagaacggtgtgcctgtaaaaaaaggcttgtacgaaatttttgattatttaaaatcagtcggttgtaaaatttcgcttgcaacttcaacctcgtcacaaacggctttgaagattatgaagaaaatcaatctctatgataaatttgacgcattcgtgtgcggtgatgatgttaaaaacggcaagcccgatcccgaggtttttttgattgccgcaaagaagctcgggcttgagccggtggactgcgttgcgtttgaggacagcattaacggcataaaatctgcacatgccgcaggtatgaccacggttatggttcccgatttgtcagagccgacagacgaaattaaaccgatgatagattttttgtgtacggatttaagcgaagcgataaagcatttataaattgaaaattacggtgagccgccgttcccaattcgtgcaaatttgaatacacaatttatgttatatcaaaacatatgtgtatggacataatatttcatcaaggcgggcgtccaatgaacgcccctacagagaaaattacaaataattacaaatggttacaatttacaaaaatacaattgagcagggctgattattatacacattttccacatagttttcaacaattgttaaaaaagaacggcaatgcctgttgagcgttgctacggttactgcggaaaagggaaaaattaaaaataatcattgaataacagcacgataatatgttatactttggtaaacaacaatctttacggaggacaaaatgaagaaaattataaataaaaagtcactcaagggtgcgcttgctgttatgttatgtgccgttatggcgttttctgtctgtgcctgtgactttgattctgacacagaaccaaccaaaacggatgcacaaattcagttcgataaatattgtgacgatttgttttcggaagaacttgaggatgacgctcttaccgcacattttgacatttcaaatccgtcggactacggtctgaaatatgacgaggaggactataccctcggtcatgtgtccgatgaagatacaaaagaatcctttgatgaactgaaaaaggcaaaaacggatttggaggagtttgaccgttcgggacttacttcttctcaaaagcagacatatgacacccttgaaagctactttgaaattcagctttcatatgagggtacaacagaattgcagagtatatttgcaccgcagtcgggaattgttgcaaacctctttaccaccctgtccgaattcactttctatgaaaaggatgataccgacctttaccttgctgttttgaaggacacaaaacgctatatggacgagtgcattgagttcacaaggaaacaggctgaggacggttactttatggctgaagatatcgcacagcagtcaattgacgagtgcgaaaagcatattaagaatgacaagtccgtgcttgttgacgagtttgagtcgagaataaagtcactcggtcttagcgattccgagaaaaagactgttgtagaaaccaacaaaaagtattttgaagaatactacattcctgctttgaaatcagcaaattcagcacttgaaagtctcaaaaaatcaggcaaaaacgaagaaggtctttgcgggtacggcaaaatcggcaaaaagtattattcggcaattgtcaaagacaaaacaagcagcagcatgactcccgaggagcttaagtcataccttacaaacagctttacaaaggttggaatgagcatgagcaatgtttcacaggatgacttgagcaaatttcaggactacaaacccgactttaaggacgccgatgaggtgcttgaatttttgattgagaatatcgaggaggactttccgactcccgttacaacctcttacacggcagattatatgagcgattccgcaaagagcgacaatgtgggagcgtactatgttcagggacgaattgacgatacaagcgttaatatcatcaaaatcaaccccgactttgcaaataagggtatgactcagatgtacacaactcttgcccatgaaggctatcccggtcatctttatcagtttaccgcatcaaatgcaaacaaggatatcccgaatgtccgtaagattttaagctttatcggcgcaaccgagggttgggcgcagtatgcctcgaaatgtacgcttgattaccttgatacaagcgagggcattaagaagcttatctacgcaaatgatattctcggctatattctctattccatggtcgatgtcggtgtgaactacaacggctgggattatgaaaaagtcaaggagtatatgtcaacggcactcggttcggctgacagcgagagcgttacagccgcaacaaaagaggcgtatgaccttgcccgttcaaatccgggttattttctcccctataccgtaggctacctcaagatgattgatatgcgtgaaacagccgaaagcgagcttggctcaagctttgacgcaaaggaatatcacacattcattatgaatctcggaatcacaagcattgatgtctatgaaaaagcccttgatatgtggcttgaaagcaaaaagtaaatttttggtgataatcttgaatattttttacaggtatgatataattaactcattgatatgataaatataaattggtatggatttttctaagatgtgattcttattttcgccatacactcgttacgggtgtgtggcgatttttattttacgcaaggggtgttaatatgggcgttaaaacggaaaataaaatggcttatgaacctgtcaacaaacttataattcaaatgtcggcaccgccgctgatttcaatgttctttcagtattcatacaaccttgttgacagtatgtttgttgcagggataaatgaacaggcacttgcggcagtatcgcttgcattcccgattacaacgcttatgaatgcgttgtccgtgtggataggtgtgggtgttaatgttttgattgcaggttatttgggacagaaaaatcagcaaaaggcaaattctgcagcggctctcggagtggtaatttcggtagttgtcggagtgctgataaatttcctttcgcttttcataataaatccctattattcggcttttacgcaaaacaaagagatttttgaatacggaattgcgtatatgagcgtctgcgtttttatgcagataccaaatatggtgcatattgtaattcaaaaaatacttcaggcaacaggcaatatgattgctccgatgtggtttcaaattgcaggtgttgtattcaattttgtgtttgaccctttgctcattttcggcataggtccgtttccgaaaatgggtgtggtcggagctgcagttgccacggttttaggctatgttgtttcaacaatcattgcgttgatacagctgtttcttacaaaacaaaaggttaagccggtgtttaaaaactgccttgaaccgcagatgataaagctgatattttcctacggattgccctcgtttgttatgaatgcgttgggagcattcaccgtgaattttgcaaatatgtttttggtgcgatattcggacacggcggttgcatttttcggagcatatttcaaggttcagcagttgatttttatgacggtgaacggactaattcaaggctgtttgcctataatgcggtttaattacagagcaaaagagtacggtcgccttaaacaagcaaataagagcggaacaattatcgcgactgttatgatgattgtcggtatgctcttggtgctgattttcccgaaagagatattgtttttgttttcggcatcggaagaaatgtgtgcttttggagtgccggcaatgagaattatgtcactcggatttgtgttcagcggcttttctgcaatgattgcaacctatgaacaggcaacagacagtattatgcccggcgttgtagttcaactgttgcgacagggcgtgctgttagtccccgtaatttggcttttaaacagagctgttcaaatgacaggcatatggcttgcgttcccaattacagaatttgtcacatttcttgttgctgttgtatttgcaaaaattaaaaatcattgaataaataaaaataacaaccgccaaaacccgatataatggattttggcggttgtttgttatttaaaatatgtttaattttaaattgtttttgcaaaaacattatcagatgattttgctctgaaaattgtttttacgagcaggaatgttatataaacataaagtgcggtgtagatgattgccgtaaatttaaggtttataagctcgtaggagaacagatagtagcaatagcctctcaggcttataagcgttgacacaatcggaatccacaaatgttttgcacttaccgccgcatagacaattaaaataatgtcaagcagataaccgtagcgttcgtgcattgacgaaaggaacatgatacaggtgaacacagtccacgctgttgtcagaagaaaagtttcaaggtttttcaaatcaacctttttatagatgataatgcacatcataattccgagtacggcaattgtcagaaagaccgaaaactgcttgaacagataataatatgtcatatcgtttccgtcacatatgagtgcataaaagttcggacagttcatctgaataagctttccgtagtcggtctgttccgcatatattgtgatgatatcgataaacggtctacccataataattgcaggcaggcacattatcacatcaaccgtagggattataaagaaatgcagaatcgaaattttctttgccgaaatccagtaataaagcagaacaggaatgatgaatacggtttgcagcttgaatgcaaacgcaatgccgatgaacacaaacgatacaatcggcttgtctttgtgcaaaaacaggattgcaaggattataaacgaggtgtaaattgaatcgcattgcgcccaaaacgatgagttaaaaataacggttgccgaaagaagtacggctgagtaggtgagtatcgctttgagccgtcggttattctttgcaaacgaataaacaagcattgcggttgaaattgcaagtacaaaatcgaatattattgatacgattttgtacgcatacagagcatttagcggcaaaagagtcataagatagattatgacttgatacggaatgttgtagttacccacctgagttgcaagccccgtaaaatcattcagcttgattatgctccaccatgaatttaaaaagctgttgaaatcatcgctttgaaaatccattccgcagactctgaggaaaattgcaataatcgttaccgcaacgagtaaaaataaaagaatgtgtttttttataaagtcaatgactttgctttctgcttttgtcatagagaaaattcctgttcgggtttaaataaaaccgattttcttcataaccttgcccattgtgcggctgctgattttaagggcaatttcatcggcttttctgtaacagctttcaagatatgccttgtctgcaacaagcttttcgtagcgttcacgaatcggacgaagttcttcaacaactgcctcgcctacagctgtcttgaagtcgccgtagcccttgccgtcaaaatccttttcaatctgctcgtatgaaagacctgtaactgcgctgtaaattgccataaggttatttacaccgtctttgccctccgcatagcgaacctttgcctcgctgtccgtaacggctctcttgaacttcttcattataacctcgggtgcatcaagaagatgtacacagccgttgacattttcatcggacttgctcatctttcttgtcgggtcctgaagactcataacccttgcaccgttctttggaatgaaaccgtccggaatcttgaacacattgccgtaaataccgttaaaacgctctgcaatgtttcttgtaatttcaatgtgctgtttctggtctgcaccgacaggcactttgtcagcctgatagagaagaatgtcggcagccatgagtacgggatatgtgaaaagaccggcgttgatgttgtcggcgtgctttgcagacttgtccttgaactgcgtcattcttgaaagctcgccgaactgtgtgtaacagctgagcgcccatgcaagctctgcgtgagtgtgaacatgactctgaatgaagaaaaggcttttttcaacatcaataccgcaagccataattgaagcataagcatcaattatattcttacgcataacggcaggagtctgtcttaccgtgattgtgtgcaaatctgcaagagcgtaaatgcagtcatattcgttctgcattgtaacccagttgcgaaccgcaccgagatagtttccgagtgtaattgttccgctgggctgtattgcgctgaatacaacctctttttttgtctgattttccattattcccctccgtgattaaagactgtttgcatactcgccgaggattttgattcctctttcaagctgttcgtcagtcggtgttgaaaagtttattctgaaactgtgacaggtttcgttttcgtcagttaaaaatgcgttgcccggaactacgcaaacctttttgagaacgagttctttgcagaaattcggcatatcaatatcctcgggcaagtcacaccaaatgaaaagaccgccgtcaattttatgatatgtgattttcggtgcgcagtatttgtcaagaagctccatgcagaagttcgctttctttgtgtagatttcacgaagctttgcaaggtgagcgttaaagtcatactttgtgatgaactcatcgcatacatattgtgcccagatgtttgtatgtacatcgttgccctgtttgcaaacaacaagcttttgaaaaatcggctttggtgcaattgtgtaagcaacacgcatacccggtgaaattacctttgagaatgaaccggcatagattacaattccgtccgtatcaaagctttttatgttcggaacatattcaccgctgtaacgcaggtcgccgtacgggttgtcctcaatgatgagaacaccgtattttttggcaagctcataaaccttcttacgcttttcaaggctcattgtaacacccgaaggattttgaaaattcggaattgtgtaaatgagctttgcgttcggattggcttttaaagcctcttcaagcttttctgtgctcataccgtcaggctcaacgggaacacctgcaagctttgcgttgtagcttctgaatgtgttgagcgagccgatgaatgacggtgcctcgcagattacaacatcgccctcgtttacaagagcctttgagcataaatccataatctgctgtgcgcctgttgtgatgagaatgtcgtcattgtcggagcctgtgttatgctcctttttcatatattccgtaaggtgctttctcagcggagtgtaaccctccgaaacgctgtactgtaaaaccgaaatcggatcttctgcaaaaacctttgccgagatttccgcaatctcctttgagggaaatgcatcgggcgacgggtttcctgccgaaagcgacacaacgctcggatcggcggcatatttgaaaatttctctgatagcactcggcttcaggcttgaaaccctgtcggaaaacctgtattccataaaaatatctccttttaagatgataaggattttttaaaattccataccctgtaattctatcacgaattgcatatatgttcaagaaatttgactgtttttactgcgattttattcaaaaaatgtgtaatttattattttgcgtttgtaaatgttaattcacggaaattgtattttttgtgctttttgtattgtttttgatgagtttctgttgtataatctaagtgataatgtccttacggtcagagcaaggcttgctttgattcaaacaggagtacactgcgagtaattaatacacttatatattcattgaattcaaattgaatttaaaaatcttcagtttgggagagtaacactatgagcagaagaaacgattacgattattttgatcttgataatttcgatgacagcattgattcccgtgaatatcgtcgcagacagcaacagcgccgtcctgcaagctatgccgcaagaccgtcatcacagcgtcccgtcagaagacctgtaaaaagaagaaacaaaagaagaaccagaaacagaattattatcgttgcgagcgcattgataattctgtttgttattatttttattataacttcaatttttaagggttgttcaaaggaagatgcccttgcaagcgttcccacgggaacagtgggtacaacggcatctcccgacgaaaccgcaaaatcttcgactgctaacaaagcagacgagctttcccctacatactttatgacaccgagcataaaggacgacaataaaaacggaactctttcatacagcatttatgtgtggaacaaaacaggctacgaattgttcagcagtgatgatgcaagagcacagaactatgctcagacgatcaacggctttgcagacaagttcggcagctccgtaaaggtttatgatatgattgttcctaaccataccgaaatgggacttccgcaaagactcaaagacagcgacgctccgtcaacctcacaggctgacaacatcaaggcagcttatgcggctctttccgacaaggtaactccgattaactgctacaaccgtcttgcggaacataatacagattacatctactttaagagcgaccaccattggacaggcctcggcgcttactatgcttacacagcatttgccgatacaaacgatttgcccgttctttcgcttgatgattgcgaggaacagaagattaacggctttacaggctcgtttaccaactcggcagacggtcttgacagcgatacggtaagttattggaagttcccttataatgtaacaatggatatcacacaggcagacggttcttccgcaagctatgacagtccctactatgaagccgcagagggcggttcaaacacctacggtgtgtttattatgggtgataatgccctcacggttctgaaatcagcttcggaaaatgcggcggcaggcaagaagattgccgttgtaaaggaaagctacggcaacgcttttgttccgtatctcacaaataactacgaagaagttcatgttatcgacttcagatatttcaaacagaatcttgttgattactgcaaaatcaacggaattgacgaggtgctttttatgaacggtgtaatgagtgccaacactcaggttcagcttgacagtatgagcggactttttaactga

SEQ ID NO: 79 - DNA, 25755 bp, unidentified
  source 1..25755: mol_type = unassigned DNA
gcgctgaatgactgttttgcggtctttgcggtaaatgtacaggatgttctctgcacaaaggtcatgcttttgaaagtatgtgttcagatcggtcatagaggcgctcctttttcagttgatgtgtccagtataccacaccatggcaggaggcgcaagaagttcattaaagtttgtttaatcatgatgtttattcaacctgttgcgcaagctcttctaaaaagtcgtttttgcgttgtgcatcttcgatatattattgacttttaaatgctgttcgtgcatgatacggaggaaggtcattacaccggcggcatcgtcgcttttggttacaagcgtgtcaagaaaggtcgtttgaataaaaggaatcaagaagtttgtgagttggaagtaaacgaggaagaaacggcaatcgtgcgcctgatctttcagaagtatgtttatctgttcacatgggcaagcacctataagggtgctagttttgaaaggcgtcaggctattttgaaacagtttatgcgaagaatcctgacaagacgaacaggggagagctggtcagcagctacgagtgtagccccttgaccgcagacgaagaatttatgctgtccaagcggcaatacgaacttgctaccgggcgcagacagaaaaatgatgtgatcgcctatcagattcggcaatcgttcaagcctggtgagatcaccgccgaggaagccaacaaggtgggctacgaactagcaatgcgctttaccaaaggcaaatatgcatttatcgttgccacccacacggacagaaaacacaacacattatttataactctactgcgctggatggaacacgaaaattccgggattttttcttttcagcgttggcagtgcagcggttgagtgacatgatctgcttagaacatcagctctccgtcattgagataaagccttaccgggagcggcagaagcgcacgctctacccgcccaaagaaagtaatcgtgaccggctatgcagtgtaatcgacaggattctggctgaaaagcccaaggactacgaggagtttctgcaaaagctggagcagcaaggctatgaagtcaaacgcggaaaatatacctccgtcaagggcgcacggcagaagcgatttatccgattccgcactttgggggcagggtacagcgaggaagagttgaaagctgcccttgccggagaagcggagcatcggcctcggcaaaagtgcccggcaccggagcagaaatttcagatgctggtggacattcaggcaaaactagccgagggaaaaggcgcgggctttgcccgctgggcaaagcagcacaacttaaaagagatgtcccggacgctggttttcctgcaggaaaacaaaatcggcagcatcgaggaaatgcaggagcgcgtggacgccgctactgcccgctatcatgaactgggcgattccattaaagcatcagagaagcggctggcagaaatcgcggtgctgaaagcgcacatcatcaactacgccaaaacgcgatctgtctatgatgcctatcgcaagaccggatacagcaagcgctttctggaaacgcaccgcacagagatcacgctgcacaaggcggcgaaagcagcgtttaacgaatccaatttgaaaacgctccccaaggtcaaagagttggatgcagaatattccaagctgctgacagaaaagaaagcgtgctacccagactatcgcaaagcgaaagaagaaatgcaggagcttcttcgagcacagaaaaatattgagcttttcttcgatgaggaaaagaagccagagcaaaccgaacattccagataaacaatacgaccctgagaactttgccgcttatccgacagggttctcagggccttttttgattattcctcagtctgtactcggaacagcatttccggtgctttcaatttgtttagcgatcatgctttccagttcctgcgtgatcgttgcacaatttgcaacacggtaattccagaaataagaaacaccttcgcactcttccacggacaaatcgctgttgaccaaaagcaagctttctggtgtcacgttcagcttttcgcacagagaagcatactttccataatcaatgcttcgactggaggatttggcttctacccagaaaaattttccattgatggagaacacgacatccagctcatgcgtgttccctgcggatgccgtttctgaaagaaccacattggagcaaaccgaaacttctgcgccctgctcctcttgatagcggttcaggatctgctgaacctgatgttctacaaaaagctccagccactttccactcaaaaaatgccggacggtttcgttttgcgcaagttcatagacgatattctgcggataaatcacaatggctgcaaaaagccccattttgtcccacgtctgagcaatctctgaaagtgtggcaaacgattttttggacgcaccctttgggatacggaacgaaaaagagccgtcgctctgcatatgtgttcggataaactgcaagaaatccaccaccaccgggtcgcaaagagcctcgcctgttttccatgccatccgctgaacagcaatcggtgggagtttttccggcacgacctgctgaacgattttatacccacagcgttccagatgctccaatgcggtcaaaggcttctggatttttgctttgacttcgggcttttcggctccggatgtgttctcggccagatagttgaacttccatccgtattcccaagcaggcgaacgggtcagtactccgaccgcatgaaatccgctgtcatgctcctccatcggaaatgtgaacttgttcttatgaacattgatttggagcgttttgtttttcagtgctttctgataagcgtcaagaaaaaattcctttcccttatacgctagctcactggaattatttgcagaaagaccagcattttttgccaaagagagaagcagacaagtcgctttgggcagttcaaggatctgttccatctgcgcaccgtccggaatatttgcattatcggactgcgacgattcgtctgccggaatctcctttgctggtgcagaaacctcgggtgccttttttgaagcagtctcggattttccagacttgggcaaaggctttggctccgtgtaaacttccgcaatgaatgattcataggaatcgatgcacggaagttttcctgccgctgcaagtcctacatagattgcagccgcccgcgaggaatcgccataatactttttagaatccgctgcggcagcaatatcagaaaaggcattatatctgctcagttgcgcagccttttccgggaactgcttcaacgcacggcagtagagccactcaaaaaatgagtccgggtgcggctctatcggatactcacttccttccagagagtagcgtagcaactttccattggttcgcagccgagtgtccttatggactttggatggcgcacaggtcagaaggtcagcgaatggaccaccatgttcaaataccatggcggcttcaaaaaccgtgctgatgggcacatcctgcgcaacagaatccagacgcagcagaagccgcagagaagaaacagcctcaccctccggctgagcggatgcagtgctgacttccagaatggaaacatccgggtctgttgtatggacggcatcatggacggcacggatattctgccgcttgctaccttttatccatgtgaacgtcaccggctgttctttgcaataggggtagccggatatgggaaaacaaatggttcgtgtagccatgaacacctccaactttttaggacaaacaggcttatgtaaatcaagtatagcacaattccggatgtgctgcatagcactattatctgcttccgggaatctatctgtgcaaaaagtgccgataccacaggcatcggcactcagatcaaaaaagcgttttgcaaaaatgcgcagcctgcatccaccggatgcagaacacaaggggtttgggcacagcccaacaagcattttgaatttggattttgaaaaatccgattcaaaaatcgcaagttggtaccaagttgcactgcttgcgacgtagatgtttccatcaacgactgcgttagaattttcaaatcacttcagctttgcgaggatatcgtctgcactcacgccactggccagcagctttttcagaacatcctcggcttcggctttctttgcggattccgctgctttggtttcagctttgacctttttagcttcgattctggcgatttccttgtcgatagattttagctctgccttcttggttttcaggtcagctttcagtgcgtcgatgttagcggtgatggatgcgatttcagcggcagcggcttcctttgcggactgcttttcagcaatctgtgcagcaaagtcaacggttgcttttacggtcttggtcttgttcttgcttcctttgggacggggcataggggacacctccaatgttttttgatggtttcagtataacacgcgttttttgtgttcgcaagaggtgcattttgtagaaataaaaatatatctatgagtgaagtaataaatcgattttggaatatgcaccggcgtgggttgccaacttgttggaatgtatctcccgctggtcgtagaactgttcaaagcgtttggcaacggcatcttttacagtcattgataaagttcaactcactatgatgctacagaggttcgtgcgctatgcatacgcatctgcgtatgctgcaaaagtattttatgatacagagaatgtgcagccgcgtaatggcaaagaatatatttaataaaaaaagtatcctccatagtgaaaatggaggaacagtgtataaatcgtgcgctattacgttatatttagcgcatccctgcccctcatggacacctgatgggagaaaattcggttcatctcccggcgctttcgggtcaggtcagagtgcacatagcgctgcaaggtgatgttggcgttagcgtgacctaacaattcgctgagggtctttacatcgcaccccgcctgcagacaggtcgttgcaaaggtatggcgcagcgcgtgtggacgtacttgccggacagctgcctgcttcagatatgccttgatgcttttccggtagcagcggggttcggtaggcttagactcgttgccggacagaaaccatgtagaattactggcgtttccgcgcagctttttcaggataacaagcagctgtttcgggattggaatttctcgacgtgaggtgcgggtcttgggcgtttgaatgactacctttgtatgaccgtttccacaggaaattcgacagaccgtccgattgattttcagtattccaagtttcaggtcaaaatcaccccattgcaggccgcaaatctcaccaatacgcagacctaattcaagtcccaatagtagtcccatcttgcgtgctgttggattctcctgcgcatattgataaagccgttgctgttctgacggggagagaggtgcagaaattttgtcgatagcttttggcagtgctacttccagttccatcggacgaatcaggcgtaaatgcgcggcatatttgcagatgcggcgcagcatcgagaggcattcccgggcagaggagtttcccagtggcttgtgtacggcatccgtaggcgtgatgatctgctgcatggcctgttccagaaagctctcgtcaagggacgcaacaggcactttgctcaaaacagggagaagatacttgtgcagtgtgtacgaataatgcgcataggtggattcttttatactgttccgcagggagtgcagccatacttcagccagtgcttcaaaggtcaggtcggttctctttagattgtagaagcccgcttccgctttcttctgaatcagcacctgcttgacctctgcataaaccgcgccatagacgtagccccactggattttgccctccggcgtgcgcgccttgatgtaccgaccttaccaccgaccatccttgcgtttgtgaatgttttctccccgtcgtgccatttctgtttcctcctgcgtcttggacacccatctgaccacttattctgtccaccttcgtttttagccggatttttcatgcagaactgggcaaagtgaaaaaaactttcggcttctgcgaggttttttctaaggtcaggtgggatacatttgtatggttttctattgattcccagatataaccatgataaaataatagggagaatcaaacaatgatgtcgaaagattggtatcctccattttcactgtggaggatacccctttatgcgggaaggggtgaacaaggtggcattgcgcctgtttgagcacaacgagaaagcgtatcgtgcggcagtccggatgatggagcagtatggcaaggccgccattgttcatcccaccggcaccggaaagagctacattgcgttcaagctgatcgaggacaacccggagaaggtcgtaatctggctttctcccagtgaatacatcttcaagacccagctggagagcctgaaaagaaacgacccggattttccgctggcaaacgttcacttttatacctacgccaaactgatgtgctgcacgcaggcacagctggacgaaatagcggcacagaagcctgcctatattatactcgatgaattccaccgtgccggtgccgaatgttggggcgaaagtacggtggctttattaaagttatgcccggatgcaaaactgctggggctgacggcgacgaatatccgatatctggacaataaccgcaatatggctgaagaactttttgacggacatgttgccagtgagatgacccttggcgaagcagtcgtcaggggtattttgcctgccccgaaatatgtgaccacagtttatcagtatcggaaaacgcttgcaaagtatcaggcacgggtggacaacctgcgaacaccgggcattcaggatgtgaatcagaaatatctggacgagctgcgccgcgctttggaacaagcagacggtctggacaaggtctttgcccatcatatcacaaacaaatctggtaagtacatcgtgttctgcgccaacaaggagcatatggacgagatggtgtcccatgtgccggagtggttcgccggggtaaacccgaatgttgtggtgtatcaggcttactcggatgacccgaacacggataaggtctttgcggacttcaaaacggacaccggtgacaggctgaagctgctgttctgtatcgatatgctcaacgagggcgtccatgtagaaggcatttctggcgtaatcctgttccgaccaacgatttcgcccatcatctacaagcaacagatcggtcgcgccctgactgccggtgacaccgcagccccgctgattctggatgtggtcaacaactttgagggcttgaccagcatttccggtctgcaaagcgagatgcaggaggctgttcaccggctctatgccaacggtgaaggtgataagatcgtcaccgagcggttcgaggtcatcgagcaggtgcacgattgtcgggtactgttcgagcagctgcaggcaagcctttcttccggctgggagcactatttctccgaagcaagcatctactatgcggagcacggcaatttgaacgtcccgaaacgatataccacacctggaggtctgagccttggggtgtggctgatcacccagcgccgtgtgcgtgaagggcagatccagggcgatctgacccagcagcagatcgcacggctggacagcatcggcatggtctggggcaatcggaaggaaattgcatggcagcacgggttcgaggctgcaaagaaataccatgacacctacggagatctgctggtggctggaaagtatgtggacccggagggctatcccttgggccaatggatcctcaagacccggcagcagaagttgaatggctgcttgaaggaagaacgcatcgcacagatggatgagatcggtatggtgtggagcatcttcgacgccaagtgggaaaaggcctatgccctggctgtggcctattacgaggaaaacgggaacttgaatattccccgctcctatgtaacagcggccggggaacggcttggaatatggctcgcaaatcagcaatggtcgtacccgaaaggaaagctgacggaggagcagatcgaacggctcaacaggatcggaatgtactggggcaaccgcaatgaccgccagtggaaccaaggatatcaggaagcaaaacgttattttgaagcccacggggatctgagggtcccggtcaactatgtttcgccggagggatatgccctcggtaaatgggtcaagcggcagcgttacacacggctgaatcccgaaaaaagcagcggcgcactgacagaagaacggatggagcggctggacgccatcgggatgatttggaacaagatgggctcgtaatagagtcaaaaagaattgatgatagggtgaaaaaggagtagttagggaattatgacaaaaattcggcacgatgtgatgttgagactcgtaaaggtattggatgtggtgatgatcacacttccgtttgcggcttgctggatctggtactatgcggcaaaaacaccgatggatggaacttggcaaggccatgcagttattctgggcctgtatgcggtgctgtttattctgctgggcaagacctatgatgcattctggatgtccatgcagcgagtttccgagttgatgtacggtcaggtactggcggcgatggcaacggacgggatcttttacattgtgatctgtctgatggccactaagctgtgcaatcttctgccgggaatcgctgccattgcagggcagtttgtgatggctggcatctggtctgcggttgcacatcgctggtattacaaagcattccctccgcagcctaccaccgtggtctatgatgtgcgccgtggtatggaaaagctgatccaggactacggtctggacagcaagtacgaggtgagaaatgttctgagcgtagaggaatgcctggaagatctgagcgttctggacggtatgaagaccgtattcctcagcggcgttcacagccatgagcgcaacatcatcctgaagtattgtgtgatgaacgacatcaatacgttcatcattcctcgtgtgggcgatgttctgatgagtggtgcatggccgatgcacatgcttcaccttccggtgctgcgagtcggtcgatacatggcaaagccggagttcctctttgtcaagcgtgcaatggacattgtgctgtccctggtggccctgatcattcttagcccgattttcctgatcacggcgattgcggtgaagtcggatggcggccctgcattctataagcaggtgcgtctgaccaaggatggtaagcccttcgagatcctgaagttccgttcgatgcgtgtggatgctgaaaaggatggtgtggctcgcctttccaccggtgacaaggatgaccgcatcacaaaggttggccatattatccgtgcttgccgtctggatgagctgccgcagctggtgaacatcctgaagggtgatctgtccattgtaggtcctcgccctgagcgtccggaaatcgcagcacagtactgtgaagaaatgccggagtttgcgctgcgtctgcaggcgaaggctggcctcaccggttatgcacaggtgtacggaaaatataacaccacaccgtatgataagctgcaaatggatctgatgtatattgcccaccccagcctggtcgaggacctgaagatcatgctggctacggtgaagatcctgtttatgccggagtctaccgagggcatcgcagagggtgcgaccaccgcaatgggagcagaaaatagcgaaaaggcaaaggtttgatgacccgtttgaaaaaaggaatgctgttgtctgcctggtgtgaggcataaaaccaacctaaaaaccatttgactggaacgaaatagagacatagcagcgtgtgattcatactgctgaggacgattggtagagctttataagaaaaacggctcagactctttgagattgagtctgggctgtaatctttgatatgcggagaggagtaaggactagggaagatgttacataaggagttcggcttgataagcattatcatggctgcttacaatgcggaaaagacaatagagcaggcgattaactcagtgttgcgtcaaacctacacggattttgagctgcttgtggttaatgattgctctaaggacagaactgtggaattggtcaaaagcattgcggcaaaagacaaccgagtgcgtttgatttctaatgaaaagaacagcggcgtatcctttactcgcaaacacggtttggaagaatcaaatggctcgtggattgcgattcttgacagtgatgatgcgtggactccggataagctggaaaagcagattgagcttcaaaagagaacaaatgctgatttgcttttcacgggttcagcttttatggactcggatgggcagccaatcgactggtatcttcatgctccggcagaagtgacctatcggcagttgttgaagcagaatgtgttatccaattcttctgcgctggtgcgtaaagagctttacgcaaagcactatgcaatcggagatgggatgcacgaggactttgcgatttggctcagcatcctgaaagaaggaaagaaagcctatggtgtggatgagccattgctcatctatcgcattgcaaaatcatcaaagtcaggcaataaagtcaaggctgcgaagatgaactggaatacatatcggtatatcggattgaatccgttggcggcactttattatgagtgttggtatatggtgaaaggtctgcttaaatacaagaacttgaaataaaaataggagaatcaaaatgaaagtatgttttatcaaccctccgttcaaggctgaatacggcaagttttctcgtgaatccagaagcccttccataggtcatagcggcgttctgtattatcccctttggctgatttatgcggcctgcgttgctgaaaagaatggttttgaagtggcatttattgatgctcctgctaagcagatgaacaaggagcagacgctggagcgtgtgaagaaggaagcttcggatgctaagctctttgtgttcgacaccagtactccttctatttatagtgatgtagagtttgcaggtgttatcaagaagatgtatccgaactctttcactatgttggtcggcactcatccttctgcgacaccggatgagactatgggcattagcgagttgattgatggtttggctcgccatgagtacgattacatagtgcgtgatacggctattgccattcgtgatggcgcagatcttgctaccgttcgtggcttaacttatcgcaaagatggtgaagtagtccataaccctgacgcagagcatatcactgacttggatgagattccctacgcagcagagtttatcaagcgtaggctctgtgtgactgattatgttttcccggcagccgctttcccgtctattcagatcttcaccggacgcgggtgcccggcacagtgtaacttctgtgtttatcctcagacgctgcatggtcatcgctatcgtctgcgcagtccggaaaatgtcattggtgaaatcgagtatatcgtaaacaacttcccggacgtgaaagaaatcgtgtttgaggatgatacctttactattaataagcagcgtgtttctgaaatctgcaatatgatgattcagaaaggtatcaataagaagattcgctggctgtgtaatgctcgtgtgaatctggattatgagaccatgtgtctgatgaagaaagctggctgccacctgattatccctggtattgaaagcgtgaaccagcagattctgaagaacattcacaagggcactactgttgagcagattgaagcctatgttgcaaatgctcgtaaagctggtctgatgattcatgcttgctacatggtaggaaatcagggcgagacccatgagaccatgaaagaaacgttagccgcagctatgcgcttcaagacggatacggcgcagttcttcccgctgattccttatccgggaacgggtgcatataactgggcgaagagcaacggctatattaatggtaagtacgatgagtacatccatgaggatggtacgttgaactgtattatcaacactccggaactctctgctcaggagctggttgacttctgcgcttatgcacgaaagaagtattatatgcgtccgtggtacattggacatcgtcttgctcgtggtctgcgtgatccggaggatttgaagagaagcttgaaagcattctggcgtctgaaagacagtctgctgaagtaatgcgctgaggtgaagtatggtaatccatgtaattggaacagtaaatggacaagtcaatgaaggaatgcgtaatgtcgcaactcatttggctaaagaatttgaaaaagataataccgtactttattctggcttgaagcagattccgcagattgtactgaactccaggcgagcagatgctacgatgattttcgctcgtgccaacaagttggtctatagcttggcatcgattgttacgaagatgtgcagaagcacttggattgttttggtacagaagccggactcggatttcatggcgagaaacaataaacatccattgaagtgcagttatctctctatcacagaaggtgatatgaagaatgtaaaagtcgtctcaggctgtaagaaaaaattgttttctgtgggcatcaaagcggataaatttgcacctgtttcagtagaacagcaaaagatgcttaaacaaaagtatggatttgatccgtcaaagccgcttgttattcatgttggtcattgctcgaagggacgtggattggaggatttcgcaaaaatccacacagcgcagcgaatggtagttgctagtggaatgtttgaggatgagaatgtggtccgcatcctgaatgaagcaaaggtgaaaattcataaaggatatctggaaaatgttgaagaagtgtatcagatggcagatgcgtatctgtttccaacaaggtctgcggagtttgtaattagcatcccgctttctgtaatggaggcactgtcctgcggtgtccccgtgattggatataagagctttgaaaatctgaatgaaatcacaggatctgaaggtgcaattactctggttgacaatgcagagcaactggataaagttttgcctgaagtaattaagaagaagagcgaccattctctacttgaaaaaacaggctcttggtgtgaagtggcgcagagtgtgctaaggatggttcgggaggaaaatgcatgaaaccagcaatgattagctttatgggcttggatggttccggcaaatcaacaagtattgactatgcctacgaacagttgaaaaagcgtggctacaaggttgaaattgttcgagctgcttacgttattgttttcctgcgtggaattattaagctcggaaaaaagattttaatgaagaaggacagtgatcctttttcaggtgactacaaggcgtacttggagagcctgcgtaagaatgcgaacaagggcggtgcctataagattttctctttcctaacgaccattgagttcaaattgcagatcttcttcaaaattcgtttgaagcgtttctttggtacgactttgctggtggaccgttacatctatgataatgtcgtgacttatgcggcaaatttggatttgggcgaagagtacatggaagaaaccatgaatggtaaatggaagaatgcaccgcgcccggacaaaattatttatatcaagactcctgtagaagtttgctgctctcgtaaggacgacattcccgatccgttgtatctggaaatccgtaaaccccgttatgaaaaggttgcagaaatgtacaatgcaacagtgatcgctggtgatcaggataagcagaagatgctggacgaagtcatggcagccatcgatgaagtactgcctccgcttaaaaagtaattagataggagtagaaaatggtacgaaaactgataattcttggcattgacggtatggactgggatgtgattgttcgatacaaggataaacttcccaatctgtatggcttgatgcagaagaataactaccctcacttgcgctcggttttcccggcggatacaactcctgcatggtccacgatttatactggtcttgatccgtctgagcatggcatcattaactttgttaatgtgggagcaaaagagaatacatataagccattggtgtttgatgacagtgcctttaaaggcaaagctttctgggatgtactcaacaaacagggactttcgtgtgcagtaattctgccgatgaacatcaaggaaggctgggaaatcaacggcctgatgattactcgtccttacgagggaaagattcgtgtctatcctcagggcaaggagagcatctataatccgcgagttgatattttgggcaccgatggaaagtttacctcggaaaaggatctgcccgctctgcgggacgagttctttgcaaaagttaatgaagaaatccggttgactcggctggcaatcgagaacgaggatgtggatgtcctgttctcttacttctccacgaccgatggtattcagcacgatttctggcggcactgtgatccaaaccatccggagtatcctggccccaatgagcatgagaatgtgattcgggacatgtacatcgccatggataactatgttggcgaagtgatgcagaaacaaccggatacaccgcttttgattattagtgaccacggtcatggtgcacgtccggtctatactgtgaggatcaatgagttgcttcgtcgtggtggttatttgacacctaagggcggtggagatggttccaagccgtcaacgaagaaaaagattaagaaaatcatcaagaagaccgcattaagtgttgtgaagggcattggtttgccgaagtgggcaatgaagctggcaaagaagttccccgtgtggaagagcttgtttgcatccagtgccgattttgattgggataagacacaggcatatctaagtgatctttcggctctgaagaattatagctacggtggaatccgcatcaacgacaatgttgcggacaaagacaagttggctgatgaaatcattgagtatttgaagccgatcaagattgagggcgaagataagaacctctttgagtggattgttcgtaccaatactttttatcatggacagtacctgaataagtatcctgaaatcatctaccagatggatgaacgctggggcggcgaatgggaacttggtaaaaatgtctttgagaagggcggctttatgtatatgatgtcccccggtggtcaccgttggagaacggcaatcatttttgcaaataactttgaactgaagaagaacagctatgagatgaccgatatttatggggtcattatggatgcggtaaagggagaatgatatgaaacaggcggagcgaatcggttggattgatacgttgcgagcatttgcgatgttcgcaattgtgctgggacatactttgagaaacgcaacagtagtctaaccgtggctatatagctttcatgttccgctttgtgttcttacttccggtattgtattccatattggacagaaaaatttggtacatttctaagagaaaaattcagagccctcatgattccatattactgctttgcacttgtcagcatcgttatttatgcgatgctagggagtaaaatggaaaaaactgtcgggggtacaacgtatctccggttcagagcgtaatcggtatgctctatgctaatagcagaacaggtttgatgcgatggaatatgccgctgtggtatattccaatgatatttgtactgctgcttatggctttttggattttcagaagcaaagatgatctgaaatggaatattacggtgtttttgtcttcggccctagtggcattcatcctttgcgaagaaattaaactccccaatctgccctttggattggaaacagcaatttatatgtttccgttctttgcacttggaaaagtgatagggagcgtaaaggatgaattcactagaaaaagtattttggtgaaaatcgcagtaacagtagggtgccttgcggtcggaacatttatgacaattggaaatggacaggtttcgtacaatgcggactcttatggaacgcatggttttggatacttcctcgtgatggcaataatgctgtgtgttggctttgtaagtcttgccatgtgttttccaaatggtgtgactccaatcaattatgttggaagaaatactgtggggattatggtaatgcataagttcccgattctgttttttgtcggactctttcctataagtaaaaagctaattggaacgtatcctttagttgcatccagtatgattgcgattctttcgattggaatgtgcttggctgcttcagaagtgatttatcgagtatgcccaatagcattgggaaaaaggaaaagataaatgcaaaagaaaaaagttctggtgtgggaaacactggcgacagtatctggtggtcagaaaatgacgctgaccgttatggatatgctgtcagataaatttgagttttgctgtctaattccggcagaagggatgatgtcagaagaacttaaaaaacggaatatcccgtatgttctaatgggtgaccagacgttacctacaggtgttaagggaaagcaagtgattttccgctacggttggatgtcagttaaaaatgtatggaagtcactcggtgtgattcgtaagtacaaaccggatattctctatgcgccgggaccggcagctcttccgtggagtgcagtttgtggaactctggcccgtaagcctgttatctggcatttgcaccatatcttcttggatggtgcaacgaagaagttgttgaacctttgcggaaactggaagtcagtccgtgagatcattgcagtttcaaactgtgtgggagatcaaattgtaaatgaagctgcacacaaaaaggtaaaggtactctataatcccgttgatgtcgaaaagtatgcaaatggtgacgcaacgaaaataattgtagaactggaagctaaacttggtagaaagctccggggggtaaaggtagtaacccaaatcggagcaattacgaagaataagcgccagaatgttctcatctccgttattgccgatttgaggaatctcggagaggatgttgttggacttgtcgttggagatactattacagaggcagatcgcaattttaaaagagagcttgaacagcggattgaagattgtggcataaaaaatcaaattgtttggatgggatttagatcggatattggagatattttggctgcaactgattgtgtttttgttccatcagaagaaggcctatcacttgttgcaatggaagcaatgtcggctaagcggcaggttgtaactatgaattctagtggggcttatgaactgctcaatcatgctggatgcggaaccttctataaagaagacgatgagtcgagtgttgcaaatgccgtgaaaaaagtactcgaaacaccgaatgcagaagagactgaacgtggatatgcattttgcagagagcaaacaaatgcgaattttaaaaaagaaatcacgagtttgtttttgaatgcgtaaagcagtaacggaggtttacgagtatgaaaataaggcaatatattggttgtgcattatatatgattgcgaaacaccttccagtttcctatggaaaatttggcggattatggaaaagttgtcgagggggggcaacaaaactgatgcttcccaagtgtggagataatgttaatatcgagagaaatgcaacgttctctattcgaactgaaataggaaacaactccggaattggtgtaaatgcacatttttatgggaaagtcgtaattggagataatgttatgatggctcccgattgcattatatatgttcgcaaccacgaaagttctcgcttagatatcccaatgtgcgagcaaggatcgacagaggaacgtccagtagttattggaaacgatgtatggattggtggacgtgtaattatccttccgggtgttaaaatcggagatggtgcaattattggtgcaggttctgttgttacaaaagatgtatcagaatatgatgttgtggctggaaatccggcgagggttataaagaatcgtaaaagttcatgagatttgaagattctcgcatgacttccggcggaaaggaaaactcgatgaagaatcaagttgttgtgggtatattgcgcttatttagcggtcgaagaaacagtggtttacaattgagttattaaagaaactccgagcagaaggatatgatgctgttggggtctttgctggtgaatgcagagagcctgaatacatgactgagctaaatcagaaggttgaacagtatgatctaagggagcatgtcatattccttggtcgacggaatgatattccggatttgctcaaaatgatagatatactcattataccatcggcatttgaagggtttccattggctggtttggcagcagcagcggcaggtgttccagtaattgcatgtgatgcagcaggcgcagaagagttcatccgcgtgagtagagatggtgttacatttgcagaggatgatgttgatagtgcagcagatgcagtgggaaaaatcttagagggaaaagaacagtataaaaaggctggcattgaatttgcaagccagatgtctaatcgtgagtattcaacaaaggtagaacaaatctttaaatcgattgagtaaagttgaggatggagaactgatgaacaaaaaagaaatcatcgttgtgacaaatccaatgatagcagcaaatcgttctgcagaagtaacactaagtaagtttttgcgcgtaataaagccatctgtggagtccatacaagtaataggtggaaatcttagtgtggaaaatgacttgaacgatatccagttgatttcttttccgattactcgccatcctaataaatttaaaaggatgctctcgattgttggtgtgcagctaaaaatgatgggggctgttatccgaattggtcaaaaaggccagccagcttacttttggattgcggataagatgatcctcccgtattttgcggcaaaaatgaaaggaatggaagttaattacttcatctacggaaatgtcgaaaaagagggcacccaaagtagattcacagcattatcaggaaagctgattcgatatatggcagcccacgctgattgtgtatgtatggaaagcccttccgttgaaaatgaatggccatctttgaaaattaagcaaaagaaagtcatacatttgtacactgataccatcgcaaaaccagaattccaaaatagggacaatatatttggaatggtttgccggttgacccccggtaaacatgtagtggaatgtatccgagctatgtcagaaattcataacttgcatccgaattggagactggaaataatcggttcaggaaaacagcaacaagagtgcgaaaatcttgttaatgaattagaggcaaaggagtatatttcacttcttggctgggttgagcattcagacttacagaataaggtgaaaagttggaaatatctgttgtttcctacagataccgagggaatgccaaatggcattattgaaatgatgggattcggtatcccagctattgcatcatcagtaggtggtatttcagatgtgatctgttcgacaaatggtttcctcctttatggtagtacggtccttgatttgaaagaaagaatggaaaaggcaatagaattgagtgataacgagtataccaaaatggctcgaaatgcgtatgagactataaacagagaatatacattgccagctgcacaggcgcaggcaaaaaaatggctgtgagggaaataatagatgatatgggcatggattgcagcagcggtagctatttcatggctgttctgtaaaaaaggaataagttggtaccattatatctggcttcttcttccaattgaaatgtatggcgttacaattgcaggtgctacgttgaaaccatacatgttgttcggtatatgtattattgcgagcgaccttgttagggataaaacaattcgagtccccgtggcaatcatagctgctgtattcgctctcatcattagtgattttctgacagggtttgtgatggcatctgtaatgcagcatataatgttcattctggttttgatgattggtttttgctatcagcatcgtcaaaaagatggcattgaatttgaagagatggggcaggcgacactggcaacaacaatcggttacggaatagtttttactgtggcttggttaatgtttagtagaggtattacgcctgacggagtatatgcttcagagcgcttggaaccgggcattgttttgagactagcatcatttggcgggaatgtttcgcagcgtatgagaggtttttgcattgatccgaatagtgtgattacgacgcttattcctggtgcagcttatgcactagccaatgttgtgtatcgtaaacaggaaattgtgaagagtattctcgcacttgctgtttatttggcagtagtcgtctattctggttcgcgaatggcgctaatgtgtacgtttgttatgcttacaatattctttgttattgggtataagagagcaaataataagcgtcaggtgcttgtagttggaatggccattttgggagtaatccttatcggactgatctctaatatagatgctgttattcttgaagttgcgaagatgtgggaaagtatctttggagaaagagcgtcattgggttcggaatatggaaggttaacgatttggaagacaaatattcaatatctgattggaaacaataaagaactgtttggggtgggacagaaccagatatatttattgacagaaagaggtcttgcctgccacaatacttggcttgaatggatttgtggaaccggtatttttttaggtgtagctattgatctgtggtttattttggcaccattgaaatataaaaaaagagccataggcttgggcgatgaaaatacgaaaaatgctattccacttattatggcctatgttattgtggttgtatgtatttctacagttgataacatcacaaattcagtgctattgtttctaatgctcatactaagatatgggacaataaatcaaagtataaaaatggaaagggaagcatgaagattctaaagggtaattcgggaaattcggttttgcttgcggtggttaaagcgttcactacggttagcggaattttgagcacaatgattatgtctcatgcgctaagccttgaattgtatggtacattctctcagacgaatctgattgtaacaactgctacaaacataactgcgcttgggttggtagatgcagtaaattatttctataatagaagcaatgacgaaaaggttcaaaaggcatatatcaatacgataatgggatttcagacgataacaggtattgttgctggtatccttattattgtattatcaaacaatttggtagaatatttcaacaacccaatgctctcaagcttcttttggctcattgcattcagaccgttatttgcaaatttgaatgtgtcgcttcaatatttgcaagtttcgattggcaaagcaaaatccgttgcgatacgaaatgctggatttgctacacttagattagttgtatatgcgattgcagcatggattctgaaagacataacagttgtattgattgcttttttggtatttgaagtaatcattacagtgttttttgggtggacttttgtaaaagaaaagttcatgattaagccttatgaaattgattggggtaaaacaaaagaaatcctgggatatagtattccaatgggtatttacgttttaaccaattctttatgtcgtgacattgataaaatgctgatagggggatggtataacactgatcaatatgctatttatgcaaattgtgccacattgctgccttttgatattatatcggcttcttttttgacaattttaattccaattttaacaagatattttggagaaagagattacatgcatggtaggattctctttaagaactatctaaaaataggatattatacggcgtttacctttacaattgcatgcatgattctttcaaaagaaatggtcctgctcctttatggcgaaaaatatttatcaggtcagactatttttattctgtatacaatagttgacatgattaagtttgctaatatgtcaattgtattaagtgcaagcggaaaaacaaagacgcttatgatttgctcccttgtgtcacttgtggcgaatgcgggttgtaatgtactattctatcatgtttttggctttattggaccggcaattgcaacagtttttgtaacagtcgttctgacggccgttcttgcagaaatgagtgcaaagtcgctggaaacatcagtctggaaactaattgattggaaagaatttttaacatttgcgattgaattatcaatagttggtgtcatttgttttatggccaaaagagctttagaagcagttgcagttagtcctattattatcctttgcgtactaggcggagcatatattgctggaattctttgccttaataagaaaaaaatattttcggcaatgaaggaaattaacgcattacattgagttcccctcttaatctcgaaaaatgagtaaatcaagcataaaagtgtttccagaaacgatggtcgattataaaatttggaaaatatcaaggtatacactggcatgactgtgtggctcaagtatattcaaaagaagagtaagtaacagcgaagaatgaagagagggtacatatggatgcggaagaaatcaaaagcataatgaggcaatttaagcatggagctgcggatagcgaatggaagcaatttattaaatctattaagattactaatattcacggatggacgggacaagaaatagcttttaattttccggtggttgcaattgttggtgaaaatggtattggaaaaagtacttttttgaaagcatctgtgtgtgcgtataaaaacaaaaatggtcaaactttttatccatctaaaatgtttgtaagtacgcgctgggatgcgactggtctgcaaaatgcaataattgagtataaagttcgtaagggaaacgaggatatcaaccttcgttggaagaagactaatgattggggatttacaccaaaacaaggaaaacctgaaaggaatgtgttcttcttagacatttcccgaacgcttccgttagatgcgactgctggatatgctaaagtggctaaacttgctagtgaagaagttggggcagtaacggagttgacgccagaaagtctacagaatctttcatatattttaggtcaacaatatggtagggcacggttcgttggaacagatgtagatgttgatcgaaaagtcggactcctgacaaaatcctatggtgaaatatcgcaatttcatcaaggcgctggtgaagactctatccttgatacgttcaaacttttacaggatataccgaaccaatcattgttggtaatcgatgaagtagaaaactccctccatccacaagcacagcgccggtttgttaagtgtctattgaagctctcacgtgtgaaaaaaattacagataatcttgtcaacgcatagtccatttgcactagaagaactaccaccaattgcgagaataatgcttatgcaactctcggaccgaaaggaaattgtttacgaagtatcaacgaattttgcgttggcaagtatggatgatggtgagcatccggatttgtatgctttcttggaggatgatgaagcggtttccctgttttggaaaatactaaaacaagatgcagagcattatgaagagtatagcaagaagatatctgcacgctctgttggtagttgcactgttgtaaaaacattaaatgaaatgagcaaaagtggtaagttgccctatccgagcctctgcattgttgatggggataaggcagaggaaattccagattgcttggcacttccgggaacacaggcaccagaaagacaaattatcctcgatttaaaggaaaaagattggaataacttagatgaaaggttcggaattggtgctggtttgctttttaagtatttggatgatgcaattcttcttccggatcatcattgctggacggaatacataggaaatcgtgtaaagaagagtaaagatgctgtttggtcaattatgattgaagaatggtgcaaacaatgcgcagagagtgaaaatatatcacattttctggaaaaggttcgtttgagattgaggagtgcggaaaacattcattaaatccaagcttgcaatgacagataaaatgatagtggcataatttaatttgactacagcgtaatacacaagagttaaggtcatgtgttccgccacatggctgtgctgctcaaatatgctacctcttcgtggtgagcagcaggcaacggatctctatccggctaaagcatatgattgccaaatcactctttggatgaggagaaaactataatgggaaagtattttggaactgacggtttccgtggcgaggctggaatcactctgaccgcagatcatgcctacaaggttggtcgttttctgggctggtactataacgccctgcgtgagcgcaacggcaataacgagcctgcccgtatcgtcattggcaaggacacccgccgcagctcttatatgttcgagtacagcctggtcgcaggtctgaccgcttccggtgcagatgcttacctgctccatgtcactaccaccccttctgtggcttacatcgcccgagtggacgacttcgactgcggcatcatgatttctgccagccataatccctactacgataacggcatcaagctgatcgactgctatggcgagaagatgccggaggaaatcttgctgttagtcgaggattacattgacggaaagctccatgtcttcgataaggactggccggagctgccatttgcccatcgtgagcatatcggctgcacggtggactatgtgtccggccgcaaccgctacatgggctatctgattagcctcggaatctactcttttaagggcgtcaaggttggtctggactgcgccaacggtagttcctggaacatcgctaagtctgtgttcgatgcgctgggtgctgacacctacgtcatcaatgcacagcccaacggtacgaatatcaataacaatgctggatctactcacattgagggcttgcagaagttcgtggtagagaagggtctggatgttggtttcgcctatgacggcgatgctgatcgttgcctgtgtgtggatgaaaagggtagtgtgatcactggcgaccatatcctgtacatctacggctgctacatgaaggagcgcggcaagctgctgaccaataccgtcgttaccacggtcatgtccaacttcggcctgtataaggcttttgatgagaagggcattggttacgctaagaccgcagtgggcgacaagtacgtctatgagtacatggctaagaacggctgccgtatcggcggtgagcagagtggtcatattatcttcagcaagtacgccagcaccggtgatggtatcctgaccagtctcaagatgatggaagttatgctggcgaagaagatgcccatgagcaagctggctgagccgctgaagatctacccgcaggttctggagaacgttcgtgtcactgataaaaaggctgcgcagaacgacccggcggtgcaggaggccgtcaaagccgtagccgaggcattgggcgataccggtcgtattctggtgcgtgagtccggcacggagcctgttgtgcgtgtgatggtggaggctcccgaccacgacacctgccagaagtacgtgtct

SEQ ID NO: 80 - DNA, 22679 bp, unidentified
  source 1..22679: mol_type = unassigned DNA
atgaaagatttaaagattgctgttgcaggtaccggctatgttggtcttagcatagcaacgcttttgtcgcaacatcatcaggtgacggcagtcgatgtgattcctgagaaagtagatatgcttaatcgtaaacaatcgcctattcaggatgagtatatagagaaatatttgtccgaaaaagcattgaacctaaccgctacgcttgacggtgccaaggcctacagtgatgcggattttgtagtcatagcagctcctactaattatgatccggtgaagaattattttgatactcatcatatagaagatgtcatagatcttgttttaagtgtcaatcctgatgctgtgatggtaatcaagtctactattcctgttggatattgccggggactttatttgaagtatgcccgtaagggagtcaggaagcttaacctgcttttttctccggagtttcttcgtgagagtatggctctttatgataacttatatccaagtcgtatcattgttggctatccaaaactgattgatggcgagcagtttgacgaggaaaacgaagctattaagtccattgctgatgttcccaccctagagagagctgcgcatactttcgcagcattgcttcaggaaggtgcaatcaaggaagatattcctactctttttatgggtataaaggaggcggaagctgtcaaactgtttgctaatacctatcttgctttgcgtgtcagttattttaatgagcttgatacttatgcggagatgaaaggtctggattcccagtcgataatacagggtgttggactggaccctcgtattggtacgcactataataatcctagttttggttatggcggttattgtttgcctaaagacacgaaacaactcttggctaactatcaggatgtacctcagaacatgatgagtgctattgtagaaagtaaccgtacaagaaaagacttcatagcagatcaagtgttgcgtaaagcggggtattatactgcctcctgttcatgggatgcccagaaagagcaaaaaataaccattggtgtatatcgtctgaccatgaagtccaattctgacaacttccgtcaaagtgccattcaggggattatgaagcgtatcaaggcgaagggtgctactattgtaatttacgagcctgctatgcaggatggtgaaacattctttggtagccaagtggtcaataacctgatcaaattcaaggaaataagtcaggccatcatcgccaaccgctacgattcttgtctggatgatgtgaaagacaaggtatatactcgtgatatttttcaaagagattaactttatggtgacatacaatgttagtttagcgaataaagtggttttggtgactggtgcagccggttttatcggagccagtttggtaaaacgcttgctgaatgaatttgatagcgtgaaggttatcggtattgatagtattaccgaatactatgatgtacgtttaaaatatgaacgcttgcaagaattgtctgcttatggtgacagatttgttttcattaaagacagcattgctaaaaagggagttgttgactccatcttcactgaccaccaccctcaggtagtcgtgaatcttgctgctcaagccggtgtgcgttatagcatcactaatcccgatgcatatattgaaagtaaccttattggattttataatattttagaagcctgtcgtcattatagtgtggagcacttggtatatgcttcttccagtagcgtatatggaagtaataagaaagtgccttatagtaccgatgataaggtggataatcctgtatcactctatgctgctactaaaaagagtaatgaactaatggctcacgcttacagtaagctttacaacataccaagtacaggtttgcggttctttacggtatatggccctgccggtcgtcccgatatggcatacttcggtttcaccaaccaactccgtgaaggcaagactattcggatctttaattacggtaactgcaaacgagatttcacctacgttgatgacattgtggaaggcgttgttcggatcatgcgacatgcacctgagaaacagaatggcgatgacggacttccaattccaccatacaaggtatataatattggtaacaactcacccgagaatcttcttgattttgtgaccattcttcaggaagagctcatagcagccaaggtacttcccgatgattacgattttgagacgcacaaagaattggtaccgatgcaacctggggatgtgcctgtgacatatgctgatacgatccctttggaacaagattttggatttaaaccgtcaacatcactacgtgagggattgagaaagtttgcggggtggtatgctaagtattatggcacatttaaataacatccataaatcgattatataaaaataaaaagataaaatcattatgagcatttttgcaggtaaaacccttatgattactggtggaacaggttctttcggcaatgcggttttgaatcgtttcctccgtaccgacatcggcgaaatccgtattttttcacgggatgaaaagaagcaggatgatatgcgtcacgaatatcaggtaaagtatcctgatgtggcacataaaatcaagttttttattggcgatgtacgtaatttgcagtcatgtaagaacgcaatgcctggtgttgactatatctttcatgctgcggctttgaaacaggttccaagttgtgagttctttccgatggaggcagtaaagactaatgttgtcggtacagataatgttttgacagctgctatagaagctggtgttgatactgtaatttgtctttcaacagataaggctgcctatcccattaatgctatggggattacgaaagctatcgaggagaaaatcgcagtagctaagagccgctactctggtaagacgaagatttgcagtacccgttatggtaatgtgatgtgctctcgtggttctgtaattcctctttggattgaccaaattcgtaacggtaatcctataacactaactgagcctaaaatgacacgttttatcatgtcattggaagaagcagtagaccttgtattgtttgcattcgagcatgggcagaacggtgatattcttgtacagaaagctccggcttgtactattcagactcaggcggaggctgtttgtgaattatttggtggtaagaaagaagatatcaaggttatcggtattcgacatggtgagaagatgtatgagacattgctcaccaatgaagaatgtgccaaggcagaggatatgggcaacttctatcgtgtaccggcagataaccgtggattgaattacgacaaatatttcaaagagggtgagacagaacgtaacacgcttacagaattcaattcaaataatacgcgaatccttaacgtggaagaaactaaagccaagattgcagctttggactatataaagaaggagttgaatggtgagggtaacttcgtacagtgataaaattatgaagatattagtaacaggtgccaaaggttttgtagggaagaatctttgcgcccaacttaataacatcaaggacggtaaggctcgttgttatggtgaactgaagattagtgacgtattcgagtacgatcttgactctactccggaacaactggataattggtgcaaagaatccgatttcgtattcaatcttgccggggtgaatcgtccaaaggacaatgatgaattcatgaaaggtaactttggttttgcaagtacattgcttgatatcttgaagaaatatcataacacttgtcccgtcatgctttcctctagtgcgcaagcctcgttgaccggtcgttttggtaacagcgaatatggtcgtagtaaaaaggcgggtgaagatctttttctacaatacggcaaagagacaggagccaaggttttggtctatcgctttccgaacctttatggcaagtggtgccgtccaaactataacagtgccgtagccactttctgcaataacattgctaatgacttgcctatacaggtcaacgatccgaatgtagaacttgagttgctctatgttgatgatcttgtggatgaaatgattcgtaccctgaaaggcaaggaacatcattgcgagttcgaagggcttgacgtacaaccgaaggctgacggcagatattgctattgccctgtcacccataaggtaacgcttggtgaaatcgttgatttattgcaccaattcgcggaaatgccaaagacgctgatgattccggaaattcctgccaactcgtttgccaaaagattgtatagcacttatctgagttatttgcccaaagaaaaagcaatttttgatctgaagatgaatgtagatcagcgtggctcatttacagaacttgttcataccttgaactgtggtcagataagtataaatatttccaaaccgggtattactaagggggaacattggcacaataccaaatgggaacaatttatcgttgtcagtggtcatggactcatccaactccgcaaggagggaacagatgaaatattgaactatgaggtgagcggtgacaaaatacaatccgttatcatgcttcccggctatacccataatatcatcaatctttccgacacggaagatctggtaacagttatgtactgtaatgagatattcaatccggatagacctgatacgtactttgataaagtagaaaaataatatggaaaaacaacccaaacttgattattcggatataaaattcaaggacaacggtaagttgaaattgataatcgttgtcggtactcgtcccgagattatccgtttggcagccgtcatcaataaatgtcgtcagtatttcgatgttattcttgcccataccggtcagaattacgattacaatctcaacggcatattctttaaagatttgaagttggcagagcctgaggtatatatggatgctgtaggcgatgatttgggagctacttgtggcaatattatcaactgttcctataaactttttgcgcagacaaagcctgatgctgtgcttgtgctaggcgatactaattcgtgcctcagtgttataggagccaagcgtctgcacatccctatttttcacatggaagctggaaatcgttgtaaagacgagtgtcttccggaagagactaaccgtcgtatcgtggatattatttcagatgtgaatatggcttactctgagcatgcaagaagatatcttgcagactgcggacttcctaaagagagaacctacgtcacaggttctcctatggcggaggttcttcatgagaatcttgtagcgatcaacgcctctaatgtacatcaacgtcttgacttggagaaaggcaagtatattcttctttccgctcatcgtgaagaaaatattgataccgagaagaatttcttctcactttttacagctatcaataagatggcagagaagtatgatatgccgattctctactcatgtcacccacgctcacgtaatcgtttacaggcttctgggttccagcttgattctcgtgtacaagtacaacagccacttggctttcatgattataattgtcttcagatgaatgctttctgtgtagttagtgattctggaacattgcctgaggaaagttcattttttaccagtgtaggtcacccttttcctgctgtttgtatacgtacttctactgagagacctgaggctattgacaaagcaaactttattattgccggcattgacgagaagagtcttctgcaagcggtagatattgctgtagaactttgtaaagatggtcagcatggtactcctgttcccgactatgtggatgagaatgttagcacgaaagtggtaaagattgtacaatcatatgtaggcattgttaataagatggtttggaggaaagaataaatcaattttggccgattaatttggttatttgctttgtaataaagattacttattcagaaagttatttatgctaatttaactgtatagaatgaatgagatactcaatgattaatgctattaagcagtttataaaatcaggaaggcgatttaataaaaaagactttggtaaattgggtgaactgtctagcctatcaagttctataatattatctaatcctaaaaatatttttattgacgatcatgtgactataggttcaaatgctatattatatgccacaaatgcaaaaattatcataaaaaaatattttgtatctgcttatggccttaaaatatcaacaggacagcatgaaagacgaatcggaagatttttggcatcaatttctgaaaaagagaagaaccataatataggtcttgataaagacgttattattaatgaggatgtatgggcggggtttgatgtaacaattatggcaggtgttgaaattggaagaggtgtgactattgctgcagggtctgttgttactcattcattaccggcatattgcgtggctgggggagtgccagctaaggttatcaaattctattggagtatagaacaaatcttagagcatgaaaaaatcttatattcagaagaagatcgattatcggaattgacattgagagatatattttataaatatgcggatatgtaattttatggtgaaatcatttattaaacgtttttgggcattttgcaaattgaaataccttgtaaagcgtgcgaatgttgggcgcaatgtgcatttaagaaaaaaatttcgtatagttacaaatcaggagccacaatttgtttgtatcggagacaattctgttttaaattgtggtctatattgttgtggaggtcgaattgttattggtgaaaatgcatatattggacattctgaaattatgagtgctgaattaattagaataggaaagaatgtgataatttccgatgatgtaattattatggataataataatcatcctacttctatagaggcgcgacgtttaatgagtgagagtcatgatttttggggaccattatggaaatgggataaagctgattctaaaaaggttataattgaagataatgtttggattggaaaaagggccattgtactgaaaggtgtgcatattggtgccggttcaattgttgctataggggctgttgttacaaaagatgtgaaacctgggactatcgtaggcggaaatcctgctagagaattaaagacgcttactgaataacattttatgcaaacttcaaaatcagaaagtaataagagaatagcaaaaaatactatttatctttatataaggttgatagtggtaatgttcatttctctctattctgtgaggattgtaatggcagaattgggagtagagggttttggtacatttaatgttgttgcgggatttgttactatgctaggtttcatagggactactatgacaatgggaattcagcgtttttttaattatgaaatgggaaagaaaggggatgctgcagcaattgaagtctattcatctgcattaaaaatacaatttgtatgtgcattaataatttttgttttatttgaaacaataggattgtggtatgtaaataatgtaatgaatttacctaaatatagaattacggaaattaattttttgtatcaatttgctattacttcattggtattaaacgtattagtagttccttataatgcatttacaatagcgaaagaacatatgaattggtatgcactgattagtatgcttgaagctattgggaaattattaatagctttttcattatcgctatttacagataataagttagctgtttatggattcttgttgatgttaatagcgatattcaatttttggggctatttctttttgtgtaaaagaaaatactcatggttaaagtatcgtggaggagtgaataatagtcttgtaaaacaaattttgtctttttctggttggaatgctttaagtgcttttgctaatataggtaaagcacaaggaataaatctattacttaattatttttttggagttgctataaatgctgctaatgcaattgtcacacaaatatatagtgctgttcagctattttctataaatatttgtacagcatttaaacctcaattaacagaatcatatgcccaaggtgattattcacatgtaaagcagatgatgtttctaatgtcaaaatctgcttttatgatggtgtatattatttgtataccattatttctagagttaccattcatattaaatatttggttggggaagaatgttcctgaatatacagaatcatttacaaatgtaactttgtttgtaatattggtaggttcgcttaatactccgatttctcaaattatttatgctaatggaaatatcaagaaatatatattggtatactcattaatttgtttatgtttacctttagggtggttagctttttatttaggggcaccggcaattacagtattttttattactttgggcttaatggtattaatacaagtaatatcattggttattcttaagaattatatggattattcttattctgaatatattatttccataatcattccatgtactgtttttgctatattgacacctattgtaccttatgctatacatattttaattgcagataatgattggttacgattattgacagttaccttttcgacaatttttgcttctgctgtaagtggctggtttgtaattttaactaaaaatcaaagatgctttttgacggaaaaaattaaatcaatgttcaaaagagctagtgtttaaagattgtacataaatgaataacaatgctttgattaaaataaaggttgtcactgtctcttatggcagtagtttgtcattagaatggaacttactgttgcgtaaaaactattttgcataaatgaaattgataagactattacgagataattttgggattgttttgtttatttgccttctctcgtatggtgtatactctcaaggatcgacacaaagcatatttctttgtttggctttatttttgatggctgtactcaaggaagagaatgttgctgtttgttttattgcacaaacttttatgtgtgataatctagagcttttaccttctctttcttttgcttcattagcagcaggtgtgttaattgtcaggtgtgttgtgacagggaataagggcaatattggatcaaaaaatatacctttcatattactgttatttgcaattcaagtattttccatagtaatctatgaaaatacactgaataatgttattcggttttgtgtaaatatcttggtgattttttattttgctaactattcaaaaatatttcagacaaagaatttggctttggttccttctgttgtatcaatcacggtattgatagcgtgtattttaggagttggaaaagcttctataatggatgatttaggggtattgcgttttagcggaatttggattgatgataatttttgtggtatgtattgtgttcttggtatcattagttcaatttatgcgatttgggttactagaaaagctctttttttcgctataccatctattttaatggcattatatatgggggcactggctatgtcaagaacttttgtttacatgatgattttagtctttcttctttttctgttatatatatttcggaacaaatcggttggtgtttttttaaaagttgtattgtctgcactttgcgttgttggagcggtgtatttctttaatcatatagcttctactattatagagaatcggggtatagttaaagatagtggcgattttacaaatggtcgaatagaggcttcattggaatctttacgagtttttaatatgaatcctttgtcatggtttacaggaatcggaacttcaaatacttttaattgtaaaatggctttaggtatgcatcctaaagcatcgcataatacctatgtggatatattggttgaattaggattgactgtaattatatatgtattagttttgataattgttttttttaaaaagtttttcaggaattttttgtatacccttccgtatacagcgctcttttcttttgttgttttatgttatatgggaacattgacaatgggacagtattcaatattgtacatcgctttcggaatgataattaattatcttaggattccaataaatgaaaatacatcagaaaaaacatagatagattcttgaaataaatgattgataaatatgaaaaaagtactcgaaatatttacttttcaaggtggttatatgggaggtgtggctactatggtagacgcatatatgaaaggagtaaaggaattttcctgtaataattgtaaacttacacatttaaatatatctccaactatcaacactggaaacggtaaaattgataattttgcctatatttttactcaaaggaaagcaattcgcaaatacatggataagaattgttttgatgtggttcatattcatacatcaagggaatttctttttttaaaggatgtgttgcttgcaaaaatgattcgaaaaagatatcatacacccgttgttatgaccatacatgtgggtagtattcatactgtatatagtagaatcgaatggtttaaaaagaggagtattgatcttttaaataaatatgttgataagacaatctttctgtcaaaagtgatgtgtcaggattttattcaaactggtcttaacgcaaattgtgctgttgtactttataatttctataatttttctacaactcgaatacaagaaacacaaaagagtaatatcttacaattattgtatgttggagctattcatagagaaaaaggaattgtagaacttttgaaagctctttcggaattaccgaatttcgagtatcatctgaatgtttgtggtaaattcacagatagtagtattaaggatgaagttgaaagcctaaaaatattactaggcgaaaaggtttcttttcttggttatgttgcaggcgaagctaaaacaaaactttttttcaattctgatgtactcatcttgccttcttatcatgaaggtttacctcttgttatcatggaagcacttggggcagggtgtgctatcatggctactccggtaggttctattccagaagttctgcaagatgaaaattgcctttgggtggatatagcatctgtagagtcaataaagaaacaattgttatgtctgacgaatgaaaagttgattttgtttaaagaagcgaataagcaacttggagagctatatacatttaaagaacatataaataagctatctgaaatatatcaagaaacaataagtaaaggtgaagaatgtatatctgtaaaaatattctagcataggtgataattacaatatagaaaaaaggagttgttttttcttataaaagaagagtgttatacatgagaattattagaatattttttaatttatataggaataaatgaagaaaatcctctacataggcggttttgagatgccggataagaatgcggcagcacaacgtgtaatggcgaatgcgttgctgcttcgtgagatgggctttgaggttacattcataggtcctattagggatagagctgctgctataacggaggcaaatggtttcaagtgtgagtatgtggactatcctacaaacatgggcagttggctgaggtatataactgtctttgtacccataaaaaaaatattggagtatcatcctgattatgtgatactttacaattttccgtcggtggcatcgttgaggatcctaaaggcttgtcataagcatgagattccagtttatcacgatttaacagagtgggagtgggctacaggttggtcgcctagggagattatccgtaaactggacattaacctccgcatgcgctactgcatgaagaagatggatggtgtgatagctatcagccgatacttatacgattgctattcgcctcatatcaagtgtatacttgttccgcctactgtagatctcagtaatcccaaatggaatagggagcgtgaattgactacaggcaagcctatcgaattggtgtatgcgggaactggtgggtttggagtgaaggacaaactggatgttattatcgaaaatgtgaaacctttcatcaatattcacctgactgtaataggcatgacgaaagaacgttacgaagaggggtatgggcctttgccagaggattgtacaaatgtggaatttcgtggtcgtatttctcatttgaatgcagtaaaagctgtatgtgatgcagactttcaggtattgatacgtgataatactttgaagacaagagctggatttcctacgaagttcgtggaatcaatcagttgctgtacaccattgattgctacactcactagcaacataggagactatttcaaggatggatgccttggttttgtggtggacgagaagcatacattgcgagatgtctttgcacaactgttggaaatggatagaggggattttatagctatgaagcagcgatgtcgagacttcacaggctttgactatcacagctataaggatgagttctcgaagttattttcttaaaagtaagaataggaacaaaaaagaaatattatggcaaaaccaattattgcgttgttgaccaacaacgatgacgatgtctattgcttccgaaaggaattaatagagggattgatagccgaagggtatgagatgctgatttcttgtccttatggtcctaagttcgagctgatgggggggattccttatatttatgacaattcggagattgatcgtcgtggtaccaatcctgtgaaggactgtggactgttgatgcattatcgtaagcttttcaagaagtatcgtccagctgtagtgctcacctatactgctaagcctaatgtgtatgcaagtattgtagctcattggatgggcattcctgtaataaacaatctcacaggtcttggatctgtgataaatgagagggggctgaagcagaagttcataatgagtctttttaagatggcttatcagaaatcggcatgcatgatgtttcagaatgctacgaacatgcaggtggctattgatcagggaatggtgaagggtgactatcgactgattccaggtagtggtgtgaataccgaccgttatcctctgcaaccttatcctgatggaggtaatggtaaagagggtgctcctatcgtattcaactacatcgggcgtgtgctaaaggataagcgtgtggatgattatattaatgcagcaaagtgcatcaagcagaagtacccacaaacagagttcaatattctaggtttcatcgagtcaacagaaatgcactatgaggtagaactgaagcagctggaggaagagagtatcgtgatttatcgtggaagccagaaggatgtgaaaccattcattgcacgtgctcattgtactatccatccctctacttatggtgagggtatgagtaatgttcttttggagagtgcatcctgtgggcgtttccttattactaccaacaatcctggttgtcaagagactcttgaggatggaaagaccggctatatttatcaggggggaaatgtagatgccctcgtagatgctatcgagcgtttccttgcacttcctaacgagatccgtcagcagatgggtgaggcaggacgcgaaagagtgaaagctcagttctcacgcgagtttgtagtcaaggcatataaagaaaagattgaggaattattgcagaagtaatatctaaatctctcaaattactcttgtctctgctcaaagctatctatttcaacttcagacatctttccataaaactggctgtcaaattgccgatttagataaattatagatgtagttgtaacatgctgagggaaattacagacatgtaagacggctgttgttatgggtttctttgaagttccattgaaaaataatagttactcattgagattaagaaaggagtgactattgaattcaaaggaaagcaaattttggaagtggatcattatataggcaaggtgtttcactgacattcgaaaaaagctttgtattgataatagtagtttaataggatattataacatattgcgtttggtgatgacaatctagtttcttgagattacataattatggatttagataattatacaatctgtaatagtaaaggacagaagatcaatcaggatcaagaaataatgatttcagataaagtatgattgtgtaatcacatgtccgttctgaaagattcgacaatactgtccaattgtgtcgttggtttaatgctcgttgttcatgaccattctttcaattccagttctgtaatagtgagtaatccggctaagcatataaaagaaatttcatcgtggcatagataaaaagaagttattatgataattggttatactactggagtgtacgatatgtttcatatcggtcacttgaatattctgcgtcgtgcgaaagagcaatgtgattatcttatcgtgggcgtaagtactgatgagctagttcagcatgacaaaaataagactccgatcattccttttgaggaaaggtgtgccatcgtggaggctataaagtatgtagataaggttgttcctcagttagataagaataagtttggtgtatgggaacagtatcacttccacaaaatgtttgtaggttctgattggaagggtactgacgtatggaatcgctttgaagagcagttcaaacctcttggtgtggcgatagtatatttggatcatactgatggaatcagttcaacaatattaagagagaaactcaacaaatgacaaagaagaaggtattacacattataaatcttggcatgaacggtaatgctgtgttcttgtgcaatgtgcttgaacagactaacttttcgaagtatgatattacgatattaaacttttttgggaaaacggctgacccccattgccaagagattggaaggactccctatccgcattgtagtgaaccgacgcaagcatggatttatagcgtttctaagcgaattgaaacaattgttgaaaacagaaaagtttgatgttgtccactcacatatgtgggatctgacgggtatcttcctcggatatgcaaagtggtatggtgtgcctgtgagagtagctcacaggcataattcacagaaggtagttggatgttataaccctatcaaacagtttattcgtgacaaggtggtatggaatattttgaagaaagctatagagttgaatgcaaactgatattttgcttgctctaatttggctgccaattggttatatacctctaaggtgatcaataacgggggggggaaattataatatattaatcttaatgtgttcaaacctctttcaaataaggtgaaaggtcgtaatctgttgttcgttggtcgtttcatttatcagaagaatcctgtattcttgatagaagtttttgcagagtattgtaaattgcacgatgatgcaagactgacctgtgtggtgtgatggtgtgatgaggcaagagtgcatacagtatgccaaagataatggtatctttaataagattcagttcattgataaggatagcaagatgactacgtactatcagaatgcagatgtttttctgctgccatctttttatgagggacttggcattgtgctgatagaggcacaagccacaaaatgtccttgtttgacctcgagtgaagtgcctgatttggcagactgcggaatggttcactataagagacttgacgatggcactgcatcttgggcaaaggcaatagacgaattgttaaatacagaaatgagcattgatcaggataagctagattagtttagagtaaacggactgcagaaatagtctatgaagcatacaaatactaaaaaattatgaaatacagttttaagtttatcattgattcacttcctgtgaagaagaactctaacagttcttggtgggtgaaattgtgggtgagaaaagtatcgttcctttttacatatctgtttattaatatgggcttttctccaaatggagtatcagtcctgtcaatcttttttgtactagcatcatgtatctgctatagtatttctacgcctgcctgcatttgggtagctgttgtgatgatcaacttttggctagtactcgattgtgtggatggtaatatcgcacgttgcagaaaggttaagacctactatggtgagtttgtggatgacattggtggctactataccgttgctttcatttatcttgcttttggcctttgtgcatacaatactggtggtatattggtagatgttgtcaataagtggattctagtagcaggtggtatggcttgtatttgcgatattcttgctcgcttgatcaataaggattatgaaaacttttcgcgtaacagatctgattacgttcagcagacctatcttactgaaaacaagaagtcgttgagctatattcgcagaagagtgggtaaagaacttggagtgtctggcgctttcatgcctatgactattctttgcgctatttttaatgcctacgacctgatggtggtcttctatctcttgtttaacggatttgcactcctttctactagtgttctgtatatctataaggcagataagtatgacaggattcatgtcaaagaataagcgccaatgacattccaatctcttgaatatctcattttccttccggtagtgttttttctttactggacggtagggcgtagaagtaggactttccagaacggtctgatagtggcggtaagtcttgtgttctatggctggtgggactggcggtttctcggactgctactcctgacggctttctccactttctttgctggttggtggatgggcaagacctataaccagaagaaatgtaaagccattttggtgggtacgactgcacttaaccttagtgttctgttctttttcaagtactataacttctttgttcaggctttcattgatgcgttctcgctctttggtacaaacatcaacatcagcacgcttaaaattttgctgcctgtgggtatcagtttctacactttcactgctctgagctatagtatcgatgtgtatcagcggaaggtgagaccaacacgagatcttttggcatatctagcttacgtgacatttttcccaagcatcctcagtggccctattagtcgcgctcagaagcagcttccgcagtactttgaacgacgtgattttgattatgataaagctgtaaatgcttgtaatttaatgttaatgggggggggtaatgaagctatgtctcgctgaccgtttggggatctatgtcgatacggtttatactaatataactcaacataatggcacgacgctgctctttacagccattctttatacaattcagatttatgctgattttgcaggatattcgttgatggctataggtagcggaaaactctttggtatcgagcttcaaacgaacttcattcgtccgtacttctcaaagaccgttacggagttttggagacgttggcacgtctcgcttactacgtggtttagagactacatctattttccacttggtggcaaccgatgtagtaaggcacgatggatttttaatacgatgattgtctttactgtcagtggactttggcatggagctgcttacaccttcctcatttggggagctcttcatggaatttgtatggtgatagaaagacttgtttatggtgacaagataaagacaatatcgaataacttttcgcttatcaatgtctttcgcatttcgctaactttcacaatcgtcacctttgcttggattttctttcgtgtgagtgactttggagatgtgatgaccattttcaggaaaatattgacggaaccgggaagcctctttatagatgccgacacattggcttatgcgttcttgtttacaatactgatactcattgtagatttcatggaggaatatttcagtggtaaggtgacgttcatgaatagcaaatatactatcgttcgttggatttcatacgttgtcatggtagttatggtactcctcttcggagtgcttgatggtggttcatttatttattttcaattttagacgataatggagaaaaaaacgactttattaacattttgtgtgaaggcggtagcactactcgtaattctcttcggcgtagataggctggttggtgcaacatttgtggttatgaaggatgttgcattggcgagaaatccttatcacgaatggacgaagacggcctatatattagataaatgcgatgcagagtgtctggtggtaggttcgtcgaaagcagaaaggtcgtatgtgacagatatattgcaggactcgcttcaggtgagtgtgtatgatggggggcagggaggttgttttttcctcttccaaaattgcgttgtcaacatgcttcttgaccgtggaaagcctaaactgattatctgggatgttcagcctgaatgtttacctgaggggtcaactatgcaggaataccagaacgtacgttatctctcgccatattatgattctgactcttgggcaagggactttgtggattcggaggatagtagggcagctgtgaagatgcaatgccagatgttccgctacaatactaaactggtgcagtatgtgatgcctatccttggtgggggtaaaaagaccaaaggtggttattcacctcttcctatttgtgggtacaagtatccggtactgaaggatggtattgtcaaagcggaagcattgatggtgaaactcgatgagtataaattgaacgtttatgagaagacattgagccgatgtaaggaaaacaatgtagatatgactatcttaatttctccttcctactcaatcaagggaaaggcttataaggaggctgttgtaaaattggcagaagtagctaaacgttatggatatcagttgatggacttctcttctgatgagagatttatgtgtgactcaacgctctttaaggacgcgagtcatttgaacgacaggggggcgagaatgtatacaagcattgtagctgcggcacttaacgacaagaaataagaactgatgaacaacctgttttgtagtttactgaatggagaaattcatggaacaaaactactacctactacaaatacaaaacaaaattccaaaattttaatgaaacgactttttgatattattgcaagtggatgtggacttttagttctgagtccagtattcctaattatggctatttggatcaggctggatagtaaagggcctatattctaccgccaggtgagagtgggacgttataacaaagatttccgaatttttaagtttcgctcaatgagagtgggagctgacaaaggaagtctcattactattggtggtcgtgatcctcgaatcacacgtagcggttacttcatccgtaagtacaagttggatgagttccctcaattaatcaatgtatttattggtgacatgagtttagtaggtcctcgtcctgaggttcgttattatgtgaattattggactccagagcagatgaacgtgttggatgtgcgtcctggtattactgatcctgcgagcattaagttccgtaacgaaaatgagttgatgggtaaggcggaggatcctgaggattattatattaatgtaattatgcaggaaaagattaaactatatcttgaatatgttcagaatgtttcgttctggtacgacatcaagcttatctttcaaaccttcaaagcgattattacagagatataataaagattatataacagttcaaaattcatataacaatgagtacagatttgaaaagaagagacattcctttcagtcctccagatatgacggaggcagaggcaaatgaggttcgtgatgcagtcctttcaggttggattacaacaggtccgcgtacaaagaaattggagaaacttgtggctaagtatgtaggtgtaaacgatagtgtagttgttcagacacctaattgcgtatgccttaactcacagactgcatgtgctgagatggctttgcgtattttgggtatcggaattggagatgaagtgattgttcctgtgtatacatatacagcaagcgcctctatcgttgatcacgtaggagcaaagattgtctttgttgatgtacagacggattgccttgaaatggattacaatgcagttgaggctgctatcacagagaatactaaggctatcattcctgtagatcttggtggcattccatgtgactacgaccgattgatggagattgtaaagcgcaagaaggatttgtttcgtccaaagacagatctccagaaaaagattggtcgtgtagcaatttgttcagactgtgcgcattcatttggtggctaccgtatgaaggatggtaagaaggtaatgtgtggcgctatggcagacttctcatcatttagcttccatgcagtgaagaactttacaacagcagaaggtggtgcgttgacttggaatttactattcggagaagaacctgttgttctcgaccttgatttgaattcagaaaacacctttagtagagtatcaatgaaggagggtaacaattggaatcagcgtatctatcgtatctgtcagcttttgtcactccatggtcagaataaagatgctcttgctaagactaagcttggagcttgggagtacgatgtcgtaggtccatggtttaagtgtaacatgactgatgtcgtagcagcccttggtctcattcagtttgagcgttatccagagatgcttgcaaagcgtaaggagatgattgagaaaatggatgctgcctttgctgacataaatgtagctgtattgaatcattatggagaaaaatacgcttcaagcggtcacttatatgttgttcgtttgttgggaaagactcgtgaacagacaaatgaggtaattgagaagatggctgaacgtggtattgctaccaatgttcactacaagccacttcctatgatgacagcttataagaagatgggctttgatatcaaggactttcctaacgcatatcatatgttcgagaacgaaatcactctccctttgaataccaagatgacaatggaggacgttgactacgttattgagaatttcgtggatattgtcaagtctttctaatttctttatcttaatctcaatgaagaagctcaaggagggcataagaagtttgtgtaaattctgtgtatatattttggggggcgaaagagagactgaacgaggtatagtagaatagtgagttgaataattattaaagtcaatattatgattacaaaagaattaaaaaagaaagtttctagcttcgtagaaatggggcagcgttctgattctatgcagttaatgctatcagagtatgtagcaaggtgtatacagattgctgaggaagatgctgctgaagcttttaagaagtaattatcagtataagggtaatgtttgcagtttgatagggggctactaatatcagcaaaaatgaatttcacttacatttcccataaaaagacgatgggtataaccttgtttacatactgtactagtctgtatcttgtccataaggagttactttcccagattgttgctttccttgtctgtcattaaattagctagcctaccatgattgggagaattgacttctatgtccaataagattcggcaggcgtattagaaaaactttgtgtgaaggaactggttggagagtccattaaggtcgacttcgatatccttgtactagaagtgccttgtcgaatctatgacactttgaaaatgttcctcctagtcatagtatgttatgaataataagaagacgatgaaggagtacttgctgaggactgatgaattgtgggatttgtttgccactgtgcctcgattccatcctgaaaaagtttgggagaaggagaaaaatagttacctggtcggatactgataaactgctcttcggaagtaaaaaatagagatttttataatgctatttcgggctttgactataaggatcccatgtccttctttgatgccacaaggagactggaggctgttatagttcgggaggaggggcggaaataaaccacttggtaactgattgctagattacgaataacgttaatagtgaattaatggcaggaaagaatgatcagaactttatcgctttctgtaatgagttaagagcatatatctctgaaaaccatcatttcccgaataagcatacccggcttttgaataagataaaatttgtccgccggaaaattaacctggggacgctggaggagtggaaactaaagatgttccttgaaatagcagagatgagggatatggacgagcatactggagggcgaaagaagaaggtgcaggacgatcagtaaaggtatcctgcgtctttttattttgatataaaaaagaaataaaaagaattttctcgagaatttcaatcaatataccgtactggctgggtgaaatggggatactcggtcttgcgaagaattgtataatccccaagaaagaaatatatgaaaagattgaaagaattattctattatgtattggcggcgttaatgtttaccagttgccagtcttacaaaaaagtaccttacctacaggatgctgaagttgtattgtacaatacccgagatacagagctttatgacgctaagatcatgcccaaggacctgctgacgatagtggtgtcatgtacgagtcctgaattggtagcacctttcaacttgacagtggccacacagaacaatgctgctttgagttatacaactactcagccagttcttcaacagtacctagttgataacgatggtaatatcaacttccccgtattgggtgaacttcatgttggtggcctaaccaaga

SEQ ID NO: 81 - DNA, 16488 bp, unidentified
  source 1..16488: mol_type = unassigned DNA
taacgcataaaaataccctccttactggttgtccagtaaagagggtacatatcattgatatgtccggggttttctatattcttcctatgagaaatgcaaatctcagtgccatttcgtccatcatacggcttcttaaacgctttggatagaatactttggtaatcacatccgggaaatacttttcaccggagaaaagccttaataatcttctgtcagagacatcgagttcaggtccaactgtctggtagaaatccttgattatatcgtgaaaatctttaaaacctcctccgaagaggtatttaaaacgccatatccataatccccagaaagactggttggatgctgttacggcgctttcgtgccgcctgtaaaaagcgcaaggctcctcatcaaagactatgtctgcatatacggagtagagcatgctcatccatgtgccacgtcccgttgaaaacgaaggcttgtgtgaattaagcagtttgagtgccttacggttgacagccattgtaaattcgagaccacatacttcaaagagagtatctttaagttttatatggcttccggcaggatgatttggagtcgcggtacggattgatgcgagattttcatcgcatattgtgtatccgccgtaatatgccgcaggtctgttacctgtaagagcagaaagcattcttattgcgcgctctattttatcgggaaaccatacatcatcctgatctgcaaaaaagtaatattcagcatccggcgcggtgtccgtaagttcatagaaacatgccggatatccgagattgcccttatcatcggatatgagatgaatgcgggaatccctgcggcaatagtcttttataatatcgactgtaccatcaccggaattgtcatcacggataataagttcccaattgtcataactctggctgatgatgctttcaatctgggctccgatgtattctgccccattgtaagaagagagcagtactattgctttgtccatatacacctcctgctattctgccatgtatgcgtcgtattcgcttatagcatcaagcattgccttagggccgggagcgccttttgtaagacgtttttcaacacaggttttaaggctgattgcttcgtagatatcgttttcaaaaacaggtgataccgatttgtagtcatcaagaggcagttcatcaagcgaaatgcccttatctatgcacataagtacgagccttccgataattccgtgtgcatccctgaaaggaataccgtggtttacaaggtaatcggcagcatcagttgcattggtaaagccattcttggcacttgcttccataacaggcttgttgaaagtcattgtatcaatcattccagtaaagagtgcaatgcatcctttggtggtgtcgattgcatcaaaagtaagttccttatcttcctgcatatctttgttatatgcaagaggaagtcccttcatggtcgtaagaattgacatgagagcaccgtatacacgtcctgttttgccgcggacaagttctgcgatatccggatttttcttctgaggcattatcgaacttccggtgctgtatgcatcatcaagttcaataaagcggtactcattggtattccatacaataatttcctcggaaaaacggcttaaatgcatcataatggtcgataatgcacttagaagctctataatataatctctgtcagatacagaatccatgctgtttgatgtagcgcctttgaaattcaggagttcagcggtaaattcacggtcaagcgggtaagttgtacctgcaagtgcgccggcaccgagaggacagtagttcattctctcacggatatcatgaagtctgctgcggtcacgcctgaacatttcaaaataagcaccgaaatggtgtgcaacagttacaggctgggctttttgcaaatgagtaaatcccggcatgtatgtctcaacattttccttcataattcttaaaatcacggcaagcagctctttaagcagagcatcagtctcgcctatctcatcacggatatataacttcatatcgagagcaacctggtcattacggcttcttccggtgtgaagtttcttgccggtatcaccgattctttcgattaatgtagcttccacgaaagagtgtatatcctcatattccgggctgatttcgagtgtaccgttttcaatatcactcttaatgctttcaagtccgttaagtatggcaaaacgttcctcgtttgtaacgattccctgttttgcaagcatattgacatgcgctatgcttccgtcaatatcctgtttgtaaaatttctggtcaaaagataatgatgcattaaaattatgcacaagctggttggtttctttagtaaatctgccgccccaaagtttcatcattcaacatcctttcctgatgcttgtattttgttatcttgtgcgctgcgctttgcgagtcttgcattggcaagttcggtaagggcaccgtcctcggatatttcttttttaaagcgtatcctatagaatatacatcctgcaatcagaagaaggcttatgattgacaatacggtaccggttctaagtccgcgcggaacatatttaaattcaatatcgtgtgttccggcagtaagatatacggcgatgaaagcattatcgccgatggaagtataatcggtttttacgccgtccacatatacggtatagctttcgtcatatggtattgatgtatataaaagaccgttatttttggcggtcacgcttcctttgatatgggtatcatcataactttctatctgaaggccttcatcagagagcgcatcataaagctgtttaaatttatcaaggtcaagtacgtaagcgtacatctgaaggctttcattgccgccgtccgaatttgacacatgaatcgacgaaccggcacttacataaccaaggtctaccatacgtccgtggtcaacgcccgtgaaagtctctggaacaccgtttacggtaacattaatggactttacggatgtattcatgatgaacatgtacagatattcatttttgtcagccgttatagtcgcggaacttgaatcatcctgaaatgttatcctgtaaaaaaggtcatcaattccggcagctgatgaggcaaacaagttctgaatcacaaatggattcgggttgccggatgcctggaaattgccgttgaaatcagacggaaccatgaatgcgagtgggagagtgtaattattacggtataagtattctccgtcgtattcatcaacaagggaataaatgtcagcccctttgatttcctgattgcttataaaatatttaatatcaaaaatagaataaacaagcggtgtggcgccgtttatggcatatgcgttcgtcgaatgttcaagtcccatataatcatagaaagaagtgagcgatgcatatgcggttgatgagaatgtggatgctccgtggaaattatgccatgcggaatcattcttggagcggtatccgcggaatttggtcattctgtagaaatcactgtttccgttttccatttcatcaacagaatccttgagatagttgacactgtcataatctctcatataatacgaacgtgatgttatagaataaccggtgttgtccatattgacggtactttcgatgatcgaaactgcaaaaagtgcaacaattaatatatctgtgcgaagtttcttgtgccttgccaataatgcgatcagcatatatactgcgataaaaataccggttatatataatattttaaaatcaaaatcatcatcatccgtgatagtgtttcctatatatataaggaagagcataacggaccagaagcttccgcctatctgcgtctttgaataattcttaatgttgataaatgcatcataacatatacttaacagaagaaatatatatataaaggactgcctgcacggaagtgaattaggataatggaatccgtgccatataaaattaggaatattcatattaaatgcgacgagaaaaacaattaatgcgattaccttcattattttttcgcgcagacttatcttattgcacataatatagagcgggaagagcacaagtattgcaacaccgcagtaaatattcggcatatggtcaagaccaaggcttacaggagtatttataaggtggcgtttgaaaattgtcacaaaagaaaaataccgtgtaagggtttttggaaaattaatcttaccggaagctgtatattcaagtgcgtacatttccggaagaaggacaactgccgcgaatgcaccggctaaaagtgaatatacgataaatcttaatattattcttgcatactcggtcttatcttctggaacgggccttgatacgatgagcacgataaaatagattaccatggaaatacataccattatcgcaatgtaatagttggacaaaatggtaaatccaagtgtaatggaatacaataatcccttgccttcgtatacaagtttttcaagaccaagtacaacaagcgggagcagaagtacacagtcaagccacataaggttccagctgtatgcggcgatgaacgccgaaagtgcatagaaaagtccaaagacagcggcacttaagctgcggcgtttgttgtgtttgcaaagatataatgtgaaagtgaaacttgaagcggcaatcttaagaagaatgatcgcattcataatttcaatcatgtatttctgcggaaaaagagcgataaaccagttggacgggctggacaggtaatatccgaaaatggccatgaaattagtgcccataccgatatcccagctataatataaacttccgccgtcacggattttactccaaagctcggagaaaaaaggacagtactggtgatacatatcggaacgcaggtaacagctgtcaccgaatggataaatgtcacgaatgataaaaatggcaatcattatgacaagcggtaccacaaaagacataacatatacagcgcggctgtgggtaagttcatgcagtgcggcatagcggctttctctggcgtttttcttttcgttattgtcagtcatcaaaacctccttcatcatttacagatggtttctttttaaaaatgaaaaatttacttgcaaagtagttgaaaattattacaaatacagccgtaataattttggcgacgagttcgttcatattaaatactttaacggtcagtgcaatgaatgcagtttcaaatatcagtgacaggagcctcgcacctacaaaggatgctaactccgtaaataacacatcagctttgaaagttctgctttcaaatacaaaaagcttgttggttatgaatgcaaaaagcaccgcaacgacccatgctattatattatacacaaccgggtcgaccatggtaaatttatagaagaggtaataaacggcataattgacaaccgttgtaagacctccgaatataatgtaggtaattgtttccttattaaaaagcttaaccagtaattttttcatccgattttaccttattgcaatcgggaagattgctttcctttgcgatatatataggcctgcgcttgatttcggtgaaaattcttgcaatatattcaccgacaatgccgattgacaactcaataattccgccgagaaaaagcaggataataagtgtcgaggcatatccgggagcatcaatgccggcaacaagtgtcctgattaatataaaaatagcataaatgatagctgcgatgaatatgataaatcccataacggagaggattttaagcggtacaacggaaaaagaaaaaataccgtccattgcgtaacgcataagacccttgaaactccacttggtggtgccgattgtacgctcgacattctcgtatggaatccattcggtatcgaatcccacccagctgaaaattccttttgaaaaacgctggcgttcggaaattgagactatggaatctaccattttacgtgacattattctgaaatccacagcaccgtatggcattttgacatcggtaagcttgttgttgaatttgtaaaactgctgggagaagaaactccttatgcggcgttcgcctttgcggcttgtcctgtatgcggcgcagcagtcatgtccgtttaagatactttcgaccatacgcggtatcagtgctggtggatgttgtaaatcggcatccataactataacgtaatcaccgtccgaagcgctaagaccggcatacataccggcttctttgccgaaattccttgaaaatgatatatatctgacattgtcatatgttgcggccattcctttaagaataattaatgtgtcatccctgcttccgtcatctataaaaatatatctgaactcgcagccgtcaatatggcttacaaccttctgtgtttcgctgtaatatgttgtaagaacatcctgctcattatagcagggaactatgatatctattttattcataaaaacccactttccgtaaacaacataatctgttatattatatattagtttcataatatagtcaagtttgacggcacccataaaaaacgcaaaaaaagcttgatttagacagaatgagatgatataatatcatccggtgtgttgtgtcgggacagacacagatgccgaataataaccacgcctgacggatacagaccggttggtgccattgctcatggttgccggtggtgcgcgggcggaagaatataaccaacggaggtattaaaatgagcgttatttcaatgaagcagttgcttgaagcaggtgttcacttcggacatcagacaagaagatggaaccctaaaatggctgagtacatttacacagagagaaatggtatctatatcattgatcttcagaaatcagtaggtaaggttgacgaagcttacaatgcagtatatgacattgcagagcagggcggaacaatccttttcgtaggtactaagaagcaggctcaggacgcagttaagactgaggcagagcgttgcggaatgtactatgttaatgagagatggcttggcggtatgctcactaacttcaagacaatccagagcagaatccagagacttaagaacatcgagaagatggaagaggacggaacatttgatgttcttcctaagaaggaagttatccagcttaagaaagagcaggagaaactccagaagaaccttggcggtatcaaggatatgaagagaatcccggatgctattttcgtagtagatcctaagaaggaaagcatctgtgtacaggaagcacatatcctcggaattccacttatcggtattgtagatactaactgtgatccggaagaacttgattatgttatcccgggtaacgatgatgcaatcagagcagttaagcttattgtatctaagatggctgatgcagttatcgctgctaaccagggcgagacagcagaagaatatgaagatgttgtagctgacgaagctgaagcagagacaacagaagaggcttaattttacagataataaggaggattttacaatggcagcagttaccgcagcaatggtaaaagaattaagagaaatgacaggcgccggaatgatggactgcaagaaagctcttggacagacagacggcgatatggataaggcagtagagttcctcagagagaacggtcttgcaaaggcagctaagaaagcaggaagaattgcagcagaaggtcttgtaacagcagttgttgacggagataagaatgcagcaatcgtagaagttaactcagaaacagacttcgttgccaagaatgctgattttgcagagtatgttgcagaggttgctaaccaggctcttacaacagaagcagctgatattgatgctttcatgaaggaagcatggaagtctgagccgtctaagactgttgaagaagctttagcaggaaagattgcagtaattggtgagaaccttaagatcagaagattcgagagagttgcaattgacaacggatgtgttgtatcatatatccatggcgcaggaagaatcggtgttcttgttgtagctgatacagcagttgttaatgatgatgttaaggaagcacttaagaatattgcaatgcagatcgcagccatgaatcctaagtatatcagccgcgctgatgtggatcaggattatatagaaggcgagaagaaggttcttcttgcagaagctaagaacgagaagcctgatgctaacgaaaagatgcttgaaggcattgttaacggacgtatcaataagcagcttaaggaaatctgccttatggatcaggtttacgttaaagctgaagatggtaagcagtcagtagctgcataccttgctgatgtatccaagaaagttggttcagatgttaaggttgttaagttcgtacgtttcgagaccggcgaaggacttgagaagaagaacgaagattttgcagctgaagttgcagcacagatgggtatgtaatttaacatttgtaaaattttgtccccgcattacgttaagctttgcggggacttttttatagtccatgaaagagagaaaaatatgagacagcacatatgcagggccgcaatagcggcagttgcggcagtgggactttttctgacagcctgttcatcacatgaagaggattacgtgaccaataccgagagcataacggaaacagaagagaccacagccataacccaagctgaatatggggcggaggattttattcaaagcgagaaacagaccagaaaacctaaggagacgcagccggtcacagaggtttctacagaatgtacacagccggaaacaagcattgaggtacagaagacagaagagccggcacagaccgaacatgtacataattataccggacaggctaaagttgcagctacagaatatgcacccggaataatgacgtatacatgttcaacgtgcagcaaatcgtacgaagagcgttatgcgcttccacatacgattgatgtaggaggcggcagcgttaccgtatgtggttactgggataaaacatcatccaatgagctcatgaaacttcttaacgagtacaggaagaagaataatcttaacgtgcttaatgacgatgccggacttgagaatacggcaagactgagagcagttgagtgctcgtatcttttttcgcacaaaagacctaattccgacagatgctttacgctgtatccggaaggatataaagcggtggcagaaaatattgcatcggggtatggaaatgcatcggaaacaatagaggcatggaaaaattccaacgaacataataaaaatatgctcaatccggaatataactatggatgtgccggtgtatttgtggtttttgacaaaaacaacgcaaataatggtaatatattatatgtacagtcgttcatgaagaaataataaaacgggtaccggcacagaaaccggtacccgttatttgtaaacatttagaagattaacacttctccagtgcctgcgcaatatctgatattaaatcagccttatcttcaatgccgcagctgattcttataagttctgcaggaacgccggcttccttaagctgttcatccgtcatctgcctgtgagtgcttgatgcaggattaagacagcaggttcttgcatcggcaacatgcgtctctatagcagcaatcttaagattcttcataaatgtgctggctgcttcgcggccgcctttaagaccaaatgaaactacgccacagcttccgtcaggaagatatttgctggcaagttcgtaatacttgtctcccggaaggctgcagtaattgacgtatgctacctttggatgtgagtcaagatattcggcaacggcaagaccgttttcgcaatggcgtttaacacggacatggagactttccagaccgagattgagaataaaagcattctgagggctctgtatcgaaccaaaatcacgcataagctgtgcggtacatttggttatgaaagcaccctctttgccgaatttctcagcatatgtgataccatggtagctttcatcgggagtacataatcccggaaatttatccgcatgagccatccagtcgaatttgccgctgtctacgatggcaccgccgactgctgcaccgtgtccgtccatatatttggtggtagagtgtgttacgatatcggctccccattcaaacggacggcagttaataggtgtggcaaaagtgttgtcaacgataagaggaacgccgtgtgcatgcgcgcatttggcaaatttctcaatgtcaaggactgtaagagcagggttagcgattgtttcaccgaatacagcgcgtgtttccggcttgaacgcagcattgagttcgtcctcagtggcatccggacttacaaatgtaacatctattcccattttcttcatagtcacggaaatgaggttaaatgttccaccatagatggaactggaagctacaatgtggcttccacactcacagatattgaaaagcgcatagaaattggctgcctgtccgctgcttgtaagcattgcggcagtaccaccctcgagttccgcgattttggcggcaacatagtcattcgtaggattctgcagtcttgtatagaaataaccgcttgtctcaagatcaaacagctttcccatatcctcgcttgtattatatttgaaagttgtgctctggatgataggaatctgtctcggttcaccgttgcccggtgtgtatccaccctgaacacatttggtattgatgttcataataaacctccgaaaaataatttgatagagtgattatatcatataaatccggataattgaatacataaataaaagttgcaatagtaataaagaaagtttataatctttgtgacatcatatttacatcaggagaaatatacatgaatgtgtcgggatttgaattctggtacccgatgctcacgagtatgttgatttctgcgggatctgttgttagtccagcttgtattctgatatatgccggaggtgttggagttgtcagaaaatattaaacattatattgtgaacgggtactgttttgaaaatgaagatgagtaccgcaaggccctaaaggagaaagagggtataaaataccttaattcaaaaattgtatttgatgatataaataaggtcacaaggctgtatgaagatttgattgataaagatgtattcacaacacagatagggattgaatatatgcgtaaacttcgcacacttatcatcaaaaaaggcggttcaaatgatattccgtatgcagtcattaagactgtaccggataatgtaccggccggagaaccggacagacagaagaaatataaggagcctaaagtcccttttaaggataaattcaggacctctcttataatcaatattgtacttgtaattgtggttgccataatgttcgcgatagcactcagcagttccaatcctaacataattaactatgaaagggtgcttcaggataaatatgcgggatgggcacaggaactgtcaagcagggaagaagcactacggatgcaggagaatcagaattcacagaattgacataattttatgagaaaatgcagactatgatttgaacaaaataaagcgtatatacataaaaaccgcgtgtcaggagatagttatatgggaaataaaatacttgttgttgatgatgaaagcagaatgcgtaagcttgtgcgggattttcttaccagaaaaggatatgaggtcgttgaagcagagaacggcgaacaggcgatagatatattctgcagtgacaatacaatcgatctgataatactggatgtaatgatgcctaagatggacggctggcaagtgtgccgtgaaatacgcaaactatccaaagttccgatcgtcatgctcaccgcaagaggcgatgaacaggatgaattgttaggttttgaactcggagtcgatgaatatatatccaaaccgttcagccccaagattcttacggcgagggttgatgctattttaagaagaagcagggctgaccagagtgatgttctttcacttggaggaattgaggttgataagacggcccacattgttagagtggatggcaaaccggtggatttaagttataaagagtttgaactgctgacttattttatggagaacaagggaatagcactttcacgtgagaagattcttaacaatgtctggaactatgattattttggcgatgcgagaacaatagatacccatgttaagaagttaagaagcaagctcggagccaaaggagacctcattaagaccatctggggaatgggatataaaatggaaaatgaataaaaaatattgacaaattatttgatgtatattagtatactttgctataaaggtatttttttaggatgccttaatagacaattacagtcattcagactgcagtcaaggaggaatttaatatgaaaaagtttacaagagtggcagcaggtcttcttgcagtagcacttgcggcaacaatggcagcaggatgctcaaagcaggggaacgcttccaaagattccgataagttctacataggtggaatcggacctacaacaggcggcgcagctgtatacggtaatgcggttaagaacgcagcacagattgccgtagatgagattaatgaagccggcggaatcaacggatacaagattgagtataagtttgaagatgatgagcacaatgcagagaaatctgttaatgcttataactcacttaaggactggggaatgcagattcttatgggaacagttacaacagatccttgtaaggcagtagttgcagaatcaggcaatgacaatatgttccagcttacaccttcagcatcatcaacagatgtaattaaaggcaagaatgtattccaggtatgtttcactgaccctaaccagggtactgctccagctaagtacatcggtgaacataaacttgcatctaaggtagcagttatctatgacagctctgatgtatattcatcaggtatctatgagaattttgcagcagaggctaagaaccagggatttgagatttcaacagcacagacatttacatcagatgccaagtcagaattctcagttcaggttaaagcatgtattgattccggtgcagatttgattttccttccgatttactatcaggaggcatcacttatcatcaaagaagctagtgatgaaggtgctaaggttacattcttcggatgcgacggacttgacggacttctttcagtagatggatttgataagaaacttgcagaaggcgttatgcttcttacaccattctcagctgactcaacagaagaaagaacagcagcatttgtcaagaattataaagagaaatacaatgacacacctaaccagttcgcagcagatgcctatgatgcaatttacatcatcaaggcagctatcgaaaaggctgatgttaaaccgtcacagtcagtttccgaaatcggagatgctcttgaaaaagcaattacagagatcacttatgaaggaatcacaggtaagggaatgacatggtcagagtcaggtgaagttaacaaagaccctatggctgttgttattaaaaacggcgtatatgtaagtgccgaataaataatatcttatagaattatttataccaataccaatatggacagagaggtcccgatatggaatctttctgtccgttattgggttttaaacagccgctgatacggcgcaagaaataaggacaggagcgaagcagacaatgagttttatctccaatattatcgatggaattaatcttggaagtatatatgccataattgcccttggatatacaatggtatatggtattgccaagatgcttaattttgcacatggtgacgtcataatgataggtggctatgtgttatatgaaattatacaaggattgggatatcatccgcttctcgcgattttcctttcaatgcttgtttgtacaattttgggcgttgttattgaacgcgttgcatataagcctctcagaggagcaacatcgcttgccgtacttataacggcaattggcgtgagctatttattacagaatgttgcacagcttatttttacctccaatccgaagagtttcgattccggaatagatttcggaacaatttctcttgcaggaggggaccttaagattaaaggttcaacgatacttacaattgttgtaagtgcagcaattgtcgtaggtcttctgatttttatcaaaaaatcaaaaacaggccgtgcaatgttggctgtatcggaagacaaggatgcagcaagacttatgggcgtagatgtcaataagacaatcgcagttacatttgccataggttctgcgttagctgcaatcgcgagtttcttcatgcttaccgcaatgcctaacctcacaccgacgacaggttcaatgccgggcattaaagcgttcgtggcagctgtattcggcggaatcggttcgataccgggtgcatttgtaggaggaatacttcttggtattatcgaaagccttagcaagaaatatatttcgacaacacttgccaatgcaatagttttccttgtgcttatcatagtgcttatatttaaaccgacaggactgttcggtaagaaaatcaaagagaaagtgtaggtgggatatatgaaaaacagaaaaataaatataaaaaaatccacacttactactttgataacgatagccggaattataatagcatatattataatgaatactctttccaacggcggctttctctcatacaagatgcaaggccttttagtaccgatatgtgcatatgcaattcttgccgtatctcttaaccttgttgtaggtcttttgggcgagctgagtctcggacatgcaggatttctgtatgtcggagcttataccggagcaatatttaccaacattaccgctgatatgatatccaatgatcttgtaagattcattctcggaatggtagtgggcggtgtgtttgcggcaatcttcggacttataataggttcggcggttctgaaactccagggagattatcttgccatagttacacttgcattcggagagattatcaagagcgtcctcggtaacgttctttatatatccaaagacagcagcggattgcatttcgatgttaccgatggctcaacacttaatccacaggatataattgccaagggtgcacagggaataacggtccagagactgtcgaccttcctgataggtataatattacttatattgactgttattatagtcatgaacctttctgactcacgtgccggacgtgcgatcaaagccgtcagggacaacaaaatagcgacagaagctgtgggcataagtgtatccaaataccgccttatggcattcacaatttcagcagcacttgccggagtggcaggtgtgtattatgcacataatttcgcgacacttaccggaaccaagttcgattttaacttttcaatcaatatccttgtaatggttgtgcttggcggaatgggaaatattccgggctcaataatagcagcaatcatacttacgattcttccggaagaaatccgtttcctcggaaattaccgtatggtaatttatgcggttgtgcttattgtaatgatgattttcagctggaatccaaaatgtattgaatttcgtaaagttgtttcaactaaggttaaatctgttttcaaaaagaaaaataaggaggttcagtaattatgtcaatgcttgaagttactaatctcggtatatctttcggcggattgcgcgcggtagataattttaatgtaaatatagaggaaggccagctttacggccttataggacctaacggtgccggtaaaacaacaatttttaatctccttaccggtgtgtataaacctgatacgggtagcgttaagttagatggtatggatatcacaggcaaatccgtcgtgcagattaacaaagacggaattgcacgtacattccagaatataagattattcggaaaacagacagtcctggataatgttaaaataggtcttcataatattcacaaatatccggctatagcaggagtgctcaagcttccgtcatattttaaacatgagaagcagatgaatgaagaagcaatggaacttcttaaagtttttgatcttgaaggtgaggctgatacgcttgcatcaaaccttccttacggcaaacagcgtaaacttgagattgcaagggctattgcaaccaaaccgaaacttctgctgttagatgagccggcagccggaatgaacccaaatgagacaatggaactggtcaaaaccatcgcttttgtcagggaacattttaaaatgacaatattattaatcgaacatgatatgaaacttgtctcaagtatatgtgaacagcttaccgtgcttaacttcggaagtgttcttgcgcagggagatacaacagaggtgcttaataacccggaggttatcaaagcatatcttggagaataggaggcatacgatggcattacttgaaataaataatcttgaagtgcattacggagttatacatgctttgaaaggcatttcttttgaggttaacgaaggcgagataattgctcttatcggagccaacggtgccggcaagacgacaactctt

SEQ ID NO: 82 - DNA, 7736 bp, unidentified
  source 1..7736: mol_type = unassigned DNA
gatgatgtcagactcttccataccagctacgtgctggatagcaccggaaataccgattgcgaagtatacgtgcggacgaacagtcttaccagtctgtcctacctgaagatctttcggcttccagccggaatctacaactgcacgagagcagcttactgtaccgccaatagcctcagcgaggtcatcaagcagtttgaagttctctgcgctgccaactccacggccaccggaaacaaggatctttgcatccatgatatcagctacgtcggatactgccttaacgatctcgagaatctcaacgtacttgttgtccggagtgaagcccgggttgaattcgacaatttcagcttttctgccagcctcacggtcaagcttctgcataacgcctggacgtactgtagccatctgcggacggaattccgggcaagcgattgtagcgatcgtgttgccgccgaatgccggacgggtcataaggagctgaccatgtttctgctctttacccggcatagctacgagcgggaaatctccgatatcgagctgtgtgcagtctgctgtaagacctgtatggatacgtgcgcaaacacgcgggccaaggtcacgaccgattgctgtagcaccgattaagaagatgtccggcttgaactcgttgataacagatgtgatcgcatgagtatacggctcagttctgtaatcttttaattccggatcgtcaacaacgataactttgtctgcaccgtactcaccgagttcgtctgcaagaccttttacgttggaaccaactaaaactgctgttacagttgttcctaaatcttttgccaggtctttacctttaccgatcagctccagagcgatgctgctgatctgattgtctacctgctgtgcaaagacatatacacccttatattctgctaaattcatcacttttcaccacacttttctttttttgaattaaagtacatgtttctcagtaagtttctcaacaatgtaatttgcagctgcggacggatcaaggtttgtctccttaacgcctgcaccctttcttactttgtcggaagccttagcgatctgagtcggggatcccttaagaccaaggttggaatcaaggacatctttcagatcttttctgccccaaacggtgatctctttcttgtatgcatcgaagattccgcccggagtcatgtaacgcggctcatttaattcagaaagtgctgtaattaagcacggcattttagcctttaacatcatgtatctatcatcgaactgacgcttaacgattacggaatcgccatcgatctcgatgccctcagcatagctgattaccggaagaccaaggtgctcagagatctgcggacctacctgagctgtatcaccatcgatagcctgacggcctgtgatgatgaggtcatagtcaaggtttcttaaagcaccagcgattgtctgggatgtagcccatgtatcagcaccgccgagaacacggtctgtaacaaggataccgttatcagcgcccatagccatagcctcacgaagaacttcctcagccttcggaagacccattgtaactactgtaacttctgcaccatactgatcttttaagcgaagagctgcctccagaccagctttatcatccgggttcatgattgtgagcatagctgctctgtcaagtgttccatccggtttgaactttacgccgcccttagtatccggcacctgttttacacaaacaacgattttcactgtatttcactccttattttcatttatagttatgatcttccagctgttaaattattattttaacagtgcgccggagataaccattctctgaacttcacttgttccttcgtagatctcggtgatcttagcatcacgcatcatacgctctacgtcgtactctctgatgtaaccataaccaccatggagctgtacagcctttgttgttacttccatagcaacctctgctgcatacagtttagccattgctgcctctacgccgtaggacttctgagtagccttagccattgctgcacggtaaaccatcatctgagcagcttttacctttgttgccatatcagcaagctggaactgtgtgttctggaactgaccgattgtgcggccgaactgctttctctcttttacgtaagcaactgttctgtcaagagcgccctctgcaagaccaagagcctgagcagcgataccgatacgtccgccgtcaagagtatgcatagcgatcttgaagccctcacccttcttacctaagaggttgtccttcgggatgcggcagtctgtgaaaataagttcatatgttgcagatccgcggatacccatcttcttctcttttgtaccaaaagtgaagcccggtgtacctttctctacgataaatgcggaaatctctttctgcattttgccacgtttctcaacagtgcctgttacagcgataacgatgtatgtatcagcatacttaccgttagtgatgaagcacttggaaccgtttaatacccactcgtcaccgtctaaaacagcttttgtctgctgaccctgagcgtctgtaccagcgcccggctcagttaaaccgaatgcgcctaacttctcgccttttgcaagcggaacgaggaatttctgcttctgctcttctgttccgaatgtcataatcggatccatgcaaagggatgtatgtgcggaaacgataacgcctgtagtaccgcaaactttggaaagctcctcaacgcacatagcgtatgtaagcggatcacagccctgtccaccatactccttcggtaccggaataccgaggaaaccgtttttagccatcttctctacggtttcaaccgggaatctctcttcctcatcaacctcctgagcaaggggtttgacttccttctcggcgaaatcatggaacagtgttctcgccatctcatgctctttacctaatgtaaaatccatgtttttagttcctccttgtgaattgtatcatgtataacatgggggaatgtggatgcttcactcccccgatgtacctaatttagtacatgccttttcattataacatattgtgaaaaaataaacaatcgtaataaaaaaataattcgaaatttactcttctgttataaaaggcatattgcctgacgggataagatcaccgtcaggcaacccttacattattatttgctgtaatcgtagaagcccttgccggtctttcttccaagaaggccgccgcgaaccatcttcttaagaagcggatgcggacgatacttcggatcgcctgtctctgtctcaagaacgttcatgattgcaagaacaacatcaagaccgatcagatcaccgagagctaacggtcccatcggatggttagcgccaagcttcatggcagtatcgataccctctacggaagcaacgccatcagcgtaaatgccgactgcttcgttgaccatcggaataagaattctgtttacaacgaaaccagcagcctcttctacctgtaccggagtcttgccgatctcctcggagatcttcttaactgcttcaacatcttccggttttgtgtttaaaccagcaataacctcaaccagcttcataaccggagccgggttgaagaaatgcataccgattacatgtctctcaactgcgccgccgatctctgtgatggaaagggaagaagtgtttgtagcaaagatacagctcggtttgcagattgcgtcgagctctttgaatgtctgcttcttgatctccatgttctcgattgcagcctcaacaacgaggtcgcagtcaccacagatatcttttacgcctgttgtgatcttgttcaggatcttgtcagcctcttcctgagtcattttgccttttgcgattctcttctcgaatccagcggcaattttcttctttccgttcgctgcaaatgtctcattgatgtcgcagagcattacctcatagccttctgtctgtgcgaatgcctgtgcaataccggaacccatggttccagcgccgataataccaactttcatgattttatctcctttatgcaaacatatgatgtagacttactgatcgctgttcagactgaacagttccatttatttgtttttgaagccgtccacttttctcttttcgaggaacgccttcattccttccttctggtcctcggtctcgaagcactcggagaaatatttctcttcgatggagattgcgtggtcaaggtcggaaagataaccatctgtcagggactccttggaatttctgacagcgatcggtgcgttggaggcgatcttctttgccagtttcataactgtcggcataagttcttccttcgtgcacacaccgtttacaagaccgatccggtatgcttcgtctgctttgatattgacagcagcatataccatttcctttgcttttccggttccaatcagtcttgcgagacgctgcgttccaccgaatcccggagtgatgccaagaccaacctccggctgtccgaacatagcgttttcggagcagtaacggatatcacagctcattgcaagttcatttccaccgccaagcgcgaaaccgttgacagctgcgatcgacgggatcggaagtgtctccagcttacggaaaacatcgtttccagctttactgaactcacgtgcctcctgtacagtcattgtgctcattgcagcgatatctgcgccggcaacaaaggatttctcacccgcgccggtcacaaccagcactcttgttgtaccaagatcgatgctgtcaagaacagcgtctaaatcctgaataacctctgtatttaaagcgtttaatgcctccggacggttgatggtgataacaccaacaaaaccgtcctgctcatattttacaaaacccatatgtagttctcctcagattttgccaaagtcccagattagtctctctctacgattgtagcgcagcccattccgccgccgatgcaaagagttgcaagacccttcttagcatctgctttctccatctcatgaagaagtgtaacaaggatacggcatccggaagctccaaccgggtgaccaagagcgatcgcgccgccattcgggtttaacttgttaaggtcaaagccaagctctttgcctactgctacagactgtgcagcgaatgcctcgttagcctcgatgatatcgaagtctttgatctccatgcctgttctcttaagaacttttcttgtagctgcaaccggtccgatacccatgatcttcggatctacgccgccgagagcaccagcaacccatgtagccatcggcttaacaccgagctctttagctttctcttcgctcataacaacaactgcagctgcgccgtcgttgattcctgaggagttaccagctgtaactaagccgccgtctttcttgaatgccggttttaacttaccaagagtctcaaccgttgttccgtgacgcgggccttcatctgtatctacgataactgtctcttttttcttcttaacttctaccggaacgatctcgtccttgaatgcgccggacttctgagcagcctctgccttctgctggcttactgcagcgaacttgtccagttcttctcttgtaagaccccactgatcgcagatgttctcagctgtgatacccatgtggtagttgttgaatgcatcccagagagcatcgttaaccattgtatcaactaatgtagcattgcccatacggtatccgtaacggcctttcatcattgcatacggagccatggacatgttctccataccacctgcaacaacgatatcagcgtcaccggaaaggatcatctcagcagccatgttgacagcctcaagaccagaaccgcatacaacattgatcgtaacagccggaacctcgatcgggagaccagcttttaatgtagcctgacgtgctacgttctgtccctgaccagcctggattacgcagcccatgtaaacctggtcaacagcttccggagcaactcctgctctctttaaagcctctttgattacgattgcgccaagctccggagccggtactgtgcttaattcgccacccattgttccgattgccgtacggcatgcacctgcaagtacaactttctttgccattttcttttcctcctcatcataccgctgccaagctctacaccatatatttttccataagcaaggcagtatattatgtataactaatcatatcaccaaaccgttttgctgtcaaatcattatcaaaagctttttatatattttttctaaacaaattaggaactttactcttcatttcgtacaaaagttacttttatgctctgacgcgtcactttctgtttttgtcatgttttaccatttctttctattcctttttcaccggatttcttgaccttgccggcagataatgataaaataatatcagagtttggccccggatcctatgatcccggcaaagttctgagatgcagtaatatttttatggttacaaagagagggtattaaaatggatttcaaacagatgtatcaggaaaagctggtttccgctgagaaagcagcttccgttatcaaatccggtgactgggtcgattacggctggacaacagcaactccgatcgcagtcgataaggaaatcgcaaaaagacttccggaattaactgacgtaaacttccgcggcggtatcttaatgtgggtaccggagatcttcaagatcgagaacccggctgaacatatgacatggaactcctggcatatgagcgggatcgagagaaaagcgatcgcacagggcttctgctactacgctccgctccgttactccgagcttccgagatattacagagaatcccagaacaagccggatgtcgctgtcttccaggtttccccgatggacgagcacggtttcttcaacttcggaccgaacgcatcccatatggctgctgtctgcgagacctccaaggtcgttatcgtggaagtaaatgaaaatatgccggtatgcttcggcggtactgaggaaggtgttcatatctcccacgttgacatgatcgtagaaggtgacaacccggcgatcgctgagatgggcggcgctgcagctgcaagcgatgtcgatgaagcagttgcaaagctgatccttgaggagatcccggacggagcatgcttacagctcggtatcggcggaatgccgaacgcagtcggtgctctgatcgcaaaatccgacttaaaggatctcggtgtgcacacagagatgtacgttgacgctttcgttgatatcgcaaacgcaggaaagatcaccggcgcgagaaagaatatcgacaaaggccgtcaggtttatgcattcggcgcaggtacaaagaaattatacgactacttaaataagaatccggagtgcatgtccgcaccggtcgactacacaaacgatgtccgcacgattgcgtctctcgacaacttcatgtccatcaacaacgcagttgaccttgacctctttggccaggtaaatgctgagtccgcaggaatcaagcacatcagcggagccggcggacagctcgacttcgttctgggcgcttatctttccaagggcggaaagagcttcatctgctgctcttctaccttcaagaagaaagacggcaccttagagtccaggatcgttccgactctggctcctggctccatcgttaccgatacccgtgcgaatatccactatctcgttactgagtacggtaaagtaaacttaaaaggtctctccacatggcagaagactgaagcgatcatctccgtagcacatccgcagttccgcgaccag

SEQ ID NO: 83 - DNA, 23274 bp, unidentified
  source 1..23274: mol_type = unassigned DNA
agagtgagcatttgctgccggatgtacaggcggcggcaagtatgtatatgactcaggccaatgaagccaatactgcaattcgtgaattgaacaaccaggcttatatggcccgatatatcaagaattatttgaccaatgaaactaacaaataccagttgcttcctgccaattccggcattgaaaatgcaagcctttccacacagctgaatgaatacaatactaggttgttggaacgaaatagcttggtggcacatagtagtaccaagaaccctttggttcgggaaatggacaaatcgttggatgctatgcgaaacgcattgatttcttctatcgacaaccaaatggtggctttgcgtgcgcaaatcagaagtttggaggccattggtggtaaagcgacctcgcagattgcctctaatccgcagcagtccaaatacctgcttagtgtagaacgccaacaaaaggtgaaggaatctctctatctgtatctgttgcagaaacgagaggaaaatgaactatctcaggcatttacagcctacaatactcgcatcatcaccaagcccggtggaagcatgatacctaccgctcccgtaaagaagaacattcttttagtggcttttgctttggggctgctcatccccatggtcgtcatctttattcgtgagaacatgaatacccgtgttcgcggaagaaaagacttggatggcttgagtgttccctttatcggagagattcctttggctttccgtggcaagaaaaagacgaaatcgcatgaggcacataccattgtagttaaagaaggaagccgtgacatcatgaatgaggctttccgcgtcttgcgtaccaatctggaattcatgattggcaaagacaaatcctctaatgtgattattgtaacctcgctcaatcctggcagtggtaaatcgttcttgaccatgaacattgccatgagtcttgccatcaagaataaaaaagtattggttatcgacggcgaccttcgtcacgcctctgcctcagcctatatccattcgcccgaggttggtctgagtaattatttagggggacaggtcgacaaactttcggatattattattacggatgagaaacatgcttcattcagtttcatccctgttggtactattccccctaatccgaccgaattgttgtttgatgaccggttacgggaagcaatcgataccttaaagcagcaatatgatattgtattgattgactgcccaccaattgaactggttgccgatacgcaaattatagagaaattggccgaccgtacgatttttgtggtacgtgcaggcttgctggaacgcagcatgcttccggagttggaaaacatctatcgagaaaagaaatacaagaatatgtctgtaatcctcaatgggacagaaggtgccgacggacgatatggttatcgatatggctaccgatacggttatggaagcggttcttattacggcagtagcaccaagtaatcatgtggctgtttcatcggacaacaaccctttcgcaaagtggcatactcaaaggtatgacggattgccatagccacctgcttcccggagtagacgatggggtacagtctatggaagagtcgttgcaaattctacgggagatggagcaacaaggagtacgcagagtttggcttaccccccacgtcatggaggatatacccaacgaaaccttatctctgcaacagaagttccaagagttgcaacatctctatcatggaatggtagagctaaggttggctgcggaatatatgctcgacaatctttttgaagagcgattggagaaagaggatttgcttcctttggaagaaggtaaacgctacctgttggtggagacttcctacttcaaccctccgatggatttgctgaccgttctgcaacgcattcaaaagaaaggttattatccgttgctggcgcatccggaacggtatgcttatatgcagatgaaagactatcaggttttgaaagagaatcaaatcgatttccaattgaatgtaccctcattggctggactatatggtaagaatgtgcagaaaaaggcggaagatttgttgaaagtcgggatgtatgctcgtatcggttgtgatatacattcgaggggtttttatcaaaggtttttgcaatctgatatccgcaaaaagagggtaacggaattaatgaattaaacaagttaagtcttatgagaaatttgaagatagctgtagccgggactggttatgtcgggatgagcattgccaccctcttggcgcaacatcatcaagtgacagctgtagatgtaataccagagaaagtagataagataaacaatcgtatttctcctatacaagatgaatacattgaaaagtatttgtcggaaaagtcattgaatctgactgcgacacttgatgctgaggcagcttataagaatgcagattttgtagtaatcgcagcccctaccaattacgacccggttaagaattatttcgatacttcccatgtagaggaggttatcgaattagtcaaaagtgttaactcggatgcaataatggtcataaaaagtactatcccggtaggatatactgaaagtgtacggaagaagtttaatacagaaaatgtaatattttctccggaattcttacgggagagtaaagctttatacgataatctttatccgagccgtattattgtaggtagaccagaaggtgatacccgcttagatgaagcagcccgcacttttgcagccctgttgcaagagggtgctattaaggaaaatatagatacgctctttatggggttgacagaggctgaagccgtgaaacttttcgccaatacctatctggctcttcgtgtcagttacttcaatgaattggatacgtatgcagaaatgaaaggactggatacgcaagccatcatcaacggtgtaagccttgatccacggattggtacacattacaacaacccatcgttcggttatggtggatattgtttgcctaaagatacgaaacagttgcttgccaattatgcagatgtaccggagaatttgatagaggcaatcgttgaaagtaaccgtacccgtaaggatttcatagccgatagggtattgaataaggctggttattatgactattacaaccgtggtgatttcaatcccaatgaggaaagaaaatgcgtaatcggagtctatcgtctgacaatgaaatcaaacagcgataatttccgccaatcctcaattcaaggggtgatgaagcggattaaggcgaaaggagcggaagtaattatttatgaaccgactttggaggatggaagtacttttttcggaagtaaggtagtgaatgagatgaatgcctttaagatgcaatgccaagctattatcgctaaccgttatgatagttgtttggatgatgtgaaagagaaagtttatacaagagatatatttaaaagggattaaaatatcctcaaatacctaaaacgggcagtaaacaaaatatgcttacaaaaaatataatattaaaagggaaaactgtattagtaacaggtgttgcaggttttatcggatccaatcttgcaaaaaaactgttgcaagatatttcggacattaaggtagttggcattgataatatgaatgactactatgatgttcggctgaaagaggagagattaaaagacctctcttcctttttatcatttgtattcataaaaggtgatatagctgataaatctacaatagataaactctttgcagaatatcgtccaactgtagttgtcaaccttgctgcacaagcaggagttcgttatagcatcagtaacccggatgcatatatagcgtccaatctgacaggtttttacaatatattggaggcctgccgtcattcttacgacaatgctcaaactggggttgaacatttagtgtatgctagttcaagcagcgtgtatggtagtaataaaaaagtgccatattccacagaagacaaagtagataatcctgtaagtttatatgctgccactaagaagagtaatgaactgatggcacacgcttacagcaaactctataatataccgtctgttggattgcgcttctttacagtttatggtccggcgggtcgaccagatatggcttattttggatttacggacaagttagttaaaggagaaaacattaaaatctttaattatggaaactgtcaacgcgattttacctatatagatgatattgtggaaggaatagtacgtgtgatgcagcatgcgccggaaaaacaaaatggtgaggatggtctacctattcctccttacaaagtttataatataggcaataacaatccggagagtctgcttgacttcgtaacaatccttcaagaagaattagttcgtgcaggtatcttgcctacagattatgattttgaagctcataaagaacttgtcgccatgcagcctggtgatgtaccggtgacttatgccgatactactcctttggaacaagatttcggcttcaagccttcaacatcactaagaaatgggttaagggcatttgctgagtggtataaaaactattacggttgaaaggagcagttacgggggcggattgctatggacgacagattagaccaaccgattttaccatttcgtatgtatgaccagtttaattggtataagtttttagatggaaagaatattcacaaaagaaaatagtcttgaggttaagggagtggctatccttctgatgttggctttccatttgttcggttttcctgagcggattcctgtgatttctattgaatggataggttctcctgtgataaaagcgtttcagatatgtgtgcctttgtttttattcttgggaggatatggtttagaatgtgtggcggttaagaaatccattgataaaaaaatgctttgtgatagaattagaaaactttatacagacttttggtggatctgtataccaacgattgtcataggtatgttgattgactactaccctatggatatctttaagatgttcatggaaattttcggaataacatcggactataatggagaatggtggttcttttccaactatcttgaattgtttctgttgtttatcgtttttcagcatttattaaattctaacaaatatacattgtctaaagcgataattacgcttgttatattgctaatattcagtcgtcttatcggagggtatgtgaattggagggaatatggtatattaggaaggcatattcaaatgatattggtcaatgttacaatctttcttttggggagtgtttttgctcgatattctttattcgaggttgtaagaagggactttggacactggttagatctccctggtatttctatattccttgttattacccctatattggtacgtggatatctaccactgataggaattactgaactcgttgtagtaccaatgttctgccttggagtggtaaatggaatggcgcgagtaggggggggtaaaatattaatgttttttggacaacattcgatgaatatgtggctaactcacacattgttcatctattactatatgaagaagataacttttattaccgagaatagtattgtaatgtatctgacagtaattggatgttcgctcacggtatcgatacttgttggtaaaataaaaaaacatactggtgtgttgaataaaagaatcgatacctatttatcatttaaatagcgagggaataaccacttttaataacctatgctctttagggaatagaattatagcaagtaaatttaaaatggtaatatggcaggaagaggatcgcgtgtaaagaaaacgatacttaatgctcaggtcaatctgttttcttcaagaagaattagttcgtgcaggtatcttgcctacagattatgattttgaagctcataaagaatttgtgccgatgcagccgggagatgtagcagtgacatacgcagatacaactccacttgaaactgattatggattcaagccttcgacatcactacgaaacgggttaaggcatttgccgaatggtacaaaaactactttcattaaaaaacacaaagaaggaggatacaaatccgaatatatacagcaattaattactgattgtttatgaaatacaaatgttattcatttaagaataactcagtgatgattcctatacccgagacacttaatgatgtcaagattcttataggttctgattattatcgtaactgcgaaaaagaaatcggctggggggggtatttctgctactactaaaaggcaatgtacttgcctggttcagactttgccaaataaacacatttcttttacctatatttcggttgatatataaagccgtttcacataaacgtcagatagacatgcctctaactaccaagataggatatggcttctatatgggacatcaaagatgtatggtaattaatggttccacgataataggaaacaatgttaatgttagtcagttcctaaatatcagcagtaacactggaaaggctgccatcatctgcgatggagcatatcttgcccctatggtttgcatagtgggtgaggttgtcataggatataacagcatagttggcgcaggcgcagtggtcaataaagatgttccacctcaatgcaccgtcggtggggttcccgcaaaagtgataagctcaaatttcacacaagaatggcattattataaaccgacacattaaaatgcaatagtatatggcaggaagagaatcgcgtgtaaagaaaacgatacttaatgctcaggtcaatctgtttttttatttcattactttggccttatcttttttctcaagaaaaattttcttggagaatctaagtgatgactttgtcggattgacaagtacacttcaaaacttattgggatttctgaatttggcagaattgggtataggatctgctattggttatgtattgtacaagccattatttgataacaatcacggcaaaataaatgaaataatatctgttttcggattcctttacaggcgcattggaactgtaatacttttgtcgggaatattactaagtgctttcctgccttttattttctcgaaatcagaagtcagtattacgctcgtttattttgcatattattcttttcttacatcatcgctaataggttattactttaattacaagcagacattgttaggtgccgaccaaaggaattatgtcgttaccgcttattttcagacagcaaatttcattaaagccattatacaaatcacatctgcactatatactgagaattgctatttatgggttgctgttgaattggtatttgcaatactctattccataatattaaacagaaagatcaaatcagtctatccatggctggaatcagaagttaagcgtggaaaaaagttattgaagttgtatcccgaagtgatcagatatactaaacagttattcgtacacaaaatagcttttttcgctcaatttcaaactactccatttattctctatatgttttcaactcttacgattgtggcacactatacaaattataccttgatagtaaatcagctaattaattttgccaataaaatacttggaagtacagaagctggtattggaaatcttgtggcagaaaataaggtagaaaaatcatatagtatatttcaggaacttacatcgtttcgatattgggtagcaggaatagaggtgtatgctatttaccacctaatagaaccgtttataattctttggttaggcgaggaatacgtgatggacaaattagtgttggtgttgatattaatcaatatgttcattatgcagactcgtggtacaaatgatcaatttttgaatgcctacggcttgtttcgtgatgtgtgggcacctatagcggaaacatcgcttagcctgctttccgccgtttatctgggatatcagtggggactatctggtgtgttggctggtatgctgatcggtatgattgcaattgttgtatgctggaaaccttatttcctgtttcattgtggatttcataagccggtaatcatgtactggaaggtgatggttttgcatctgatagctttaggtacagccttttgtgcatctacagccttgactggaaaaataattaccatgacctatgataattatctacattggtgcataaacgctatgatacatgtgctaacatttgcggtgtcaagctttatgttgcttttcctgcttactccaggtgcaaagttgttattcaatagattaaaagaaaaaatatgaaggtttcaattatcatacctgtatataatgtttcgacctatttgacaagttgtcttgaatcgtgcgtaaatcagacatataaagatgtcgagataatatgtgtaaacgatggatcacccgataattcattgtcaataatcaagaaataccaagaggctgacaaaagggtcgtctgtatatcaaagcaaaatgagggcttgccgttagcgagaaaaagtggcatcaaggcagctaccggagattatatttttcatcttgatggtgatgatgacttgccccataatgcaatcgagtgtatgatgaagacggcagtggctgaaaatgccgacatagttatcggagattatctttgggtggaaggtaaacaaagaaaagtgattgactccgagataaatgagattctcgattctcgaagctattccaaatatttgttggaaagggggctttttaatatatggggaaaactgataaagcgaagcttatatacgaaaaacgccattgagttcccggcgaaaatagtcatggcagaggatttggttgcttgtgtgcaattggcgagattcgctcaaatcattgttcctatacacaaaatatgttgtaaccattatgttaggacagagtcgatgagccgaaccaacaagtatgtggtcggcgagttgaccgatagaactatccatgcagtgtgtttcgtgtcgcgatactacgagcagatatcacttggcaatgagttgaagtcttcgatagatcatttactgactacgtttctttaccagtatttatgttcaccctatccgataagccatcatagggaaagtttgcaatatataaggagcaggatatcgccggaatatatcaaaaatatttccaatactgtcaaaagaacatcgatacagatggcaatgaaaaatttggaattgtctaaattaatgatgcgctgcatcatgcttttactaaaattgaagaaatgaacatagctttttttctatttacatatcccggtatcgatgggacggaaacggtctctaatttgcttgctgagtggtttactaaaaaagggggggggaattgttgcgtgattgcgtggaaacgtggtgagcacaagactgcaaatagcttgactgacattttttatcttcctgatggtaacaatatcgactccgatgctaatgttgaagccatattggagtatgtgaccaaaaagcagatacgagtcatcatcaatcaaggccctttctggaaaggtacaaaacgactgcatacggcagggtgtagactgatttccgtactacattatgccccttcgtttagaatcgacaacaacaggaatgcaatagacaggctgtacaacaactctgaggggaagaacctgtcatatagaataaagacattggtacgtcattctttcaaagattttttttccaaaagggatttttaccggattgacgctcccttctttcgtgaagttctggagaacagcgatgctttcgtcttgttgtgtccttcctatgttactgagtggaagaatttgctgaaactaagagatgacaggctacttctctctatccataacccaattattgtgcccaaagtcaatggtacgataaagactgaaaaaatgaaaactttacttttcgtaggaagacttacagcatgggacaaacgagtcgatcggttattgtatctgtggagcgagttagaatcgaaatataaggactggaagttgtgtgtagtcggtgatggagaagaaaggaagaatctcatgacattagcaaaagaattacaattggagagagtagaatttgtaggatacaaagacccacggccatattatagaaacgcagatgtcctttgcatgacttcaagttccgaaggatatcctatggtggttcttgaagctgctatttatggatgtcctaccattgcttacggagtttcttcgggtatcaaagaaatgatagaagacggtggcacaggttttgtcatcaaaccatttcaaaaagaagaatatctaacaaagttgagatggctgatggacaatcagtcagaaagagaagctatgggtaagaatgcgtatgtaaggctttctaagtatgacatagaaacaatcggtaaacaatggatcgccctgttcaataaaataagagtagaacaatgaaagtatcaataatcattcctgtatataatttggagagctatatcgcaaagactatagagtcgtgtctgagacaaacgtatggcaatattgaggtggtcattgtgaatgacggttcgaccgatggttcagaaaaagagattgagaagtatcttgcagatgaaagaataatttatgtgaagcaagagaatgccggtgtgtcggctgcaaggaatcatggggtaaagatttcgacaggggattatctgacttttgttgatggagatgatcttttgaagtctgatacaattgaaaagaatatagaactgataaaggcaagtgaaatacctattgattggctggcttttcccgttgtaagaatagacgagaacggttctcctgtcttgataacttgtggtcggcttcaagactatcattacatgaaggtggaggaattggatgcccaaagtgtctatgcccgatatgagaaaggattgtttccaccgatcgtatgtagtatgctgttcaggcgttcgtttttcgaccggcggtttgtaaatggacggtacgaggacacttatatgtttcttgaactattggaaaagtatcctgttgtgttactttcaccttatggcgcatactattatgtaaatagagaaagttcatttatcaatgagccgttttcggcagaaaaatgggtggcttacacgagagccaggataaagtcgataaaagtagggaacatgctgtttcctgaacgagtaagagaatttagaaaaatgagttcgtcgatgtattacaacttgaaatgggtgaagtttaagcataggcatgatgataatttttcaaagccattacatcttttagagtcggaaataccggatattaggaaagggggaaatatggcattgaagtactatatgaaatgtgctgtcagcgtaatgggttcaatccgtagaacaagacgcaaatgagaaacgattgtgtagattgtttaaggggagtgggaatcttcatcatcgtatggagtcatatctctcttggaatcctgttggatgaaatcgtcaacccaattgtcttgggtgtgtttttcatcctgtcgggtatgttctatcgaagtatgccattgtacgacttgctacgttcgaagggaaaaaggcttatctccccttggctgatttttgtagtgatggggtatgtctatcattggttatattcctttgtcgattccaagccattcgattatctgatgttgattgaagacttatatataggggatgattatcgtgcaaacattccttgttggttcttgataagcctgtttgaagtgatgttaatctatgctttacttgaaaagtatatacagtcgagaggaaggaggatagtcgtattgttggtaatatctatcattgggaatataatgttgtgtgaaggctggaattacttttacatagggaagacattgttctacatttcactatttggtgcaggcaatatgtttctaaaacctttaaaacgccttcgtgggggggattttgttatggcggcaacaatattattacttgtaaaagtttatgtaatagataatcagtttgccgattattgtcttggttggattgtcgcattatgtattactgtgggaatcttttctgtttgtggtaatataaagaatacgaatgtcttggcagctacgttgtgcttccttggtaagaattctttggtaatattatcattccatatcttggtgcttgattttgtgtggcggcttttatatccctgttttggaacgcaggggacaatactttcgttttttatatccataatagttacaacgctatgtgtgcctatgatatacgtttacaataatattatgctatctaaattatggaagagagatgagtaataggaatctattggttgatgtagcgaaagggataggtatcgttttagtggtattaggacacagtgggattgagtttgggcattacctgatttatatgtttcatatgcctcttttcttttttttgtctggtatgcttcataaggatagaggtctcaatgaactattgagcgtgaaggtgcctaaaatgggaaaagcttatttactattttttactttgtgtacattagtcagcttagcacttaacggaagaggtttcctttatgaggtcaatgtactgaacccgaaaggcagcgcaggcccactgtggttcttaataagtctgtttgaggcgaatgtctgttttgcgttaattcaaaagtatgccaacaagcattattttacggtatgtttcatgcttaccgtattaggtttcatcttttgcaagaaaggaattcacttgcattgtttcgttgattcaacaatgtccataatgtttttttacggattagggtatgcattcaaatcgaaagataacaaaagattactttctatcccatggtatatgtcagcatcgtttttcattataatgtatatttgggattggaaagttcttcatctgattggaaatgatatatatagtaatacaataatggataatttccttttatacattctatctgcattggctggcatatcttttacattttctattgcgtatattcttacaagaaaactgcaacttgctgggggggtggctgttatgggacgaaactccttatatgtgtttgcaatgcatcggcctgtattagacatttgtcatagtatccatccggcaaacaacgactgtataagatttatatatgtactgattgcgttggcagtaagttactatatagggaagattatttcaaatttaagattgatctaaatggataagaatactcctgttatatctattgttataccagtttataacgctgctccttatttatctaaatgtatatcatctgtgtgttcccagtctttcaaaaattgggaggtgctggcagtagatgatggaagtacggatgattctttgaagatactgcaagaatggttcaaaaaagatagacgtataaagaattaccacagaccaaacggtggggttgttgctgcacgtgaatttgcagtaactaaagccatggggaagtatttgttttttcttgacagtgacgattatttgccaaatgatgcattggaaatattacttcgcacaatggaaacagctaatgcggatttgtgtattggtagctatacacttgtatgggagaaaacagggaaaaatgtttttgtaaaccatagaaagtcctttcgtaacgtaataggttgcttagaatattgcctaaggaatggagaaatgtttttacctataaaactatataaaacagatttatataaaaaatctgttcatatacccaaggggataattgtgcaggaggatactataggtgtaactcaatatcttgaacagtcaagtacagtggtattcacgacacaaaatgtctattactaccttaagcatgaggggactgcaaccagtacctatagccttgcccatattaagggtttgcttgtcgtggtcgacttcttattaggcagtcgtttttgtaaaactacaacatggtgcatccatttttattgtgcaagactgttgcagtattgtctatcatcttctctaaataataatgatacaaagcaatatgccatttgcctcctaaagcacttgtcttggaaagcaagaattatggcacgtatcagtttatgctcaagacgacttgttgcaagcgtaaagaaatttctaaaacattaaaatgaacaataacgtatatactcttttattaccagtattcattctgtcattattgagcgttccacttggtgccatgctcgcattcattatgacgttcacaacaccagaattctataattccaagaacacgaggtatgccttatatatgattttggcattagccatttcgtatataaatacgaccaagccactctttggttctgatctgggctattattattggctatttgactttgccggaaagaaatcctttatcaattacttttcgctcatccctaaggaaccattgtatcatatatataattatctgctccatattattactttagggagttttaatctattcttggtgattacaacggtattatgctatatgctgatattcgtatcatacgacaccattgtccggcattccgacatcgacatacgctatgtgttgttttccgcagccttgtttttgctgttcatcgaatttttcttttacacagctcaaatcatacggcaggtgcttgcaggtgcagtagctttttatggcattaccaaacatctgtatgaaagcaagcgctttgcattatggctggtagcggttgcagggcttatccacgcatcggctttcttttttctgttgtattatgtaatttacttacttcgcaatttgaaatttacaaaattgttatttttagtaataggattccttctggtgtacaaagtatttcttagcttgttgggtaatgtattcgacgatacatctacattgagtattgcgataaacaggggattgcgcggttcgggagaacaagtctcaataggtatgattccgctgcttgtcacctgttctattttaccaatgtcaggttttgtattcttgaagagtgaagacataacagaaaaattattcttcgtatttcccatggcgttggtggttttcatcatgttgaatatcaacacgccattgtttgtgctacggtttatggaatacaattatatgttcattcccattgctctgtccatatcatcagcgtatttgttccggtcatttccaatgtggactgtagtgctattactggctgtcatgcttgtccgcttctgtaccaaattaggaaccagtgatttttcgtacattccactgtttgattatttaagtattggcataccgagatatatagttcaattgataaagttgtgatattatgcatatagtttatataagccaagaatttcctccatccaaaagagcgggaggaattgcttcatacgtaaaagaaatagctgatggaatgatccgtttagggcatcaagtaacgattgttacggcatcagatgatacccgtataagttctgacacagtagaagatggcataagggtgtttcgattatctggaggggctttcttcgttccatcggtagagggcggtagcaagatgaaaaaactgcgtgtgatttaccgttttcattcatatcgtaggaaagttttggaagctataaagaatttgaaggatatcgacctcatagaggttgccgattatggggcggaagggctttatcttggtaggatgaatgtaccagttatattgaggctacatacaccctctcttttagatataggcactttggaaaaagtcaaagcacctctatggaagttacatcggttaatggtggtaaaagcagaggagtctgtgttggaaagcgcgaagtatgtgtcatcatgctcccaatctttgttagactggatgaacgagaatgtcggtttcagtcctcgccgactcactgtgataagaaatcctattgcattttctagtaatgagcctatcgtatctgatgttaagaaaccgactgatgggtttactgtattttatgccgggactataactggaaccaagggtgtacaggaattgtatagagcttgcgagcgactgaaccgtgaaggtatgaacataaccctaaagctagcgggaaaacagggggcgtatgcggaaaatctgaaagaagaagtatccaaaggttgcaatagatggtgtcaatttttgggaaatcttgcgagaaaagatttatacacgtattattctaatgccgatgtttgttgttttccatcatggtgggaaaatatgccgatggtgtgccttgaagctatgtcgtgtggggctgtcgttattggctctacatccggaggtatgaaagaaataatagaagatggcataaatggctttctctcgatgccacgtaatcccgatgagctggctggaaaactacgtatggtgttgtcgatgggaaaaggtgagacaatgagagtgagacaggctgcgcaaataaccatcaaagagttattctgtacagatgtgatagcagccaagatggaaactttctatgatgaggtaattaaagatttcaaaacgaaggagacaatgttgtgaagattacgtgggttacaagaagttttagggactatcgcattcctgtgtatgccgcgttagacgaactctgcaatcacgaattgacagtcatatattacagtgatgcatgtcctcaaggagcgcaagcgaaattgaaagcgatattaggcgaacgagccatagccagaacaaatgaattacgtattggaaacggaaagaaactagacaatgccacaaaaatgaaaagttcgattcgtattcctctgagccccggcttgattcaccaagtcatcaagacaagacccgaggcattggtatcggatggttttatgcagtggacatatgcacctcttttggtgaaagctataaaaggaatacctcatgtgatgtgctacgagcggaccgagcatacagaaaggagagcaggaaccttgcggaaacagtatcgtagatttgtcagtaagtggattgatgtcatagactgtaacggagtactttgtggcgagtatgttaagaaattgttaggttggaaagacaacagactgacttacggacacatggtagctgatgtagaaggcatgaagagtgatgtggagaaggtaacagaaatccaagttgccgcattacgtgaagatttacaagtggctgggactgtcctgctatttgtcggtcaattgatagatagaaagggggtgatggaattgctggcggcatggaatgaattcaagagtaaatgtcatgtgccatgcacaatggtctttgtaggaactggtgaaaaggaaaagataatgaaagatataattgaaatacataatataccgaatgtcgtgatggctggttctgtgccttacgaaaatataccggttttctaccgaatggcagattgttttattctaccgacaatggaggataactggagtcttgtaataccagaggcaatggcttgtggcttacccgtagccaccacaatgtataatggttgtcatcctgaacttgtaacgaaacgaaacggatggctttttgacagtatggacaagaatgacattgtaagaacattggacgatataattggcaagcgccaccagttgaagacaatgggtgagaacggtagacacattgttgaaaaatataatgcaatgaatgcggctatgggtatcatgggagcaattcatatagctaaaaagcaaaaataagctgatgaaaatactatatatccataacgattatggccgtccaagtggagaggagcaggcggctggtgagattgtgcaactactacgtgaccatgggcatgaagtaaaatggttcagacgcacttccgaaggatatagggatagtctgtggggaaatatcatcgcattttttacgggcatatataaccccaagacatcatgggaactggcaagggtgttggatgagtacaaaccggacgtagtacaagtgcaaaacctctacccatttatatctaccagtgttttccgaccattgaaaaaacgaaatatacctgtggtgatgcgttgcccaaactataggttgttttgtccgcaaggtttatgccttgatccgaaaggagaagtgtgtgaacgctgttggaaaggaatgtatgagtggaattgtgtaagttataattgtcttaatagcaggctaaaaagctttgcttacgctgtgagaaactggtatgcccgtacctcacggaatatttttgacggagtggatgtatttattactcaaagtgaatttcaaaaacgtaaattcgagggaatgggaatagatactaaccgtattggtatattaccaggtattccaccaatagtgagtgatattgaggaaaaggaaatgggtgattgggtgacatttgtgggcagggtaagcccagaaaagggtatttatgaatttatcgatgcggcaaggttgaaccctaacatcccattcaaggtggcggggaatttggacgagcaatttcatataccggctgattgtccttcgaatgtggaatttgtgggttttaagaaaggtgcagaactgaatcaactttatactgacagccgtatcattgtaataccgagcaagtggtatgagggtttcccaaacgtgatattgaggggaatgttgctgaaacgtcccgtcgtcactacaaatattggtgccatgcagagtatcattgacacgggtgtgaatggtattttggtgataccaggtaatgccaaagagttgggtgaggctgtcaggctgctatattatgacaggcaaaagtgtataacgtatggtaagaacggatataaaaaagccactacagtatattcaaaagaagtgatttaccatacattgatgggaatatatgataacgcaataaaacgagcaaagcatcatgcataaggatagtaccataaaacaactgatgtataaggtggcaagccttataccagacaagatatatctgtcgttgaaatataagaagaacttcggatattttctagactggaaacatccgaaaacattttctgagaaaataaactggttaaaactgtatgaccgtaatcccttgtatactcggatggttgataaatatgaggtcaaagagtatgtggcaggtatcattggcaagcagtatgtgattcccacacttggtgtttgggatagggcagaagacatagactttgatttgttgccagaccaatttgtgctgaaagccactcacgacagcggacgtgttgtgatttgtacagacaaagctaaacttgacaaggtaaaggcggtagaagaaatgaaaaagtctctaaaacgagatttttatgctgttacaagagaatggccatacaagaacgtgaaaagacgaattatcgcagaaaagtttatagcgccacggacaaaggatactcccaaagacttgccggactacaagtttttctgttttaatggtgaaccgcagtattgccaggtaatacgcgatcgctctacggaagaaactattgatttctacgatatggaatggagacaccaaattttcgtgggacttaatcccgtcgctcgcccggaaaatttggaaaatatgatagccatctgccggaaattatcaaaagatattccattcgtacgagtggatctgtatgaagtagatggatgtgaatattttggtgagttgactttttatcccgcaagtggaatgggagtctttactccagaggaatggtctgtgaaattaggagacttgattaaattgccgactacgtcggggggggggagaatttgtaaggtaaagaatggcattgttgagataggtacgaagtgctctaataattataatgaactaaaagattacaagtttttctgttttaatgggaaagtgagatgctttaagattgactatggtaggtttacagagcatcatgccaactactattctcacgatgggaatttacttccttttggagaaaaaatgtatccaccggtctatgatcataaagaaataatgccatataatttgtctgaaatgatagagatggcggaaaaattaagcgagggacattcttttctaagggtggatttatatagtgtttgtggaaagacatatttcggggagttgacattctttcctaatagtggtatggcaactttcacagataacaaatgggacttaaagcttggagaatggattaatcttcccatgtagtttcataaataaaatgaataacttttttaatataaactatgagatggaccatgctaaggtgcatagtgccatcgaacgtgttgtaagtcagggtcgagcagattatatatgtgtggccgatggtgttattttgaacacagctaaccgtgatcctgaatatctgaaggtggtgaacggtggaatgttctccatttgtgatagcagttatgtgccactctacctgcgctggatatatggagtgagatataggcagtactgtggcgcagagatattcaaggatatagtaagctctagaaaatatagaatgatgttcatgggtacgtcagaggctacgcttgctggattgaagaatactataaagtattggaacccagatgtacagactatgacgttctacgaattgccattttgtacagtagatgaatttgactattcagacatagcccagcgtgttgaggctgcaagagctgatattatttggattgccctcggtgctcctaaacaagaaatattcatgagtcgcttaaaaccatttttaaagcatggagtgatgattgctgttggtgctgcattcaaattttacagcggattggaagaaaaacgagctccgcaatggatgatcaggttacatatggagttcctatttcgtatagcatgtgatcctaaaaagcaattgaaacgctgtgcttggattgtaatcacactccccggattactttatgaggaatggcgaaaaaaacgtatgaaaattagaataaaacgataataatgaaaacagcattaatcacaggtattaccgggcaagacggttcgttccttgcggagtttctattggagaaagggtatgatgttcatggtattatccgtcgttcatcagttgattatcgggaacgtattgctcatttagaggggaaacctcattttcacttgcactatgcggatatgggggactctatgtctttagtgaaattagtgggtaaagtacagcctactgagatttacaacttggctgctcaaagtcatgtacaggtgtcatttgatgcgcctgagtatacagccgaggtcgatgcggtgggagtgcttcgtatattagaggcggttcgtaccaatcatttggagaaaacttgtaagatttatcaagcttctacttctgaactttatggcaaggtagaagaagttcctcaaaatgaaaatacgccgtttcatccttatagtccttatgctatcgctaaactttatggtttttggattgtaaaagagtaccgcgaggcttataatatgttctgctgctcgggtatcctgttcaaccatgaatcggaacgcagaggcgaaacctttgtaacgcgcaagattacattagctgcttcccgtattgcacaagggaaacaggattgtctgtatttgggtaatctggattccctacgtgattggggatatgctaaagattatgtagaatgtatgtggttgattcttcaacaggacaaaccgcaggatttcgttattgcaacaggtgtacagcataccgttcgcgaatttgctacattggcattccactatgccggcattgaactgcgttgggaaggtgaaggtatagaagagaaaggtattgatgtgaaaacaggaaaagtactggtagctgtcagtgaagatttctatcgtcctacggatgttgttaatttgtggggcgatcctacgaaagctaagaatgaattgggttggaatccgcaatctacttctttcgaggaactggtgaaaattatggtcgcacatgatatgcggaaggtggcagcggagcatgtagccagtgtaatgcataccaacttagctgaatacctggagaaagggattgtaaaatgatggataagaacgcaaaaatatatgtggcaggacaccgtggaatggtgggttctgccattgtccgtgagttgcatcggcaagggtatatgaatattaccactcgtactcatgcagaattggatttgacacggcaagaagctgtggaaaagttttttgcggaagaaaaaccggaatatgtctttttggctgctgccaaagtaggtggcatcattgccaaccaatctgcattggctgatttcatgtatgacaacatgatactggagatgaacgtgattcacgcagcttggaagaacggatgtaaaaaattggagttcttaggttcttcatgtatctacccgcgtttagcccctcagcccatgccggaatcttgtttactgacatcagaactggagaaaacgaatgaggcgtatgccttggctaaaatatcggggttgaagtattgcgaatttttgaaccgacagtatggcacagacttcatcagcgtgatgccgactaacctctatggtcccaatgacaactatcatcccgaacatagtcatgtacttcctgctttgattcgccgtttccatgaggcgaaagaggcgggtctggatgaagtgacttgctggggtgacggcagcccgctccgggagtttctatatgtagatgatttggctaatctgtgcgtgttcttgatgaacaactattcggggaatgaaactgtgaatgcaggaaccggtaaagaattgaccattaaagatcttacagaattggtggctaaggttgtaggatttacaggcgaaatcaagtgggatacgacacgtccgaatggtacaccccgaaagcttttggatgtatcgaaagccatggctttggggtggtcttaccaaactgaattggaagatggtatccgattggcttatgatgatttcttgcataatcctatgcgtgcagaaaggtaacgatttaaaacattatttatgcaaattcttttattatccggaggctctgggaaacgcctttggcctctgtcaaataacagccgttccaaacagtttataaaattactcaattctcccgatggtcaaaaagagtcgatggtacaacgggttattcgtcaattgggagaatccgatttaaaaggtcatgtaaccgtggctaccagcttgtctcaggctgatgttatttacaatcaactgggtgaatacatcgatgtagtggtggagccggaaagacgtgatacatttccagccattgctttggcagcttcatatctgaaat

SEQ ID NO: 84 - DNA, 8633 bp, unidentified
  source 1..8633: mol_type = unassigned DNA
ttaaagctcttttcgccacaccatcttgttcactacgcccacataactctgaatgatcttcacaacctttgtggagacattttcatccgtatagtcaggaacgggggtgccgtagtcgccgtttttaacaagttctactgccgtatcgacggactggagaagtcctttagtgtcgatgccggagagaatgaatcccgccttgtcgagagactcgggacgttcggtcgaggtacggatgcaaactgccggaaaaggatgtcctacgctggtgaagaaagaactctcctcgggaagggtgcccgaatcggaaacgacagcgaatgcgttcatctgaaggcaattgtagtcgtggaacccgagtggctgctggacctgtactcgcggatcaagtttgaaacctgtagcctcaaggcggtgacggctccggggatggcaactgtagagaatcggcatgtcatacttctcggccattgcgtttatcgcattgaaaaggcagaggaagttcttctccgtgtcgatgttctcttcgcggtgagcactcaacaggatgtagtgccccttcttgagtccgagtctctcgtgtacatcggatgcctggatctcggcaaggttcttatggagcacctcggccatgggagaaccggtgacgtatgtacgctcacggggaagtccgcattcagcaaggtatcttcttgcatgctcggagtaggcgagattgacgtccgagatgatgtccacgatacggcggttcgtctcctccggaaggcattcgtctttgcagcggttgccggcctccatgtggaaaatcggaatgtggagccgttttgccccgatgacactcaaacagctgttggtgtcgccaagaacgagtacggcatccggtttggttgcagcgaaaagcttgtagctgcagttgatgatgttgccgcaggtcgcgccgaggtcatctccgactgcatccatgtagacttccggttcggcgagtttcaggtcgcggaagaagatgccgttaaggttatagtcgtagttctgtccggtatgggccagaatcacatcgaaatatttgcggcatttggagatgacagcagcaagccggatgatctccgggcgggtgccgacgatgatgcagagtttgattttgccgttattttgccagtgaatgtcactgtaatcgaatttcggagttttggtttccatagatcgttttgattattcagccatcttgcggcttttattcgcttgctacgggatcgaagaaagtgtccggccgctccgggttgaaaacctcgttgcagtacatgacagttacaagatcctgagtcttggagaggtttatgatgttgtgcgtatatccgggcagcatgatgacgctctgaatcttgtcgcccgagacttcgaactcgatgacctcgtccgtaccctcttttcgctgctggatcaggccgtggccggaaacaacgatgaactgctcccatttggtgtggtgccagtgctgacctttggtgatacccggtttgctgatattgatacttacctgtccgcagttgagtgtgcgaaccagctcggtgaaggagccacggtcgtcgcagttcatcttcaggtcaaaaatggccttatccttgggaagatagctcaaataggtgctgtaaagcctcttggcaaagctgtcggccgggatctcggggatcatcagcgtcttcggcatgtcgtggaactgctgcagaagggcaacgatttcacccagcgtagccttatgagtgacgggacagtagcagtaacgtccttccgcagaaggcaatacggtcagcccttcgaactcgcaatggtgctcctggcctttcagagcggcgatcatctcttcaacaagatcgtcgatgtaaaggacgtcgagctccactttcgggtcattgaccgtgatgggcagatcgttggcgatgttgttgcagaacgtggcgatggcgctgttgtagttaggacggcaccattttccgtagagattggggaaccggtaaacaagaacctttatgccgttttcctctccataccgaagaaagagatcttcgcccgcctttttgctgcgcccatattcgctgttgccgaaacggccggaaagagatgcctgtgccgaacttgagagcattacaggggctttgttcccatgcttcttcagcgtgtcaagaagcgttgaggcaaagccgaaattgccggccatgaactcttccgggttctgaggccggtttacgccagcgaggttgaatacaaaatcacattcggaacaccatgcgtccagttgctccatggtgctgttcaagtcatactcaaagacttcatcaatctgaaggtctccatagcacttggccttacctgttttgatgttattaagttgggagcaaaggttccgacccacgaaaccctttgctccggttaccagaatcttcatctgttattcacttctataatcgcgggactttgctttgggctgcaggccgaggtcttcgcggatgaaattgagtttgaggagaagagccttcatgccttcgacatccagcctcttggtgttatggctgtgatagtcctccatgcggttgatggcatcatcgccttccgtgaagaatttgtcgtagttgaggtcgcgggcgtcgcaaggaatgcggaaatagttgccgcaatcttccgagcgaagcatctcttcgcgcgtgacaagcgtttcatagagtttctcgccgtggcgagtaccgatgattttcacctcggtctctccgtattggggatccaccttggcataaacctgcttgagggcttctgcaagtacgtcgagagttgcggccggcgccttttgaacgaagaggtcaccgttgttgccatgctcaaaggcatacatgacaagatcgacagcgtcatcaagtgtcatcatgaaccgggtcatgttaagatccgtgatggtgatcggcttaccttccatcatctgctctacccaaagaggaataacggaaccacggctagccattacatttccataacgggtgcagcaaatggtggtttttgcatccggacccaaagcgcgtccttgagcaatggcgaccttttccatcatcgctttggagatacccatggcattgatcgggtaggctgctttgtccgtagagaggacgacgacatttttaactccgtgagcgatggcggagagaagtacattattggtgccttctacattcgtgcgtacagcctccatcggatagaattcgcaagagggcacctgcttcaacgcagccgcagagaagacataatctactccgttcattgcgaagtctacagcctcacggttacgtacatttccaatatagaatttgactttgtttgaaacgtccggacgatttgcctgaaggaagtgccgcatgtcatcctgtttcttctcgtctcgggagaagatgcgaatttcccggatatcagagtcgagaaaacgacgcagaactgcattgccgaaacttcctgtaccgcctgtgattagcaggactttgtctttgaaaatactcataatgcttaaaataatgtattgtgcttttttagtttgaaagtgtttgtattgcgcgcagatgcagaatggatgtcgttgatatgaggcagtgattatttatcgctgtgaaactttgcataccattctgcaaatactctcaatccgttcctaaggaatgtcgatggcttgaacccaaagtcgtgctcaagaggtgttgtatcggcgtatgttacaggaacgtctcccggctgcatcggaacgagctctttgtgtgcttcaaaagcataatttgcgggcaggattccggctcgtactaattcctgttgcaggatatcgacaaaatccaacagattctctggctggctgttgcctatgttgtagactttgtaaggcggcaacggcagtccgtcttctccagttatgcgctccggtgcatgttgcataacccgaacgactccctcgacaatatcgtcgatataggtgaaatcccgcttgcagtttccgtaattaaagatgcgtatcttctctccttttacaagcttgtccgtaaatccgaagtaggccatatcaggacgtcctgcggggccatataccgtaaagaatcgtaatccggttgaaggtatgttatatagtttggagtacgcgtgcgccaacaattcattcgactttttggttgcggcgtataacgataccggattatcaactttatcatcggtcgaatagggtacctttttattcgagccgtatacgctggatgaggaggcgtaaaccagatgttcaactcctgtctgcccattatcgtaactgtgtcgacaggcttccaaaatgttataaaagccgatgagattactttcgacgtaggcatcaggattggtaatgctgtatctgacgcctgcctgtgctgccaggtttacaacgatagcaggtttatattcgtcaaacaagcggatgatgatttcccgatttgctatcgagtcgtgaatgaacacaaatcgatctccaaattcttccaggcctttcagtcgatcatgtttcagggagacatcgtaatagtcggtaatgctgtctataccgatgacttgcagttctgcatagtccgtcaaaagccgtttggcaagattcgatccgataaagccggcaactccagttaccagaactgttttgccgttcagtattatattgtagggtaacatataataggctgtttaatctcttctgaaaatatctcgggtatagacttttgtctcgacatcgcccaggcaggcgtcatagcgatttgctatgatagcagcactcatttgcttgaatttctcgagatcgttgacgaccttgctgccgaaaaatgtcgatccatcctcgagggtcggctcgtaaatgataaccgttgcgcccttggccttgatgcgcttcatgatgccttgaatcgaactctgtcggaaattgtcactattggatttcatggtcaggcgatatacaccgatcacgattggcttctcccgcttcttattgtaatcatttgtcgaagagtagctataatatccagcctttttcagaacctgatccgcaatgaaatccttgcgggtgcgattcgattcgacgatggcctcgatcagattctcggggacatccgcataatttgccagcatttgtttagtgtctttcggcaggcaataccctccataaccgaacgatggattgttgtaatgagtcccaatacggggatccagacctactccgaggataatggcttgagaatccagaccttttacctctgcataagtatccagttcattgaagtagctgactcgaagggccagataggtattggcaaagagcttcacggcctcagcttctttcaggcccataaacagtgtgtcgatattctctttgatggccccttcctgcagaagagcggcaaacgtatgggccgactttttaagcgcctgaatatcggcgattgcacgaatggcatcattctcctccttgaaccgctcatcgtcgatgatttggggaatacccacaataatgcgactcggatagaggttgtcgtagagagctttgctctcacgcaggaattcaggagagaaaagtagattgaaccgttttacccccttctgcatgtatttgatatacaaactccggcagtaacctacaggaatcgtcgatttgataaccatgacagcttgaggattaacctcaagcaccagatcgatcacctcttcgacatgacttgtgtcaaaatagttcttgacagggtcgtagtttgttggagcggcaatcacgacaaaatctgcattccgataggccgcagcaccatccaatgtcgctgtaagattcaacggtttctcggccaaatatttttcaatatactcgtcttgaatcggagactgtttccgattcagcatctccaccttttcagaaataacatcaactgctgttacttgatgatgctgagccaataatgtggcgattgacaaaccaacatagccggttccggctacggcaatctttaagtctttgttcaaatctgtgttcattatggttgattttactttgtctctttatcgaactcttcgaatcgggagttcttggacttgaactcgggaacgatcttcttcatcaggcgaaccatgtccggaatgacgacggcgcggcaaagctcctccaactcctgcgcacccttgagagcatcggcgtagtcgtactcgcggaccttggcgatacggatgcggtcgtgtgacgtcggaagcgtgttctccgtattcgacagcacctcctcatagagtttttcgcccgggcgcagtcccgtgtattcgatcttgatgtccttgtcgacctccagaccggccagttcgatcatgcgcctggccaggtgggcgatcttcaccgacttacccatgtcgaagacaaagatctgggtgcccgtagacatcgtggcagcctccattaccagacgacaggcctccggaatcgtcatgaagaagcgcgtgatgtcggggtgcgtaaccgtaaccggaccgcccttggctatctgctcgcggaagcgcgggatcaccgaaccgttcgaacccagcacgttgccgaaacgcgtagtgacgaacttcgtcttgcccttcaccttgccggcctcgatggccagaccgagcgactgcacgtagatctcggccagacgttttgtacagcccatgatgttggtcgggttgacggccttgtccgtcgagatcataaccatcttctcgacgtcatattcgatacacttgtccgccacgttgcgcgagccggcaacgttggccagaacggcttcgcaggaattctcctccatcagcggcacgtgtttgtaggctgctgcgtggaagaccacctgcggacgataggtgcggaagacgaaatccagacgcggaatcatgcgtacgtcgccgattacgggaatgaacttcagattggggtagcgatcctccaactcgaggcggatgttgtgcatcggcgtctcggagttgtcgaacagcacgatttccttgactccgaacgtcgccagctggcggcacaactccgaaccgatggaccccgccgcgcccgtaaccaggatcgtcttgccgcggaagttggcgatgatctcgtccatcgagatcttgatctcttcacgtcccagcaggtcctcgatcctgatctcgcggattgcctgacgctgcaccttgccgtcgaccacctcgtcgatcgagggagcgatcagcaccttgaggttgcagtccgtacaataatggattaggcgctcctgctcttcgcgagcctcatggacgtgggcgaagagaatggcgtcaatatccttgcagttgtgcaggtatttgacattctcttcggtttcgaagcagtagaccgggagatcggccagcatatgattcttcagtgttttgccgtaggtcaggaaaccgatgacctgatactcttgagaattttggagttgggtcaccaacgaaacgcccttgtcgccggtaccgtagatcaggatccgctggcatttgcaatgcctttgacggctgtctttgagccagtcatagacgacaaccatggcaacacgcataatcaccagttctgaaaggctcagcaacatgtcaaacaacagagtgatccagatcgctggaaatgtcgggccagcgacacccaaagccaatataactgcgatcccaattcccttgaaaacaacggcgacactcaaacggcccaaaccccgcaaggtggcatgacggatgattgatttgtgggtttggagcaacacgaacgcgatccaggaaaagacaacggatcctccgagccaccagccgattgttttccagataagggcttcagcacccaaaagaatgcttgcaactaacagtgagatgatcgaggccccggccgaaaccagcaggtccaatgcaagaatcaaccgtgaactgatataacgatccagtcgcagtttttcaattaaacgatacatgatttgatgtatgaatattttatttgtttgaaattcgaagaccgaaaacagcctgctcggatctcgaatccatgccccccccctctcctccgcggccaaactgacggtcgaaatcggccaagaggcgaatcagctgtgccttgctctttttgagtgattcttccgtgagccagggatcaatcaaggcgtgtgcttggtcgcatgtgactactttggcctcaatttccgcaaaacgatacgaacatcgggaatcgtaaagaattacaaaaactctttcaccgcgtgttcatgccatgcacgatactctgcggcggagaattctgccaccagcagtttcttgtaatcgtgcttgtcacaaaccggaatatgctgctggatgtaagcccgcaactcgctgtcgggaatgctgaccatcaccaccggaaaaggatagtccttatggctgaacaaggtggtttctcctttccggaagagccgctccaactggaaggccgactcttcgaaagcatgccaatagtcttccgttccgtatagccggatgtatcttttgttgtcctgttccttgcggagtatctcgaccatacgggtctcgaccagacgtttcaatgacatccacgcaggctcgacattcggtttgccgttcat

SEQ ID NO: 85 - DNA, 43329 bp, unidentified
  source 1..43329: mol_type = unassigned DNA
gccacatcatacttggcaagcttctctctgcccttcaagcctgcaagttcgatcaagaatatgatttttaccacttcgccgcccagttcttctaccagtcttgcagccgcctccatggttccgccggttgcgatcagatcatctacaaggacaaccttctgtcccggcttgatcgcatccttatgcatctctatcgtagcacttccgtattccagatcataggatgcctcaatcgtctctctaggcaacttgcccttttttcttaccagtgcaaatccctttccattcttatatgcaagaggtgttccaaagataaatcccctggactccgccccggctattacatcataatctacgccctcaagcagaccatctaatgaatctatcgccagcttcaatccatccggatctccgatcacactggtaatatctctgaaaataattcccggctccgggaaatccggtatacttgtaacatattcttctatctttttcataatcttcctcctacatatatatgtatattctacatttatttacattttccttttccgccatccacataatatcaaaaggccggttaaatctttaaccctcatgctttcgatattcgagcaaacgaatctgcagcgttcttcttcccgcaaattcattgatatccggataataggcaatatctaatacaacatgaccgggcattccttttagtattttatcacattcatttgctccaaaccactgttttatgttagaaataaacacttccggggcaaaacttatgccatcgatcgtgccaccgttttccatcaggaacgtaacccgtagaacattctgtcttttccccatgatcctcgcactttttacatacacaccactctgggcaaataccggtttttcatttccttttccaaatggttccagaagctccagttcttccgtcagtggtatacttacataatcaagcggcataggtacatcgatccgaagcttcggggtaagcagtttttcatctaatgtacaattcgtattcatcttttcacgaagtctggcaagattccgcttcttcatggaaaagcccgctgccatctcatgtccgccgaacttcgtgaaataatcactgcatttattgatctcatcatacatattatagccttcgatcgaacgacccgatcccttaatgattccttcttcctcaccatccgtaaataacagcaccggccgataataccgttccttgatcctgcctgcgataatcccgaccagactttcatgaagcttcggaatatacataacaagcactttatcagataatgccgcaacccccgtctccgggactgcgcccatcagaaggcgatccgatttctcaagcagctcgatcgcggtcttcgttccctgctctgtcatatcttttcttgcattattgatattcaataactcaatcgcccgttcatttgccttatagctgtcggtttcgagcaggaactccaaactggtttttgcatccccgagtctgcccgccgcattgatacacggtccaatgataaatcccagatcaaatgctgacagcttctttccatctctgccactgtttgtgatcaatgcctttaaaccataattgctgctatcggacaaccggcgcagcgcttctctgacaatgatgcggttctcatctaccagattcataacatcacagacagttgcaattccaagtatctcaataaatgcctcacattccgtctccggtatcccgcacatccggtacagaagctggataaatttatatgccaccccagcgccgcacaactccttgcacggatattcacaccccggctgcttgtgatcgatcaccgcatccgcttccggtactttatagatccggatatttttttgatctgtatcatatggaatatcatgatgatccgtaacgatcacccgcataccatattctttcgcttttctcaccgcatcaaatgccgcaatcccattgtcacaggtaatgatcgtactaatctgatcggctgccgccgcatctaccatacggatattgattccatatccatcgtagatccggtgtgggatatcataatctatcttatctcctgcggatataccattttcatgctcccacacacgctgcaagcctttatataagatataatttgaactcacaccatccacatcataatcagaaatgatccgtatcctttttttgttccgaatctcctcaagcataaggttacaacccttttccatatttttcatcaacccgggatcatgcagacgatcaagacttccattcagataggtatcgatatcctcatccgttatcacatcccggtttcggatcaccctgactgttaccggatcgatatgaaaacgttccccgattccgaaaaaatcggctcgtttcccatatacagtccattccatatcatattttatcggtggttttatctctgttgccatatctgtcttctcctgtccgtctcacttgtattttcccttataaaagcaaaggaattatacaccagccctaaaaaaagcgtcaacacctttgccgttttgtttattcgtgtatatacgcattttatgcacctatcaggttatgtgccaatacaccttacaggttgtttatttgattttttattctaaatataatgtatagtggaggtagttttatggaaaatttatatgccaaaatcggacaacgtattgtgcagatacgacacgcaaataatctaactcaataccagctcgctgaaatgcttgatatttctgtaaagcactgcagcgcaatcgaacgaggcaaatccagtctctcattagagaaaatgatcgatctctgtgatatctttaatatcgatctggattacttgatccgcggtgtgcagaaaactgacgatataccatcttatatcccacacaccgtagtggagatcatgacatctgatgacgaggaaaagaaacaacatttccgggactatatagagatttttaatgctatttcaaattctcaatcacaataaccgacaatcttcacatccgggtatttatattaaaaaagaagcagttgaaatctaatatatccgaatccttcggtacataccagcctccaactgcttctttttataattatttgaaatatttgtcgatgatctcatttgccttatccgtatcatctgtaacacagtaaacaacataattgccatcttccttgataatcgctttatccagacgactcgtctctgacggcttatagtctgcataggatgttgtctgctttgcctttctgtcttcgcatgctgactttacggcatccgcagagctctgatctgctgcttcaaataccgcaatctcctctgcagttgcacctgttgatacaacaactacactgttctttaccttatccgcatcaatcccataataagtaagcgccacatttgtatctaactcggacaaagaatcttcaaacgtcaatccgttctttaattcatttgccatatctgtcacgtttattttcagcgcttccttcgaatcaccgtttccacctaccgttgtgccacatcctgcaagcatacctgcaataccaaggattgcacacatctttaaaatctgattcttcatctactcaataacactccttgtctgttcttctgttttttctatatcacaatatcatccattgcggatctactgtcttacatatacattctgtctgatgtattccagccattttttacaatattcctgattacaatgtctcccatccgtacttgcatctgccggaagaacaccgtctaccgtaacactgcttgctacatccagatatatgatatctccatagtccttacacattctctttaacagcttattaaatttcttgacatttttattattatagatctcatcctcatccgatagcttctttgaaaccggaagaatattttctacataaatcgttgcatccggttggatctctctgactgaatcaataaatgtcttatagtcctcaataaaaatatcatcataaacccaccccaactcattaagtccgaaggatatatagatattatcatactgcttaagctttaaagcttctaatgtcgttatcattcccttatctgtcgaaacgattgaatccgtcataactttttcgatattcagacccttcgaacagaatgcatccagattactcatccccgtatataaactcaagccttctgtcctggaatctccaatgataactgctgtatcaaaataagcatcatccgtcgcatttgccggtttgaaaagctttttatcataccagtcatctccctttgatgagagatccggatctttatcatttatatattttaaagttgctccgccttctgcttccgaagtagatgcttcctcaccggtcgttactgtttccgttgtcggttcttctgttgtcggcgcctccgtcgttactcctgttgtagcttcttccgtatcctctgttgtcggtttctcctccgttcgatctgcatcggactttgttgcaacattttccgtgttcacatccctgccgaaatctataatttcctgtctatattttgtagcaaatatcgcaatggaactcgccagaaaaattaccgcgatcgcaataattttacatctgtcgacctgtgcgttatgctgctttgcgttatatcgtttatcattgtccattatctgtgcttcctcttttgatcttacattctaataaaaggaaagggttattaccccgatttaatcagtgttcacattataacataccactttacataagtgtacagattttgaaatttctacataattcgcagttttagtcgtttttcgacttttcccattgttgaaattaacaaatcttgtttcatttttatggacactttttaacttaagtgttactattctattagatttttgagatgagtctgttttcacactcacacatacatattattatcttgcagactttttccattttatgtatcttatattcaaatatttatcactttatatgggaggcaactatgagctttagcgcaaaaaactatgattttaaaggcgaaacctgtattgagcttatcgcaggagattttcgtgcgttgatcgcaccttttaacggaagtaatgtaatgaagctggaaaacacagctcttgatattgatattttaagaaatgatctgtcactttctccggcagaattaaaagctgctgccgaagtatatggcatgcctaccttatatcttccaaacagattatctcatggaaatctgaaaacctcagatgccatgtatcattttccttgtaacgatccactcggaaaccatcttcacggttttcttcacaaacgctgccatacaattgatgacatgtatgtagaaggtgaaagtgctgttgcaaagacatcttatgtatatgatgaaaatgatgaatttttcgagactttccctgtcagcttcaaggctgaatttgtctttacactgacagcagacggactggattattcctttacactgactaacctttccaaggtgcagatgccttatggtgtatgtaaccacattgcattcaaagcaccatttacaaatggcggaagcggcgcaaatgttcgtttacaagtcccgatcggtgacaaatgggaactcagcgacacctgcatcccgaccgagaaaacactgccgcttaccagatatgatatgatgtacaaagagggtgacatggttcctgttcttcaggatatcgacaacgacctctataccgcggagatgaatgaattagacggcaaaccattctatggcatcatcgttacagataaagttacaggcgtccgtgtctgctacgaagtatgtgatgttatgaaatactggatcatgtggaatgatcacggcatgaaagaattcttctgtccggaacctatgagctggaacattgatgctccgaatctctccggcgaccctgccgtaaccggctacaccgaactggctcctggcgaatccaaaaccgtaaccgagcgaatctttgtccggtagaaaatagtttataataaagcattaactttatatctatcatcatacacaggtttgacagtaaaaaaagacatacatattcctgtagcagacctcttttcacgtcggtacttaatgaaccgcaaaagcggtgaatttagaaccgttacgtgaaaatagaacgaaagtgttctgcgaaaggaatgatatatgtctctttttattgtcagaccgtcatgcaaacagggccttagctaaaaaacacggcatatgtattctgtgtaaggaatagcatatgccatgttttcatataaggctcggtcttattcgttctctaccgttccgccgatataccattttccgcccttcttgtaacagatcagtgacatcttgtcatcctctgtctctgtctctccaaggtagtttattgtcatggtataatcaacatcacagatataagcacatcttactttgcttgctacagatgtatcaccatacagaccttcgcacatattcttgatagttgctctgtttgccttctctgttgatgtgatcttgtaatcaatagaatactcaacccccatagaggtcagaagctcgaagctgctagataatgttgctacatcattatccgcaacgcattctttgtcaacaagcgatacaatctttgctgtatctgcttcttcgattccggtcatgaaatcatcaaccagctttttactcttctttgctccaccgattgaaccggaaaataagaatattactgccgctgcaattaccacaagtgcaataatgattccaataactgctcctacgccggatttcttctttttggttggctgctgataatctgtgccatatgcatttcccgcataaccgttctgcataggatctccctgatactgtggtccaccatactgtggatccatccccattccctgctgtggctgtgcatcatatgtaacaccctccggctgctgtggctggtcattccccgcaagtttaaaaccaccacttgtacctactgctgccccacaaacaggacaaacagattcatttgtctctgctccgcaatttggacaattcataatctctcctcctaaaagtaaaaaataataaatagtatttgtgaactttttatgtctgttcacattttgagtgtatcagatgatgattctttttacaatgattatttttccacttttatcctgggttttgttgtcaaatatactattttattatataatatgtccatatgactgtttttataaagggcgtgctatgtcctttgtaagggagagatcatgaagcagcggatactgcctgataacggcagacactacttatcttaatacacatgaaaggaaggtatatattacatgaagtttggttattttgatgatgccaacaaggagtatgtcatcacatctcctagaactccttatccttggatcaactaccttggaacacaggatttcttctcactgatttcaaatacagcgggaggttacagcttctacaaagatgctcgtcttcgtagaattacaagataccgttataacaatgtacctatcgatatgggtggtcgttatttctatattaacgagaatggtacaatctggaatccgggctggtcaccggttaagacagagcttgacgaatatgaatgccgtcatggtatgggttacacagtgatcaccggtaagaagaacaacttaaaggcagaggttactttcttcgtacctcagaattatgccggagaagttcagcaggttgttcttacaaatgaaagctcagaagagaagactttctcattcttctcatttgaagagtggtgtctctgggatgcacaggatgactgcacaaacttccagagaaacttcagtacaggtcgtgtagaggttgttggttctacaatctaccacaagacagagtacagagacagacgtgatcatttcgcattctataccgtaaatgacgagattgacggttacgatacagacagagattcattcatcggactttacaatggtttccacaacccacaggctgttgaagccggcaaagcaaatgattcattcgcagatggatggtcaccaatcgcttcacactacaagaagatcactcttgctccgggcgagacaaagactcttgtatttattcttggatatgttgagatgcctgttgaccagaagttcgaagctgatggcaagacgatcaacaaggttaaggctcttgagatgatggagaaatacaacactcctgagaaggttgcagcaggtcttgcagaactcaaagaacactggaacaacctcttaagcatcttaaatgttaatactcctgatgataaggttaatcgtatggttaatatctggaatcagtatcagtgtatggttacattcaacctttcacgttcagcatcatacttcgagtccggtatcggccgtggtatgggattccgtgattccaaccaggatgtacttggatttgttcatcagattcctgatcgtgcaagagaaagaattattgatatcgcttctacacagttcccggatggtggatgctatcatcagtatcagccacttacaaagaagggtaatgcagatatcggtggtgacttctcagacgatccattatggctgatcctttctgtatctgcatacatcaaggagacaggcgactggggtattcttgatgagatggttccatatgacaacgatatgtccatcgctaaaccgatgcttgaccacttaaaggtttctttctacaagatcgtaaacaaccttggaccacacggacttccacttgcaatgagagctgactggaacgactgtatcaacctttcatgcttctccgatacaccgggtgaaagtttccagacatacaccaaccctaagttcgctgctgaaggcggatactcaaaggttgctgagtcagttatggttgctacactctttacatatgcaggtcctaactatgttgctattcttaagcacctcggaatggacgctgaagcagaagctgctcaagctgagatcgataagatgaaagctaacatcatggaatctgcttgggatggcgactggttcttaagagcatacgatgcaaacggtgagaagatgggatctaaggaatgtaaagaaggacagatcttcatcgagccacagggcttcgctattatgtcagacatcggtaaagatcagggctgcgacaagaagacacttgctgctattgatgagcgtctgaatacacagtacggacttgtacttaacaatcctgcattcacaaagtattacatccagtatggtgagatctcaacatatccgggcggatacaaagagaatgccggtatcttcacacataacaatgcatggatcatctgtgctgctgcttacgcaggcgccggcgatcaggcattcaaatattactcagagattgctcctgctttcaccgaggagacatctgatatccacaagactgaaccatatgtatatggtcagatgatcggtggcaaggatgccggttccgatatcggaaagccgggcaaccactttggtcagggtaagaactcatggcttacaggtacagctgcttggaacatggtagctatttcacagtacatcttaggtatctcagcagacttcgatggtcttaagatcgatccatctattcctgctgcttgggatggtctgaatgctacacgtcagttccgtggtgctacatatgatatcaaggttacaaatccggatcatgtaaataagggtatcaagagtgttactgtagatggcaatgctattgaaggcaatgttctccctgtattcggtgatggcaagactcatgctgtagaagtagtaatgggctaatccatataacaaatttcatataaccatataataaagacccatatagatttattacacagatttcaattctgctataaactatatgggtcttattatttcttctgtaaaaatgtgctccgtctataacggcatctctcttataacctttaccataaccgcaacacgatcacggaatgtatgtccattcaatgcaatcttctgtccggctttcgcctttgcatcgcgttcttcttcgtgtttcagataataatcgatcttttctttcagatcctctcgtccatgatatgtcacaacattatccccaaacaactcatgtatttctggaatatcgtcgctgattatgaatgcgccaacggccaatgcgtcaaagatacgatttgagataattccattttctctcatatcatcccaatgatcatttagaagaatctttgcatcatgatatgcctgtccaaccttactgttatccatataatcactgacaacataatcctgaaccggaaatttttcccaatgtcttccatatactgtcagcttatgttctgttggaataagatcctttaagatcggccggaatacatgccgggagtttcctacaaacaacaattcatattgcttatcatgtccttcttcatataccatcgcactgtcatctacacactgctgtgcaactcccgatggcacatgaagcttcgaggcaagctcatcatgcattttctgagaagcgaagaatacatagtcataggaattatattcgtctatcgtcacatcatccggatgtgaaatattccacatgatatatttcctgttatctcccatcggtctgtaataaggatttttccctctcagcacgatcacataacccgcccggctctgatcataccaacggtctctcggaagaacatttgccttatacccaagcttttcaaattcctttttcattccaacagcaaaatgctggtctccccagtatttttttgattcatcatccggcatcgccccacatatatcgatctcatccgaacagacaggtacatcaaaacacccactgatcatctgaacaaatccatgcgcagcatcctcatatatatgattctttatgacatatgctttctgttccgcaagatattctttcttctctgccggcgtcttttcattcatacagctaagatcatacaaatcgtaatccagatcaaacctacaatccatatcagccgccttatcctgtccagcttccatctccaacttcagacaaactgtattatctttctgctgccataatatcctgatcagatcattcttgcagttatacactgcttcaatatcataatccggacaaacaggaaccaatatatctgtatcaacccctacgttataccaatccttcttcgcagtccggctgagtatcttcactttacagccaagtgcttcaagtgctgccccaaagaataatgcatgataatattcctctgcatctgtaccggtcttcgcatccgacacggcaaatgcaattgtcaatttctgttctgtgaacatatgtgactgactgatcttatcattgaataactgctttgcaaggtatctctgccatttacccttaaataccatcatgttatgaatacgtctttgcttcttttcttttgcatcatctttctcctgcgttccgaattcataatgatatactacagaaccggggcagtaataatttttatatccggctaaatgcaattttaaacataaatcgacatcctcatatccgtatatatattttatatcaaatcctccgacttcatcaaatgcatcttttttaaccagcataaccgccgccgttactgctgcgcgttcctgaagttccagacttatatccgaatccggctccccgtttttcagattatatggttgaataaaatgtgccttttcccgtataacatccttaaacccaattccggcatgctgaagcatgtatgatttttcctcatttgccgatccgacagggatctccggataaaccaattttgctccaattgcaccgggctgatctgctttctgtatggcaattaataattcatccagccatccatccgttacctgagtatcattattcataaataaaagatactcgccctttgcctgttttgctgcataattatttgaaacggaaaatgacagattttcattttgcttaattattgtcatatcatataccgacctataggtctccaaataatccacagacccgtctgttgatgcgtgatccacaaaaataatttctatatttttataaaaatgacagttaacgaacgacttcatcaatcgttccaaattctttttcccattttgattcaatactatgatcgacacaagcggtcgtttttcttccagaaaacgaatctcctgaatatactttaattcatcgttctgttccggcgacggatctgccttccaaaacatccactcggtttttcgttcaaactgccgttcctgtaatcttgcaagatctgccataagacatcctccggctgcatcctcacgcagtttcttcatctgtctgttaaccttggcaagctccgcattcactgttttcttttctgcatttagctgtttgatcttatctgaaagatcagtattttttttcttgagttcagttatttgttttttcagacttgaagcttctttcttaagcgcttttatttcagcaagcgcatttctccatttgtgaagaaatccccggataccgggtagttttgcgataaaattctttattcctttcaaagttatcttttctcctgattttatgattttatgttgctatatatctttttccttaattgttaattatagcataccctgtctttgctatgcaaactcatcctgtcactttcaaaagccaccttcaaaagcccactgccaaaagaatgagagaaggatcatgtattcaaaaaatatatctttaatatcgttccgttttcaaatattaattctgtcagtattatctccggaatgcttgacacctacattccggtaacttaaaattaatcatatatcaatagttatttgggggaaatttcatgaaaaagttaacactgatcattccctgctacaacgaggcagatgcccttcctctgtttgcggcagagctaaataaagtcatagttcaactgacaaactataatacagaagttcttctggtcaatgatggttcatccgatcagacattgactgtcatgaaagaaatctgtgcatccgactcacactataaatatatctcattttccagaaatttcggaaaagaggcagccatgtatgccggtttctgtaattccgacggtgactatgccgctgttatggatgccgatatgcaggatccaccatctctgcttcccgaaatgttaaactgtctggaaaccgaagattatgacagtgttgcgaccagacgtgtctctcgtataggtgaaccaccgatccgttctttctttgccagaaaattctacaagcttatcaacaaaatttctgatgccgatattgtagatggtgcaagggatttccgtttgatgcgaaaagaaatggttgacagcattgtttctatgtgtgaatacaaccgtttctcaaaaggtattttcgggtggatcggctttaagaccaaatggatccaatatgaaaacgtcaacagaatcgcgggagaaaccaaatggaacttctggggactcgttaaatatgcgatcgacggtattatcaacttctcggaaactcctatgtcctttgcctccggtctcggtatttttctgaccattttgtcatttatcatggtcatatttatcattatccgaaaagcaatattcggtgatccggttgccggctggccatctctcgcctgtatcattatattcattgcaggtttgcaattcctctgcatgggaattatgggaaaatatatggcaaagacctatctggaagtaaaaaatcgtccacattatattatttccgaaacaaataaagaacacatagatcgaataaattaatttgtatagaaggcgcattcattgaaaaaaatattacttactttacttaccctgactctgttctttcttctgttttccgcacagaccagaataaccgtatcagccgcagaaaacagttcctctgatgaaacaacgatcaaagtatccgccaaaaatggcagtgatatctcggacaaactgcgtgaagctctgatcaatgcaagagacctcgcagaaagctccggccagatcataaccgtcaaggtaaaaaagggagattactatctctcaaagtccctgcacatatatagcaacacaacccttgatgtaacagatgtacattttacttatcagggtactaaaaagatcaacatggtcatcagcggaacaaatgccccataccgcggctatgaacatttcaattccagtgaaggctgttccggctatgatgcctttgaaaatatcacggtacttggtggaatatgggaaagcacacccgaaaatgccggcagtatgatccggctctttcatgccaggaatgtcactttggatggcttgacactgattggcggaggctgtgtacatcagatggaggtcgctgccatcgatggtttctatgtccgcaactgtacttttctggatcatggcaagagcgcagactccacaactaattttcaaaaacaggaatccatccagcttgatatgccatacagtaatctggtatatcccggtgtctatcaggatggtacgcctatgaagaatgtcgagatcacacataatacttttcgaaatattgcccgcggtgtcggaacacacacgatgctttgtggatcttatcatgaaaatattaatatcagtaataatacatttgaaaatgtattggaggaatgtatcatttgtctgaactatgtaaactgtcagatcaaggataatacgatcacaaactgcggtggtggtatccttgttgaaaatgcaagagattacgatcgttccatgaatacttcgatactggacggaagtaaagtgtatgccggcgcaaccatccacgacctgaataccgagatcagtggaaataccatacagatcgtctaccatccaaccacgctgatcgtagccggaatctatgtatatgggaaaaatatatccgatgatgcacttggtggagacggctatcctctgcctaaagaaaatcattatatcagctctatatctatccgggataatacgatcataaccgcaggtgatggcataaccatatccgatgccagaaattgtgagatagcagggaattccatcaaaggcgcaaaattttcaaagaaagatccatatgccagatacagagacggaattcgagttgataaacaaagctccgatatctctataacaggaaattctattaagaatatgtccagaaacggtattgtaatatatgatcgttcctctctgtccggcatagtaaacaacaatattaaaagctgttccaagtccggaatcaaattaacagaacacagtatctgtgcaaatgatataacaaataatataataaaaaaatgttctttcggtggtctgatagttgaaaacaacagcacgacttccgatatcatcgggaatacactctcagcggtaagcggtaatcccgccatcaaaatcagcaacatgagtactgtccgttatatcaactccaaccagatttatgacctgggggagtacagaaaaaaagaggttgcctcgggcatcgtagtaagcggcagatcaacttcaaaaggaatagaaagcaaccggatctatgcatccaagtctaaatactcctccggttacggcattctgattgattcagattccagattatctgaatcagtcagcaacaacacaatttcaaatacaaacgaatactctattgccgttaaaagctattccaagatagcaggtcagattaatcgtaatgatatcacctctgccagaaaaagtgctattgctgttaccgattcctccataatctgtgataatatcgaaagcaatcatatctcaggcagcggtacaaacggtatcttacttgataaaaaagcaaccgtccggaacagcatcgccggtaatgttattacagaatgtaataactatggcatcaatatccagagtatagaaaacgacctgaccgttgcccacaatgaactgaatgaaaataagaacgctgctattaatattgccgcaggaaaaaagaatctgaccactatatcaggaaatatattatccggctcagcttcaatcagtggtatccggctatccaaatgcaaagtatcgattgcatccaatgaatttgaaaaattcaaatacggaatccatgctgcagcttccgtttcagggtcaatctatgataatatatatagtgatatagcaaaaaaagaaatctacattgataaaaaagcccagaaaatgaatacagtcatttcatcaacagtcgaaactacgacagataatggaaaaaataaagcaacgatcacatgggatgctgtaaagggaatggacggatacgaattacaatacagcacatatgcagatttttccagcaaacaggttatccacctgaatgcaaaacagacatcttataccctacacgatctgccaaataacaaaccggtttattaccggatcagggcatataaaacagtggaaaacatctgtattttcggaaatttccagacgaactattttattctcagataaatgggatcatatttataactgaaaggggacatatatatgaaaaaacatcttatcctgcttgcttcaggactgctgcttgtttccggtgttgcttatacagcagatacacagacatttgcagccaacttaacagctactgaaagcacagcatcaaatgacacctcaccggaactatttgcaaattcatactctgtttccggcgacacgattacggtctccgctaaaaacggaagtgaaattggaacagtattaaatgacgcattaaaagctgcacgcgatcttgcggattccaacggacacataatcaccatcaatgttccggcaggaagttatactcaggacattgctttacatatctacagcaatacaacactgaacctgacaggtgtaagtatcaaatgcacagcggatacaccgatcaacatgatcaccaccggaacaaacggcgcatacaaaggacagaacaactataatacaagttcattatgtagcggctataacggattcaaaaacataaccataaacggcggaacattcatcagcattccatcaaacgactcaacaatcgtgcgtctttcccatgcaaccaatgttcatttaaacggaatcaccttaaaaggaggcggctgtcttcaccagatggaagtagctgcaatcaacggcttctatgtaacgggctgtacattccgggacaatggaaaagcaaccgatatcaataaccacgaaaatcaggaagcacttcagctcgatatgccatgccgtgagtttgtattcccgaatatatacgaagacggcactccgatgaaaaatgtcgagattaccggttgcacatttaaaaatgttgcaagaggtctcggaagccatacgatgctgatcggcgcttaccatgagaatattaagataaacaacaatacctttgataacgtactggaagaatgcattatcggtctgaactattataactgtgaaattaaaaataacacgatcaagaactgcggtggcggtatccttgttcaaaactataaagctgccgctaacacgatcaacacctcaattctggatggcaagaataaatataaagcatccttccgctataaactcaatacagttatcagcggcaataatatctccctccgttattctcctagctgtattacaccagaaggaatcaaagtctccggatacaaacaggaaagtggaaaaaagggcggtgacggattcattcttcctgccggaaactactatatcagtggtgtaactgtttccgacaacacaatccacacctccggtcatggcattcattttcttgatgctcacggatgtagtgcatatgataatacaatcattgggcagaatttttcttccaaagatccgtccaaaaacgatcatgatggcattctggtagaaatgggttccaaaaatattatcataaacaataaccatatatccggaatgaccagaaacggtattctcgtacagaagtcatcttccgtaaaggggatctccaaaaatattttttccaaatgcggcggacgcggaatccagatatatgataaaagccaatgcacagaaggcatatcggataatcagatcaaaagctgcaaacgaggtggcatctttatcagcaataactgcacctcgggaaatatcaccggaaataaaatttcatcttataacgaagaaggcggtatctctgtttataataactgtacaacaggcaaaatcgcaaataacacgatcactgataccagaaaaaacggtaaacatacaaatctggccggtataaagatcagtttaaaatcaaccaccggctccatgacgggaaataagattctgtccggtgccgcaaagtactcatccaaccgtggaattgtcctttacaattcttccaaggtaaaaggatcgatcaataaaaacacgatcgaaaaatgtagtgactcagctatcgtggtatctctgaaatctcaggttaccggaagtgttaatggcaataagatatcatctgctgccaaatacggaattcagaccctgaataagtcatctattggcaaggcaatagcatccaacacgatcaaaaatgccaaaacaagcggtatcttgatcggaagtatctcaaatactttgaagatcgaaaaaaataaaatatcaggctgttcaaatgcaggaatctatatccagcctgcaacaacaaaatacaaaattaccgctacaaacaacacaattaccggaaataaaaaaggatccggcttcaccataagaaaagccaagatccttatcaacaaaaataagatttccaaagttacatttggcgtatatgcagataaaaaatgcaaaggcaatgtctatgcaaataaaatctccaagatcaccaaaaaaaaggtctacaccgacacaaaaaaagtgaagcttaagaaataaacctcttctatactaatgaggaaggttatactattattacgcaagtcgtttgcactctattctcgcgtaacagtactaagttcccgcctcacggcggatcattaaggactgacgcgagaaaaggcttgcttcataatagtataaccttcctcattttgtacattaagtctgctctataagaaataagacatttcttgtctaaagtaacaataaaacaaaccggcggtaagtatatagatacactattatgtaccgctgcacgaggattagagcgaaagcgtcttgcgaaataatatgtgtattatatacttaccgccggtcataaaaatatcacttatagaacaagacccctatatactttatgcatcagacctgttcactctgtataacttcgaactaaactcggctagcctcgttaagatctcagttactcacgtcggtccttagcgacccaccaaatggtgggagcttagtaccgctacgtgaaaatagagcgcgagcgttctgcggcataaatgtatatatgtctttttttgtatacataaacagacccgtgagcattatatatgtacatcattatgcagcaagcctatccgagtgccggtacttaggttgcgtcttttgcaaccttatgtaccgctgcaccgaggatagaacgaaagtgccttgcggaataatggatgtactatataacgatcacgggtcgtacatatattattagtctaatgtgactttaacctttttgaggttccagatctcttttgcatactcttcgattgttctgtctgatgagaacttaccggagcatgctgtattcaacataaccatcttagcccagttcttctcgtctctgtaaagagtatcgatctttctgtgagcttctacataagaagcaaaatccttaaggatgaagtatacatcttcgttgataagtgaatcatacagatctctgaaacgatccgggtcatcagaagaatacataccattgataagctgtgtaagaacagttcttactgctgcatcattgttgtaaatatcctttggattgtatccaccttcacgctcatacttcataacttcttcagctcttaaaccgaagataactgcattttcttcaccaacttcttcaacgatctctacatttgcaccatccatggttccaagtgtaactgcaccgtttaacataaatttcatgttaccggtaccggatgcttctctggaagctgttgaaatctgctcgctgacatctgctgctgcgaagatcagttctgcattggatactctgtagttctcgatgaatacaaccttgatcttacccttgatagatgcatcattgttgataacatctgcaacagagttgatcagcttgatgataagctttgctctcttataaccggcggaagcctttgcaccaaagatatatgttgttggatacatatcatatgacggatttgtcttcagctcgttgtactgatacataacatgtaaaatgttaagaagctgtctcttgtactcatgaagtctcttaacctgtacatcaaagatagaacgaggatctacatccacgccattatgctccttgatataatttgcaagacggatcttgttctggtacttgatattcatgaattcctgctgatacttctcatcagtagcatatacttttaacttcttcagatttgaaagcttaacgatccattcatcaccgatcttatctgtgatccagcttgcaagaagcggattaccatgaagaaggaaacgtctctgtgtaataccatttgtcttattattgaactgctcaggtctcatctcatagaagtccttcagctctctctcttccagaatctttgtatgaagtgctgcaacaccatttacagagtaagaacctgcgatagcaagatgtgccatcttaacctgaccatcataaaggatagccatgttcttaaccttatcctggttgcccggatacatagactggatcttcagtacaaatcttctgttgatctcttctacgatctgatagatacgaggaagtaatcttgagaataattcgattggccatttctcaagagcttcagccatgatcgtatggttagtgtatgcacatgttctggttgtgatatcccatgcatcatcccactcaagaccttcttcatccataaggattctcattaactctgctactgcaactgttggatgtgtatcattcatctggaacgtgatcttttccggaagcttatgaatatcactgtttttctctttgaatttcaggattgctctctgaacagacgctgaaatgaagaagtactgctgtctcagtcttaattccttacctgcatagtgattatcatttggataaaggacttcaacaattgtcttagcaaggttctgctgctcaacagccttttcatattcacccttgtcaaatgaatcaagacagaactcctgatctgcttctgcatcccagatacgaagtgtatttacaacattgttgccataaccgacaaccggaacatcatatggtacggcacgaacggtctgataaccatcctgaataaagtaatttcttccgtctctgttctcaactcttacataaccgccaaatttaacttctacagcgtactccggacgcttgatctcaaatgggttgccatcctttaaccagtcatccggcaactcgatctgataaccatctttgattgcctgcttgaacataccataacgataacggataccacatccgtatgccggataaccaagtgtagcaagagaatccaggaaacatgctgcaagacgtcccaaaccaccattaccaagtgctgcatccggctcctgatcctcgatcagattcaaatcaaatccaagttcatctaaggcttcttttactgcatcatagtatgtcagattgatcagattgtttcccagggctctacccatcaggaactccatggacagatagtaaactgtcttaacattcttcttctcatattccttatgtgttgctatccatctgtctattatgtcgtccttaacagcgtagctgacagcctggaatacctgctgtggagttgcctcttcgattggtcttctgtacaatgtctttacatttgtaataacctcttttttgaagccctctttgtcgaaatcaatcaactttttcatttatcgtatcctccttgaaaattgcacgccagaatgcatccctgacgatttttctataatcagatgccgatattatccgcatcctttatatctctttcaccctaattcatcataatatccagttttaccatgagaaattttggaagaaacctatatcattttaacaaaaaaacatgtatttctcaatacatgtcttaattttttgtaggaaaatacatattttttagaccaaagtctaattaatcttgcaattttacaatgatttttcaattattttctgtttttatagttatttatacgctcttgccctatggggcataccaatatctgaacagtttcataagggattttccttctaataaccgcctgaataatagccgccacaagggaaacagcacatatttccaccacaacaggagagacaaagcagggtagtgcagaaagtattacagcattttgtcatatcccggcctgacatatccatgccataaccctgtccctgatccatataccatttcgatccgctcttgatctgttcgtatgcacgcttgtattccatattatccggctctagctgtatcgccctttgaagcatctcaagcgcccggatctgattaccaagtccggcattgcatacaccagaataataatgccattttgcattatgatcctggatctggttcaatactgttcttgcttcctcataactgcctgaccgcagataatttcttgccgcctgaaaatatctggaatcctgatcgttcggatcatagtcctcccgtcttccgccggcatatccgccgaacccgccaaacgggtcaaaaccgccatagaaaccgccaaacggatctgactcatcataagtagttcttccaccgctgttgctgtttcggtaactgcccgaaccatatgaaccatttccatatgggctgccatatccacctgctccgtatggatttccataaccggtgtcaccatccatgatcgccttatatgcctgctggatctctttgaacttctcttcagcctccgctttgttcggattgttgatattcgcatccggatgatattttctgctcaatcgtctgtatgcactttttacttcatcattactggcaccatgcggcaatcccagtacttcataaggatctttcatttattctccattctgcctgttatctgctttgctaccgcatctttcggcagttgctttataataattattccatatgccagaatacacgatattcctgagaatttccacattttttataatcggaagcttctcaaattctctggcacattctgccgcctgcatcatcaggacttcttttacccagtctgcaagcttctgccattcctccaccggaatgtcctctgtcttcatttcttcactacatgtaagcttgtgtatcaatggattaaagctgtgtttttttcggtccttttcaatatcatcgtaagcgtccagaatatatacaaatcttccaagataataaccgatctttctcagattttcttcccatgcatcagcttttacggcaaatatctctgccagcacttcaccaaaatatcctgataaccgatccagatcttcactgttttctttctcaagctcgctgatctttgcaagccgatctgcaatagtatcaatcttttgtctgtaatcacataatcgactgtcttccttttccaactctttcttcggtattaaaagctccgcatacagcttacgaaacagcttcttatcatctgtccagtcatccatgcatttgtaatatgtaagtatacggttcatatccgctgcataatcggagtacagatttctggcatattcatgctttgtcatcggatggaccacacacctttttgtaccccgctcctctgacggctcatacaatccggtaagcagcagcaccagaaatgtcatatcgtagcttaatgacaactgaccttttgcgccctgatcttcttttaacgccctgcacaacccgcagtaatacctgtggtattcgtcaaattctttaaatttcatttcctgctggtttactactatatatccaaacacgcgcctgtctccaatcagcttttcttaataaaagtattcccacatttcggacatcttatctcgatcctgcccttgcctcgtggaatccggatcatctgctcacaacgtgggcaggtgaagatcttataatcctttccggcttctttgctttttttcatccgtttaaatacatttcgaacgcctgtcgtgtggcttagaaaccacttattttctgccgcacgtttgtcatatttcttagaaaagatgcgcacatatccatagataaaagaagcaagtccaaggaaatacaaaactcctgtcttcgcccagacatctatgatgatcaggatcaatcccatccaagtcagaaatgatgaaaactgatcatttccatatcttgttcgcataaagttgtaaatcttatctctcatataagcaccactctttctttactctgcagatctgctgccatttcagcaccttcagatcatgtattctatctatatatttccgatccgacgatcgtaatattctgcctatccaaggatcattgcagattcctgtaactgtctgtaagcatcctttatattgcccgcttctatatccgtgatccggtcagcatccgtccggcatacgagcttcttcagatattccagatctctccgaatcttcttgatctgagacttatccagtttctgactttgtacctctaactgattttctactttatatacatatgcttcagcttcattccagatatccatattttccttgttgccctgagtttcttcctcataccgcatggcatcttctcttgcccggcgaatctcttcctctgaaagattcgtactggatgtgataacgatttgctgttccacgcctctgccaagatcctttgcagatacctttaggataccatttacatcaagatcaaatgtaacctcgatctgcggaactcctgcaagtgctcgcttgattccactcaggcggaagttaccaagcagcttattatctctggtatatttgcgttcgccctgatacacctttacctctacatcacgctggaaatttccggccgtcgtaaagatcttggataccctggtcggaattggtgaatttcttgggatcagtacatttgcaataccacctaaagtctcgattgacagagacaatggtgttacatccatcaacaaaatatcatttaccttattcgtaacggtcagaccaccactgagctttcctccctgaatcgcagctcccatcgcaacgcactcatccgggttgagattcttcgaaagctcttttccggttatcctcttaacctcgtccataacggcagggattctggttgacccaccaaccaataataccttatctaaacttccggctgatatacctgcatcccgaagtgcctgattgaccggaccgtctgtccgttttacaagatcatctgtcagctcattgaacaactctctggttatgagcatatcgagatgcttcggctcgttctttacgaccgtgataaacggaagattgatatgagtctgcagcgtactggataattccttctttgcctcttcgcatgcttcccggatacgctgtaccgcggttatatctttctccagattgatccttgtttctttcttaaatgactttatcacatactgcaccagacgctcgtcaaaatcatcaccaccaagatgattgtcacctgcagttgccagaacctcgatcacatgatctccgatctcgatcacggatacatcaaaggttccgccaccaaggtcatataccagaatcttctgtgcctgtccgttatccagaccataggcaagtgccgctgatgtcggctcgttgatgattcgaagcacatttaaccctgcaatctttccggcatccttcgtcgcctgtctctgactgtcatcaaaatacgccggaaccgtgatgaccgcatcatgaaccggctcacccagatagttttctgcatctgctcttaactttgacagaatgatcgccgatatctcctgtggtgagtaatcttttccatctattcttttcctgtataccgttcccatttctctcttgatcgaagcgatggttctgtctacatttaccgtaagctgtctctttgcagcatcccccaccagtctgtcgccatttttcgtaatggctactatcgatggtgtggtacggttgccttcggcattcggtatgatcgtcgcctgttctccttccagaacggccacgcagctatttgtcgttcctaaatctattcctattaccctgctcatgtatgatctcctattctgcacgaacgcctgctctagttgagtatcttattacgcaaaacgctctcgctctattttactctgtataacttcgaactaagttcggcatagcctcactaagggctcagttatcacgtaacggtactaaactcctcacctacggtgattcgttaaggaccgacgttcaaataggtttgcttcataagatactcaaccatcgcagactgccaattacataaaatataatatatattgtgcatcaattctttaaattatttttccttacactttttctagaatgtatgatagacaagttttttgaataaattgtgtatagtttataaagcaagtataaagtgtttcataaaactttgactgctgacaaatacgaaaacatgctataatgagcattgctatggaatgtgtcttcacataccggcataatgcgaaaatgctgtttatttccgcaaatatctaacaaacagaaagtggtgtttttatatgcgagagaaaacaaaagcaattctttatataattctggccggtgtcggtttttcttttatgaacgtattcgtacgattatccggcgatcttcctacgattgaaaaagcatttttccgtaatctggtcgcagcattcatcgcacttgttgtcctgatccgaagtgatctcggactgcattatgagaaacggcacattccgatgctgtttatgcggtcgatctgcggcacactcggtatcatgtgtaacttctatgctgtcgatcacatgaacatcgccgatgcttcgatcttaaataagctgtcaccgtttgccgctgttgtcttctcgatcttcctgttaaaggaaaatgcaagtctgaaacaatatgctgctctgatcggtgtattcatcggtgctttatttgttatcaaaccatccctgaacttcactgattttgctccgggtctcatcggttttaccggcggtatgggtgcaggcgctgcttatgcggcagtaagatatctaagcaaccatggtgcaaagaatccacagatcgtattctttttctccgcattttcgactctggtcatgctgccgtttgtgatcgtcttttataaaccgatatcatttttccagttgttctgtctgttaatggcaggagcctccgctgctgtcggtcagttctcgatcacggctgcttattcacatgctccggcaaaggaaatatcgatcttcgattattcgcagatcatcacctcggcaatccttggtttcatcttcttcagccaaataccggatgcattgagctttatcgggtatgccgttatcatcggcatttcttatctgaactggcgcgcaggattaaaagcagatacagccggcaagtaaatttagatattatttatatggctaacagatttgtattaaacgaaacatcttatcatggagcaggtgcgatcacagagatcgctacagaggccatcggccgtggcttcaagaaagcatttgtctgctctgatcctgatctcattaagttcggtgttactaagaaagtaacagatgttctggacaacgctggtcttgctcagtctgcatatgatgatgcttgccgtccgggcaatccaaaagagacaagcgttgaggatatcaccaagctgtacgaatcattgatctaggatttatataaaaacagggatgtaacatcgagggcatcataatcattatttcgcaaggcgctttcgctctaccttcgtcgtagcggtacataaggttgcaaaagacgcaacctaagtaccgacgctcaggcaggcttgctacataatattatgatgccctcaacgttacatccctgtttttatgctatctgtaaaatatcctacagctaaccggtcttttatttttttcttctttttttaatgctcattactccaatggcagctccaccactgacaaataaaagaacaaccgctaaaacaggtacactgttatcacctgtctgtaaagacttcggttcatcttttaactttggtattattacagcttctgctttgatctctttctttccggcttcatcgctgtaatactttccgcaaccatcacaataccaatattcaacatttccttcagactttttcgtagcagccttggcatcaacatgcttgaaatctgaatgattttctgaatctatttctccataagctttaccacatacttcacactttgctttttcactacatgtggctgtaccgcctttatgtccttttgctttaaccaccgaaccggatgaaagctttttcccgcatcccttgcagtaagtatctccggtatagccatctttggtacaggttgctgactgttccttcctgacctcggtttctcctgcatgattatcagaatcatattcaccatattctgctccgcagcttgtgcagactgctttctcatgacaggttgctgtgcctccgctatgttcacagttatagccgcatttctgacatacaccatctttccattcatgcttttctgttgcaacacttacgaggttacagcaattccatttcttctcgtgtgtatcagctgtctgaatccactcctctgttcccgtatgattgctcggattcagttctccataactttctccaccaatctcacactttgctttttctgtacaggttgccttgccacccctacactttacagtttcagaaacgttacagccatttgtctcacatttccggatatgcattcctgtagtatcatcaaactgccattccccaaatgcatgttctgatctgcctgccgcaattgtatatccacatacattacatgtagcagcagtcgtacaatctgcatcatcatttgatatatgcgctgtcttagcagtcacactcgatgccttatccggacaatttgtatcatcacactcctgccaatgaccgctctcatcactgttccagatactgtcactatagctatgttcatgtatggaaaggaacaccccatcataattacctacttttgaaacagtatatgtatatacctttcctgcttcaaaaacatagtcatccatacgcgcttcatccgttcctctcgttcctacgatccagacattcctacctggtgttggatttgtaataacataatcatatgttccttccggaattgtaattttggcagatgaaccatatgggatattatttttcgtatcccttgctccgtctgcattttcaggtattttgtattcgaacctgtcgtacacagatgacggagcatccgtattgttactaagcggaccactatctggtattacatcaccatacgtatcatggtctgcatccagcaaaatttgaacccctgaaccatctttccaatcacagttattaaccaatatgattgtagccgtacctgtctgtgtctgcgaatcttctgcatgcacagtataagcagttgatacacctcctgttaataatgcgcagcctaacaataaactgcttaaaattcgttttctcatttttttaccctccatttctaaatgaataaacctccgctccgcactgtattaatctccctgaccaaaaggctctgcataaccccaacagaaataaccttttgtataattgaaaccagtacatatgttaattataacatatacgatatttgaatgtcatcaatcaaagtgtacaaaaaggacggctacaaaaacagggatataacatcgagggcatcataatattatttcgcaagacgctttcgctctatcctcatgtaacggtactaagctcccgcttatcagcggatcgctaaggaccgacattcgaacaggcttgctacataatattatgatgccctcaacgttacatccctgttttttattttatttacatctcacggaatctcttatatcttgcagcagcaatttcttcgccgctcattccatcgaatttcttcaggaattccttggcattcattttaatgaatttaccgatatatgggacagattctttatctgctccgccatattcaggaataaccttctcgatcacaccaagtcttgaaagatcctgtgcggtaagctgcataacctctgctgcctcctctgcacggttgctgtccttccagagaattgatgcatagccttccggtgaaagaatggagtatactgcattttcaagcatccatacttcattacctactgccatagcaagtgctccaccactgccgccttcaccgatcaggatacaaagtacaggaactttaagggctgacatctcgtaaaggtttcttgcgattgcttcacccataccacgttcctctgcttccagaccacagaatgcaccgggtgtatttacaaatgtgatgataggacgattgaacttctctgcctgtttcatcagacgaagtgccttacggtatccatccggaagcggcataccgaagttacgctccatgcactctgtcatgctggaaccctttacctgtgcgatcacggttacaggctgtccatcgatatgaccgataccaccaacgattgctttatcatcattcattgttctgtctccatggatctcatggaaatcatcacagatataatcaatataatcaagtgcgcatggacgagtcatctgtcttgtaccacggatcttctcccaaggagtcttattctcaacagaagtcaatctctcctttaagatctcgctgatatcaaacttttcgtcttcttccttatcgaagtttgcataaccggttctctgtttatgcgtaacgatcaactgatacatggtatccttcatcttatctctggtgataataccatcaataataccgtgctctaccaggaactctgaacgctggaagccttccggaagatcctgtccgatcgtctgcttgataacacgagggcctgcaaagccaaccagagcaccgggctcacctaagatgatatcgccaagcattgcaaagctggctgttacaccaccggttgtaggatctgtaaggatcgatacatataacaatccggcttctgaatgtttcttcaatgctgcagatgtttttgccatctgcatcagggaaatgataccctcctgcattctggcaccaccggaacaacagaacatgaatacaggaagcttttcttctgtcgcacgctcaaccgctctggcaatcttctcaccaacaacatagcccatactgctcatcaggaatctggcatcacagataccgatcatagccggctcaccattgatcagagccttaccgactgtaaccgcttctttcagtcctgtcttttcctgcgcagccttaaccttatcctcatatccggctgtatttaacggatttgacatcggcatatcttcaaaccatggttcaaatgactttggatctgttaccatcttgatacggttctttgtcttaacacggaaataagaaccacattcataacaaatatattttgcctttacaactctctgcttatcaagctcagctccacatttcggacattttacagtctccggttttggctgttctgcttcgacagccttctttttttccatctcggcttcttttgcctttttctttataaataacatttctttttactgctccttatatttctgtaaaagaatacatgcgttatgtccaccaaatccaagagaattgctgatcgcacagtcaacctcctgctcatatggctccttacaataatcaagatccagttcttcttcactctcatgaagtccacgggttctgtggatatagccttcttcgatcgtctttgctgtaacgatacattcgattgcacctgctgcaccaagaagatgtcctgtcatagactttgtagaattgatcttgatgtcctttgcatgatcgccaaatgctttcttgatcgctctggtctcaaccagatcgtttaaatgtgtactggttccgtgtgcattgatatatgcaacatcctccggtgatacgcctgcatcctttacagcatttaacattgctcttgcagggctctcgcctgaatcttccggtgctgtgatatggaatgcatcactggagcatccgtatccgctgatctcggcataaatctttgcgccacgcttcttagcatgttccagttcctcaagaataacgataccggaaccttcaccaagaacgaaaccatctctctctttatcaaatggaattgagcatctgtccgggttatcagatgatgacaacgctgttaatgcatcaaatgtcgagataccgatcggtgaaactgctgcttctgtaccaccggcgatcattacatctgcatctccatactgaattgtacggaatgcttcaccgatactgtttgtaccggatgcacatgctgtaacaacatcaatactctttcccttgcagccaagctggatcgcaatattacctgctgcgatattactgatcatcataggtactgtaaatgggcttacacgattcggtccctttgtcatgatcttctcatatgcactttcaagttcctgaaggcttcctacaccggaaccaacacaggttccaaccatgtatggatcttctgctgtcatgtcaagctttgcatctgcaactgcttcctttgccgctgcaactgcgaactgtgaaaatcttgccattcttcttgcagcctttggatcaatataatcttttgctacaaatccttttacttcacctacaaccttgcacttatattctgatgcatcaaactgtgtaatcggtccaaaaccatgtctgccttcttttaagccgttccagaactcatccacattcaagccaagtggagtaaccgctcccattcctgtaatcactactcttctactcatattcaataattctccttaatataaagtatgatttccattttcttccatatatataccatccagattatttgtgaaagatatagaagaaatcctgcattgttaaattctataaaaatttactttgtcagcttatgtataaaccacacatactgcacagaatgcatggttacgtcgatattgtactacattttacaaaaatatggaaataaatcttgtaaagtttttattaattatctcacgatttcacggcatacttcgtcttccgacaacatttctccgctatttttcttttcgtattgaatggaaaagataaatttcttactgatgaaataattcaaaaagatcacaaggatcgatgtaaacaccttaacacccatcgcattccatttcagtccggtgacaagcgcaaagataattcctgtttcgatcagaagtgtagatacccggctcagatagaataatgccagttcgataaaatatgcctttaccgtggctgcctttgtgtggaatacagatttgcggtttgtcgcaaatgacacatagttgtacaaaatccacgacatataattggcatagatctcatttatcccgcatttgtacataaaaaaccaggcagaccctaagttcactgcccctacgagtatgccccatgcgatatatatgtatatttcctttggtattttgcgtaaaagtttcataccattctccctatagtcctgatatcggaagctgcttgagtgtcgtctcttcttccggaaattcccggacgatgcgatcatacattttatggttaaaagcttccctttctttataattgaatttcagaatgttcttatagccccataaatgtgtgaagatatcctggttctcgatctgtgccgaaccgggaaaaaaagatgatatctgctttccctgcttctctgcgcacatcgcaagaagccgctgttccgcaaataccatatggcagagattctcctctgtctccagacaattctccataaatgtgatcgaactgtcaacataataattcttaaacgcttcatccgcgatatataacatacaggtattgaccggaagaacctcaaagctccagtccgggtcaaaccgatactcctgcttcatatggaaaaactcttttcccggatacacatcagggaatatcccttctctgtgtattgcacagatatccgtatcttttataatattccgtatatccttccagatgatcagatccagatccaccataaccgcaggcatctgcatttttttcaatgaatatagtttgccggctgcccagaacaccttttccggtaccgcttccggcactgtaatttcctcgattccgagattccagatgtgcgcaagtcccagcttctcgataaatactcttgcctctgcatccgcacacaaacggatccccccattgtgttttctccacatcaatgccgaaagaatcatcgtaaggacttcatagtcctgcatccaatattcttccgcttgttttcccgccatatacggttttgaccataaggaatgaaatccgtccatatgttgtcctttcaagataattgaaaaccagctaaatattgattagctgcaggctcttgaccttctcagccaaggggtgcttccgctctatattaaatccaacccatagccaaatgtactgtttccgccttttctgctgcatggtcgttttgaccggtttataagctgccattccggcggcatgtaataccaatgcggaatatcataatcatctgccccgccatctgttgcctgataaaatgtcggtgtgtaccggctgcctgccagataattccggttactgcctgttaaaaagcttcgattgctgcctgctaaaaatccacgctggctgccattctcatattcccattcgtatgaccaagggcgattgctacttgtccagaattcacgattgctgcccgtcagataacctcggttgctgccataggaaaagctgttccgacttccaaaaaggaatccctgctgacttgtaccaaaaaatctaccttgacttccaaagaaatttccacgttgacttgtactaaacagacttctctgactgcccccgaataaacttctctggctgccattctcatattcccactcatatgtccaaggtcgattactgcttgtccagaattcacgattgctgcctgtcaaaaactcacgctcactaccaacaaaagctccctgctgactgcctgctaacaatttgttctggcttgtaccgaataagcttcgttgactactcatctggcttccggatacatccatacgatttcctttaccgccattctgcgaaccctgtatcctcacattctctgctttcttcttataatcaaccgggatcaatatatttccgttaaattccacactaaaaggcctgccattccacatcacatatgtgcgatacggatacagcctgccctcatgtgcgatcaacttcatataaacaggaattccacctgttttttcttccaactgtcttgcctgttttcttgttgcctttataaaataaccacccgaaggcagtctgtcattcagaatggaattcaattcctcattccattctatataaacattaaattccccattatcattacgatagtttcgcatatcaaaaaaaaccagaccggcagccactggaagcatgttagaaattctgttatcaaattgtgaaagttcctctccggctctcttcaaaaacaatgaatacacgaaactcattcaaatctccattctgacacccacaaatatgctgtcccaatttttctgtctcacaggcgtcatttgttcgcccttcacgctaaaaaagcgctacaatcccatactaaatactcatgatattatggtaaaccatttacccatttatttcaagaaaaatcacactttcttgcaatgaaaaatcagcagaatcaggacttcaaaagccacaaatattaacagccgcagaattcctgcaaatagaataatcatctttagacagtagataaaagccggacactatctttggtttaaaaagatagtgtccggcttttatctatctacactttacgcatctttattatctgctaatgctgctgtgatgatcgccatagaataaacctcatctgctgtacatcctctggacagatcgttgataggagaattaagtcctaacaggatcgggccatatgctgagaagttacccattctctgtgcgatcttataaccgatatttcctgcattgatatcagggaagataaaggtatttgcatttcctgcaacctctgactgtggacatttcttctttgcaactctaggtgatacggctgcatcgaactggatctcaccggagattggaagatcagggttacgctcctttgtctttcttgctgcatttctcatcttatccacatcttcgcccttaccggaaccataggttgaatagcttaagaaagcaacctttggatctacaccgaagattcttgcacaacgaacagtctcctctgcgatctcaaccagctcatcttcatttggcttaatgttgataccacagtcacccatagcgaacacttcattaccacctgttgcaaacggacgtaccagaatgaaacaggatgaaaccagtgtgttgcccggtcttgtcttgatcagctgtaaagcaggtcttactgtatctgctgttgaatatgtagcaccaccgagaagcgaatctgcaatccccatcttaacaagcatcgtaccaaagtagttgttctgatacaggatctctcttgcctgctccggtgtcacgcccttgctctttctgagttcacagaacagctcgaccatctcatccatacgatcaaaattccttggattaatgatctcggaacctcttatattaaaaccgctttcctctgcaacttcataaatcttatcaggatctcctacaagaatcggatgcaggaagttacttgcaagaagtcttgaagatgcttccagaatacggggatcagtaccttcagtcaaaacaattgtttttggatttttcttcaaaatatcgatcaatacaccgaaaccaaaatttttacgttcttccacgattatagtcctccattgattatttatacgaatcatatatcatgcattatatacacgttccgtatattttcagtattaaaagctatacttgcgcatagcgagtcatcttacttttattatattgatttttaacgaataaacaaggttttccatcgaaataattgtacctttttttgaacaattttaaaattagctcttgacaaatatatcataccagtgcaatatgaatacaataaaacaaaccaatgagcaagaagagtagcttatgaacaacatgtccagagaactgcaggtggtgagattgcagtgatgatttcttaagtgaatggacttgcgagggcaaaccgaacgagcgaatctagtaggggcgacggagacttcccgttatagaaagtacatatatgttagtatatggttgagtgcatcagattttgatgaatataggtggcaccgcaggagtgttgtatttgtatcttgtcctataagcgttttgcttttggatgagatttttttatacaatcttctgatggtgctttttctttttataaaaagcagatcaggcaaagcgcacctcaccatacatgaacaatttcaaataacttattaaactattatttatgaacgaggtgaaacatatgatacgaccaacacttaacgaagcaaaagaatatgcgaaacagggatatcacatggttccggtctgttatgagatgctctctgatatcatcactccgatcaatctgttgaagaaactgaaagcggaaaatgagcattgctacattctggaaagcgtggagaatcaggagctctggggaagatacaccttccttggatacagtccaaaactggatatcacctgtatgaacggaacactgacattaaaggatgagaacggagcagtcatcaaagaggcctccggcatccatccggaagtctttatccgtgaggttttaaaagattataagagtccgaagatcgaaggcttccctaccttcaccggcggactggttggatatttctcttatgactatctgaaatacagtgaaaagaagctggtgcttgatgcgaaagacgaggaaggatttcaagatgtcgatctgatgttatttgaccaggtgatcgcatttgacaatgtaagatccaagctgatcctgatcgcaaatgccagcacagcaaatatcgaagaaggatatcagaaagccttacaggatatcaaagaaatgaaagaactcattctccatggcgcagaagccgatatacctgctcctgttcttaagacagaattcaaaccattatttgacaaagaagcctactgccggatggtagaaaaggcaaaacactatatatatgaaggagatattttccaggtcgtgctttccaaccgactggaagccgaaatggaaggaagcctgttcgatacctaccggctgctccgaagcacaaatccatctccttacatgttctactttgacggtgacacgatcgaggttgccggagcttcccctgaaactctggtcaaggcagaggatggtgttctccacacatttcctctggcaggcacaagaccaagaggaaagacaaaggtcgaagatctggaactggaaaagagcctgatggcagatgaaaaggaacttgcagaacacaatatgttagtggatctcggaagaaatgatctcggaaaggtcagtcagttcggaacggtcgaagtcgaacgatacatgtccatccagcgttattcacacgttatgcatatcggctctaccgtacgcggaacacttcgtgaggatctggatgcgatctccgctgtcgatgcggttcttccggccggaaccttatccggtgcaccgaagatccgggcatgtgagatcatcaacgagcttgaaaataacaaacgaggtatttacggcggcgcgatcggttatatcgatttttcaggaaatctggatacctgcatcgcgatccgaatcgcataccgcaagggaaataaagtatttgtccgttccggtgccggcatcgtagccgacagtgtaccggcaaatgaattccaggaatgcatcaacaaagcaaaagccgtaacggatgcattgattaattctcagaagatacgaggtgacgaagcatgatattactgatcgataattatgacagcttttcctacaatctgtatcagcttgtaggaaagatcaatcctgacatcaaggtaatacgaaatgacgaatatacctgtcaggaaatagaagcaatgaatccggagaagatcattatttcacccggtcccggaagaccttccgatgcaggtatctgcgaagaagccatctcctattttgccggcaaggttccgattcttggtgtctgtctcggacatcaggcaatctgtgaaacctacggtgcaacgatcacatacgccaagaagctgatgcatggcaagatgtccgttgcaaatgtcgacatcaactgcaaactgttcaagggacttcagaaacggatcgaggttgccagatatcattcccttgcagcttccgaagaaaacttcccggatgttcttaccgttatcgcccgaaccgatgatgatgagatcatggcagtcaaacacaaagattatgaaatatatggtgtccagttccatccggagtcgattctgacaccaaaaggaacgatcatcttacgaaactttttagaggcataaccagacatttgcaggttgcaatacactacttagattaaacatttttgccattaccaaccagggaacgcttccgctcgtttccactctgtgtaacttcgaactaacctcggcttaagcctcgctaaggtctcagttacccctgcagcggtactaagatgctgctaatgcatcatcacaccacaggggtgcgctttcgttctaagctcgtgcaagcactcactaagtacgaaatgtgagtaccggcggtctcaaatgccactgttttggcaagtcagaatgtttaatcatgaatatactttataggattcgcaaatgtttattagaacatacattaaaggaggaaatgaatatgattacagaggcaatcgcaacagtagtaaatggtgaaaatctagacaaagaaatggctgcggccgttatggatgaaattatgagcggagaagcaacacaggcacagatcggaagcttcttaacagcccttcatattaaaggtgaaacaatcgaggagatcacagcatttgctgagatcatgagaaaacactgtggtgaatttacaccggatgtcgatgaggagatcgacatcgtaggaaccggtggagactgcgcaggaaccttcaatatctcaactgtttcctcattagtaacagccgcaggcggtggtaaggtggcaaagcatggcaaccgtgcagcatccagcaaatgcggaacagccgactgcctggaagcccttggcgtcaacatcgcagcagactgtaaagtcagcgaagcctgtctgaaggatcttggtacctgcttcttatttgcacagaaatatcacacagcaatgcgatttgtcggcgctccaagaaaagagatcaagattcctacagtattcaatatcttaggacctcttgcaaatccggcaaaagcaaatcttcagttactcggtgtctatgatgcctcccttgttgatccgcttgcaaaagtactcagcaacctcggtgtaaaacgtggtatggtcgttcatggaaacgacggtctggatgaaatctcagcggttgcaacaacaactgtatgtgaattcaacgatggcacatttaacacctataccttagacccaaccgcatacggcttcaccctctgtgacaaagccgaactggtcggtggtacaccggaagaaaatgcacagatcacaaaggatatcttatccggcaagatcacagatggcaagcgtacagccgttatcttaaatgccggtgcggctttgcatatcacaaaccggatctcacttgaagaaggctttgcccttgcagccgatattctggcaaatggcagcggtctgaagaagctggaagactttatagcagcaacaaacgcttaattatttgtaaaagcaaaacacataaccgatccggaacctttaatctccggaccgctatggaggaatatatatgatcttagatgaaatagcagcaaaaacaaaagaacggattgccagatgcaaagagcagatctcatttgaagaaatgaaggcaaaagctcttgcaatcgtagaaaaggaaacagagaacggaacaaaaccttataccgtttttcctttccgtgacaatctggcaaaaccgggaatctcctttatctgcgaagtaaaaaaggcttctccttccaaaggactgatcgcaccggatttcccatatatcgagattgcgaaagaatatgaagccgccggcgcatccgccatatccgtgctgaccgaaccattttattttcagggaagcaacgaatatctgacagcgatccatgaagcagtatccactccgatcctgcggaaggatttcaccatcgatccttatatgatctacgaggcaaaagtgatcggtgcctctgcgatccttctgatctgtgcgatccttaccgacgaacagctcaaaagctattacgagcttgcaacaagtcttggcctgtccgttctggtagaagcacacgatgaagaggaagtcagacgtgcgatcgcgatcggtgcagatatcatcggtgtgaataaccgtgatctgaaaaccttcatcgttgacatcatgaacagtgtaagacttcggacattgatcccggattcgataaacggcaaaccggtcgtctatgtatccgaaagcggcatccgcacaccggaggacatcgaccgtttaaagggaaatggcacagatgcagtattgatcggagaaacctttatgcgaagccctgataagaaagccgcatttgcatggttacggggtgaagctataggatagaaacagatcctgtttctgcaggaacaacgaactttatttgaaagcattaatgatatttataatatagaaacaacacatacaggaggaaacatatatgtcaaaaggacgttttggaatccatggcggacagtacataccggaaacactgatgaacgccatgcttgagcttgaagaagcatataagaaatacaaagatgacccggaattcaaccgggagctgacagaactgttaaatgaatacgccggcagacctagccgtctgtactatgccaagagaatgacagaggatctcggcggtgcaaagatctacctgaagcgcgaggacttaaaccataccggagcacataagatcaacaatgttatcggtcagatgctccttgcaaaacgaatgggtaagacaagagttatcgccgagacaggagccggtcagcacggtgttgcaactgctacagttgctgccatgatgggtatggaatgtgaaatcttcatgggcaaggaagacaccatccgtcaggctttaaatgtctatcgtatgaaattattaggagcaaaggttcacccggtagaaaccggtacaggtacattaaaggatgccgtttccgaaaccttccgtgaatggacttccagaatcgatgatactcattatgttctgggttctgttatgggaccttatcctttccctgagatggttcgtgattttcaggctgttatcagcaaggagatcaaggaacagcttatggagaaggaaggcagactgccggatgccgttctcgcctgtgtcggcggcggttccaatgcgatcggcgcattttataactttattccggataagagcgttcgcctgatcggatgtgaagcagccggacgtggaattgatacatttgagacagccgcaacgatcaataccggaagactgggtatcttccatggtatgaagtcctacttctgtcaggatgaattc

SEQ ID NO: 86 - DNA, 79311 bp, unidentified
  source 1..79311: mol_type = unassigned DNA
  misc_difference 54527: note = a, c, g, or t
  misc_difference 54528: note = a, c, g, or t
  misc_difference 54529: note = a, c, g, or t
  misc_difference 54530: note = a, c, g, or t
  misc_difference 54531: note = a, c, g, or t
  misc_difference 54532: note = a, c, g, or t
  misc_difference 54533: note = a, c, g, or t
  misc_difference 54534: note = a, c, g, or t
  misc_difference 54535: note = a, c, g, or t
  misc_difference 54536: note = a, c, g, or t
  misc_difference 54537: note = a, c, g, or t
  misc_difference 54538: note = a, c, g, or t
  misc_difference 54539: note = a, c, g, or t
  misc_difference 54540: note = a, c, g, or t
  misc_difference 54541: note = a, c, g, or t
  misc_difference 54542: note = a, c, g, or t
  misc_difference 54543: note = a, c, g, or t
  misc_difference 54544: note = a, c, g, or t
  misc_difference 54545: note = a, c, g, or t
  misc_difference 54546: note = a, c, g, or t
  misc_difference 54547: note = a, c, g, or t
  misc_difference 54548: note = a, c, g, or t
  misc_difference 54549: note = a, c, g, or t
  misc_difference 54550: note = a, c, g, or t
  misc_difference 54551: note = a, c, g, or t
  misc_difference 54552: note = a, c, g, or t
  misc_difference 54553: note = a, c, g, or t
  misc_difference 54554: note = a, c, g, or t
  misc_difference 54555: note = a, c, g, or t
  misc_difference 54556: note = a, c, g, or t
  misc_difference 54557: note = a, c, g, or t
  misc_difference 54558: note = a, c, g, or t
  misc_difference 54559: note = a, c, g, or t
  misc_difference 54560: note = a, c, g, or t
  misc_difference 54561: note = a, c, g, or t
  misc_difference 54562: note = a, c, g, or t
  misc_difference 54563: note = a, c, g, or t
  misc_difference 54564: note = a, c, g, or t
  misc_difference 54565: note = a, c, g, or t
  misc_difference 54566: note = a, c, g, or t
  misc_difference 54567: note = a, c, g, or t
  misc_difference 54568: note = a, c, g, or t
  misc_difference 54569: note = a, c, g, or t
  misc_difference 54570: note = a, c, g, or t
  misc_difference 54571: note = a, c, g, or t
  misc_difference 54572: note = a, c, g, or t
  misc_difference 54573: note = a, c, g, or t
  misc_difference 54574: note = a, c, g, or t
  misc_difference 54575: note = a, c, g, or t
  misc_difference 54576: note = a, c, g, or t
  misc_difference 54577: note = a, c, g, or t
  misc_difference 54578: note = a, c, g, or t
  misc_difference 54579: note = a, c, g, or t
  misc_difference 54580: note = a, c, g, or t
  misc_difference 54581: note = a, c, g, or t
  misc_difference 54582: note = a, c, g, or t
  misc_difference 54583: note = a, c, g, or t
  misc_difference 54584: note = a, c, g, or t
  misc_difference 54585: note = a, c, g, or t
  misc_difference 54586: note = a, c, g, or t
  misc_difference 54587: note = a, c, g, or t
  misc_difference 54588: note = a, c, g, or t
  misc_difference 54589: note = a, c, g, or t
  misc_difference 54590: note = a, c, g, or t
  misc_difference 54591: note = a, c, g, or t
  misc_difference 54592: note = a, c, g, or t
  misc_difference 54593: note = a, c, g, or t
  misc_difference 54594: note = a, c, g, or t
  misc_difference 54595: note = a, c, g, or t
  misc_difference 54596: note = a, c, g, or t
  misc_difference 54597: note = a, c, g, or t
  misc_difference 54598: note = a, c, g, or t
  misc_difference 54599: note = a, c, g, or t
  misc_difference 54600: note = a, c, g, or t
  misc_difference 54601: note = a, c, g, or t
  misc_difference 54602: note = a, c, g, or t
  misc_difference 54603: note = a, c, g, or t
  misc_difference 54604: note = a, c, g, or t
  misc_difference 54605: note = a, c, g, or t
  misc_difference 54606: note = a, c, g, or t
  misc_difference 54607: note = a, c, g, or t
  misc_difference 54608: note = a, c, g, or t
  misc_difference 54609: note = a, c, g, or t
  misc_difference 54610: note = a, c, g, or t
  misc_difference 54611: note = a, c, g, or t
  misc_difference 54612: note = a, c, g, or t
  misc_difference 54613: note = a, c, g, or t
  misc_difference 54614: note = a, c, g, or t
  misc_difference 54615: note = a, c, g, or t
  misc_difference 54616: note = a, c, g, or t
  misc_difference 54617: note = a, c, g, or t
  misc_difference 54618: note = a, c, g, or t
  misc_difference 54619: note = a, c, g, or t
  misc_difference 54620: note = a, c, g, or t
  misc_difference 54621: note = a, c, g, or t
  misc_difference 54622: note = a, c, g, or t
  misc_difference 54623: note = a, c, g, or t
  misc_difference 54624: note = a, c, g, or t
  misc_difference 54625: note = a, c, g, or t
  misc_difference 54626: note = a, c, g, or t
  misc_difference 69707: note = a, c, g, or t
  misc_difference 69708: note = a, c, g, or t
  misc_difference 69709: note = a, c, g, or t
  misc_difference 69710: note = a, c, g, or t
  misc_difference 69711: note = a, c, g, or t
  misc_difference 69712: note = a, c, g, or t
  misc_difference 69713: note = a, c, g, or t
  misc_difference 69714: note = a, c, g, or t
  misc_difference 69715: note = a, c, g, or t
  misc_difference 69716: note = a, c, g, or t
  misc_difference 69717: note = a, c, g, or t
  misc_difference 69718: note = a, c, g, or t
  misc_difference 69719: note = a, c, g, or t
  misc_difference 69720: note = a, c, g, or t
  misc_difference 69721: note = a, c, g, or t
  misc_difference 69722: note = a, c, g, or t
  misc_difference 69723: note = a, c, g, or t
  misc_difference 69724: note = a, c, g, or t
  misc_difference 69725: note = a, c, g, or t
  misc_difference 69726: note = a, c, g, or t
  misc_difference 69727: note = a, c, g, or t
  misc_difference 69728: note = a, c, g, or t
  misc_difference 69729: note = a, c, g, or t
  misc_difference 69730: note = a, c, g, or t
  misc_difference 69731: note = a, c, g, or t
  misc_difference 69732: note = a, c, g, or t
  misc_difference 69733: note = a, c, g, or t
  misc_difference 69734: note = a, c, g, or t
  misc_difference 69735: note = a, c, g, or t
  misc_difference 69736: note = a, c, g, or t
  misc_difference 69737: note = a, c, g, or t
  misc_difference 69738: note = a, c, g, or t
  misc_difference 69739: note = a, c, g, or t
  misc_difference 69740: note = a, c, g, or t
  misc_difference 69741: note = a, c, g, or t
  misc_difference 69742: note = a, c, g, or t
  misc_difference 69743: note = a, c, g, or t
  misc_difference 69744: note = a, c, g, or t
  misc_difference 69745: note = a, c, g, or t
  misc_difference 69746: note = a, c, g, or t
  misc_difference 69747: note = a, c, g, or t
  misc_difference 69748: note = a, c, g, or t
  misc_difference 69749: note = a, c, g, or t
  misc_difference 69750: note = a, c, g, or t
  misc_difference 69751: note = a, c, g, or t
  misc_difference 69752: note = a, c, g, or t
  misc_difference 69753: note = a, c, g, or t
  misc_difference 69754: note = a, c, g, or t
  misc_difference 69755: note = a, c, g, or t
  misc_difference 69756: note = a, c, g, or t
  misc_difference 69757: note = a, c, g, or t
  misc_difference 69758: note = a, c, g, or t
  misc_difference 69759: note = a, c, g, or t
  misc_difference 69760: note = a, c, g, or t
  misc_difference 69761: note = a, c, g, or t
  misc_difference 69762: note = a, c, g, or t
  misc_difference 69763: note = a, c, g, or t
  misc_difference 69764: note = a, c, g, or t
  misc_difference 69765: note = a, c, g, or t
  misc_difference 69766: note = a, c, g, or t
  misc_difference 69767: note = a, c, g, or t
  misc_difference 69768: note = a, c, g, or t
  misc_difference 69769: note = a, c, g, or t
  misc_difference 69770: note = a, c, g, or t
  misc_difference 69771: note = a, c, g, or t
  misc_difference 69772: note = a, c, g, or t
  misc_difference 69773: note = a, c, g, or t
  misc_difference 69774: note = a, c, g, or t
  misc_difference 69775: note = a, c, g, or t
  misc_difference 69776: note = a, c, g, or t
  misc_difference 69777: note = a, c, g, or t
  misc_difference 69778: note = a, c, g, or t
  misc_difference 69779: note = a, c, g, or t
  misc_difference 69780: note = a, c, g, or t
  misc_difference 69781: note = a, c, g, or t
  misc_difference 69782: note = a, c, g, or t
  misc_difference 69783: note = a, c, g, or t
  misc_difference 69784: note = a, c, g, or t
  misc_difference 69785: note = a, c, g, or t
  misc_difference 69786: note = a, c, g, or t
  misc_difference 69787: note = a, c, g, or t
  misc_difference 69788: note = a, c, g, or t
  misc_difference 69789: note = a, c, g, or t
  misc_difference 69790: note = a, c, g, or t
  misc_difference 69791: note = a, c, g, or t
  misc_difference 69792: note = a, c, g, or t
  misc_difference 69793: note = a, c, g, or t
  misc_difference 69794: note = a, c, g, or t
  misc_difference 69795: note = a, c, g, or t
  misc_difference 69796: note = a, c, g, or t
  misc_difference 69797: note = a, c, g, or t
  misc_difference 69798: note = a, c, g, or t
  misc_difference 69799: note = a, c, g, or t
  misc_difference 69800: note = a, c, g, or t
  misc_difference 69801: note = a, c, g, or t
  misc_difference 69802: note = a, c, g, or t
  misc_difference 69803: note = a, c, g, or t
  misc_difference 69804: note = a, c, g, or t
  misc_difference 69805: note = a, c, g, or t
  misc_difference 69806: note = a, c, g, or t
ataagtaaactccatatttgtctggctctcaagcacctttagatatgcacggcactccttctttgcctcgtcaagtgacagattctcgtaatgtccgcactctatggctgatgcaccaaacaccggtccatcatactcaagtatctgttttaagacctcttttgtgatttcaaaaacctttcccggctcgacatccctcacaacgagatagaagcctgtctgacagcccatcggtccaaaatataccacatcatctgcaatctcagagtttctcacacatgttgcaaacatatgctccactgagtgcatagctgaattggtcatataatcgcctgcattaggttttcttgtacgaaggtcgtatgtaacgatttctccatcttttcttgaaatataaaatccaggtttaagaatattatgattgattgtaaagcttttaattctttccataaaaatgtttctccttacttagttgctgcctcaaactgcttcagataatcctcaaatacattgagtgcatcatccacaggctttggtgtgctcatatcgacaccggcactctttagcagctcgattggattcttcgagcatccaccgcacaggaaatttcctatatacttatccacagcaggctttccctcctcaagtatcttttttgaaaaagcaactgctgccgaatagcccgtcgagtactgatatacatagtacggtgtgtaaaaatgcggtatacgcatccactcatatgatatctcatcatccacgcgcatatccggtccgtagtactgcacattcagctcatgccatagctcatttagcacatccttggtaaccggctcgcccttttgcattttccggtgagctatatgctcaaactcagcaaactgtgcttgtctgaaaagtgtcgtcctgaaaccgtccagaaaatgtgtcatgagatattttctctcattctcatcctcacaatgctcaagcatatagtgcattagaagcgactcattgcaggtggatgcaacctctgccacaaaaatcaggtatcccgcgtaggtgatgctctgatgctcatttgaatagtatgtatgcatcgcatgtcccatctcatgagccagcgtaaacacactgtccagattgtcggcatagttcaaaagcacatacggatgagtgccgtaagcgccccatgaatacgcaccgcttctcttgttctcattctcatatacatctatccagccactctccatgccagccttaagtgtgctgacatactcatcgcccataggctcaagcgcctttgccacaagctttttcgcctcatcataggtgtatgtggtctgtacattgtccacgatcggtgcaaacaaatcatacatatgcagatgctccacacctaaaagcttcttcctaagcgccatgtacccgtgcagagccggcagatgtgcatgaaccgtctcaatcagattgtcatagacactctcaggaatatcgccaccggataaatacatggcccttgcactgtcatattttcttacccttgcataaaaagtgtcatttttcagcttgctgatgtacatcatggaaacagtattgctccacttcttgtacgaatcatagactccacggaacacctgcttgcgcaggcttctgtccttgctgcttaaaaaatctatgaaattgccatgcgtgatacggattttatttccctcgacatcagtgatatacgggaatttgatatccgcattgttgaacatgctgaatatattctccggtgctgcagccatctcaccgcactgcgccaggatattttcctctgcagccgataaggtatgctctttctgacgcattatctcatcaatcgcacgcttatagtgcataagctcattgctctcactgtaaaagctctcaagccttttatcatctatctgcaaaatctccggactcgcaaatgccagcgcacctgatgcctgaacagtcagtgtctctgcctttgacacatatgcctgatatttcgacacggcagtatcctgatgcgagcgctcattcgcataaaccactatacgctccaaataataagacaactcatcctgcttcttaaaaaaatcaagcagcgttgctgcactgtcggccagatgttccttaaatccggatagcttttctgcaagctgtgacgctttttcgcactcagcctcccacagctcatctgtctcatacatatcctcaagcttccatttgtactcgtctgagatttcatctctcttttgaagccttttctcactcattttgtgttaccttctatcttactctttttatttagaatcccacacatctgctctgcaaaatgcatatagacgtgtgggatatatgtgaattataacaattaagctctactttgtaattaaagtgcccataccacctgaaactgtcttgccctctttgtttagctttgtgataagcaccgaacggatggcagagtcaccgataaagtcgatagccgcctcaatctttggagccatggtaccctcatcaaactcgcctgctgcaaggtacttctttgcctcatcgacagtcatggtatcaagcggcttctcatcctccttgccatagttcaggcagaccttgtcaacgcttgtaagtataacaagtctgtcagcatcaagagtatctgcaagctttcctgctgcaagatctttctcgataacagcactggcgccctgaagcttattgtcctgtgctaaaacaggaattccgccgccaccgcatgcgataacaacctgatccgcatcaacaagagccttaatagcatccttttccactatatcaacaggctttggagctgccacaactcttctgtagcctccctcgacctgtgtcacatggttgcccttcttctcctcttcctcagcctcagcctctgtcataacacggccaatgatctttgtcggatgataaaaagcctcatcatatgggtcaacaaccacctgtgtaagtattgttgaaacggtcttgtaaattcctctgccaagaagctctgtacggatagcgttctgtaaatcatatcctatatatccctgactcattgcagagcagacagctgtaggtgtagctgtatactcaggataaatcctgcaaaactcagacatagcagtgtgaatcatgcccacctgcggtccgttgctgtgtgtgataacaacctcataatcgtccctgataaaatctgcaactgcctttgctgtatgctttgtagcctcgtgctgctccggaagagttgttccaagagcatcatgtccgagtgcaataactatttttttcttcttcatgccgacctcctatgctgcatccgctcaatgtgtattatatctcataatcataaaccgatgtgtatactattataaatctacatataaaccatcaattttaaagaattcctatgcggtgcaaaaagtaaaattatttatatacattatctaatattttagggaatttgtctagtactttgaactgatttgaacaacatttccaccatagcgtaagccccgggcacctgtgacgcacacgtactcttgcaggagcgaatagcgaagtggcttagatactgtagaaattatgcccatgaaacgcagaaacacccctgcatggacgcaggggtgaggagaaaacgcgccggaattactgctggacatccttcgcagagcttaaggttacttcaaccttgctctcttcgtactgtctgccactctgacgggcaacagtaagagtaaccttatctccggccttgtagctctttaacgctgactgcagctctgtcatagaagaaatctttgtgctgtcaacagcagtgatgatatctccctcctgtaagccggcatttgcggcacctgaaccagctgaaacagatgaaacatacacaccctgtgggaagccgtaggctaccatctcagatgaaacatcaccacccttgataccaaggtatgcctgattctcattagtatattttccattctggataaggctctcaataataggctttgcaactgacataggaattgcatatccaataccctcaacctcagttgaagaatattttacagagtttataccgataacctcgccattttcatttaagagtgctccaccactgtttccagggtttatggctgcatcggtctggataagcttgttgttggtaacagtctcacctgtctgtgaatcctgtgtagtaacagttctgttaagtgcacttactatacctgttgtgacagactgtccgtatccaagtgcattaccgatagcaattgcaggacttccaacagctacactatcagaatctccgattgtagcaatcttgatatttgagtaagtatcttttccaaggtctgctttctttacacgtacaactgcaagatcgtcatccggatctgttcctctgatttctgcctttaccacagaatcatcatcaaactgtactgtgagctcctctgaatctgccacaacatgattgtttgtagcaatataaagataatcatcatcctcactcacaataattcctgagccacagctctgagactgctgtgactgccttccgaaaaagctgttgtaggtgactgttcctgtatttgtgatagcaacgatgctaggcataacctcatcgacaacagatgatacatctgtcatatcctttgcatcccctgaggatgtctgcttagtcccaccggatgttgtagtggtaagctttgcacttgcagtagaagaatttgaaatagctctcgtgccaatatagcttactcctgtgaaaactccgcctccgacgagtccgaagataagagctgcagctactgtctttgctgcaaatggtccaaatgcaccaggctttctaggtgctctctgtttcttaggctttacagtctgctggtatgcctgaccattcatattcatccggcggctatatgaattgtctgtcgaacctgctgatgtgccgccatatgcattattatttgtgcctgaattatacgactgattagaataaggctgatttgcatatgattgatttacatttggctgtcctgctgcagaagcctgcgaatatggattgtagctctgtgaatagctttcagctgatgtattattagtctgtgcagccttctgtgactcatccgaattgtaaggattacccgacattgtgaaatttacattgtttgtattgttatttgtactgttagtattatttgtattatttgtatcattcatatttctataattgttatccataataatttctcctttcgtttacatttagaagtatactgtcaatctgtgtttattttgtgacgggattatttattttttcataaatcatttaactatttatagcctatattccccattgcaggccactatgcgattataaaaataaaaataactgctcatcggcagatgcacctctaagtctgcgataaatagaaattgcagaatatcaatacatccctgccaatgaacagttaccataaatcatatattaaatttcaattccgttcttctcaagaagagctctcgctgtttcaaccgaatctgtacctgtcgcattctttacaggtgcaaactccttctctctgtctacctcaaatggcaggctattgtccatcatgtataccatatcgaggatgagtgtctcgaacttgtatgcattcggagtctcaggcttgtgctctgtaccattctcatcaatgtaaggtaccttcttctctaccacatgaagtggaaggctcttttctgcgatagccatgagcttgtccacgcggaataaatagtttaagataacaccaaaaccatactgcaatgaaccattctcgttctttgcctctgccatctcaggagtaagctcgtaatactcaacaatcgaaggcttgccattctcaagacacatagcaccaactctctcatatggatcacattttctgaccaccttagagccgctgacacagccggactcgattgtagcacctacaaatacaggatctgcaatctgctgaagcacattgtccacagcaaatacattgagccactcaacacccttgtccttcaaatccttgtcaagaccggcattgatgagtgacttgaaccatccaccgtttccgtttggtgacatggcaagtgaatcctcagatttcatgagcagatttccatcaaaatcaactgccggaaccatctcctgcacgaaaaacttcacataatccttgttgtatccaaaatagtcgtgctcttcaaagaactctcttgtcatgccatcatttatctcgcttgtcatgacatacagcggcacccatgtaccggtctgatttgtaaccttcatgaggtttgagacaagctgctcaaagatgtagagttcctttgtctttccgatattgaacatgcccttagccttgtcaaagccaagacgtgtaccctgtccaccggcaagaagaattgcaccgaccttgccattcttgacagcatcaagacctgttgcaaggtatttgtccttatttgcctctatctctgaaagctccatagcagcaagcggtgaaaatgtacctctctgctgctccttgttgtgaatcatatcaaggtatgaccagtccatgtgctcaagctggctctcaagcttagccggagcttcctctgttaagaatttctttaagtatttctggtttgttgccgtgattttttctttgatttccggtttcataataaataatctccctaatagctaactttaattatttaatcatccgaaccatctgatgatgatttttcttctgaaccgttttcagattctgactggctctttttcagggcatcctgcttgtccttattttttttctttgccccttctgttccatcagagccaacagtatcattgtactgcgtgagatcaaatgctgaagtcttagatgtaacacctgtctttttagcaatcttatcacttactgtctgaactgtctctgttggctggtaatcagtctcattaaacaggaactgatgaagcttagaaacattctgtgccaggtctataggaattacggtatcgccagtagttgacagattcattgtagtcagctcaaatgggaagcctgttgtctccttcatctgatattttgtaacagctgttgcatactggataatctctttagctgtaaaattagtacttatctgactcataatatccttacacatctctgttagagagcctaaatctgactgtttagccttgtcaagcatagcctgaagcacaattctctgacgggatgcccttaagaaatcatcacctgaggtgcttctgatacgtgcatagcatgtagcctgagttccatcaagatgctgcataccatccccctcaagataaggagtattatatcctgtagtataatcaacctcaggaatcagataattgatttccttcatctccgcattagtaatctcaagatcaaggccaccgatatcatctatagcatctacaagagccttccagtcaacacagacatacttggttatattcaaatccaaatttgaattaagcatagctactgctctctttgccccaccatttgcataagcggcatttgcctttgcaaactttccattgcctataggcagatacgtatctctgtagacagaaacaagctgaacctccttagtatcataattcagactagcaatcatgatacaatcggaatgcccctcatcgtatgaaccattacttctgttgtccagaccaaacaacgctacattgagatatccatgcatattggcaagaacatcctcatcaatctcctcattgattccggcctcactatttgtcagcgcatcctcatatttaacctgtccgagtgtcttattataagcccaaaccactaacagaacaattaacagcagcaggatttcaaatacaaagagtataatcttcttacgtccacttcttctcttttttcttcttctcttctttgccatgttatttttcctttttcctatgaatgtaaagccacgcgtctgcgtagtcctgacgttccttctctgacatattggtatactttccaaactccagattcgtcagacgcatctgcggcctgccacacttgaagcattcaacctctttccttcttgaaaccatccgtatccagccacaatccgggcaaatgtatattttcatcatagtctttattcaaactgtccgagaacctcagctgacaaagcatcaagcttagcctgtgaatcttcaagagacactcctttaactccgaaatagaatttaatcttaggctctgtaccagaagggcgtacacagcaccaagcgttatcgttaagttcgtagtaaagtacattggaagaaggaagacctgtcggctcgacctttcctgttgtcatatcttttcttgtgtcattcttgtaatcacggatagcaagcacctgataatcaccaaatttctttggctcagcggcacgtgcctttgtcataatctcatttatctgtgcagcaccatcaatgccctttaaggtcattgtggaaatgccctctctgtagtagccgtacttctcgtacatgtcaatcatgccatcccagagtgtcttgccctgtgacttgtagaaggcagccacctcacacagcatgcaaactgctgcaggagcatccttgtcccttgcatatgtgccaggtaagcatccgtagctctcctccataccgaatacatagttgttgcagccggtcttttcgaatttgagcatctgctcaccgatatacttgaagcctgttaaaacctcgatatgctttacgccatatgctgccgcaattgccttacccatatctgtagaaacaattgactcaacaaatgcaggattctcaggcagagtaccattggcactcttctggcttaaaatatactcaccgataagcatagctgacatatttcctgtaaatgtcacatactcacctgtctttgtatccttgcagtatacaccgagtctgtcggcatcagggtcagttgctaaaacgatatcagcatccttttcctttgcaagctcaagtgcaagcttccatgcatcaggattctcaggatttggataaggacatgtagggaaattgccgtcaggtactgcctggcttggctcaatgtatacattctcaaagcccatatccttaagtactctctgtacagggcgaagacctgtgccgtggagtggtgtgtaaacaatcttgatatcctttgccatagccttgataatctcaggatggatagaaagcttacggagctctccgaaatatccctcctcaacctcatcagagatgacattgtaaaggcctgcctcaatagcagcagccttgtccatagtctttacctgatcaaacgatgtaacctttgccacctcagccatgatgcttgtatcatgaggtggagtaacctgtgcaccatcctcccagtataccttgtatccattgtactcacgaggattgtggcttgctgtgataacaacaccggctattgtaccgagtgtccttactgcgtatgacagctccggaacaggtgcgagctgtgggaatacatatgtcttgattccgttagctgcaagacagagtgctgtggcatctgtgaactcatcatgcatattacgtgagtcatgtgctattgcaacacctctctttactgcgtcctctccctgtgaaagtatgtaatttgccagtccctgtgtagcctgacggactgtgtatatattcatcctgtttgtgccagctcctattacaccacgaagacctgctgtaccaaactcaagtgtacgatagaatctgtcctctatctccttatcatcacctgcgatagccttaagctctgcctttgtagcctcatcaaaatatgggtctgtacaccatttctcgtactccgctctgaaatccatttatattaacctcctgtgtcagctagtaaataagcctattaatattaactataccgattttaccacattaagatgcatttgaaaagttttagttccttaatatttttttaaacaccaggctcctcatgcaaagtggcatcatacagacaacaaactgtaccgcaaccgtaacaaaataatcggccgcacttatggtccctgtctttaaaatactctttcttcctgccttgtatttaaggaaataatcaaagccgccacgcctcttcagcatatcatcaccggttctggcatacacaagagtctcacctatatttgccatacgacagtgatttctgatcatattcgcccaaagaagagaatcctccataagcatacagtcctgataattgcccgcagcaagcaccgcagaccttttgtacatcacagtcatgtgattgaacgcatcgcgctttctctgatactgctttatcacataatttccgagaggcactgtcctttctgatataatattatgcatatcatcggaaaactcgctgatgtagccgcctatgatatcaagccccggattttccgaaaaagcattcagctgtctctcaaaccggtcaggcacacatatatcatctgtatccattctggccacaagctcattagagcaatgctttatgccttcagcaagtgcaagaccgagcccgctgtttttttcaagctttaccgtaacaaaatttatttccgagggcctgcattcataatctctgattgcctcataaagcccatctgtcagcctgccatcctccaccagcactatctcgtccggtaaaacagtctgtgaatatatgctttccatacactcactgaaatactcaggcttttccttgtaataaattgacagtaaaactgaaaatttgactttattcataagtatcatcctcccagacaagtaaactaatgtattaccgcaagcacagtctctatgcacagtctgatatcatttatcagtgaaaatctcttaagatacttaagattgtacctcatcttgcccggcagcaccttgtggatatatgtgtaatccacatcatcagaagcctcaagaagcctatcctcatccttatacctgatgcttgcctcacttgtgattccggcaggcatcagaagcgttgccatcatcgctggtgtatatgccatgacatacttctccacctcaggtcttgtgccaacaaagctcatatcaccacatagcacatttatgagctgcggaatctcatcaagcctgtactttctgatgacagcaccgactcttgtgattcttgaatccccaccgacagtcaccagtgaaccttttttgtcagcatcattcaccatagttctgaacttgaatatgcgaaacttcctgccatactgcgtgatacgctcctgtctgaaaaaaacaggtcctctgctatccacctttatccagacagcaaggaccagtataacaggcgaaagcagcacaagaagaatagcggacataatcacatcaaaaatgcgtttgaataccatgcttgtcctctttctgctcagatgcctgtaatatttaagtgtaaaatcatttttcatgaatgtaggaatctctccccatgttctccatctactcatgtaaaatctccaataaattattaattatatactccacatcctcatcgctaagctttgtgttaagaggaagtgtaatctcattctcatactgctgataagcatttggaaaatcagctatgtcaaagcccatattcttatatgcagtcatcatcggaagcggcttgaaatgcacatttgtggcgatacctcgctccgccatctgcactataagcgcattgcgcctgtccacgccgatgcccggtatgcgaagcagatacagatgtccgctcgatgtatgcctgtctgtaaaatgaggcacagtcaagagaccaagcggcttaaatgccgtatcatagcgctctataatatcacggcgcctcttaagaagcccatcatatctgtcaagctgtaccagaccaatggcagcctggatatcagtcatattgcacttatacgaaggagccacaatatcatactcccagttgccctgaccattcttgtggaaagcatccttcgtctgtccgtggagtgaaagcagcataaactgcttgtagatatactcatcatcaaagccctctataggtctccaggtgagtgctccgccctctgcagtggtcagattcttgaccgcatgaaacgaaaagcttgtaaaatcagctacattgccacacataatccgctcaccgtctctcatgtatgaggcgccaaaagcatgagctgagtcagccgccacaatcacacgtccgattgccctctgcacatcgtttgacggatgaaaaagagccttttttctttccacaatatccaaaatcctgtcatagtcgcaaggcacgcctgcaatatcaaccggcacgataacctttgtcttttctgtaatagcagcctccaaagcctcgtaatccatctcaaaggaatcaggtgctacgtctataaacttaagtgtcgcaccgacatgcacagcagggcttgcagatgcagtataagtgtatgcacttgtgatgacctcatcacctgcacctattcctaagaatctgagtatcgactcaagacacgcagtagcagagcccagagccacagccttattcgtgccgcatagcttagcaatcctcttctcaaattccttagtccttggacctgttgtaatccagtcgcttcgtagcacatcagcaacagctgacacctctgcttctgttatatcaggtggtgaaaatgaaatctgtcttttttccatagttatgttcctcgcttccggcataaaatatgccaaacatccggcttttacaatctatattatgagcttcaaaagatatttagtcctccaggtcaggatgatatgtcttgaccacagatgcaactatctgcttgatatcctttgcttctgaggtgcatgccttctcgagcatctcaagctgcttctcaaagagctcatcatccatctcaataggctcacccacatgaatcagcttgtttggagtctccttaagaccctcctcactcatcagcatctcctcgtagagcttctcgcccggacgcagtcctgtgtatacaatctggatatccacatcaggctccagtcccgaaagcctgataagattccttgccatatcatcaatcttgacaggctcgcccatatcgagtacgaaaatctctcctccatgagcatagagcccggcctgcagtacaagtgccaccgcctccggaattgtcataaagtacctaataatacgcttgtccgtcacagtaaccggaccgccatcctctatctgcttcttaaatagcgggataacacttccgttacttccgagcacatttccaaaacgtaccgctacaaaatcagtcccagtctgcctgttcatcatctgtataaccatctcgcacaggcgctttgacgcgcccatgatattagtcggattgaccgccttatctgtagagataagtacaaacttcttcacatggtactctgctgcaagccttgagagctttaatgtgccaagcacattgttttttattgcctcattcgggctctcctccatcagcggtacatgcttatgtgctgccgcatgatagataatctcaggatgatatgtctgaaatacatagtgcagcctgttggtattgcgcacagagccaatcagcgtctccacccttacataaggatacttacgcttcagctcctgctgtatatcgtatgcattattctcgtaaatatcaaaaatgataagaagcttcgggtcctctctggctatctgacggcaaagctcactacctatggagccaccgccacctgtaaccataaccaccttgccctgtaaaaatgaatgaataccatcattatccacaacaaccggatccctgccaagcaaatcctctatactgaccggacgcagattagaaaccgaaaccctgccgtccaccatctgatatattcccggaaccacagacacatcacagccggtatccttacaaatattgagtatatccttcctgtccttacccgatgtggaaggtacagcatacacaatctttgtgatatcatacttctcaaccatctccggaatgtcgtttcgattgccgacaataggcacgccgtctatgaagcggccgagcttcgccggattgtcatctatgatacagcaggcctttgtgtgcagatgtgagctcatgataagctctctgataagcatcctgcccgcatttcctgctcctataatcatgactctctcatcaccgtttgcaaagcctctctgctcaagcatcttctggcctgtcctgataaatctgtacgcaaaccggcacgctgtgcacagtgcaaagctgagcatcagtccgataatccagaaggcatacggcatcttaatctcatacacctcatgaatgataacgcacagaaccgtaagcaccagaaaggcaccaataatatgcataaactcattgatgctcgcaaagcgccatatactgtgatacagcctgaaaatataaaacaccacaagtgaaatcaccataaacaatggcacaatgtgcagatacccctccaaaaatgagagcggaatatgtgaatatgaaaactcaaacctgatcatcaaagcgaaaaagaatgagattgcaataatacacatatcaacaaatgcaagaaccaatgccctgaaaacccattgcttgtcattgcccatgtatgaatccggcttctccggaccatcgcattttgttttgtcttttagattatttgtatcttttttcatgtcaagtctattactcatatagaattttctccttttgtcctacactgcaaaaagcagcttctatatccctatgcaaatcaacttctcataaactgcatttaaatttacgctttattataccatacacacactattatagttcttattattttattaaatataccacatttagcgatttttgaaaacaaacagcttgcttatgacatagttgagcacaaccacaaccacctgtgctgcaagcttcacccacatgcttggatagtccaaaagcgtgataaaaataaagataatagcctcttcaataaccagtgtgataaatctgccactgaaaaaagcaaacatctgtactaaaaacgccgtctttgtcggcgtagcaaccttaaacacccacttcttgttggtaacatatgagaaaagtacagcaaacacccatgccagcgcattcgcaatcagctcattgattccaaacaaaacattaaaaatggcatatgcgcctatgctgatcacaaaggtcatattgccaaaaaccgcgtataaaacaagctccttaaactcctctttcctgtttcgtattataatattatccatttctccacctatgtgacaggctatataactctgtcgtaatttatacgtgtaagttgatagtaatgttaatttgcgatttttatataataactgcatagccaaaataagtcaatatgtgatatgatatctgcatgaaaaagaaaacacaaaaaaacaagagtataaaactaaactacatatataatgtgagctaccagatactcacactgatcacaccgcttatcacagcgccgtacctctcgagggtgcttaaggcagacggaataggtgcatacagctatacctactcactggtatcatactttatcatgtttgccgcactgggcactgtaaactacggaaacagggaaatatcatacctgcaggaggacagagcaaaacgcaccaaaaccttctgggagatagagcttctatccgtcatcagcgtgattgtgtgtctgtgtgcatatatggtattcacacttgcatttgggcactcaccgctcaaaaagcacctgctattgattgaagccgtgtacctgatatcagttgcttctgatatctcctggctgtttcagggacttgaggaatttggcaaaatagtcggtcgaaacgtgatttttaaaatcataaacattgcttttatcttcatcgccgtacgctcagagagtgatttgctcatatatgtggcaggaatatgtctattagagctttttgccaatatatccatctggttttacctgcctcaatatgttgacagaccaaagcttaaggagcttaagccattctctcatctaagggctacactcacactctttgtacctacaatagctacaaccatatacacagcgcttgacaaaaccatgctcaacaacataacaggcagcatgacagaaaacggctactatgagcaggccaataagatatccaaaatggttctcatgctcgtaacctcactcggtactgtgatgcttccaagaataggaagagccttcagtgaaaataaaccagacgaagtaaaagccctcctttataagagctttcaattcgtctggtttataggtcttgccctgtgctttggcctgataggcatcgcacgcaatttctcgccatggttttttggtccgggatatgaaaaggtgccatatctcatcatgataatggctacactgttgccgattataggcttaagcaatgtaatcggtatacagtatctggtaacaaccaagcgtgaaagcctgctgacacgctcagtatgtatcggagccgcagccaattttgtcatgaatatgattctcatacatcagctctattcatacggtgcagccatagcctctgtcatctcggaggtaataataactgccgtacagctttacttcatacgaaatgagcttagcatcccaaaaatattttctctatcgtggaaatatctcatatcagcagtctgtatgcttatagtactgctgctcatggatgcaaggctgtcagtcagcttcatgcacacaatgattatgattgtgaccggatttatagtctatatggtgctgcttgtactgatgcgtgacgagatggtatgtgaaggcataaggctcatcaaagccagaatcaaatgccactaaataataccattctgcaacgcttaattccccggcagcttcacttatttggctgcctcatactctccaaccacctgtgcctctcctctgtcagtatattctcttgccattttcagagcttttttagtcctcttcacagactttttccatcttgaaagctctgattttgccgtatcagactttataccatattgattcacagccatatcgccaatatatgccgtaagctttttggcaccataagcattcaagtgctcaaaatcagcgaagtcatgggaatcatctatccctgcaatgctctcataatcagtactcaggtcaagaaaatcgtatccatactccttcgttatactttcaatctgctcaagacccgacttgtcagctgcctgtgtctcatgaggtggctgcagcaacagcacatgctctatgccaagcttattgcagtacgaaagcagctccttaagatatgccctgcactcatcagtcagcatataggcttctttagtaggctgtccgatatttgccagattgtcacggcctccggtgatgcctgtttttgaataaaagcctttcagatagcctccaccactgagcctcatataggcacgagtgacaaatgaggtatacaccgcctcagggtccttccagttgccatgatacttttccaatggaaaataaagggtatccgatatgttatccttcaccttttcatcatccttattgatatttttgggaatagtctttaccgtgtcaagcttgttctgtgacataggcatattgtcaatccactttctcagataaacctcatcagtcagattccaattgccctgactaaatgctgcagcactgattacaagaagcttcggcttctgtctcttcacaatctccgtgacgatggacttgtacatattgcatggcacagctcctattgaaagattgcacgacttaaggccatactcctcccacgccagagccggcgcatagcccgtgtatacctcacttggtccaatcatgaccatatcaaggctgttctctggctctgcgtaaaagccatatatattttcaatatcgctgctgtcaatggcaataaatgcctttgatactatttgcatgagcaataggaggactattgcaaatgcagagattttaataaatttcatggtgtttccttttctattaaaacgctttattttgatattttttcagtaaacactatatagtatagcggattagtattaaaaaacaacaccctgattcatatttatcattttctgatatgaagctgtttacccgggtagaatataaaattgataagcctgattttctttatgatacactcatacaatatccagcatatagcagtgcttcctgcaaatccacatatacactgcagcgccatattggttataccggccctgttcaatataatcctgattccacctacaaatatcacattcatcgcataaaacggcatgctgtcacggccgatagtctgtaaccatttagggaaatcacaataccctgataaaaaatagtttactgcaaatataaatactgttactatacaggcggtaagccgctcaaacagactgctgaaaatgggattgctgctcatgtcatcctgtaatactatgccggacgcctctacaagcgcactcataacggcaaggctcagcacagcatatctattatccagtttatcaagccacttcttaatcaggcatcccagataaaagtacatctgaaagccggctatgtagttaaagcccacatagtgaaagctgccatagcatgtcaaagcaattattaaaaacagcacaaataaaagctccattttataattaaaatgtggcagaagcctcgcaaacacataatcagccatatacgccacacaatatatgagaaatagtgcgtataaataccataaaaactctatcggcttccacggtatgcttatcaggctgctaacggcaaccggctcccttatcaaatttgaaaggacaaatttaataatccagtaaataactgaaatcatcacgtaaggcagcaggatattaaatgctttatgacctatccggctaaaaatgccttgtgaagcattccctacatattcactgtataagaagcctgaaactgcgataaagcaaggcatgtgaaagctgtatattacatttgcaataccattcattgtatcatcaaatgaatacatgtctgtcaggcccaatgtagtgtgacctaaaatcacaaataaaataaggatgccctttatgaaatcaattgttttatctcgtgtggtgttggtttgcatgttatgacctttccttaaacacaaccagcttactaataacataattcagcacaataacaataacctgcgcaatcaccttaatcagcatactattaaacccaagccatgtgataaacacaagcaatatagcttcctcaacaaccagtgtaatcactcgccctgaataaaacacaaacatctgctttataaatgcctgcacactatcagtcggtgactgaaatacccagacacgattcgtcagaaatgcaaacataacagttataatccatgaaagaatattggcaataagctcatttattcccataccaacattaaaacatgcatatgtagctatgctcacaataaagctcaatccaccaaaaaataaatacaatagcatctctttgtacttcttgtagaatggattaaaaattctgagtataggtaattccattaatttatcaaatactttcattccacataaaacctaataaatcacaacctttgttccatttggaatattatcatacagccactttgcattattaatgtccaatcttacacagccatgagaaacttgtttgccaagcgttccatcttgtatatgtgtcatactaccacgattataaagcactgaatggaacaaatagtttccataaaactgcgtataataccaacatgtataagacctgctaccaaaagatttacctcttccatagattgtaaactccccttttactgtaggcgtagaaggctttcccggcccacatgaccacaatgcaactcgactccaattaccatagcttccactataaacgcctacctgacatgcagatgtgtctgtcataataagccatcttgtagaactggctcttacctgtgcgttcttagacattacatctaatgctgccggttttggtgtatatacgggcttatttttataataatttgcaacacttccaggtgcaggtgccccctttcttaccaaattaatccttagagcctctactctataactaataccagttgagcctgatgtctgcccatttgaagcccaacctaaccatccataattctctatatgtgaactgtagtatatattataaaatgttgctaactgacctgtaagctttatctcaatggcttctacctgcttagccctacctgaggttccagaatattgccccaaagttttccatccagtccatcctatatcctgcacatgcgttctatacatgatagtaccggttaatgaatgtacagtatcctgagataaattgatattaattccttcaattctcagttttcgtcctgtcgtacctgtaatgtttccccctgaaacccacggcatattacctatatcctgtttatagttctattttatcacatatgcattttatttaaaacaaaaaaagaaactaatacaaattatctgtatcagtttcttttttattaatttatctggcaatatatgccattgtatttttagaaattattccaccataattgttgccaggtgctgactgtcctttcttcactaatactatctgcaatgcctctaaatgaagattttgtccggatgttcctgcattctgtccattctttgcccatccaagccatccgtaattttgtgcatgtactctgtaatagatatcgtattgatttgccatttctcccgtcagagacatatttattgcctctacattcagagctctgcctgtcgttcctgcaagtgcaccatccatcaccgtattctgccagccgatattctgtacatgtgtctggtattttattcctcctgaacacggctgcccgtcaagatctatctttattgcttcaagtccaagatttctgcctgttgttccactgagacttccgttttccactgcactctgccatccgatattacttacgtggctctgatatcttaccgatgcatttgtgttgattatcggaacagtactggtttttgatatatacgcttttgcgttattagatgtgtatcctccataaaatactgtaggagccatatctccctttgccgttacaactatctggattgcttcaagtctatatgcatatcctgaggttcctgctgcctctccgttttttgcccaggctaaccagccgtaattctgtgcatgtactctgtagtatatatcatacttatcagcatctttaccggtaagttttagcatcaatgcttccacatgcttattctggccggttgttccactctgttctccattgaacgagtttccaagccatccgtcatttttcacatgtgttgtatagatcacaccaatgtctgcatctgattttacatttatttttattgcctcaagctgcagtcctctgcctacggttcccgccatagctccgtttgacacaccattctgccatccgatatttgctacatgtgtctggtatgatactgatacactgtttaatacccaatgtgcatacagaacatgatcagaagctgtttttactgcactgttaaaacttatctgttctccactgtctacagccgtccaccagcctgcaaatgtatatccgcttcttgtcggtgtaggtaattcaccatatgcatttccaaaagtaacagtttttgtattagcagtaactgttccaccatcagcattaaatgtaactgcgtagctgtttgctgtccagtgtgcatagatagtctgatcagatgtaacctctacttttgtatctttagtaatctgtgttccaccgttagctgctgtataccagccggtaaatgtataaccatctctttcaggagattccaaatcgccatatgtgccgccatatgtaatattcttgcttgtatttgtaatattacctcctgctgcatcgaaatttaattttactgtaaccggagcccaaactgcattaactgttgtatctgaagctatcttattatatgccttatcccacgataatacatacccggtctttgttatttccggagctttcgcccctctcatacacaaaacattctgtgactcaacaatctgaccattatcaacaaaatccactttatatctaagtggtgacgcatcacgttcttcatttataccatatgatatgtaatggtctacataaccctcataatcatcaccaaacgcactttgtaagtccctatatcttgttttgtaacttataacatcaaaattctcacttgcctgacgtccctctcgtattccattttctagataatgctgataatataaataccaattatctccaaaagcattttgcaaatctatattattatccttataaaaatgcacatcaaaaatttcattaccacgacgaccttcagccatgccatatttaataaaatgttgcagtgcagcttctgcagtatttccccaattattcttcacatcaggattattattcaaataatatgatgcgtcaaatataaggtgatagtcttcttgttttaatccaaaataattaacaattccctgtgcatctgcgatgccaagtttttttaaagctgtctccgatccaaggtaattagtcgcgtcactttgattacttatatacgcatgttcaataataattcccgggaaaccggcctttttactatttcttattacactatagtaatcacaaatagatccatctgtataggtatctccactctcagaatttctgatacgcgttccatcatttgccagtcctaatgcgactaactgtttaagaacctcgtttgctaatgctcccccctgtgcaccaatatttgcatttaagctggaattaggataataaactgttgcgccatgaacactcgagctggttgtcgaattattatgaattgaaacaaatacacttgctcctactgacttagcatagtttactctatcttcaagagctacataatgatcatcatttcttgtcatatatacgtttacacgtttgtatttactaagttcttccttgcaatactgtgcaatcttcaaattaagtgttttttctaaataggtctttccaccataacttgcctgtgctccaccatcgttgccgccatgccccggatcaagaacaacattcactgccgaactagctctaaagagattattctgctgtacatcagccgctgctgcaatagcctcgctaattgtattccccgcagcttgtgttgatgtttcatccggatttattactactgcatcatacacttcactgcccgtattttcattatctgaattgctattatctgaatcctccgcatatgcatcagcattcaaatccattacaacagtatcaattccaaactgtgaattaattccaatagcttcaaagtctactgaatacccgtcagtttcgagagacttaactgtataacagcctgaaaccagatcacttgattcaaatatcaggtttccatcctccgtcatctctccacttatttcaaatgactgatttaaatcggtattttcaactgttaatctagcatttgattgatcaatgccatccgctaatccaacaattatccttacagcatctccctttttaacagatggatctgcaacagataaatatgtaactatctgattttcactattatcttgttgttgatagctctccgtactattacctgtctctgcagaatcagcaaaaacaaaagtgtttgccgaaatcagcatagaaagcgtcaacaacagtgctactacttttttcatcttaaaacgcctttccttttgtaataaatctaaaatatagtttatcacataagaaaagacgtttaaagagttacctttttatattttcttaagattttttataattcgacggattgcaacaagttaattatcaactcataatatgtatcaggaaatgctagtatttcatattttatctcaacaagaaagacaacgtttaaagactttttacctattttatttagtttttaccataaagcaatttcttcctatataattgagaatctttcaataattcaacatttatatagtccagaccatatttttcaatcaaagtatcctctccagaataaaggttagttcctaatccaagtctatttccctctatttgaacccctaaagctgccaatgttgttggatacaagtccaaagttgtatattctctttcaacacatggtttttcattaaccgctgcgccattaacaattgtaaaatatgttcttctattaaaatctgttgcattttgtctttctatataatcagaatccattgtaagatgatctccggaaataacaactgttgtattatcataaaaatcctgttgtttaatccaatccagaaattcggaaacttgcctgcttgaacatgcaataacattactatattgttcatcatattgattctgacataattcacatacatagccatctgtaaaatgcgtatctactgttaacattgtaagattaaacggttcatctttagaagctaaattatttaattcattttttgcatattcaaataatttttcatcttcatatccccaccaaaccatataatcatcatctatgtagcctctatcaattgcagtataataatcaaaaatatcatagtttccgtgtccgtgaaaatacgatgaacgtccagcaaatttcttatctgaaccaatcaaaaattcctgattgtatccttctcctttcaggacatctcctatagcccaaacacctggaacataattattatctgattcccactttgaatttaaggtatcattacttattaagttctcattaattggtacaccggatgtctgtgcaaccaatccacccattgtaaaagtcgcgcccgaagtcgtatacgcaccattcaattttccatatattccaaaattttcattctccaatgaaatttgtgtaagctccggaatataatttttactcatagcaccaccaacgctctgatctgaatatgtcatttccatagattctaaaaaaatatatatcagatttcttttttcctttgggaatgtaattgctacatctcttccatcaacataattatcttcatatatcgttgaatcctgctttgtatattttaaatacgatatgatatcaaaatggaaacaacacaatataattgaatatccaattgctatacaccctaaaagcgacatccaaaatttatatatccacttatttttcttttttctgaatatcaataatccaaatgtaaccattaaaacgcatattataataatcaaaataatggaaataaatatcacactgaatgatgaagtatttgttccttccaaaggtgtatttaaatgatatattatctgtcctattggcacatctttaaaatttttctgcatataccaaaaaccatatagcaatgctccacctaatgcagttaatatatatgttatgaaagcagacaggaaattaaaaatcctactatgtttcttatcatcattattctgacacaataatacaaattgcaaaataccaaatagcaaataacaaaacgtacctatataaaacaatactaattgtctattcaaaaacagtttaactaccttataatttagtttttgtgacaaaataaacatattatcctgagtaagtgcagtaatatacaagccatcatcatgtacctcatactcaacatccttacgagatgatatgtatttttctagtttcgaaccagatacttctatggaatttccccaaaaatcagaaagtgtaatactcttaatcgaatatacctctaatgtatttataggatcaactctaaataaattattgttgatttctgccagacccatttttattttgaaattcgcttttttattttcaaaatatgcattaatactatcctcttctgtcattttcttaacactgggcgcataatacatttgggcatagtttttatttgaatgctcttctccatattcaatcgaaaaattatatgtatgttttccgaatattcctatacataatccaattaataataacgcaataaaagccacgtctattatagctaaaactacacttaacaagcgtctattattacataattcgttttttatctttcgcataataaaataccccttatttatatataaagaaacaaggagtattatattataatcttgtatttttttcaactttttcttaattttttcttaattttttcttaatctctttttgtgttcttttttaaaattgtatagattatacaaaaataaaatattaaaaacaacaccattacagaagtgagaaaaccgtatgcgccaccttttattccatatctagccactaagtattcatttgccaatttcgcaactatagcagaaactatatatcctataattatcattcctgattttcgcatcacagttaaaacataataaccaaaataagataacgcattaattccacccgcaaacataagtaaaatcaataccatcttatattgtattaattctgaacccgttaaaatctgtaatacaggaattcctaaaatccaagccccaattatacaaattatagtaaagcctactattattactgatatttttgatattgaaacaataaatggtttcttgtaatctgaagcatatttgtctgctaatttagttaacgcgggcttcataacaaaagttgcaaataggtttacaatagaaacaggcataaataatgtctgaaaatatgctgaatagtttgatgccatttttgcatctattgctattcgactagcacttaaaatatatgaccataaaaaagaacctataaataaaggaaaacaattcttgagaatacccaaaatatatttttcattccagataacagctatatttctaaatgttttcatcggcattacatcaaaaataatcaaaccaagtattgcaataagaattgacaacgatatagctaaaatcatatttttcgtaataataagaactactaacattacagtaactgacataaccgttctaaatgcttgagattttcctgttaaatctaaacgaccatctttttgaaatgttccctcgtataaatctgcatatgcatcaacaaatctataaatacacatcaataaaataacgatgcacttatatatatttgatttagctgtcaatattgaataaacgatactaacaacaaccgacacaacaaataaaatatattttactgccttataatgtccaaattcaaaagtgcttttagtatctgtaacctgaaatgtccttgtttcataatactctataaaagcaagcatctgcgctactgttattgctatggcaaaaattcctccatcatcttcaccaactattctaattatcaataaagataatatcattgatgctgccgcaaatatcatgcttccaatcatattccaaacaaaattatttttttcagaggtctcactactaacatatttatgacacgctattgttaatagtttatttactttcattttcctcttctttcttataataatttctcactgcaatttcttcggtaagactgtttatcatattatctaaattggaaattcttaaagtcaaataaaaattatgaacaaaaagtaccattattgaaaatagaaatataaaatttaccgggctttttattccgcatatatctgcaaaaaaatatgcaatttgaggaaaaatacttaaaattaataataaaatacttgatacaatccaaaataaagcatattcaatttttagttttgctttctttattttcttcattataaagaaaaaaacacataatgacgcaacaaataaaataactctcaatgatgttgacatactctatatcctccctatctttttctaaaattctgtacaaacaatatagacattaacattctaaacatataagaaatggatcttgcaaaattcaaataacttgttcctgcaacacgctccttcatttcaacctgcacctcagcaacctttgctccattttttatcaaatatgatatcgtatccggttctggtccataattaatttcctgtgcaaattccttaatacattttctgctatataatctcataccagatgttggatcatttatttttactccagttgtcagttttattgctgtggatataagtctgcttcccaacattctagcagaaataggctttttttcatccacaaatcttgaaccaataacaatatcatagccttcatcaagcttctttaacattttgtcgatatattcaggtaaatgctgtccatctgcgtcaaactgaataaagcaatcgtaaccttttaaataagcatattttgctcccgcctgaaatcctcctgccaatccaagatttattggcaaatcaattatattatatttatttttttcacaaactgagtatgtgctatcctttgagccatcatttacaataacataatcaaattgtgaataattttctttaatattatttacaacttcttctatactttcttcctcattatacgctgggattactattaatagccgattcatatctacaccttactttctatacattgttttctttttcactaagagaatatatttttgttaagacctttgcaaccggtctattccaaaattttaaaaacatctcataatcctctttacttcttaaattatctcctattactgctgatgtttccgactcttcatgaattctgtgtgccattaatatttcattacaatataaaaactccccctctgctctagatattctttcccatgtttcccaatcaacattacttctaaaacctgttttaaataacggttcataatcacataaagcttcctttgaatatgtaacagaaggacagcaaattgcatttccaagtcttatagcacttctcttatttttaattctgtatgccttgtcatgattccttaaattctttaacattatccttttcagtttcaaattaaacccattgtcagaaaaatttccattaatgagctccgagtaatctgaaaacgcgattaaagcatgtggatatttatcaaatgtatttataatttcagttgaataattttctctataaatatcatcctgatgtgctattgttatatattgcgcatcagagcatgaatatgcaaaattccaatctcccgcaattcccttttcacctttattaacgaacatttcaatctgatatttattacataaattttcaatatagttgttcggtgttgatgttgctaacttaatatttgatttttttttctgttttttcaatgaaattatgcaatcttctaaatatttactttctttatatgcacaaatcacaaactcatgttttatcattttttctccctataacattttgattaaaatatactgatatatgcaccacattgaaacgctttgcataattatcattacaatataattatatactctataatcaaatttcaacctgattccactaccacccaaaacggcaaataatggataaatcaatggtgttatatatcttgattgacatccagctattgtatttgaaccaacttctgtatatgcaatgtacagtgatgtagctatcaaaactactgttccaaaaaacatcaaaatatcatatatataaactattttcgaatatgccttaacgtcgtattcacgtttatctgttaatgttgtaaaaaccaaaaatgcaaatactattatagcaactgttgttgtaccaattcccagatatgcaaagtgatcaataaacccattcatatttctaattgacaaatagtctttcaaaaaatttaataacgtacgtgtatattctactgggttatgaataatatacaatatctgttcagttggattaacacctgcaccacctcttacatcaccgccttttgaagtttcaaaaatggttttcaatagcaaatcaaataacataattacaaaggccatagagcaaatgctataatattttttcttattctcaattttgttcagtttcatcaaaaatggaattatcaaaaatgctaaataaatttgctttggaattattgctattgcaaatgctataaccataataaccgtatcttttgtcgaaaccacaccttcttcctgacagttgcccacaaaatacgccattccaatcatgacaaatccaataacccatgtatcataagaataattgcttgctataaataaagatgttggaaacatagccacaacagctaatatcatttttccactatgtaatcgtttcatggcaaaataacaacataatgaatatactaatactattggaatttgtccaaatttatatatcacaaaaaagtttgctccaaacaatcttagcaaggcaatcacaactccactaggcaatgccgtcaaagaaatattatgatctatatattttattattgcatcactattcttgtttaaagtattaatcttttcaatattttgagcataagtgtctgtattctgaataaaattccccccattagtcaagacttctaactctggttctgataaacctatatgtgcaacagacgaagaacttattgcaaatttaaaatgtgaatcaatatcccaactaatatgaccaattggagaaacaaataacatagtaatagaagaaacaaaaaccagcctgacaagtaatttctccggcttatcttttatcgttctatagctaatcaatacaaataaaataatagcgactatagcagaacaaaatagccacgtactatacataaactttagtccactaacaaaatacgcaattatagctcctataaccaaagaaactataaatataagtaaatctcttaatgctattttatattttctaccgataaagcaaataattgtatcactaaaattcaattttttgtctataaataataaaatcgatataataaaaacagtaaaacaaatagagtaaattattctttcataatgcatattttctttgtcaatactaattattgacttacctgaatatatttctatatcatcaaagttaaaatcagaatcaacatctattctaatttgtttaaggcttttgttagtaagttcaaaccctacgttgtcatcccctgaaaaaatagtttttatacaactatcattttcattaaattcattgccatcatcaaaatataactgtacatctaaatcgccagatactttatcttttaatttaataacaattgttgttacattcttaatattttcttttttaaaaacaatatgcggatctactccattaatacaaatttgaccactttgatttatataacaaccgctatattctattatatccgatgtatcatatcgttctaataaattatcagcatttccgcgaatctttaattctttacgaggggaccaaaccatggctactgtcacaagacttaatatactaaatattaagatccataatgatattttgctaatatttttttttgacatttcttactcctacaacaaatgatttcatttgtttattataatatgtcgttttgtcttcgttgcttttccattacagcacacatatatttgatacttacctgcatcaattttgtcgaactcacatataaatcctgataattctgcacctggttttcgcttaaaatgaatagccaaatcgcttctaaaaatcttacgagtagttattagataggacttattatctgatttcagtaataattgtatattcccattatacggtttttcattataaaatccccatccctcaattatacatttatttcctacataaatattatcaatcgcattcacaacttttctacaaatatcaaattcctttgtacattcttcaacaacacactttccaatattctctttcatcatattatatgagaaatcaggagcatgctgtgtcagatttgagctataaaatggatctttatttttaaagtacggatgcaatttatataaatgtttttgttctgccattaatcgtttaaactttttctcacttttcaaatcgttaccacgacttaccgattcatgatgataaagtataacatcattcctaacaacattataatatccagcctctacaagcctaaaacaaagttcaacgtcattatatgcaaccggcatatcctcattaaacccatttactttattaaactttgcagcatttacgagcatacaagcagccgtaacaacaagccagttataatctattttatttcgtccgaaataatatatattatcatcattataacctataaatgcatgaactggaccattagcaatattgataacaccaatatgctgaattttcttactattcgggtataacagctttgccccaactgctccaacatgctctaattctgcatgtccaaccattctttcaagccattcctcattaattatttcaatatcatcatttagaaataagtagtaatcacccttagcttctttagctcctatattacacattcttgaaaagttaaagttcattttttcatagatatatctaaaattatacttgtctgctaatccctgatacagtttcttattttcgtcattgcttccattgtccacaagaataacttcaaaattcctatatctggtaatttcatacaaggtctctatacatctttttaagactttatagttgtcttttgatggtattatcacgcttataagcggattggtctgcgagatataattcaccctatattgatacattatatctaccatttccaaattagccttgagaccacgtctcgcaagagcatcttccttgctcttctttgcagcctcgaatatatatggctttgcagatggatccaaagctgttgattcttttctttctctccaatgatataagattttatcaatatgagctattttatttgtcttttcagtaaatctaagagtaaaatcatagtcttgtgcaccttcataaccaactcttaatccacctatctcatttgcaatacttctgcgatacactccaaaatgacaagtatacatatgtgacattaatgtatccggagaccaatccggcttaaaatgtggcatatgtctattgaaaccatcatcatcaattttatcctcatcactatagataaaatccaaattgggattttcattcaatttttttacaacttcataaagtgcatttggacgcaatacatcatcacaatccataaatgcgacaaattcccctgtcgcaatttcaagcgctgaatttgtgcaacgtgaaatatgaccattctctgttctgtagacaatcttgattttttcgtttccttcatactttgcaagagtctctctcacactatcccatgaagaacagtcatcagccagacaaagctcccaatttgtatatacctgattaagtacagactcaatacaaggaataagatgtctgtccagtacattataaacaggtaccaaaattgaaatcttaggattatattcaaacttctcatcatagttctcatttgcttcaagcatagtaatccatgtttcatattccaaactgcgatttaatcttgctgccctacgtgctcttaccttctccggaactactttatgataaattggtcttgctactttttttatattttgcttgatagtattcataaataataacctgcacccttcaattgcttatcttttatcgcgcttcaatctcaatatatggattgtatactgcatatttatttaatttcttcaaagtcttacccaggattaattctaaatcattctcacatccagccttatccggcattatcatagataataatacactcttatctaacatcacacagtctgatgagactgaataacaatctcttgtacttacaagtctgttaaaatttcctgcttcgaatcttccatatcccttaaacggatatataacgcttccttcctgatctacatctatgccagcctgcaaaatatatttcttattacatatttttgcacctactgctcctacctccggtcttgttaaatatccaagcatttcttctatacattttaagctcttgacttcaaatctgttatttataatccatacataatcagttcgtatatcttttacaacttcttttatctgttcttttttttctataaacaagtaattcttattaacatacttggaactgcactcaattgaatccacacatgccttatcatatattctatcaccaaccacaataatagttattggcgttgtcttactatacccatatatgatgtgataagtcccatgatatggtccttcttcaaccttagcatcaattttctttcttttaatatggtcttcaagtgctttttttccggctttaaatgcataaagcttactatcaggattttcagatgtagaattttcatggcatcgccaatgatataatatcttaggtatatgatatatagaatcagttttttctgcacacctaagaatataatcataatcctgtgcaccatccaagtcaggatttaaaattccaacctgcttagcaatcgacattcttactacaaacaaatgacaaatataattattagctcttaaaagatctatattaaaattcggtttgaaatatggttggaagcgttttgtaccaccagcaactattttatcttcatctgaatatataatatctgcatcaggctcattctctaaaagttttgcgcactcaaaaagtgcatccggagctaacatatcatcatgatctgcaaaaacaataaaatctcctgttgccatttctatagcagcatttgtatttgctgaaatcccatgattttcctctaaaactttaaatttaatccttttatcatcagccagatacttttcaattatattgatagtctctttatcttcaccagatttatattcgctagcatcgacaatacagagctcccaatcagaatatgtctgtgcttttatagaatcaatcatagctcttagatattctgcattggttctatataccggcacgactatactaaatttatagtcctctttgaaaaggtatcttctttgcagctctagcaaattatcatcaagtcggtttttctcctgccagattttatatgcattttcttcatcaagctttctcttgatttttttggcagttgcaaacagaccattttttttaatatttaatactattccactattcatatttacattgcatcttcattgacttctcttacaacaccagttatttctacacttgaaacgccatgactaaatgacatatctatccaaggatcatcctttccaaaatagaatacatcatcaacttgtctgccattcgtagctataatattgacatttgcatcttctgctacaatcttcaagtcactaagcgatatcgttgtaccctctaccggatcatatctcacatgctggcattttgtcgggaattcatatacctgtttaaagatattaccatccatcggcataacctgagtaaatgtagctctctcattaaagcctgttccatcatcaaagtaaagcttcgacaattcatcgttttcactcttcttaaactgatatgcatcacatacctcttttgccccaccaatcatctttactttgccatgatcaagccaaacaactgtatcacacatctcccgtatctgagatatcatatgtgatacaaatagcactgtagttccgccactcatcaaatcaagcattttattcttacttttttcctgaaagtcagcatctcctacagctaatatttcatccacaatcagtatttccggattcacaatagtcgccaccgaaaaagccagtctcataagcattccggaggaatagtttctaattggctgctctataaactctccaagctcagagaattcaaggatttcatcaaacttttcatccaggaactcttttgaatatcccagtattgaaccattaagatatatattttctctgccactaagatccatatcaaagccacttccgagctctagcattggaacaatattaccatgtgttacgacagttccctctgtaggcttcataatccctgagattaccttcaatattgtactttttccggctccgttgtgacctactattcccacaacctcaccttttttcacattgaagctcacatctttaagtgcccagaattcctcatatttgagttttcccttcactttctggatcataaactctttcaggctattcaatttatcatttgccattcgaaagcatatagacacatcttttacttctatcatgttcataggtcatactccttaatgattacagattgaaaataaacttgtcctcattctttttaaagaaccagaaaccaagtataaatggtacaactgatagcagaatacaatataaataatgctgtggtgacggtgataccccatctatgagaatgcttctcacaaagtatataaactgatacatcggattacaatgaaaagcttttaataatataggtgaagtaataatattttctgtatagaaaataggtgtcgcatagagccacactgtgctcagtacattccatataaactgcgtatccttaaaaaacaccattgacgtactaaggaaatagctcattcccagactaaatatcatcatgcatatgataggaaatggcaataatataaatgccggtctaggccataatcctgtaacaaatgtcactatgagcaaagggataagtgaaaatccaaggtttactaatgatgacattgcccttgacagaggatatatatatttaggtacatatacctttgttataagtgaagagtttgatgttatagctgaaattcccatagcacaacattcattaaagaagttgaacataacaattccactaagcaggtatacagggtaattcgccactcctgaactaaatatagtagaaaataccacatactgaacaagcatcattaagagtggattcaaaaagctccaacacacaccaagcacagaacgcttatatttagtcttaaaatctctctttaccaactggcttatcaggaacttgtaatgtgaaacagaatctaagaatgcaataactactgtttgtttacctgatttccgtttatttaatgatacaacaaaataaacaataagaagaattcctattgctcccattattatccaataatagttaccaaaccatattgtgttcattccatctatagagaggcataactccccctcaagaccctcgttatttacatacacgcgagtgctatcatcatatgatttggatatctctccttttgccatcttgatagaatttccatagtaaaaagagatttgactgtcgccatccaatgatttgcaaatcaattctaatgtgtagctttcattattatccaccttgattttttcaggcaattttatatcatatggctgattatcacttagctctgacatatccacatcaatatcagcaatattttttccgtttgtatctgtaatcttcgcttcaagcatcccctctgcggttttgccataggttgccggtgtaactgtcaccccttcaagatactggctatcaaccgtaaatgtctgcttaattgtatctccctcagcaaattctcctacaacctgagactgtgagacagtatcactctgagtttcctggtagtgaaactgcttacttgacactaaatatactaaacatatagaagcaaaataaaccaacaatgttattccaaatactttttttataaatttttcttccataacaattaaattctttcctaatctaaaatattatttgtcactaaatgcctaagaattatactctctactgatacttttgtcaaatcatccccacacagcctgtcccagccgtctcatggtcccggtcttatacatatcattttccttataaaaccgttgtctcacgcgtctggatttgccttccagtgccgcataccttactgccagactgtcagttggcagattatatgtctttgcaaattctctcgcctgaagccgtcccagcctcatgctctcctgtatctgttttttctgccagacacggcgcacaatatatgagagcttatttatcccaagcgctcccaggctgttgtctccatgctgtctgtacaatatcgttggctcatctatgaatgctgtttttccaaactgtgcggctacaagtgctgcccaccagtcatgcattatagtgttgtctatatcagtgatgtgaagcatcttatctcttaaagccatgtttaccatcattgtacagcctgtcacagaattctgcaatataaactggttgatcgtacgcttgtggcagtcaagactctggtattcgctcatcgtgtccgctattgtatttagctcgctatctaccacgcgaagctccgtgtataccaggcacggaacatctgctttgttctcaatagtaagcatcttatcacatgtcagctctatctttttatccagccacacatcatcctgatcacaggtcatatagtatggcgcttccacctgaccaaacagatagaaaaagttatattttgctccaccggttgatttaccatctatcagatgtatcttatccgggtatttttccacatagttttctacagcagctatcgtgttgtctgtagagccatcatcgtgtatatatagctcccagtccttgcaggtctgcgacaggatagagtctatctgctgacatatatatttttccccattgtatgtagccattagaatggctatcttgtctgtgctatgcattcttcctcttccactttcttccggccctgttgcccagaaactttgccgcactgtcaaatatgcagtgcactgctgcccctatcttgaactgctttaagagctgtttttctatgaaaagcaccatcctgatgccctcacctgtggtaccgtcacactttatctcatccttataggtctccataaagaccgctacatcaaagttgcgcttgtactgctgcttaaatgtatagttgtgtgagtgatacacctgcgctgtggcacaatagcctatcttgtatcctgccctaagtgccctggctgccatcagcatatcctcatttgtgagcagtgggctttcaaagccgcctatgtcttcaaagaaatcacgtctgtaggctgagcatacatctgagaagaaatatgcctttattccaagtcgtggtatatcctctttgcttctgacaaagcctcctgccggataattaaactccctgactaatgcctcgtcaggcttagcatcccttctcgggagctgtctggctgatatcataacgacttcttcgttttcaaagcctgccagcatattttcaacatagtgttcatctgaaggcagcgcatcctgcgacaaaaacatcactatatcaccctttgacatggctacagcatagtttctcgtgccaccatgatcaaattcgcttctcttgacctttagtgtcctaaagcctgccttctctgccatgcgcactgtggcatcctcggattctgagtctatcactattatctcatcgggcttacgtgtctgcctgcccagtatatctatcagaccgggcatatactctgcagcgttgagagtaggtattatgagacttattgttatactatttaaatccaatttcttcattatatttctcacatatgttctgattattgtgctccatcctccctgatcacagagaaaacggttctgaaaagtatctttatatccatccaaagcgagcagtgctccacatagtacatctccatcctctggcgctctccgctctcataggtggcattgtttctggcatatgcctgccagtagcctgtcagtcccggctttacgctcagaagctttgcgatgtccttaccgtatatctcggtttccttctccacgattggacgcggtcccactatggagagctcgcccttaagtatgttgattagctgtggcagctcatcaaggctggtctttcgcaggaagcctcctatttttgtgattcgaggatcattgtctatcttgaattcctttacatactgctcaagctgttcaggtgtcagtatcttttccagatcacctgcgttcgtcttcatgctcctgaacttatatacagatattttctttcccttatatccgactcttgtgtgcccatagaacacgctgccgccatcactcattctgattatcacagcgagtatgataaataccggtgacagtactataagtccaagcagtgaggcaacaatatccaccagacgctttataaatctgtataccggctttccgctgccttgaatggtctgatatgcctgtatgtcatagcttaaaggctctctatccttcactagctcgctcaagcatctcatctcatcaaccagctgtgccggcatgacaagatctctctttgacacagacctgcacagaggacatactgccctgaaaataatcctcagatcaagacctacagtccagttcagtatatattcctgatcgtactcgctttgctcctcctcggtaagcagcctgtgttccctgctgtatacctgccagaagcctatgattccaggctttacagatagactttttctgtgaaatgcagagtattctataaactccggcagtgatggagccggatttcccaccatgctcatgtctccccacagcacattccaggctgacggcagattttcaagtcttaatgccctaagcattcttccaaccggtgtaaatctcggatctttccccttctttccatccagtagccatttatcatatctatccctcgcatccatatacatggtgcggaatttataataataaaatcttcgtccgtttttgccgactctgacaagcgatatgagcaccggtccatggtcgcctgtgactattttgcccataaatgctacaaaccacacaggcactataagtatgcttcctgccacgccaaacagcagatctatcagctttttaataagcagatgccttacacggtatgtcttattcttccatgtgaccactgcgtattttccaaggaaatccatatagtgctcaccgaccttggcctcatactcgttgacattcaggtgcactgtcttacccatctcattgagtactgtaacaaactctctctgcttaaacggatagttgtccggcagatgcacaaacactgagtctatctctgctgttgatatcacctgaagcagattatcggcggttgccacgacctctatcttgtccactatctcaccgaccatatcacagtccagtatcgctatgtttgatatacgaaaatcccagtttcttgtagtctttatcttttttatcactcgctccacctggtctgatgtggtgacaagcatgattttctcattggcccccgagcggtgatattcctttgtcaccagtcttttcagcagctgtctgactatcacagtgaatatagtactcagtataaaggtcatacccatctgccctctggagaaatattcacttgtttttgtaaaatatacgcagccgacggtgattgcgcccacatatacatacatcttcaggacattgtatatttcaggaaagagctttcggtttatcagattatcatctgcaaatgccacaaaatgtaccaccacatatgccaccagctccaccagaaatagtgtaagatagtgctctgtatggtttataagtcccgttctaaagaaaccgaacttgtaccagtttgcaatcagataagatgtaaacatcacaattatatcaagaagtacctcgaggtactggattatccatttttttgagttcatatctttctcccggatttttcctcatcagcagtatctataccggcaagcagtacaagcaggaacggatcatatgccacctcgagcagatgatgctccatgaaggagtgcactccaatcatgactattgctgcaaaaagcacatattgctttgcccctattgccctatgacctataactattaataatataagcactacagcaaatactattattccatactcaaacagcattctaagatacatatcatctataaagaaatactttgcagggtctatcccggtcgggtctgcaatgcctccccagccctgttcctctataaactgtccaaatgccttgatgctatactcactccacactttgtggctcaccatcagcctttgagatagtacagtgtctattttaaccattacagcattgctcgcgctataaaaatagctcagcgccaaaaacagacccgcccacactatcggcaaatatttaaatatctcacacaccctgcgtgccagatttttcctctcaagcagataaatcaggcctgtcagaaccaggaatcctgtcaggcacactgttcccgtaaaggctcctgcttttatatatataaatacacctgccacaattacgattagccatctgagccctgccggatatctgtatttttcgttttcccaaaccctctgccatataccaaggcagcttaccgccaatatcaggtaaaatacatgtgccgcaaagtccgtcggatatataatgccgtatgaatgtctggccgccgctgcatttctcggtgaatagcctatcacatccgctatcacacctgtctgactagctatagctgccactataagcatgaccgataccaccgccgtatatacctttagtatattgtcaaacctcacattttttgccccggcaataagtagtaccggctgcagcagttcataataaccggtttgtaagcctactattccaaatataagaacaactacggcaattgcaagctgctcttttctgctgtaatatccggaaaaaaggaccttggctcctgtatacaaaaccatcgctgcaagaaaaagcttaaaggttcctaccagcacctgctgcgagaacatagtagtctcgtatacacattttgccagcacaataccatataatataaagtatcctacatcccatctgttaattttctgtgttgaaatcgatttatttttgtccataaatgatattttaccatatttgatatataattgccacatttcaaaaaattataacaaaaatttaataaaagctacagtttatgcgtctccgctcaactgtagcctttaaaatcgacctatttaattacttcaggtcatcatctgtaattgtttcaccattcataaccttctgtatcaactgtttagcatgctctacgctgctctcatccggaatagtaacataaactttctgaataggcatagaatatgttgttttcttggtaccctgaccagttactgcaaatgacttaatattccagcttcctccctctgacagctgcatattgataagagatgaaatatctgagcttttaaaatccatggaaatcattccctcaagactgtcaagaataccggagtagttggtcaataatgccgtactgtttgtcatcttatctattactgctgaaataagatccatctgatggcgtcccctgccattatctccgtccggaagattatgcctctcacgggcatatgccaatgcttcctctccgtttaattcatttggaccctttgaaaacttgtaagaatccatagatgaactaaatgcctgttcagaattcacagtaactccacctatttggtctataagagtctcaaaacctgtgaaattaatctgagcatagtagttgattgtatccagatcatatactgaagccaatgtcttcattgaacaatctataccatacaatccacaatgtgtcagtttatcctttgtcccatgagataccgacgtttcaacatagtaatctctaggtgtatttaacaataacacctgtctactctcaggattgacaaaagccagaatatttacatcgcttcggctctttgcaagcttcttgcttctggtatctgatccactgatatatacaacgaacggctcctttgtcacctgaacatccttttctgtcttctcaacctcatatgtcttagtataagcatacaatacctttgcctttgtttcaaaatcttcatacccctctgtatctgtgataacagatacatatgaggtattgagtatcatcgcctttacctcacccgaataaagggcatccaccatctctattgcagacgcatatggctttgtattgattgtactgtctgtttttttattaatatcatctattgtttcctttgtctcttcatatccatatgaatcagtatatgcaaaggtataatccttggcatcatcaatagtctcagcgggatcatccttcataacatagacaacaatcttatcctccatgacatttttatttccggtcatatcattaagtgtgcccatcaccttgctaagcacagacgtgccatataagctacatatgataaccagtatagatataaatgttcccaatcctcgcttaaaatagcccgacgcttttggtttcattatgttttgtcctaagtgaacaagtgcaaacaccaggaactccataattaataaacccccggctgcaaacataatatactttgcaggtaacatttttgtttttacagccatagcaaatatcatagcactagcaataagctgtaaaaccaataatacccttgcaaatattatccattttgtagcctttttctttttcttcatttgtttctccttctatctataaatacatagtacttatctattttaacaaatgattttgatttttcaatattttaacaatgattataacaaaattaataattttttttaaaatttaaatgtgttttccagtgtctcccacttctgatccttatcactcaagttgattggtgtgccatcctcaagtgtgtatccgcttccgtcagcgcttcccggatactctccgacaagctgtggccactcgatgccgattgcaggatcattccatgcaaggccgctctcatctccaaggtgccagaaatctgttaccttgtagcagaactctgctacatctgagagtactaaaaatccgtgtgcaaagccctccggaataaggaactgcttcttgttctcctctgtgagctctactccgaaccacttgccgtatgtctttgaatcgcttcttaagtctacagccacatcaaatactgagccttttactgcacgcacaagctttgcctgtgggtattccttctggaaatgaagtccgcggagcactccctttgtggagcatgactgattatcctgtacgaacactctgtcaatgccagcttcctgcatatcctttgaattgtatgtctccataaagtatccacggttgtctccatgcactgtaggctcgatgatgcaaagtccttcgattccacctacgtttttctgtactttaatctgtcccatgatttctatgtcctttcttgtattacgtgaacatcccaacatctaactcaacctcgctacttcgtagcttctttgctcactaaaattctatctcctgcagatatctgtgcagcgcatcctgccatgtagggagtggcttaaatccattctccacgagcttgctcttgtccagtctgctgttaaacggacgtgctgcctttgacacaccgtactctgctgttgtaacaggtgctactgtaagtctgtcctcagaatactctgtatgaccaagctccactgcctgcttaaagatttcctttgtaaaatcataccagcttatatatccaccctcgtttgtagcgtgatagtaaccgtatttatcagtctctatcatatctacgagcaatcttgaaaggtcgagtgtatatgtcggtgtaccaatctggtcacttactactgtaagcttatcgtgtgtcttgccgacatttagcattgtcttgatgaagttcttgccgtttacaccaaatacccatgctatacgcactataaagtacttctcaagtgtatttgccactgcaagctctccgtcaagctttgtctgtccatatacattgagtggtgcatagtccttgcagtcaggctgccatggtgtggtgccctgtccgtcaaatacataatctgtgctgatatataccatcttggcatctatcttcttgcaggcatccgcgatattctgtgtgccgtctgcgttgattgcatgcacctttgcttttttatcatcatcctcggccagatctactgctgtccatgctgcacagtgtactaccacgtcaggcttaagctctgtgattgttttttccactgcatcacggtctgtgatgtcgagtgagacatatggcatctttgtaactgctgtgccatcatctgctccgctgtactgtggtgctatatctgttccgattccttcgtaaccgcgtgctgcaaggtcgttcattacgtcgtgtccgagctgacctgcaactcctgtaacaaatactttcattttgggtctcctttatacaaatattcgtaaacaggcccaacatatatgcgcaatcccgcatgctttggcatgctttcccgctgcttacgcagctaagattgcttatatacgttgttcctgctctattctagagcctcaaagaatcaaaatgcgcttatgtaagcgagcttacaacacgcatttcgattcttcaaggtttacgaatagcagttatctattcgcgtacatcttctcgtaatagttctggtactctccgctgatgattgtctcccaccactcacggttatcaaggtaccatttgattgtcttcttgatgccgtcctcgaacttggtctccggaagccatccgagctcgttgtgaatctttgttgggtcgattgcgtaacgcatatcatgtcccttacgatctcctacgaatgtgataaggctctcaggcttgttgagctccttgcagataatttttacgatttcaaggtttgtcttctcattgtggccacctacattgtaaacctctcctacacgtccgttgtggatgataaggtcgattgccttgcagtgatcctctacataaagccagtcacgtacgttctcgcctgttccgtataccgggagtggcttgtcattaagcgcatttgcaatcataagtgggataagcttctccgggaaatggtatggtccgtagttgtttgagcaacggctgattgttacaggaagtccatatgtgcggtggtaagcaagcacgagtaagtctgctgctgcctttgatgatgaatatgggcttgatgtatggattggtgtatcctcatggaagaaaaggtcagggcggtcaagtggcagatctccgtatacctcatctgttgatacctggtgatatcttttaataccatacttgcggcatgcgtccataagcactgatgttccgatgatatttgtatcaaggaatacctgtgggttctcgattgaacggtcaacgtgtgactctgctgcgaagtttacaaccatatcaggatgctcttcctcaaataatttgtatacagcgtcacggtctgtgatgctctcctttacgaaacggaagtttggattgtccattacaggctcaagtgttgagagatttcctgcatatgtgagacagtctaagcatacgatacggtaatccggatatttgttaagcatgtgaaatacgaagttgcttccgataaatcctgctccacctgttacgataattgtcattttgatttcctccttaatataactgctcgcggtattttccatcaagtacgtcctttaagtactgtccgtactgattcttctttactagctcatatgtctttaatacttcatcctttgtaatccagccgtttaagtaagcgatttcctcaagacatgctatcttacggtgctgatgtgtctcaactgtcttgacaaagtttgtagcatctacaaggctctcatgtgttcctgtgtcaagccatgtgaagccctgtcccaaaagctctacattgagggcttttttctcaagatagattctgtttaagtctgttatctcaagctctcctctggctgatggcttaaggttctttgcatactctactacattgttatcgtagaagtaaagacctgtgacacagtaattgctctttggatgctcaggtttttcctcgattgaaatagcctttccttccttatcaaactctacaataccgaatctctcagggtcatctacatagtagccgaatactgtggcgcccttaccgctcttggcattttcaactgcggccttgagtctcttgttgagtccgtgtcctgcgaagatgttgtctccgagaaccatggctactgtgtcatccccgatgaatttctcaccgataacgaatgcctgtgcaagtccgtccgggcttggctgtacctcgtaggtgaggttgacaccaaactgatgtccgtctcctaagagctccttaaatcttggtgtatcctgtggtgttgaaatgatcaggatatctctgatgccggcattcataagcactgacataggatagtagatcattggcttgtcataaattggaagtaactgctttgatgttaccattgtgagtgggtaaagacgtgtgcctgaacctcccgctaatataatacctttcatgttgttctccttcaaactgaaactacgtgctgcatttgatgctttcggtctgtagaatccactgacctgattcatcatttacctgcattataaaaggtgccccaagggcaccttcaagtacttttttatatttttagcatttttcacaaaatatatgcttataatatcctgtttttaaatcattttcgtgcaataaatacacctgcatcctttgtgatatggaaccctccctctgtcttctttctgacaaatgccgcaaattccttatagcggtccacaatatacctgttctggttgccgtggcacgaaagcacatactctatcacaggctctgctttttctaccacaagctcatcctcgtacccatgccagcttacatcaccaaagtattttccaagtattgcctcaccattttctttaccgaattgctcatacagcctttccgctgacagctctatgcggtcatcaaactcctgtaccaggtcgtttatttccttcatatgccgtgagctgtatgtactgcacacaaacacgccaccgggctttagcaccctttggatttcactgcacacggcatccagattgtcacaatagaacagtacatggtctgctatcacgcagtcatacgatgcatccggcttatacagcctgtgggcatccatcacctcatatgtaaaacgcttgtcgtctgcacctacatttctcgtcgcatcccttaccatgccatacgatatatcagtcagggttatctgcatatctgccggtatcctgtctatgttctgtgtccagagagaggcatcaccacagcccacctcaagcaccttttccccctcaaaaaagctgcactcatcaaatacccagctaaaccagctcaccggattcatcgagaaatccctgtgcagattaattctggctgatatatttgaagcatccctgtactgttgcttaagcttttgctccatctcgtttatattaaccagctccagcatatggctccagtccacgcttcgcccctcgtctatcacctctgaagcctcctgcagtgctgatttcataagcttcatctgctctatcctctcctccacgagaccaagctgcatgtgaagcgactcagacatgacattgctgtccgtgtttctgagtgtcatctccttgatatcatccagggaaaatcccagatatttgaggaacagtatctgctgtagacgcgcaaagtcgtcatcattatagaatctggctccgttttcgtttacgtaggatggttttaaaatattgtgctcgtcatagtacctgatggtcttttttgtaatatgcgctttttttgcaaattctcctgaggagtagtagccgggtagtttcatcgttgcgttgcctttcctcttattttcttacttttgaacttcctatatctaagtatatcataattttctaatacaggatttattaatatttacttattttcattgtttctgcttgtttttccggaaaatgtacttataattataatatcactatgcaacaaggagaaaacaatgaaatacgattatatagtagtaggttctggtctctacggagccatcttcgcccatgaggcaaaggccaagggcaaatcagtgcttgtagtggacaagcgtcctaacatagcaggaaatgtttacaccgaaaagcaggagggcataaatgtacacatgtacggagcccacatattccacaccaatgataagagggtctggaactacatcacacagtttgctgagttcaaccgcttcacaaacagccctgtagcaaactacaaaggtgagctttactctatgccatttaacatgtacactttcaacaagatgtggggtgtggtgacacctgaggaggctgctgcaaagattgaggagcagaaaaaggaaatcaccggtgagcctaaaaatctcgaggagcaggctatttcactcgttggccgtgatatctatgagaagctcgtgaagggctacactgagaagcagtgggggcgtgattgtaaggagcttccggctttcatcataaagcgtcttcctgtcagacttacctttgacaacaattatttcaatgctctttatcagggtattccaatcggtggatacaccaagatggttgagaatctgctcgacggcattgaggtcagactgaataccgactaccttgagcacaaggctgagcttgatgctcttgctgacaaggtggtatacacaggtccgattgacgcatactttggctttaagctaggtactttggaataccgctcagtgcgctttgagaatgagaccctcgatattcctaacttccagggcaatgccgctgtcaactatacagaccgcgagactccatggacacgtatcatcgagcacaagtggttcgagttcggtaaggatgaggatggaaatgatctgccaaagactattatcagccgtgagtactcttctgagtggaaggcaggcgatgagccttactaccctgtaaacgatgagaaaaacggacagctctacgccaagtataaggagcttgccgataaggagaccggtgttatattcggtggtcgtctcggcgagtacaagtactacgatatggatactaccattgcctctgtacttgatatgtgtgagaaggagcttggctaatagtcagactttccacaaaatgctttgtttatgtcatacaaaaaccgcccatagcatatcatattttgccacgggcggttttgtttacattatttttttccggccagatttatctcagccgcaggaatatgctccctaaggcactcatatccatattccttcgaatatgcatatatagccggaagctgtcttgaaagaaatagcgccggtgcttctgtcacagagtatgcgccacagtgcccgaactcaagaacatcaccaagttcaagcttcttaagcttcacctcgcgtaccagcacatctgccactgtacagaggcttccgcagagtgtatagtctgtgtccggcagttctgtgaattccacaccgacagctctatatatactaatcggcggcacctgcatagccattctctgtccaaagtaattcagatggtggattcctccatcaagaatcgcataattggcatcgcctgtcgatttaaggtcctttacctgtgtgtaatatttaccgcatgaggctgcaaggaaacgtcccatctcaatgccaagcggatattccacagcaaattctctaagcacctctgctgcctcatcaagtgcttgtttttccctttcctgccagtcttcctcaaaatactccacacaaagtcccgggccatactctacaagctgtggctcaaaaccgtatttttcttttaatccggtaagtgcagactttattttttgcaagtccttatttattttgcgcaagctcttctgtgtgccggaataatagtggatgcctattaccatgatgcccttaaactcatccggatgcgaaatgatatattcaatatcctcaagcgacatgccaaactggttgccgcttgtcaggcgcagtatgacatgtgctttcgtttcggcaaactcggcttcatgcgcaccttccggcatacgttcaagcatcacctctgatatcagcgctgcatgtcttatgctttcacaggtgagtataccggcgccatatgaaactgctcgctctatatcgcatttttccttcatcacacctgaatagatgatgctctccggcttcacgccaagtgctatacatatctcaagctctcccgggctgcacacctccacatggtctaagccctccggcagcctgtgaagcaggaatggatttgcctttatcgaaaagcaaagcggtatcctacgtcctcctttacaatcaagagcagcccttatcatggctgctcttttcgcaaactcgtccgtatcaaatacatagtacggtgtctgtctcatatgcattattcctccacaagctctttcacaagcttctcgattgcatctactgagttgaaattctcaggaaccagatcctttggtctgattgtgatgtcaaactcatctgtcagctccgatacgagtgaaactatatcaaatgactcaagaattttgtcatcgattagctttgtctccttttcaaaatccacatccggtcttaattcctctaaaatctctaaaattgtgtctctcattttacatttcctccagttttttcatatcatattttccgtttggaagcttaggaagctgctccagcttcttgattttccttggcaccataaagcccgggagctcgtccctcagtgccagcgcgaggcttctcctgtcacagtcacctgtgtagaaaagtatcagcacctcttttgctttattatatataacacagctttctgcgactccctcgaccacattggcggcatgctccacctcgtcaagctccacacggtgtcccatgtgctttatctggcggtccatacgtccacagaaatgaagtatgccatcctcattgagccttccgtaatcccctgtgcgatacatccgctcaggataagccttattgagtggattgagtgtaaatgccgcagctgtcctctccggatcattataataacccagcgccaagattggtccacatacacatatctcgccctgttctccaacagccggctcatttccatgctcatctatcaggaaaaccctgtaattgtcataggcttttcctataggaagcacctcgtcatcttccactgtatgatccacgctatagtatgtgcatgatgctgtggcctctgtcggcccatactggttcacaaaatgtgcttccggcagattttcctgccatttcctaagcaccctgcacggcatcactgagcctgagaagcagatttttctaagactcttaagccctacttcctcaaatgccccaagcgatgtgaggatggtaaatgccgaaacactccagcctacactgctgactttcttatcattcatgtaatcaaacagtgcatttggctccataaaatactcttttggaataatcgctgtgctgcagccggtctttagcggcagataaatgtccctgattgccgcaatatagtcaagcggcgactgattgcccagcacatcactttcctctatatgcattacatcacagtaagcattgatgtatgtcataagtgacagatgcgatgtcatgactccctttggattgccggtggagcctgacgtgtagataatatacagcgggtctgtcatggacatctgcctgcggactgttgcaagcttctccagtgagctgtcatctttttttcctgcacagcctgccacaacaccaccatctgtatcgttctcactatccgtcacagcgtctcctgctgattcactgattttacaattactatcagcgcacgccacctgctcgaagcgcgatatctcctcagcaacaaatatctgcggtctatcgaagccttctgcctttgccagctcatccactatgctctccacatgctcaaggctttccctgtctgccacaatagcccttggacacagattttcaagtattttttcaattctcttgtcaggaagcgatgcatcaatcggcgcatacggtctgcctgcatatgccactcccaggaagtacgccggtgtcaccattttccttccggcaaatactgcaacaggagttctgtccactccaagctgttctatcagatatgctcctgtatttcttgctatatcatatacctgcgcaaacgtaatactgcattcagtatccgaaaatgcaggcttgtcagggtattttgccactgtggcctcaagccactccagtacgtttttcatcttagtcctctttcatgcattaataaacnnnnnnnnnnnnnnnnnnnnnnnnnnnnnnnnnnnnnnnnnnnnnnnnnnnnnnnnnnnnnnnnnnnnnnnnnnnnnnnnnnnnnnnnnnnnnnnnnnnnctcaagccactccagtacgtttttcatcttagtcctctttcatgcattaataaacgttgccgaaaaaattatagcacataacatccgaaaaaaatgtcatgtgctatcgaattaataattcttaagaaagccttaatttttttctgtaggtttttctatatttgattctcctattaaatatatcggtctgtcctttgcctcgagataaagctttgacagatacagtccaagtatccctatgctaagaagctgtataccaccgataaaaagaatgatgaccaccgttgatgcccagcctgctaccggatcaccaaatacaagtctcctgataatgataaagagcattgcaattattgcgacaataaagctgaacactcctgctattgaagccatgtataacggagcatttgaaaatgctactattccatctaaactatagagaaacaactgccaaaatgaccacttcgtctcgccagccacgcggtttacattttcaaactcaagccatttgaccttgaatcctacccagccaaataatccttttgaaaacctattgtactcttttagcgataaaagagcatccacatatttcctattcatcagcctgtagtcacgtgccccatcaaccatatttgcctttgaaatcttactcatcagcctatagaactttctggcaaaaaaagatctaatcgttggttcacctttgcgtgtcactcgccttgtaccgacagcatcatagccctcttttgtaaggacctgatacatcttcggaagcatttccgggggatcctgaaggtctgcatccattattgccacatattcacccaccgcatgctgcaagcccgcatacatggctgcctccttgccaaaattgcgtgaaaaggatatgtattttacactggaatcatttgtggcaagctcctttgcaacatcgagcgtcccgtccatagagccgtcatccactataatcagttcataggacaatccctctgcctcactcgcttgactcatctgattcagtacccaggttattttattataaaaaagaggcagagcctctttctcgttaaagcatggcaccacaatgcttatcttatttttttccatataagccaccctgcatataatatcaaataaataaaaaatccgattgctgatcctgccgtatttgtcacaaaatcatcaagctgacaatatcccctgccggtaaccagctgcgtgtactcaattgctgcgcttataaaagcaccaacaggtattgtaaaccatctcatccaatttttaaaaaccagtggaaacaaaagcccaaatggtataaacaatactatattttctataaaataagcgtgcatctgaagtgtcatgccccatgtgctccacagcaccatatcggcgacgccggttctgcttcccggctcccttgaataatacactatcattataagcgtatacatataagccacaaatgtgccgcagaacagcatatgccagattttgcccactatcttttttcttctctcatctgcctgtgatacctctctcattgtgaaaagatatcgcagcagacacacaaaaatatacatcgcaatgcagattaaagccaaatataccgctgacggaagatatttgaacttttcctgtatgtctcttattatataatcctttaaactcaatgtccttttttatgctccttgtaggcacgaatgaactccagctgtcgttcatcgtcctttttctgttcgtcatcagacatatgactcactttaataattatacacaatattatgccaattacaataataccggcacataatataaaaataattaagatttcaggcatagactatttcctccggcagaatttaattactattctctctacagattaaattatatccacttaatttatcttaattcactcatttatgaaccctgataacagcaaaagctgcatgatattctcacacagcttttgtatattacgtgtattatctttggcattaacctttattttaattttgcaacaaccatatccacatatttctgacagatttcctcgctctctgcctcaaccatgacacggataacaggctctgtacccgactcacgcacaagtatacgtcctgtatcgccaagctctgcagtaacctggtcgacagccgcctgaacctcaggatttgcaagtgcctcggccttgtcagccacacgcacattctgaagtacctgtgggtagatactaagcccctcacagagctggctcatcttctgttttctcgccatcatgacctccatcatcttaaggctggtaaggataccatcacctgttgatgcatacttagagaagatgatatgtcctgactgctctccgccgatgcggcagccgttctgctgcatgtactcgtatacatatttatcacctactgcagtctttgcgtagccgattccaagctcatcaagggccttatagagtccaaagtttgacataacagttgtgacaacagtattgttatcaagctttcctctctctttcatgtactttccatatatgtagaggatatggtctcctgtgattacattgcccagttcgtctacacagagacatctgtctgcatctccatcgtatgcgaagcctacatcaagaccattgtccaccacgtacttctgtaagccctcgatatgtgtagagcctgcattattgttgatgtttagaccgtttggctcattgttgatgacatagcactttgctccaagtgcctcaaaaatagactttgccatgttccatgagcttccgttggcacagtcaagacctaccttcatgcccttgaatgagtagacaccaagcgatatgaggtatcccatgtaacggttacggcctgctacatagtcaactgtacatccgatagcatccttatgtgcataaggcaattccttccactcctgaccaaacaggcgcagcttgccgtctatatagtcctcgacaaggagaattgtctcctcatccatcttctctccattgctgttgataagcttgattccattgtcatagtatggattatggcttgccgaaatcatgataccacagtcaaaatcatcggttcttgctacatatgccactgatggagttgtggtaacgtgtaatagatatgcatctgctcccgatgctgtaagtcctgatacaagggagtactcaaacatgtagcttgaacgtcttgtatcctttcctattactatcttcgccggctcgtcgagctgcttctgcttcttaagctctccataataccagcccaaaaatctaccaatctgatatgcgtgctctgctgttaaattgacattggcctctccacggaagccgtctgttccaaagtattttcccattgttgtccccttgtgaataaatttttcttatattatacacttaataaatgtgtttgtgtagtaaaataagcttatttgttaaattattcgacttcataaaatcaattgtttataaatatgataaaattaacatatgtatataaatcaaagctacaaagatatcttatgacactccatataatatctcttctcattcgcttctccgattgagaatgtctttctaggaagcaccccgcccgcatttattgcagggaacaatgtgctcttgtctatcgactgaagaaagattccacatccattagtctccctaaccagtccgtgaagtgcctcatcaccatggatatagtctatttccacattgtcatgtgtctcaagatacttgtctaaaataccctggagtatctcaaccgggaggcggtcacctctatttgtgatattaattccggaattctttatttcggtagcgcctgattcaacatactcaaatactatctcatcgccctcagtgctcgcaagtccttgttttgtgatttcagcttcgaaaaacgacagcatgtcctttacatcaacatttgtaagcagtctgtgaataggcttaaactcaagcgcctcactgtgcagattacagatttccacaagagcatgccttgcaggatgagttttcaactgctcctctgtgaattttcctgattttttgatattttcccagcatgtcttcgctgttgcaagggaatggtttccatcacctactgcaaataaaaagcctccacagctattctgttttgctgcaaatgcctctgtcacctgccttgctgcctcaccctcgacagcatagccgcggatatgtccacctccctgcatgagctctgtatcgtaaagcttacgaagagtgtccctgatggcatacacatactcgattattccatgctttacagctgctatatttactgcatcttcctgtgaagcaccctggcaaccatcaatcttttgtctgtctataggatcatcaacaagcagcataacatgtggcagctcaatagctgcattctctcttattttcactctcggaggtatacgtgagattactgttccctctgttgctctgatgagagtcttctttttcgggtcgaaatcatagtcatccagatcaataagtcctactattccaagacgcacccctgactccgtagtacgctcaacaagcacatagccatctgccaccgcttgctttagggttccatctgtgagatatgtatccatagtggtattaatatatttgattctctcatcatcagtcattgaagcatattttgtttttctgccggtttctttgtcatttttgacaccatcccctgacgaattgcaatcattctcctgtttcgcaattgttcccagatatatttcagggaataccacattaagtgttgacggagcatcgcccacatacttttccacagcatcccaataatcagcctgacttgtgaactggtcacaggcgataactgaccatttttccatatctataccatcgtttggcaaaagaatatttgccggattgaaacaatttgacatatcaacaattctcctttaaatatacaaaatatataacaaaaatccgctatactctatagtataacggatttacttttatttgcatatattaaattccttttgttgttagaattcttccaactgcatcatctaatttttctgccggtatctcaccactgttaactgcagacagcactgcattatagctgctctcaaagcctgttgaaacataaagcatgctcattcctgccttaacagctgccacagccgcctcatcctgtgtacataccttattaagagatgcatctgataaatcatctgtaatcaaaaggccattaaagcccatggtagttctcatatagtttacggcacctgctgatgtagagcatggcgtggtttcctctcctgtcacactctggcaaatcacatttcccatcatgactgccggaacacctgcttcaattgccttctgatatggcacaaaatcagatgcctcaagatcttccagcttatctgtcatccagagcattcctgtcgctgaatctgtagtagcctttccttttccgggaaagctctttgctacagaattgattcctgcactattatagctgcttacctgtgctgcaacacagtcacctacagtcgctgactcgctgccaaatgcatatgtatcgttatctgcattatcaccatatgctatatccgctgtcggcccaaaattcatattaaggccattggtagccatatatgagcctatctttcctgcactgctgcccgctgcgtcagcatctccaagctgtgatggtgcctgctgtgcctcatatccattagctgaagcaagaggaagtctttctccaccttcttcatcaattgcaagaaacagattcacgcccagtcgctcctgcgaaaatgactgcagactgctcatcatctttgtaactgcagcctctcctgaaaaattttcctgtctgaaaacaaaaccaccaagaggatatgtaccaatagctgcctttgtcttgttaccggcctgagtgaactctgatacacctgtaatctcctcaggtctcgtaatgaatagctgagctaccttttcctctgttgtcatagaagacagcttcgtcttgacagaatctgacggagtaaatgccggtgctgtctgctgtccatcaacttgtacctgcttagttccatccgtctcctgagtaggattctgtgtctcctgctggctttctgttattttcttattcgacttattccccggcatcacaaaatgcactgctccaaataccagcacaactatcagtgcaattacttctattgtgatgaggtacttatctccattttgtctgaagttcatatttaatccccaaaatttgtgtttgttaaatcgttattaggtccgcttacttttcctgataatgcactgctgtattcgtttacagttgcactaggagtatagcctgtatcaccttcaaggaactgatgcactcctgtagccatgtctgcaagtgtagtcggcacctcaacccatgcaccatcgacctttccaccatagaacacctgtggatacgccgtcgaatcctctactgtatagtctgcaagatttttaaatactgaaagaatctcatcagtattatagttagtattgacatgtccaatcaggtctgataccatcttaatctttgccgctgtattcatctgcttagctgattcaaaaaccttgaacagcactgttctctgtctttcagcacgcttatagtctcctccggctgtataacgtattctggaatacgcaactgcctgagttccatcaagtgtatatgtgccggctgaatcaatatgggatgagcttgttccacgaaccttattgacctcatcaatatatccgtttatcacctttgcctcagatgcatcaatatcctgtacaatgcctcctacctcatctataatttcaccgactgtattgaaattgactgtaacataattctttatgtctaagtccagatttttgttaagtgtatctactgcaagctccggtccgccaaacgcatgtgcatgtgtcaccttctggtatccatgaccatcaatattcatcatacagtctctgaaaatagataccatgcggattttcttagcatcatgatcaaccctgataatcataatggaatcggaacgtgttcctttatcaagctgatctgagcggctgtcaacaccaaatagtgcaaattcctctatgcctgatttgtctgtaatgttgtcatcctcagcctgagtatcagcttttgtcttaactgcctctgtacccggctttatgcctttggcttctttattcttaacattactgctgttaatctttacaagtattatcactataatagcaataagtacaatcattactgccgtaataattatatttttcttttttttcatctgcactattctccgtcattcatatgtgtctgtgcctgctaattttcgtcatcgtccctgccataataattgccataataattaccataatagtttccatagtaatgaccatacttagactcctcaaacctgcacttattgagcacagctcctaatatcttgacgcctgagtcctcaagtgtacgctttgtattgatgattgcacggctgcttgtagcattctgggcagcaactattactgctccgtctacattctttccaactacggccgcatcaatcgcagctcctgtaggaggagtatcgacaagcacatagtcaaagttcttctctccaaactcgataagctctttaaactcctctgtctcaagaagctccgtaggatttggtacctcatgtcctgcaaaaagaatgaacacacccttgatgtttgtcgcatatatcactttatccaaagatacctgacctgagagataatgtgagagtccgtatatctttccaccgttctccaccttcgctctgattcgtcctacaaggactgacttacgcatatcggtatctactacaaggactgacttcttagagtccgccatcgaataagccagatccataactacggttgtctttccctcattaggcaagctgctggtaaaaaggatagacttcacaccttttccactgaaactgatgcttgttttaagagctcgaagagactccttcattgtatagctctggtcttttatctgattaataactactgtttccattaaactgccctcttcttactcttgctatcgtctgatttagatgattgagttttcttcttttttcttctctttgtcttggctccatcatactctgcctcatcaacaggaagtgatgcaagcaccttgaggcctgttctggtctccatatcatctgcattggaaattgtatcgtcaagcatgtatccaagtacaactatgccggcagcaagaaacagtccgagtacagcaccgataactgtattcttaaggatattattattcaccggtgtctttgaagcatatgctttctgtataatctttggctgtgactgatccatattgtcagcgatatactgtgatgaaacttttgcaatctcatctgccactgtttttgaagcttccaaatcagtgtctgtaaccacaatcttgagcacacgtgtatctgtcggattctctattgaaaccctcctgctaagctgctcgtatgtctcgtccatatccagattgtcaattacctgcgataaaactgtcctgcctgtgataacgtactcatagtcgtttgtcagactcgagcctacctgaatatcagcaagactggtgatagatgttgacttgctcagtacatacatctctgcagatgcctcatactccggtacaaaagtaatcttggagtataatccaaatactgctgcaagaagcaccattgatgccacaagtgccttccagtgcttcactaattcgtgaaacagcgctactaaatcgatttcaatttcctgatctcttattggttcgttgttttccattttcctaccctttacatattgtaacattatttttcggtttaatcctatactatattactacacttcatttcttttgtctatttttagaagtcacaaaaaaagtattaagaatatgtcatattttgtaaataattatgccatataatagaaaagtgccgtttccggcacttttctttattgtattttcatttgctatattttatttgttcctgttctattgttgctgttctagttctgctgtggctgttctgatggttcagtcggtgccaccggctgtggctgtggttttggatttactgttacggttattgaactgcttgcgctattccagcctgccatttcacctgctatagctgtaatctgtacgctaccagccctgtggatagtcacatttccggcagcatccaccgttgcaatcgatgtatcacttgactggtaataaagccctgctccgtttgaagcacttgctcccagagaaaatggtgcatctccctctgttacagttttattaccgcaacctattgtcacagatggtgtctggtttggctgtggctttgcatttacagtgattgtaatcgtcttgctgccggccttatagcttgtagtagcctcagacttgacagtgatttttgcagttccgacacctgctatcgtcacattacctttctcatccactctcactacaccctcattatcacttgagtatgtgagctttgcattatcctctgctgtcacaccgagattgaatgctccgtcgccctctgtcacattataagagtcagctccgccaagactctgtgctttgccggtcaccttgtcagcaccaccatatacaattactttttcatctaatgttacattctcatatagcttctttgcagctgaataaggcatatttatgcagccatggctgccgctgtataggtagatatttccaccgaagctacttctccacgaagcatcatggaatccaattccaccattgaatggtataaagaaattaacccatgacttatatccgtctccccttaagtatctgtccttatctcttgagaagatagaatacactccggtaggtgttccatgaccttttgaaatacatcctgtaacacactgacttgatacaacaagctctccattcttgtatacatataccatctgattggtaagatccacttcacagtaattgccaccatatgtgacatattcacctgtttcttcttcctttgcctcactgtaaactgcttccactgttgcagactttttattgtttattgcctcagcaatcgcctcatacagcttgtttccatctacagtctgtcctgatgatgtaacaggcacatttattatacttccgcctgtagtcttaaactgacctgttttcttctttgacacatcatgcttttttgcaagctctgtacagtatgtagccatattctcaccatcaagtgaaactgacaatccgtcattgcccactataagccactgggctatctgatcctttcctacagcctctgtagctgcttcacctgttgccggtgtgaaattacatgtcaccgtcacatcaagatatgcattggcttcttttaatgccttctttaccagctcgctgtccgcagccttttctccatcaacatatcctgttgcagatgtaagctctaccttatccttcagctcctttacagcgcttgtcagatttgtagctgcattgtcatatacaggtgcatctcccgatacaccgtcaacaccctcaaactgtcctgcctctgcattgtatgctattgtagcacgatatggcacaattgatcttatatcaaaggtctgtgtgtctgcctcagccttcttttgttcgtcatcatttgcctctgcatccgtatcactctgtgccgtagcatcagactgtgactgtgtttttgcagtgatataagagtctacaagagcagtctccagctcatcagacttatccattttaaaaagcttcacctgcttttccggtttcttatccttattggccgcatttatcagttcctgaagatctgctttgtcattgtacttgagtcccaaatccttagctgtcatatcaaatgatgcatcgtcaagcttcactgatatcttatacttgcctactgcagtctttatggctttctttgcctcgtcagcagtcattccacctacatcaactgatgcaagcttgtacttttcagggaatgtcttgtatgctttctttccacagcctgccattcccaatgccataagcacacaggccaaaactaccaggagttttatacttttcttcttcatctttgtcctctttatcttaattttatattattctcacagcaccatattttatcactttcttatatatgcctcaagtgagatttgtcacatattttccggttatttagacacattattcatcattatgataacaaaaaagcttcctaatgacgcacaatatgtaacaggcgtataaaatagttctgataaaccttatcgctcatatgcattttatttaacgcacaaaatactttataattcttatttacacatttatacatatctgtattctttttttcgatttgactgacaaacagcttcatcctttttctaagctgttttttatcagtgttcctaatcaggcaaagctgcaaatagtcgttgataaatttgcttgttttatcaaaccacagctgctttccgcctatactaaagtgctccgcatcccggcctgcctcaatcagcctcatgataaccttctcataatggtcaagcctcttcagtgagctttctatcgaaacgctctgatttacgtcacctactctatactcataaagtgccttatcatatgcatagatactttcggcatatgccattgggattattgagaactcctgatcctcgtagaataccccctcagagagtgtcagtcctgtatttctataaaactgcgtattatatatcaccccatgcagactcagcccccaccagaaatcatacagatgctcgtccacatatcctgcattatatggtccaccattttttgttatatatttatcgtcgtatggatattcatcagtattttctctctgcagcacatatgatctatagctcatcagcactgcatctgcgaaattctcatgtttattttcattatctctaagataacagatagtttctttcaacacatcagtgtttacccagtcatcagcgtctactaccttaaaatagcttccttttattatttttacgccttcattaattgccgagccatgaccaccgttttctttattcagtatccgatacacgtcaggatatttatttacatatttttgcgcgatttctacactattatcggtagagccgtcatttacaacaacaatgtccagcatatttaaaagagagttatcatcaataataaatgatgataaccctttatccaaaaactttgccgcattatatgtcggtattattattgatagtatctttttattttctgtttccatatcctatctaattcctgtttctatatgttaatttccacttatatcgctgtctgtcaccatatttgacaatggtagtcagtattattttctgtatagtctgtctgctctgccaacccttttggcaagctcaagcagctttgcaaattgattctcgtaaaagctgttgctcacatgcagcttattaaacagccgaaatactttatatttacgctgtactgcctcatacataagtgcacttttttgagcgagtttcatgttaaactgctctactatcgctctgccggattgtctgtcggtattttttatcaaagctatttgataatagcttgtgattatgcccgacgtctttctgataaagtgttcctttccaccttgtggcatttttgcaaagctcttctctgcctcaagtacattaaatataacctgctccagatccggaagacgcttcacctgactcgctgctgaaacactttgatttacatctccaactctgtatacatacaactcttcctgaataaatctgacagtttttgcatacgaaaacggaacggttgcatactcctggtcttcgtaaaatacatgctctgtgagcttatatccaagtgctttatagaaccctgtgttatatatcactccgtgaaatgatagtccatcaaatacatcatcccacatgtttactatatcctttaaattgtactctcgtgtaaaatcaggcacactcacatctgccggtctgtactcatcctttgatatgtcataatacctgaagctttgtatcaccgcatccgaatctacatgctcgagatattcaaccaggtgctttagcgcaagcgtatctacccagtcatccgcatcgaccacctttaaatactttcctctcacatgctccactcctgtgttgattgcagaaccgtgtccaccatttgttttatttactatgacaaaggtatccggataccagtccacaaatttctgcgccacttcaacacttctgtcaggtgtgccgtcatttacgactatcacctcaagcttatcgagtatagccttgtcaatatctatttcctcaaagcggccctccgttgccattttacagttgtgctgtgctgtctgtgcatctgtatccctgcataccagaaatgacgacagccccttattcagaaacttttctgcattatatgttggtattatgattgataatattttactcattaactgttctatccgtcctgattactattattaaaaagagtattgtatactcattaacgcctattcatgaaattaattaccacgcagtctgctataaacccatgctgccatcggaaatatcttaaaacctgtttttctaagcatccagacgctcttcctgctgcacgcctggtacactcccgggtgctcctcacgcagcatctcgttaaacttcttcatctgctcaacgttccttgcatcattgccctttgccagaaatatctggtactcatcatcgactgcctcggctatgccgcgctcaaggtactgcttcttgtaggtctgcagattgccgtgcacgttgttgtactcaaacaatgcatcaagcaccttaaggtgctggtcatgacgcttgatcatcatctttatgtccacgctctgaccactccttccaagtctgtactgatacagcggcagaggtgaaaacgtgatgcttgtgcaatatggtatagggtagagtatatactcctggtcctcgtagaagcagtgctcatccacacgaatatcattcttctgcaatacatcagtacggatggtcatggaatgtatagtgatcagcgggtccatgactgcctcagcaaagccccactccctgttgtagtgataagagttggacactgcctttctgcgctttgtgaccttctttgtcctatcatccaccaggttgaagtcattggatatgacatccgagtgcgtgtgcttcaaaagctgtacaaattgtggcaaaaggctcttgtccagccagtcatcaccatccaccaccttgaaatactttcctgttgcgcgcggtatcgcatagttgatggtagatccatggcctccgttctccttggagagcaccttgaagctgtatggatatttctgctcgtaggtatgtgccaggctggctgtggaatctgtggaaccatcatccactatgagtatctccagacttctgagcacagacaaatctataaacgagtcaagacagttctttatatacttttcaacattgtaagccggaacgactatggttaaaagcttctccatatatgtttctccatgtatacctgtttccttgtgtactactctccgagtccatccttgatgtactgtataagatgttcaagcgcctcactctcatcctcgccattgcagataagctctatctcatcgcctgactttatgcatgctccaagcactgaaagtacactctttgcattagctacatttttctcgtcatatataaatgttacctttgatttaaatttcattgcctctttgcagagattgccggccggacgtaaatgtaatccggtaggattcttgattattattttttgtgctaccacttttattacctcttttcggttatatatctatcaatgtgatgaactgtcagagccgttatttccggtgtttcctgacgatgtgctgcccgatgannnnnnnnnnnnnnnnnnnnnnnnnnnnnnnnnnnnnnnnnnnnnnnnnnnnnnnnnnnnnnnnnnnnnnnnnnnnnnnnnnnnnnnnnnnnnnnnnnnnatgaactgtcagagccgttatttccggtgtttcctgacgatgtgctgcccgatgacgtaccagctgacgatgaaccacctgtgccggtgtcgcctgatgttgtaccgcctgttgttgagcccgaggctgttcctgtaccatcagttcccgttgtgccgcctccgtcacctttccttccgataactatctgaacctttatctcgccccatgtgtacttggtctcatccagatttggctttaccgtcactgtatgtgtacctgcatcaaggcctgtcacatcaattttacccttcagtgtagttcccgaaagcgtatctatatcagactgggtgccgcttactacgacactgctcttatctgttacaaatgtaagcgtatatccatcttccagtccgtcatatgtgatattggagctgttcagcgtcatggttgaagtcgcatttgtttcaacctttatatctatactgagctttgccttgtatgagttcactataaaaactccatccggcagatatcctgtcaggtcaacagatgtacttatatcgtctgttgcgcccgatatatcgattgggcccacatctatagatgtgatattgttcaatgcttctgcattacccttgagcattacagactcctctgatagttctactccgagcacgctctttcctcctgccggtgagcctgtcgtagtacacttgataggtacctccttggtacttaagacatcaactgtcactgctatagactgatactggctgtccacatcaagctttgatatatctatctcatcgccattatcatcaatcagagtgagatcaccgcgatcagttatctgattatctgatattatggtattgtcatcgacctttatatttacattagccgatgctatagttgaaacaactgactcaggacctccgatctttactacctttggatttgcctgtggcttgtttcccagtgctttcgcacctgagagacttccaatcactgatacctttacctcaaactgcttctgcatatatttttcaactgaaagcgggagcatatggtctccaccgttgaatgtaatcgaatgtctgtacttagtgcatccaatatctacctttacgcttgccttattcgtatcatccttatctactatgatatttgcaaggtcaacatttgcgtaaaaatcggaatcatcaagctcgttcagatagcttctcttacctgataccgaaaagctgatggtcttttccgaatccttgatggtaggccatagccccttgtcaacaaccgaatcacggcctgtgacggtgactgttgtggtaaatgtctttgtcttgaccgggtcattgagattgtagaccacaagccagagtataaatgcaaatgctatcgcgagtattttaaagcctatattatttgtgaaggtttttagaagcttctttcccattcttaaacctccttttaattaattcaaacttacccggctccctatgtctgttctgcagaagcttaagctgtgtgcgtagatgatcggcatctatatcgtgctcaatctgccccttgtatgctgtagaaactgctcctgtctcctctgaaactacgatagtaagcgaatcacttacctcgctgactccgaccgctgcacggtgtctggttcccagatccttcgagagtgacaggctgtctgatagcggaaggtaacatgtagctgacaccacacggttgccacgcacgataaccgctccgtcatgaagcggtgtatttttctcaaaaatattgatgaggagctgacttgtaagtatggcatccacatctattcctgttctgatatactctcccagatttatctcatcctccatgactattagtgctcctgtctttaccctgcccatcgcaaagcatgcacgcaccagctcatcgattgtcttgtcggagaatttctcaatctcgcctctgccggtattaaaaaaatcacccaaaaaggtctttccaccaatattctccaaggcatttcgaagctcaggctgaaaaataacaacaagtgccacgagacctatattaaagagtttctcagcaagccacagtatcgtatccatctggaacaatgctgcaacaagcacaaacaacagtatgataataaggcccttgaacagattccatgccctcgtggtctttatccacaaaagtatatgatagaagagcactgaaataataagtatctctataatgtctatcacaccgattttgatgcccggcacatttgtgaatgtaaggaactgatccttgaagcgtatcaatacaccactcacattatccatagcgccctcctttctcttatactatgtaactatttgtcatcctcaaatatattttcgtctatttcgagatcttttgcaatagcctctttgctaatattttcctgattatgtctcggaatcttctttccaaggcttcctgtattgccaaagtgctttacaaccttttcctccttggcaatcatcttctttggaactgccttgacgtaatagtaatattcatcatcctcaaactgtacgttttctgtacgtgcatagtcaagattcataaatataaactgtatgacaacacctgcaaaaatagcagctacagtgctgagtacaagccagattatcttctccggcagtcctagcaccagataagcaacaacaagtgcaaccaactgtatgagccctcctgctatggtagcaacagtccatgaattgttgattttcaatcgtctgacctgatacaccaccagtgtggtgataacaaagattgccataactataaacatctctttgttgtcaagaagctgacccattgtcacattgagctttgtagtgctctgcccctttttatctaccacctctgcaagcgctgctgcattctgtctgattccatcaaagaaatagtacagcagtgtgccacatattattgcaacaaccgaataagctcttcttaaaagacctgctgcaaccggcataacagatggtatgtgaagctgaaagcatataggtgtgagtatcacaagcatgccatccttcggtgcaaaacgaaaatagacaaaatacagtactaaaaaaagtacaaatgtgatagcacaaacctctatggacagcgcatacatatctaaaagtatcataatcgaagcaatccagagtattgcattcaccggaagcagtgcacacacaagcgctaaaagcagtgccacaagcatcgagctgattttcgccatatagccgatattcaaatctattgttataaatgcgataaatgcaacggcaaatctcacaaccggaagtataaagtgctcatactcaccgcaaaatttgactgccttatccttaatttccagtaacttgttcataaagcctccctaacgcttaatcttttcctcacgggaatatattctgcccactgccttcaggtgatttgcgtatttgcgcacttctcttctgccggccttatatcttgcagtatacaccacaattgtgacaaaaatgtaaaccgccataaatgcaatatacagtatgcctattgtgacacctattgccttaaaatcaagcttattgattctgtccaaaagctctgctgcattgacagcaacccacatcacaacaagccctgcaaatgcgaatgtacctgtaaagaagctttttaagccctctttccatatatagtcccatccgtagtagcttgcggactgtttctgcacacggctgtcatcgcttttgctatcacaaagagcaatattaaacagttcccttactttttcttcgtttatcataaatcatcctcttacctgttatatctcatacggtttttgtcatcctgctgccacagcccttgcaattagatattctcatctgataaaaccctcctaacttccctgtcctatgcaaatacacagcacatatacacggccaggacatttctttgctatctcgtgcccaatcgactccaccgtactgcctgtagtatatatatcatctactattagtatttggtcatattgtacaatactatccgccacttgaaaagccccctcgagacaatttctgcgttcaacataccccattgtcttgagtggactggtatttttcattctgcgcacaagcccttttgccatctttatgcctgttttttcagacaatgcccttgcaaaacactctgcctgattgtagcctctctgacgcatttttttacggtgcatcggcaccggaataataacatctatcccacatctctgtatccagtccgaatatctttccactgctgtctgtgcaaaataagccgcatactcacgtctgtttgaatacttgaacctgtacatggtctgctttatgctgcccttgtatgcaaaaagcgccttgccctgcctgtagctgtcatcttcccgcatctgcctgtgatgctcgagtgcccgtgcgcagtcgtcacaatactctcttcgctcagacaaaaccggcttcccgcagcgcatacactgtggctgctcaaccggaaagagcttttcacagcatctgctgtgtatatatctctcaaccggaccaattataccatcacataccggacagcgaggtggaaataccagattgattacgcctctcccaatatcctttattttgttcactaatccccctgactgtaatatccccatttgtaacaatattaacaaaaaagcgacaatacattcctgcaatgcagggacatatcatcgccctcacggctgcctgttataaaacgtatattctagaattcttcatctctcttgcctgcaaggaactctacatactttcctgtaccgatagcaacacatgtcataggctgctctgcagtcattgtattgatgccggtcttttcctcgataagctcctcaagacctctgagcagtgaaccgcctcctgtaagcacgattcctctgtctgcgacatcggctgcaagctccggtggagtcttttcaagcactgagtgcactgcctcaactatctgaagagttgcctcacgaagtgcttcctctgtctcctctgagctgactgtaatagtccttggaagtcctgttacaaggtttcttcctcttacttcaattgtctccggctgtgcgagagggtagcatgtaccaatcttgattttgatatcctcagctgttctctctccgatgagaaggttatgcttctttctcatgtatctgacaattgcctcatcaaaatcatctccggctatcttgatagatgtgctgactactgaaccaccgagtgagataactgctatatctgatgtaccgcctccgatatctactatcatatttccgcatggctttgaaatatcaatacctgcaccgattgcagctgcgattggctcctcgataatcttaacatctctggctcctgctgcaaatgtagcatcctcaacggccttcttctcaacctctgtaacaccacttggcacacatacgctcacgagcggctttctgaagctcttctttccaagcgccttctggatgaagtgcttgatcatcttctctgtaactgtataatctgagataacaccctgacgcaacggtctgactgcaacgatattacccggtgtccttccgagcatgaggcgtgcttcctctccgattgccttaatcttgttggtgtccctgtcaaaggctactactgaaggctcctttaacacaacaccctttccttttatataaacaagtatacttgctgttcctaaatcgattccgatatctgatccgaccattttaatagcccctttcctaccatatctttaaatttacacatacactctcttattatatacaataaatcccatttttcaaactttttttttgaaaaagctcatatttaataaaattttaaagtttatccttgtctttttccagatatggtttcaaaaactgtcctgtatatgactgttttacctcacatatctcctcaggtgtgccctgcgctatgacggttccgccgccgtctccgccctcaggtcccatatctatgatatagtcagctgtctttatcacgtcgaggttgtgctcgataacaactacagtattgcctccgtccgagagcctgcgcagtatctccacaagcttgtgtacatctgcaaagtgcagtcccgtggtaggctcatcaagtatatatatggtctttccggtgctctttctgctaagctctgtggcaagcttgatacgctgtgcctcaccaccagaaagctctgtggacggctgtcccagcttcacataggatagtccgacatcatagagcgactggattttgttctggatttttggcacatttttgaaaaactcaagtgcctcctccactgtcatatcaagaacatcgtatatgctcttgcccttgtactttacatcaagtgtctccctgttatatcgcttgcctccacagacctcacacggcacatatacatcaggcaggaaatgcatctctatcttaaggattccatcgccgccgcaggcctcacaccgaccgccctttacattgaaactgaaacggccctttttatagccctttgccttggcatcgggtgttgatgcaaacaggtctcttatcatatcaaacacgcctgtatatgtggcaggattagagcggggtgtacggcctatcggcgactggtcgatgtctatgaccttgtcaagctgttcaagaccatctataccatcgtggtcacctgcgatacacctggctctgtttaaggatttggccagatgcttgtagagtatctcattggtcaatgagctctttcccgagcccgacacgcctgtaacacaggtcatgataccaagaggtatctgcacatcaatatttttcaggttattctccctggctcctcttatcatgatatatccgcttggcttgcgcctctcctgtggcaccggtatctttattttaccgctcagatatgctcctgtgagtgattttttgcactttatgatgtcctttaatgagcctgctgccactatctccccgccgtgcgagccggctcccggccctacatccacgatataatccgctgcacgcatggtatcctcatcatgctccacaactatgagcgtatttcccagattcttaagattcataagtgcaccaagcagcttgtcgttatccctctgatgcaatccgatacttggctcatcaagtatatatgccacacctacaagtcctgagcctatctgcgtggcaagcctgattcgctgggcttccccgcctgaaaggcttgccgtgccacgggtaagggtgaggtaatcaaggccgacctgctgcaaaaagccaactctcgcacggatttcctttagtatctgatctcctatatagtgctgctgctctgtaagctctatatcagcaaggaacttcacaagctccttcacagacatggaggtcatctcatatatgttcttgtccgcaaccgtaacggcaagtgacgacggcttaagcctctgcctcttacagctcgtacacggagtaatgcgcataaactgctcatactctgcctttgccgtatcagaaaaggtctccttgtatcggcgctcaacattatccacaaggccgttccatacaaggtcatagacgccttcgcctctctgacccttgtatctgaccttgagcactctgccatctccaccgtaaaaaagcagttttttcatatctgcagataaatcatcaatcggtgtgtcgagaggaagcccatagccctcatgcagcgcacgaagtgtcgcataggtatagctctttgggtctgtacatgactgccagcccatcacctgtattgcaccctcagatatggaaagcgatgagtcaggcaccataagctgagggtcaaactccatcttgtagccgagtccgtagcaggtcggacatgccccgaacggattgttgaaggagaagcttctcggctcaacctcatctatgcttatgccacagtcagggcacgcaaaattctgggaaaaggtcatctgttctccatccacaatatcaactattgcattgccctctgtcagttcaaatacattttcaagtgaatcagtaaggcgcttctctataccaggctttacaaccagacggtctacaacaatatcaatattgtgctttatatttttctccattgggatatcctcggagagctcatacatgctgccatctacaatcacacgcacatatccgctctttttggctctctcgaacagcttctggtgctcacccttgcggcctctgaccaccggtgcaagaagctggatacgggtgcgttcaggcaacgccataacagtatccaccatctggtctatcgtctgctttgtaatggcgcgcccgcacttcggacagtgtggtattccaattcttgcataaagcagtctgaagtaatcatatatctctgtgaccgttccgacagttgaacgtgggttcttgttggtggatttctggtcaatggaaatggcaggtggaagtccctctatagactccacattcggcttctccatctgtcctaaaaactgacgtgcatacgatgaaagtgactccatgtacctgcgctgcccctcagcatatatggtatcaaatgccagtgatgacttgccggagcctgaaagccctgtaaaaacaacaaactcatctctcgggatgtcaagactgacgcactttagattgtgttcgctggcacctcgtattttgatgtattttctttctttttttgccataatttgtgttcctccaaattgcttccaaatgtcataagcttttatcgtatatccctcagtgtgtttttcagcataataagcttatccctgtactctgcagcagcctcgaaattgagctctgccgctgcttttttcatctttttctctatatctgcaatatgcttctcaagctcttttttgctcattgactccggatctttgtcaagagcattctcatcggccgctaccttctttgagatagctatgagatcacgcacggatttctgtatagtctgtggcgttatgccgtgagcctcattgtactcttcctgtacctttctacgacgctttgtctcgtcaattgcgacacgcatggagtctgtaatcttgtcagcgtacatgataacatggccctcactgttacgtgcggcacgtcctatcgtctgtataagtgaggtctctgaacgaaggaagccttccttatccgcatcgagtatggcaacaagtgtaatctccgggatatcaaggccctctctgagcagattgatgccgacgagcacgtcaaatacgtcaagacgcaggtcacgtattatctccgctctctcaagtgtatctatatctgaatgcaggtactttaccctgatgccaagctctgccatatagtttgtgagatcctcagccatacgctttgtgagtgtggtgataagcaccttgtgatggtttgcagtctccttattgacctctgacacaaggtcatcaatctgtccctcaacagggcgcactgatatctcaggatcc

SEQ ID NO: 87 - DNA, 48478 bp, unidentified
  source 1..48478: mol_type = unassigned DNA
actggtggaaaaatcagttacagttataaagacacagcaaccggacagatgaccacgaaagagctgaatgttaccactgttaccaccagtgatttagaagcgtcttcttatgcaatagcagataatgacatcgtatttaataaagacaccggtgaattcctgatgggaaaaacgctggcatcaaatctgaaatcattaggagcaacggtttctgtaaattatgataagaccggattttccaaaggagaattacgaccggagaattattttgactgtaccaataatacagatgcagctaatccaatccaatatactaattttgaaaacggaaagagagtccggcaggatattgaatataccattgcatcgaatcagacactggtggtaaatacacaggcaagcacagtgttcaattctgatatcgcaagagatttagataatcttacttccattgtgcagtcagcgattgacgcacatagtgtagtggacaacattaaggaaatgaaaggcttaagccagtattcctcaaaggacgaccaggaatatttagaaagctgtctggctgctgcccagaaacaggcagattatgcagaccatcagctgcagacagtatttaacaggggactgacaaaatttgaaggctatatgtcagatgtaaatcttgcaatcacggatgtgggaagcaagggacagcagcttgatattacaaagaaccgcatgtctaatcagcagcagacagtagaggcgttaaaatcagacaatgaggataaggatttatcagagattatcattgactatacttcttcctatactgcatatcaggcatctttacaggcggccgctaaattagaaagacagactttactggattatctgtaagaaaggagaaactggcatgaaagcagcaacaagattgtttggggaaatagaaattgacgaaagcaaaatcataacatttgaggacggaatcattggatttccggatatgaagaagtttaccttaatcttcgatgaagaaaaagaaggcagaccatccatttcctggttacagtccatggacgagccagagatagcatttccggtaatggatccgctgttcgtttgtgaaacatataatccaagtgtggaagaggaattgttaaagaatcttggaaccataaaagaggataacctttatgtactggtaacagttaccgtgccgcagaatatcaaagaacttgcagtgaacttaaaagcaccgattgtaattaatacagacacaagaaaagcgagtcagataatcgtagaggatgacctgccggtaagatacagaatttatgaaattttagaagaagcaaagaagaaggcaggtgaataagatgctggcattaacaagaaaaaagggagaatcccttgttgtcaataacaatattgagataacagtactggaaatcagaggagaccagattaaaatcggcatctcagcaccgaagaatgtgccggtataccggaaagaagtatatttacagattcagaaggagaatgaagcttctcttaaagccgatgggttagaagctttgaaaaatttactgtaaccgctaaataaatttacgggttctaccgatataagagttagaacaatggtaaacggaaatgacaagaagcacatggaggtgtaagcaatgtcaattgaatcaatcagaaacagtggatcggtgtatcagggaagttctccggttcagggaacaataagagaaagttccgcagtaacaacagaaggattacagacaagtgcagatgaaatgcagcaggaaaatgccagtgtattagaaaatgcagcagcacagggtcagaatccagcagaagaagaaaaagcaactgccgcttcctcggaacaggttaagaaggcggtggagagcatcaatcgcagccaggctcatacagaagcaatctttggcatccatgaaggaaccaatcgtgttaccattaagattgtggataaagagagcaagaaagtgattaaagaatatccgccggagaagacacttgacatgatacagaagctctgggagatggcagggctgatggtagacgagaagagataggaggtacttaagatggcaattcgagtatcaggattagcgtcaggaatggataccgagtcgattgttacacagctcgtatctgcatataatgtaaagaaaaatacatatgtaaaagcacagaccaagctttcctggaagcaggatgcatggaagacattaaataaaaaggtaaagagtctttacagtaacatgacaagcttaaagtacagttctgcgtataagaccaagatggcgtcggtgtcggatactactaaggcaagtgtcagtgcagagggtactgctgtaaacggaagctacagcttaaagattaatcaggtggcaaagtccggttatcttaccggcggccagttagcagcttctacaaccggagcaaccaagcttagcgagttattgggtgatgacagctttgccggtggaaagattgaagtgacatctgccggaaagaccagcactattgaagtgacagcagatacaaccgtaagtaattttgtttccaaattaaatgacgcaggcgtaaaagcatcttatgatgctacgaaccagagaatctatgtagcagcatccggcacaggagcagccaatgatttcagcctgtcaggagtagatgacaatggaagcacagcattaaaggcactgggcttgagggtagcttccaagagcaatacagagaattataagtcatgggcagcgtatgatggacaggatatagcgcagattcttgcggatctgcagaattcaaaggatgcaatctcagcagccaataacagcattacacagtcgcgctctaagatttccggttatacaacaaaggtaaattatgcatcttcctatgagaccatgatgaatgcatataagggacttgataatgcaggagaaatccgtgatttggatgaactgacagctatgtccaaagctgatttatccaaaacatatgaactggatgatgatggaaactttaaaagagattcagaaggaaagctgattgtagcagacgatacagtcgcagatgataaaaaagcaaccggtacagaccgcctgaatgcccttgcagccaaagcaggtcttgttgagaagaaggatgaaaatgccggagaagatgtaaaacaggttaccattgcagaatttgcggcggcaaaggctgcagtagacaagtatgatgcccaggcagctgatgacaccctgacagctgatgaaaaagcggatatgaatgatttcattaccagtgttcagcatgcttataagggggcagcagattcagaatatgcatccatagaagaacttaccaatgcatacaatgataagattacgaaagagcaggacagtattactgcccagaatcagattatcagtgacaataaggctgttcttgaaaaatatgccctgttagataacggggaagatcaggcgacgctagaggcacgtatttcctatgcggtaaaacagcttgccaatgcagctgacaagacacagtacaatacggatgcaacccgcatagatggtcaggatgcagagatttatgtaaataatgcaaaatatacgtcatcctctaactccttcagcattaacggactgaagattgaggcgctggcttccaccgaaggtagcgagattaacgtaacggtaaagaatgacgtagacggtgtatacaagaaaataaaagatttcttaaaagaatataattccctgattaatgagatgacttctctttacaacgcagattctgccaaaggatatgagccgttgacaacggaagaaaaagatgccatgacagattctgaagtcgaggaatgggagaagaaggtaaagagtgcattgcttcgccgggatgacagtctgggtaatcttttaaattccatgaccagtgccatgtataagggatatactgtgaatggcaagagttacagcctttccagctttggtatttcaaccctgggatatctcaatgcagatgagaatgaggaaaatgcttatcatattgatggtgatgcagatgattcagccgtttcttctaagaccaataagttaaaacagatgttacaggaagacccggatacagttacggcattcatgcagcagcttgttaccggtgtatacaatgagattgataccaagatgcgctctaattctctgagcagtgcaatgactgtttataatgataagcagatggcaaaagagtatagcaattacactaccaccattaagaagtgggaagataagattacttcgatggaagattcttattataagaaatttgcggcgatggaaactgcactggcaaaattacagcagtctacatcctcactgtcaggtctcttaggttcataagtgccgataaatgtcagtcacaggtatagaccggtgataatgtgaaaatacatggaggtaacacgatgacaatgaacaatggatatgcagcatatcagaacagtaagattatgactgcttctccggcagaattgacactgatgctttatgaaggtgccatcaaattctgtaatattgcaatcatgggaattgaggagaataatatccagaaagcccatacaaatattgtaaaagtagaaaatatcatagaagagtttcaggcaaccttaaatcataagtatccggttgcaaaggactttgaaaatgtgtataagtacttacaggaacgtctggttgaggcaaacatgaaaaaagataaagaaattttagaggaagtactggtacaccttcgcaccatgcgtgatacttggaaagaggtaatgaagcttgcacacagcaaataacagctatattgaaatcttaaaacagagccttacgaaaaaaatagaactgctggatacaattatggcattaaatgtattgcagaaggacatgctggaaaatccggatttagatccggatgaactggaagaaaatctgaaccgtaaggcagatctggtagagcagttatcaaagttagatgacggattcagtcagatttatgaccgggttcgagctgatttgacagagaaccgaggggcatattcggaagacattgctcagatgaagcgggatattaccgcaatcatggacaagagcactgcaatccagagccaggaaaaacgcaatcaggtattgatgcagcagaaatttacttccgtgaagaaacagattaaggaagtaaagaaatccagacaggcggtgaattcctattacagaaatatgatgaaaatgggaactccgggttccacatttctggatgataaaaagtagactggaacaatttaaaaaaattttccatttactataaagtatcgagacaaccgtccgatatatataacaagtaaacaagatattgttacttagcagatagatttgaggagcgtacggccgataagatatctgcaacaacaaacaagtagtcgcaaggaagcgacgttaaattcaaggaggaattaattatggtagtacagcacaatttacaggcagcaaacacaaacagacagttaggtatcacaacaagtgcacaggcaaaatcaactgagaaattatcttccggttacaaaatcaaccgtgcagcagatgacgcagcaggactttccatttctgagaaaatgagaagccagatccgtggtcttaacaaagcttcttcaaacgcacaggatggtgtatctttagtacagaccgctgagggtgcattaaatgaaacacattctatcttacagcgtatgaacgaacttgctacacaggcagctaacggaactaacacttctgtagatagaagcgctatccgtgctgagttggatcagttaacatctgaaatcaaccgtatccagtctactacacagttcaacacaatgaacttgttagatggtacattctctggagcaacaaatcagatgaaattacaggtaggtgccctttccggacagtctatcgacttctcaattgctaatatgtgcgcaacaaagattggtcttaagaaaactttaagtgtaagtacatttacaaaagctggttcttacatgaaatcagttcagaatgcaatcgaagttgtttctaaacagcgttccgcaatgggtgctatccagaaccgtctggagcatacaattgccaacctggataccacatctgagaatacccagtcagcagaatcccgtatccgtgatacagatatggcttctgaaatggttacatacagcaagaataacatccttgctcaggcaggtcagtctatgttagcacaggctaatcagtctactcagggtgtattatccttacttcagtaatcataagtactcaaccataaaagtaaagctgacccgaaagggtcggctttattttttactttacaggaaattgctttcctgtaaagtaaaaaaacgctccgcgaggatgcgcactgcggcgtataaggtagatgtcgcaggtgcgagaatgtgccaaggcacattctttgttacacgggtagtgataattattttcttagtgacgaaaagattagtatcatgtagaatagaagaaaagagataagacgaggtactataaagtggaagcaggaaagtatagtcaattacaagaggaaatgaaagcagtaatccggaagctgtatcagaaccagcaggaggaaacttatccatggattggtgcacatattcaggagataaaggatagcctgttagaacaaattacatattatacagaaaaaggtgaaaccgacgtagcaatacaggaacaggcagttactatattggaacatttgattcatgcatatcagaatcatcaaatcatggaactggcagattgcctgaactatgaatatggcagatatatgggatgggagatataatatgacgatatacgaaaagaatatgcaggcaatccgggaacaccatataagacttcatgaatatctggaaacggcacagccggagcaatcagtagagatacgttatgaagctgcggaagatgaaacactttatccagttgtgacaaaaggtggactggaataccggttaaacagtaaatataatccaaaggaagcatccatgcagtatatcagccagtttgaaaaagaaggctcctacagtgtgttctttcttttgggatttggagacggaagaagtattgaagcattggcacagacgctggatgaaaccatgacgcttattgtatatgagccatccgttgctattttccaaaaaacattagagacctttgattataccgaccttttaaagaagaaaaatgtgtatttgattgtagagtcagagaacatgctgcaggaatatttggaatcaggtatcagctttaacaatatccgaatgctgcgccttggcattcttccaaattatgattctatttatcccaaggaatgtaaacatatgttagaaacgatgatatatttcatgaataagacgaagatatatcggaataccatctataatttcagggaagagtttgcggcacatgccttaagtaatatgtatgattatctctggcagacagatacccattatctgaaagaacgccttgcggaggaggatttaagtgatgttccggcaatcattgtagcagcaggtccgtctttaaataaaaatgtacaggagttgaagcgggcgaaaggaaaagcattgattcttgtggtggatgcagcacttcgtgcagtggtaaatgccgggattacaccggatttggggataacaattgatgcaagagtaccagaacgcttttttgaggggataaatatcagtgcatttccatttgtttttgaagcaatatcgaaagaagatattgtcagacaacatactggaaaacatttttatgatgattttccttgcaatataattgctaagatagtaatggaaaagaaaaaatattgtctggaagaaattccgacaggtggttcaatctctactagtgctttttcactggtgaaagcactggggtttaaaaaaattgtttttattggtcaggatctggcttttaccggaggtcagacctataatagtgggttgaaaatggaacagaaagaggatgaacagtatcagaagaaacgtgtcatcgtacaggtaaagggcaatgacggaactatgctggacactgattatcagatggatatgtaccggaaatggattgagaatgaaatcttaaaattgccggaggatatcacggtaatcaatgcaacagagggtggtgcgaaaatagaaggcgcaaaagtgatgacattaaaagaagtcattgattcctgcacgaaagaaattgatttcgaaaaattattgcaggaagtaccgttggcattttcagaggaagaacggcaggatattatcaatgagataaaggaagagccaaagcatctggaagaagtaaaggagaatattaagagggcaacggaagtggcagagcagttagaacaggcatccaaatatgacgatgtagaggagcagaagaagctgctgacagaatttggaaatttcaatgaagaaatccagaaagagccggtgcaggatttattattatattataacagcgaaatagaattctcccttggagatgatgttttatctgcagatttaacaataccagacttatgcaatcgggcaaaagcctggtacaaaggctatgaagctgcggtagaccgcctcatagcagatttacatgaaaaatttattgaacgtttatagaatggataacatggtatgaatcctgtgctcaaaggtgtgggcatctaaaattttaccaagagcgttggcagcaatctgctgacgttctttttcacgggaaagataatagccggcataagtttctgattcctcataggaagaataataaataaagtcttctcctggaacaaaataattaagaaaatcctcctgataattcgtcagaaggaaaccaccgcttcccataatatcgaacgcccgcagaggaatacccttttgtatgctacgcaaggtaatgttaagattaatctttgaatgccgaaaaaccaggggcataatctcgtaatagtcaatggctcccatattttctactttgggaagctgcggagtaggattgttggtataaagtttcacttgatgcgaactggaaagcttttttaagattgcagtgcggtctaattcagccagtttccgggcaagaaaatagttggcataaatatagcgtggtgtttcgatgccgtcctcgtttggcgtatatggaacggatttttgtatatcacttaagacagtatcatttaataaaccgggaataaggaattcaccatatacctgctgctgggctgcaagaatcgcatcgaggtatccctttgtaaaggcaggaagcttctgatataagcggtcataaagcaggtggtcttcgttataaagagaaccaacaaaagaaatctcggaagagattttatcaagaatggaatccgaagcctgcatattagaaagtctttttgcatttgcggcaagcggcagatagaatacccgatcaattccaccctgctttaattcttcgtaaatcggataatcaaaaaggaaaatataattggtgggataagtaatcgtaaaggaatacaaagccaccagcggactgtcataaacataggaaacataacggagattatgccgatgggcgcaggtagccagaatcggataatagttaaaggaaaatacaaagtcgtaggaagtaccttctacggcagcatcaaaagcagcatcataggcggcacttttacggacattgtaatcctcgtgcataaataaatccgtttcaatttcacagttatgaaatgcttctaacatatcttttttggcaaaagccggtgaatcaagaaataatattttcatagagttcctcgtaaataaatgacataatttatgctttgaagtatatcattgtttgaaaatattgtcgatatatataaaagagacaaatatgagaatgtaaggagaaactaataagtggaagaaaaattactggaattgatacagaaaattgcagaagtaaaaggagacagcaatgcagaagtagaactggaaaataaaatagcttttgagactggaaaaatggaaggattgtctttgacagaaaaagaaagtattgtaaatacaattgctgcaaagcttggcggagagctttatacaaatatcttttttgcattctggtcatggatagtaacagaacagaacagttacttaatgaaacaggtaaaagaactcataaattcaagtaacataacctggcaggaaaaatattatctggcagatcagataaattttgacatgtttaataatattcatctacggacacctgaattggaagagcttgtggttgagttgcatcatatggcaatccatgagggaaaacagttagtagatgttccggcgagcattggggcggtagaacagaatgccaaaaataaagaccttgtaatcatacttaccagtcagtttctttctatgaatcatggaccgaccaaaacagcattggacagagcctatattctgcagaaatattatgggaaaaaagtattcctgataaatactgctgagatgcggggaatggcaggagagatgccggtatatccggtacgggtaggaagctatatgccacattggaatgaagtggaagagattacttatcagggcgagaagatagccttttttcaatgctatatggatatgccgaatatcgaagatacccgggctctggtacagaccatatggaagctgaatcctgcaatgtgccttaatattggagggggaagatttacatcctcttttaaaccgaagcaacatacttatgtgcggaaggattttggacttccggaggatgcgtttctgctggtggtggtcggactgcggctgacagaggaaatttccgatgaatttgttgcaatgttagattctgttttatcagagaaaatacaatgtgtaatcatgggaaaaatggttaattatgaggaacgtgcaagacaaaatgaaaagttcagaaaatatgtgcataatcttggactacaggaagatgcactggcaatctattctctgtgcgatttatatctgaatccaattcgtttaggaggaggaacgtcagcggcagagtccatgtcggaaggagttccagtactgacaacagatttgggagatgtagccttagaagtagaggatgcttataaagtaaaagattatgaagaaatgaaacagcggatttttgaactggaagcagaccacaaacagtgggaaaaatggtcacaggcagccaaagaaaaagcagaggaactgacagattctaagacagaatttattaaaattataaaacagatagaaaaatgtatggaaagtaaggataaataaaaataactaattaaattaataaaaattaccgatatattctatatgttgaataaaagaacagaagatggaggaataaaaatgttagatggaaaaactattttggttacaggtggaacaggttcatttggaaaccagtttgtaaaatatgtattggaaaattataatcctaaaaagattattatatattcaagagatgagtataagcagtttattatgagaaacaaattcaaaaagtatgatgaaaaattgagatactttattggagatgtaagagatcgtaaccgtttatatcgtgcttttgaaggtgtagattatgtggtacatgcggctgcattaaaacaggttccatcttgcgaatataatccgatggaagcagtaaaaacaaatattgatggagcaatgaatattattgatgcggcattagattgcggagtgaaaaaggtagtggcactttcaacagataaggcagtaaatccaattaatctttatggcggaacaaaacttgtttcagataaattgtttattggagcaaatgcttatgctggaacaaaagatatcagtttttcaatcgtacggtatggaaatgttgccggcagccgtggctcagttattccgtttttcagaaatattgtagcaaatggaggaacagagcttcctataacggattatgcaatgacaagattctggattagtttagatgaaggcgttcagctggtaataaaggcattatctgaagcaaagggaggagaaacttttatatctaaaattccttcatttaagattactgatttggctcaggcaattttacctggatgcaagatgccggaagtgggtattcgtgaaggagaaaaattacatgaggtgatggttacaaaagaggattctttatcaacttatgaatatgataagcattttattgtatatcctcatatggactggtggaattcggctaagattcaggctggtggtaaaaaagttgagccgggttttgaatatagttctggaaaaaattcccagtggctttctgttgatgatttgaagaaattgttgaaagatgtggaggaacattaattaaggaatgaatattgcaatcataacagcaagaggtggaagcaaaagaattccacataagaatataaagaaattttgtgaccggcctattatagaatactccattcaggctgcaaaagaagctgatatttttgatactataatggtttctacagatgatgaggagattgcccggattgcaaaatcggcaggagcagaagttccctttatgcgaagcgaagatacatcgaatgattatgcaacaacggcagatgttttgaaagaagtattgaaaaggtatagtgaactgggaatgacttatgagaacgtctgttgtatatatccgacagccccatttgtaacaggaaaaaaattacaaacagcattagatatattgatgaaggagaaaagagacagtgtgatgcctgtaacgtcattctcatttccaccactgcggggaatggtgataaaagatggaactttaaattacaaatgggagcaatatgcaatgatgcgttcacaggacctggaagaaatatatcatgattgcggacaattttatatgttgcgaacagagccatttctacatacgggaaaaatggtaaccgggaataccggagcgttggttatttctgaactggaagttcaggatattgataatgagacagactgggaactggctgagatgaaataccgattgttaaaaaagaggggtagattataaaatggaaattaaagggcgcaaaataggaaaaggtttcccaacatatattattgcagaaatgtctgctaatcatgcaggagatatttcacgggcaaaggaaattatatgtgcagcgaaggaagccggagcagactgcattaaaatacagacatatacgccggatacattgacaattgattgtgataataaatattttcatatttcagatgggacatggagtggggaaaatctatatcagctatatcaaaaagcttatacaccatggaaatggcaggaggaattgctggaagaagctgaaaaagtagggatagatttcttctcaacaccatttgacaatacggcggtagactttctggaggaaataggtgttgaattttataagattgcttcttttgaacttgtagatattccactgattgaatatgtggcatctaaggggaaaccagtgattatgtcaactggtatggctactctggctgaaattgatgaggcagtaacagcagtgaaaaggcagggaaatcaaaatgtggcattgttaagatgtgcaagtgcatatccggcgataacagatgaaatgaatcttaggacaatgcagaatatgggagaaacttttaatgtgccagtaggactgtctgatcattctatgggatcggtgggagcagtaacggcggttgcacttggtgccagtattattgaaaagcatttttgtctggatcgttccattgaaaatccagattcttcattttcgatgaatcccaaagaatttgctagtatggtaaaggatatcagacaggcagaaaaagcaattggaagagtgcaatatggaccgactgaacaggaaaaaggaaatttacaattccgtcgttctatattttgcgtacaggatatacaaaagggacaaaagataaccgaagataatataagaattatcagaccagggaatggtttgcaaccaaagtattataaagaaatattaggacagactgcattgcgggatatagaaagaggaacgccgctttcttttgagatgataggaaaatagaaaaatgaaggaatatttaagagaagcaacaaaagatgatgtggatttattgtttaaatggacgaatgatcctgcagtgaggaaaaattcattttcttcagaaaaaattacttatgaagagcataccagttggtatagaagtctgttggagaataaaaactgtaagcaatatatctatatgtgcggcgattgtccgataggacagattcgtattgtgcaaaaggaaaaaaatgcggaaatcagctatagtatttgcacagaaaaacgttcacagggatatggggcaaaaatgcttgaactggtgaaaaatcaggtgtttaaagattttccaatggtagataaactgactggattggtaaaaacggataatcttgcatcaaaaaaagcatttgaaaatgcaggatatgaagaaaagtacagtatgtttgaatttgtacgagtggattaaagtaatggatgaaatatatataagaacagatatgaataatcagattgcaaccggacatatgatgaggtgtcttgcaattgcagatgcattacagaaaaataggattaaagtaaactttattgttgcagatgaaagtgctttagaacttttgaaaaaatatggatataaagctattatactatatacaaaatggaataataaagaagcagaattgccagttctgaagaaatatattcagaagctgaatattaaaaaaatgctgatagacagttatgaagtgacagaaaagtatttaagggaagtacacaacctagttcgagtaatgtatatagatgatttaaacataaatccatatgaagtggatgctctggtttgctatgcaaattactggaaaaaatttcattatgatcaatcagacaataaaataaagaaatatttaggagtaaaatatgctccgttacgaagtgtgttttggaattgtgaatctcataaaattaagaatagagtagaatgcttgttattattaacaggtggaacagatccatataatattattcagagagtattagatggtatagaaagggacaacttcttaagaattgaggttatatgtggagtttataatcaaaactatgatagtttgaaagaacagtatgggaacgaaaaaaagattttttttcataaagcagttgacaatatagaaagatatatgcaggaagctgatatagcgatttcagcaggtggaacaactctctatgaactgtgtgcgttgggtgtgccaacaatatcttatgcgtttgtagataaccaactggacaatgtaaaacagtttcaagcagatgatattattgattatgtgggagatgtgagggaggagaacattgtagataaaataaatatgtatttaaagaagtacatgaatgacatggaactaagaaagaagaaatcattgcaaatgcaaagatttattgatggaaagggtgcagaacgtatcgcagaggcactgatagcattatagataattggaggcggtatagatgataccatatggaagacagactatagaagatgatgatatacaggcagtgattgaggtgttaaaatctgatttcttaacaacgggaccgaagagtacagaatttgaagaagcagtaaagtcttataccggaagcagatacgcggttgcaatatcaaatggtacatcagcattgcatgcggcttgttatgcagcaggcattggaccgggtgatgaggtaataactacaccacttacttttgctgcatcagcgaattgtatattgtattgtgggggaacaccagtatttgctgatatagattcgaaaacttataatatagatccagcagatattgaaagaaaaataacggcaaaaacaaaggcaattattccggttcatttagcaggacagccttgtgacatggaccacattcatgagatagccagaagacatcatttgttagtgattgaagatggagcacatgctttaggatctgtttataagggaagaaaaattggaacattatcagatcttacgacatttagttttcatccggtaaaaccgattaccaccggagaaggtgggatgattatgacaaatcaagaagacttatatcagagaatgctgttgttccgttctcattgtattacaagagatcccaaattgatgacaagaagtgatggaccgtggttctatcaacagttggatcttggatacaattaccgaattacagatattcaatgtgcacttggaataagtcagatgaagaaactggatcgtttccttgcaagaagaaaagaattggttcagaattataatgaggcatttcgagataataaagacattattactccatatcagatggagggaaccgagagtggatggcatctgtatatcatacaagttccgcatcatgaccgaaaaaaggtatttgaacagttaagagaaaagggaattggtgtaaatgttcactatatacctgtttatatgcatccttattaccagagtcatggatatgaaaaagtgcattgtaaaaatgcagaagaggtatattcgcatatcatcagtttaccattatatccgggattaacggatgaagaacagagcagagtaattgaaacagtacaggaaaccattagacaggtgtaggagaaaaataaaaaagcatactggcatagctgattaaagctgtgccagtattttttgaagctgcttctcataagtataatgatttaatactttctgatagccgttttcggcaatttctatccgttccttttcatgggaaagatagtattcgcatttagacaaaaggtcatcaggactggtatagatgtctaaatcttctccaatggtaaaacattcgcttaaatcattctgataattcgtcagtaaaaagccgccacatccaagaacatcaaagacacgaagcggaatgccattccggatggatttacaggtcatgtttaagttgattttgctgtgagcaaagacctgaggcatctccgttaaggttttaacccgtccgtgattgtggacaggaagaccagatgaattgcttccggtgtataagtccaccgtaaagtgggatccaagaaaggataaaaggtgttttcgttcattggcagttactttcatgccaaggtactgctgtgcgatgatatcccggtcaactcgtctggctttttccggtggaagataataatccggcatacagtcgataaattctttgacaatagaatctggcagtagttcatttaaaagaaatgcaccataaatctgttcctgcgcatccattattccatttaaatatccttcgagataaggggaaggattctttatggcatcataaggacatttctctgtataaagggagcccacaaaggaaatatcacttttaaaggagtccggattagcatgagcaagaacggaattccaacggcttacattggttgccagcggcagaaaaaaagtgtgagttgggttatatggagcaaagtcctgatattgcatggaatcaaaaagaaaaatacggttccattcattcgaataggaatcagaatataattccataacaggactgtctacggtccagcagatataaggaatcttcataatattacagatttccgataaaacaggataaaaatttatcgagaaaacaccgtcaaaagaagactctaacagtgcatcagaaacatgtttgataactgtctgcgcgggaatatttttatcggtaatttcaaggttgatagagaatacttcatgccctaaatgcttcatggcttcaataatatccggttcgcaaatgcttccataacggtagaatagtattttcatgataaactttcctcttccttggatatagagtataataactataactattgtaacgaaatcggtggaaagaaacaaggttagaataaggagaaaacgtcgcaggacgaaaagaaaatatatggaacagttttttgggattttacaaagcggactggggcagctggatgcaacaggggaatatgaagaaggaacgctgcatgaactgaaagaaagttatgacttattagaggaaaaacaacagggggatgttttgcggattatagaacagtctcttaaaaatcttccggatacggttcttatctatatctggtcgacactgttggctgttttaagggacgaaaaagtaattccgtttatcgaagtgttgatgaatcatgagacttttacgctatggcaaagagcagaattgatgcatcagcttcagagaactatttttacaaatggactggctgtggatgaaaaggatgaatacaggagaaatgatagaatctataattccattatggacaaaatccgggaagaaaagaaaaagattttttcctatattccattggcaaaaagacaaaagaaagtagttattattttaaaccagttagttggcaggcagcatgcacctacacgaattattttacagacaaaagaatatttagaagcgtttggttatgaagtcaaagtatatgttggctttatgccaaatgagaatagtggaattatgtggtacaaacaatgtatctggaataacttcatggagcggcagggttattttaaatgcaatgtagaaaatggtcggatagaaggctacaatgcgcggattgaaaatgataattttgagaaaaatttagaggatacagcagaacttatttacagagaagcaccggaatgggtattggaggttggagaagaaacatttcttgcagatttatgccgggagtttacaacggtagttacccgggggtgtgttaggacaattccggtaaccaatgcaccgattatcgtattggcttcggattataccttggaggaagaacaacgatatcagaactggctgaaaccttatcagcagtttgtagaagtaaaacattccattgtgggaaatgcagtggttgtcgaaaaagagaagagagaaaattatgggattgcagaagatagattcgtgattttactggtaggaaaccggctggagcaggaagtgacagaggattttcttaagaagatttatgtgatgttagaggaaaaccctaaagcagtaattgcagtcattggaaattgcggggcactggaaaaacggatagcagaagcataccggaggcgtgtttattttcttggatataccgaagaattgcagaaaaccatgaccataggagacttgttcttaaatccgccgagacagggcggtggtaccggagccatgtatgcaatcttacaggaaatcccggtggtaacactggacaactgtgatgtgcaggtaaatgtgggcaaggtattcacctgtgattctgttgagtcgatggtaaatctggtacatcaatattgtgaagataaaggatttatggagaagaagaaggaagcatgccgcagaaaagcagaggaaattcttgcagtagatgaaaaagaaaactatcgaaggttatgtgaatttgtggaaacttatacgataaggcaggaaaagcaggtacagcatccggacgggagataacatggagcatagaataagagacgcaaaagggacaattttaatctataagggagaaccaatctgctataacattttaaatacatttgcagagcagctgggagaagcgttacagaggcttggagaagaggtagaatattttgatgtgaagcagagcggcgaagctgctctggcagcttatgcaggaaaaacatatcaggcggtaattggctttcagagttatctttttgatatttatcttccgaaggcaggcatttatttacatgatttgataaagggaccaaaaataaatttccagtttgaccatccaatctggatgaagaatcattatatcagaatgccggagcattgatatagtgcaacccatgacagaaattatgcggcatttatagaaaagtattatccgagaattgcaggaagttccattatctttccgggaggttgtgagaaggcagcaggagagaatggaaaacaggaagcagagcggaatttgaggggggcgcaggataaaaaggaatatcagatatcctttattggcacctatacggactatcggagttatctgccactgatcagaaatagccagggaatcattaaaaagatagcagcccattttctgtttcggatgaaacagcacccggaagagactgcggagaaagcattggaagaatccttacgaaaagatggaattgtactatcggatgaagaatttttagaagtattagatggcgtcaagccaatgatttattgcatcatgtcctattaccgggaaaaagcagtaaaggtaattttggaagcaggcattacactggaagtattcggggacagttggaagaagagcccgtttggggattcaccatatcttcgtatccatgaagcggtggatatgagagaaagccttgaagtcatggaaaaaagccttatatcttttaatgtgatggcctggcataaggatggatttacggaacggattgcaaacagcatgttacagcatagcgtggtacttaccgatgaaagcacttatctgaaagagcagtttacagatgggaaagatattctcatgtaccggttgaatgaactttataagattcaggaactgcttgcggattatctggaaggggcaggaagagataacctgcagatgattgcagagaatgcttacaggaaagcaaaggaaaattatacctgggagcagagcgcgaaaaagcttcttgcatttattgatgaaatagatgccaaggaaagaaaatgcagtgaaaagtgaaaatactcttgtgaaaatgaaggaatgaaccgatatacattctatagaaaggcggcacaggatgtgccagggtgaaaatatcatggaagataatagaagagaagaaaaagaagcgttaaaagtattgacggagtacagcccgaaattattaaaatctatgagaaatgtaatggaagaattacatggaaatcgtcagccggataccgatgaatatcttttgagcattatcaaaggtatgaactgggaaattcaggtcttaaatggaacaatggactatctcaatgaaatcgagcagcttattgataagcaggcagcaaatgctctgtttgtaaatttcagcaaaatatatcagaaaaaagatgatgagaagcttgcagaagtctttgagaaggacatgataccattctttgaaaaactggaagaagtagccaaagttaagatgaattaaaaaactactgatatcgaaaggtatcagtgtttttcgttgcaaagcaggagagaacgatgaaaatattattctggcaatggcattcttttatgggaaaaggaatggaacgtgcgttacacagattgaatattgcttatgataccttcttttatcagatgaatgactgggaaacggatgatcggtttgcagagcagttggaaaagaggatttcgcagcaggcgtatgatgcagtgatctctataaattttaatccggttatttctgatgtatgccagaatcataaactgccttatcgtgcgtgggtctatgattctccgattcatatccgcaatgtacaggcactgaagaattcctatacaaaagtgtatttttttgaccgtggacaggcagaagaatatcaaagacagggaatcaatgccggctatttgccactggcagcagatgtggaaacattttatccggttgcagttacagaagtcgataaaaaggaatatggagcagagatttcactggtaggaaaattatatcagactgtctatccacagtatatggcacctttgaaagagtatgacagaggatatttggaaggtgtgattgcagctcagaaaaaagtatatggcggctatttcctgccggattttataacggatgatttgatagagagaatgaatgcggcttatcagaaacagtggaatggagagattacggtaaatcatcgtgaaattgaatttctgctggccagtgagattacacgaagagagcggcaggaaatattaacgcttctttccaatcattttgatgtagcactctattccggagaacagaatgtagccataccaaagataagaaagaagaattatatcgattattatacccagatgccaaaagtatttaaatgctccaaagtgaatcttaatatttcgctgaaaacaatccggacaggaattccactgcgtatacttgatattcttgccagtggtggatttgtgatttcaaactttcaggaagagttggcagagtacttccggctgggagaagaaatcatcacttatggagatatagaagagctttattatctggtgaattactatttgcagcatgaggaagaacgaaaagagattgcagccagaggtttacagcgggtaaaagatgattttcgatttgaagaacggatgaaagtaatacttgaggacttatagcatgagaaaaatttctgtatgtatcatcacgaaaaatgaatcagaaaaattgaaaaaatgcctgaaacatctgacgggatatggctttgaaattgttgtggtagataccggctctacggatgatacggttgccatggcaaaaaaatatgcagataaagtatgctatttcagctggtgcaatgatttctccgcagcacggaattatgcattgactctggcgtccaatgacattgttatgatgatagacagtgatgaatatttacaggaaatagatacaggcgagctggaaaatttgttaaagcagcatccttctatggtagggcgaatcaaaagaattaaccgcgtttccgtaggagagcaggaaacagaatacgtagaacggattaaccggatattctccagacagcaatatgaatattcgggcagtatccacgaacaagttacagcaaaaaataaagaagagtatgaaacctaccttgctccggttgttatcttgcatgatggttatgaaggcaccgaagaggagcggaggaaaaaagcagaacgtaatctgaagttattgttaaaagagttggagaaccatccgtatgatacttatttcatgtatcagattggaaaaagctattatatggcagaggattatgaagaagcaatccggtattttgaaaaagcattgggctatgacttgaatccaaagctggaatatgtaattgacatggtagaaagctatggatacgcacttttgaataccgggcgggttgaaacggcattgcagtttcaggggatttatgaagagtttggagactgtgcggatttcaagtttctgatgggactcatctatatgaataatgaacgttacgaagaagcagtagctgagttcttaaaggcaacggagtataagagcgcacggatgacaggaacaaattcttatctggcatattacaatgcaggcgtaatccgggagtgcctcggagacatcggacaggcactggaatattaccggaaatgcggagattatgcaaaagcacaggagagaatcaggaaaatagggggaaaatcataaatttctaataataactaataaataagtatataattaccgatatatcaatataagtaattaatgatgaagccgtatcaaaaggaattgttcggcgcacgaagttttgaaatagatgaggctttttgcgtggtgcagaaagtcttttttaattgtaaaatatgagaaaagtatttcttatagttggtggagaatataggaggagaaaacgtgaaagttgtaatacttgcaggtggtctgggaaccagaatcagtgaagaaagccatttgaaacccaaaccgatgattgaaattggaggggcgccgattttgtggcatattatgaaatattattcatcttttggatatgaagaatttattatttgttgtggttataaaggatatgtaattaaagaatattttgcggattattatctgcatcgtagtgatgtcacatttgatttttccaagaataatgaaatgattatacataacaatgtggcagaaccatggaaagtgacagtagtggatactggactaaataccatgacaggcggacgcttaaagcgtgttcgaaagtatattggagatgaaacttttatgatgacttacggagatggagtttctgacgtgaatcttgataaattagtggcatttcataaaaaaaatggaaaatatgctacattaacggctattcagcctggtggccgtttcggcgttctggacatggatgatgaaggtactgtaaaccgttttgcggaaaaggcaaaagaagatggcggctggattaatggtgggtttatggtattagaaccacaggttttggattatattgatggagatgctacattttttgaaaaagagccattggaaagactggcaaaagaaaatcagctggcggcatataagcatgatggcttctggaaatgtatggatacattgcgggataaagaagcattggattatttatggactactaatcgggcaaaatggaagaaatgggaataaggagaaagaaaaatggtaacaaagcagttagaaaaagatttggaatatacatatgaaagattgtcggatgaggaaataagccggctggagaattccagtattttaattacagggtgcgcaggctttcttggattttattttgttcattttttttatcagtttcgggagaaacttcatttaaagaaaataatatgtttggataattttatgctgggttatccaaaatggattgatgaaatggctgcagatgaacattttgtggtgaagaaatttgatattatcaaagatagaattgagacaattgaagaagcaaaagaggcagattatattattcatatggcttcaattgcttcaccgatgttttatcggaaatatccaatagaaacactggatgcaaatatctggggattaaggagacttttggattattatatggaaaaagaaatgaaaggttttcttttctactcatccagtgaactttatggggatccggcaccggaggcagtgcctacttcggaagattataatggaaatgtgtgcgcaacagggccaagagcctgttatgatgaatccaaacgttttggggagactatgtgtatgctgtttgcacagcaatatggaatgccaattggtgtagtaagaccatttaataattatggtccggggatgaagataaatgataaacgcgtgccggcagattttgcaaaaaatattgtagatggaaatgacattacaattctttctaatggatctccgagtcgtactttttgttatattgcagatgctgttgccggttatttgaaaattatgctttatggaaaatatgattatttcaatattggaattgaaaagccggagattaccatcagtaaacttgcagaaatatataaagcagttggacaggaaatctttgattataaaggtgaagtgaaatatgcaatatcggaggacaaagaatatcttacaaataatccacagagacgttgtccgaatattgaaaaagcagggaaaatacttggatataagccgggtatatatgttgaagaaggagtaagaagatttctccagtttattaaagaaagtccggaggaaaatttattatggtaacagtttttggattgggatttgtagggcttacaacagcgcttggttttgcccatcttggatataaagtgtatggaatagatgtggatgaagaaagaaaatccatattaaaaagtggaaagcttccgtttctggaaccagaaatggaagaggtgttgcaaaagcatctgaataataattttattgtttcggataatcctaaagaggcgattgcagatagtgaatatgttttttattgcgttggaacaccatatggaaaagatggcagtgcagatttgacatatctgttttcggcgatagatacaacagtagatgcaatctcggatgaaaaatacagggttcttgtaacgaaatcaaccattccaccttctacaactgcagaaaaaatattcccttacgtgaagggcaagggggcggtagcagagcatcttggggttgcgaataatccggaatttttgcgtgaaggtcattgttgggaagattttattggagcagacagaatagtattaggatgtaatgaggaacgttcaaaagagatgctggtgaagttgtatgaaccaatgcagataccaatcaaatgtgtttctcattctaccggtgaatttattaagtatttatcaaatacactgttggcaacgatgattagctattctaatgagatggctgaaattgcagatgccataggtggaataaatgtggcggatgcattccatattttacatatggataaacgatggaatgattgtaatatgacaagttatgtgtacccgggatgtggttatggtggatactgtcttccaaaagatacctgtgcactttactcacaggcagtagctaaggggtatgaaccagagatattgaaacatgtaatagaattaaataatgacagggcaaaatcgattgcaaaaaaaatcacagacaatctttcagaaggacagacgattggaattttgggactggcttttaaacctctttcagatgatgtgcgtgatactgctgcagcgagaattatccgtgagatagaaaaacttggatatcacaacatttgtgcatatgatccggcagcaatgaaagagtttacacgtcgttatccggatattgcaataacagaaaagtcatctgcaaaagaagtttatgaggaggcagatgtaatagcaattgtgacagcatgggaggaattccgggaagtcctatcttttggaaataaaacagtgattgattgcagatatatgttataggagcattggaatatggaaaaagagaaaattttaaatctggtaagagagtattatcgggaaaaccatatgcggaaggaatatgaacctggagaccgcatcaattatgccgggcgggtatatgatgaagaagaattggtaaatctcgtagattcgtctttagaattctggttgactgccggcaggtataccaaagaatttgaaagtggattgggtcagtatctgggagtgccatatgtatccgtagtaaattccggttcatcagctaatcttcttgcagtggcagcactgacctctccattgttaaaggagaggcggttgcaaaaaggagatgaggtcatcacagttgcagcagcatttcctacaacagttgctccgattatacagtgtggtgcagttccggtatttcttgatatagaaatgccgacatacaatatagatgttgcacatttggaagaggcatacacaaaacgtacaaaagcggtttttttagctcatagtttaggcaatgtatttgatataaaaacagtaaaggctttttgcgaaaaatacaatttatggcttatagaagataactgcgatgcacttggcggtgaatataagttgaacggagaatggaaaaaaacaggaactatcggggatattggaacttccagtttttatccagcccatcagatgacgatgggagaaggaggagctgtttatactgcaaatccattacttcataaaattgtccgttctatgcgtgactggggacgtgaatgcgtatgcagcggaggacaggataatttatgcggccatcgttttgatggacagtttggcacgttaccacagggttatgatcataaatatgtatattcccatctgggttataatttgaaaattacagatatgcaggctgcaataggtgtggcgcagcttcacaagttgccgggatttgttgaaaaacgaagaaataattggacttatttaagagagcatttaagtgatatagaagataaattgctgttgccagaaaaagaaaaagatagtgaaccatgttggtttggttttattatgacagtaaagtcagagagtggaaaaaacagaaagcagatagtggattatttagaaaagcataatattcaaacaagaaatttatttgcaggaaatattatcaggcatccatgctttgctaatcttattgaaggaacagattatcgtgttgtaggtgggcttaacataacagatcaggtaatgaatgacagtttctgggtaggcgtgtatccgggaatgacaaaagaaatgttggatgaaatgatccgggtaatcaaggaagctgttgtatagaagaaaaatgcaaagaggtagaaaatgggaaatatagaagtgctggattgtacactaagagatggggcatatattgtagattccaaatttggggatggagcaatcagaggaataatatataagcttcagaatgcaaatgttgaggtaattgaatgcggatggttaaaggattatgaccatgaagaggggagttcattttatcatttgcctgaggatgttttgccatatattgtagaaaagaaaaaagagtgtacttatgttgcaatgatagactggaaccgatatgatgacagcgttttgccggaatatgatggaacttctatagatgccataagagttgtatttccgtatggaaaagtaaaagaagggatggaaattgcggatagaatccgtaagaagggttatcggatatattttcaggctgccaataccctggcatataaagagaaagatttaaaagaacttgcagagaagatgaataaatttaaaccggaaggtctttccattgtagatacttttggagcaatgtatgaagaagatttgttgcggattgcaaagatactggacgctggtcttgaaaaagaaatccggctgggatttcattcgcataataaccagcaaatggcgtttgcgaatagtatgacatttgtgaattacttttcggaaaaagatagaaatataatggtagatgcaagtctgtgcggaatgggacgtggtgcaggaaatacaacaacagagctgcttacaagctttttaaaccgaaagcatcataaaaattataatttggatgaggtgttagatgcgattgatacttatatggtttcattccaggaaaaatataagtggggttattctacggaatattttattgcagggacatattgttgccatgtgaataatattgcataccttttaaataatcatcgtacatcagcaaaggatatgagaaatgttattgcttctttatcagctgaagatcgtttaaaatatgattatggtttgttagaagaaaagtatattgaaaatcagagcagactggtagaagatgacgaaaatgtaaaacaactgacggaaatctttgcagaaaagaaaattctgcttgttgcaccgggaaaatcatctgtggattcatatgaaaaggtacagacagttttaaaagaaaagaatgtcattacaatagcagttaatgctattttaccagattataaatatgattatctttttttctcaaacagagtacgctatgaatatgcaaaatctgcatatgcaaaagaatttgataatacaaaaagaattgtattgtcgaatgtaaagacaaaggcgcaggaaaaagaaatgattgtcaatttcaatcgtgttattaaacgtggatgggaacattttgataatgcggtaatgtgtatgcttcgcctattggaaacaataggagcaaaagaagtatatattgcaggatttgatggttttaaaacagcttacaatgagagttatgcagatgaatcattgccaactcttagttcggacatagactatgcaaaacttaatgaagaaattaaagatatgtatcatgattttgtagaaacagacgcaggaaaaatgaatattatgtttgttacgagaagttattttgaaaaagtataagaatacaggtggagaaaagcgatgaaagtatcggattatatcatagaatatttagcatccataggcattcaggatgttttttatgtaccaggtggtggagcaatgcatttgaatgattctttgggtgcaaatccgaaaattgaggcagtttccatgatttttgaacagggagctgctgttgcagcagaggcttatgccagaggaaaagatggatatgctgcatgcctggtaaccagtggaccaggagctaccaatgcattaactggacttgtaggagcgtatcttgattcggtaccggtaatttttatttctggtcaggtaaagagggatgatttggtagaaaatcagggaatacgccagtttggtattcaggaagtaaatattatgtctatggtacagtcctatacaaaatatgctgtacagatacagaaacccgaagacattgtctatgaaatggaaaaagcagcagcaatggcagtctatggaagaccaggtccagtgtggattgatgtaccacttgatattcaggctagtatgattgatattaataaatgtgcaaaatttcaggataatcaaattccaatgcaatatgctaaaggagaaagtatctgtggaactggattggaagaggaatatattgcaaaagaggaagatatttcagaagttatcagcttaataaataaaagcaaaagaccaattctttatataggtcatggcatccgactggatcattgtatagaagaagcaagaaggctgtatactgcactgggaattcctgtggttacatcctggaatggtgtagatttgattgaaagtgaccatccactgtatgcaggccgtccgggtggggtgggccatagagctgcaaatatgattgtgcataaggcagatctggtaataagtattggaacaagattcaatcttttggcaacaggatataatttcgcaagtttcctagaaaatgcaatacatgttatggtggatattgatgagaatgaaatgaataagaaatcacttcatccagagaaaaaagttgtcgcatctgctaagtcctttatctgcaaaatgcttacacatatggacaaagttactttgacagaaaatagcaaacaaaaatggatagacgaatgcaaaaaactccaggaagaatatccaatccggataaaggagcaggaagcaagggaaggatttgtaagtaattacaatctaatcgaagaaatttctaaacagatgaattcctatgatatgtatcagtttactagttcaggtacaacggtggatatcgccatgaaagtatttaaagtgaagtggggacagcggacgtttcttaataaaggattggctgctatgggatatgatgtaccggcttctattggaagtgcgtttgcaaataaacgtatttatgaagcgtcaaaagataagaagataaataaactatgcaacagagctgtttcagatagagcaaaggtggtttgtgtaacgggagatggaagtattgccatgaatatgcaggaattggaagtaattgcaagatatcagcttccagtcaaaatatttgtatctgacaatgcaggttattccatgatatatggatcacaaaatggcaatttccaccgacttacaggatgtaataaagaatccggcttaacacttccgaacatggaaaatattgcaaaagcatttggaatcaaagcaatgtccattttgaatgaggaaaatctgaaagaaaaaatagccgaggttctgcgaagtgatgaacctgtagtctgtcgcgtgaatactgatatccagcaaaaaatattaccacgtcagtgcaattatatgagagaagatggacagatggcgtcgagaccattgtatgatatgacaccattgattgaaggattggagatataagaagatttaacaaaagtctggaaatgaagggtactaaaagaaaatgaaaataattgtaacgggtgcaacgggttttataggaaaggcattgtgtaaagaactgataaatgctgggcatgagatatttgcaataatcagaccaaatagtagcagaaaagaaagcctgaaacaggaagtgaatacatggggaaagaatcctcataaaatacaattgcttgaaatggaaatggaagaattggaacagctttcgaaaaaaataggacaggcagaccttttttatcatttggcatggaatggttctgctggaactgatagagaagattttgaaatgcagtataaaaatattgagtatactgcaaaggcgattaaaacggcaaaagaatgtggttgtaaaaagatcattggtgcgggaagccaggcagaatatggtgtggtgaaggagaccgcaaaggaagaagaaacaaatccacatccatttatgatgtatggtgcagcgaagctggcagcgtatcagatgggacaagttttggcaaaacaattagagataccattcatctggccaagaatttatagtgtatatggcgtgggagaaaatcctggaacgcttgtaaattatgtgatagacacattgaaaaaaggggatattccggaattatctccatgtgagaacatgtggaattatatatatattacggattgcgtacgtgtattaagacttttaggagagaaggatgtttcagagggaatttaccatattgcgtcagatgatacgcgaatattgaaagaatatgtagaggaaatccgtgatattgtagcacctggaagtgctttgcattttggcgcgaaacaaagtaatccaaagagaactttctggttagaaccggatacagaaaaaataaaaaaaatagatagagaaagtgaagaggtatcattttttcagggaattacaaaaaaattacagggaggaaaatggtttgtcggagagaaatgagctggaaaaagcaattgattatgcaatagaaacagataattgtttgttttatgaggaagctaaacgatggaaagaagtggagcatgcaaaaaaagtatgtgtttttggaacaggttctttttttaagggatatcaccattttttaaacaaaatcgattttgtatgtgataataatagccgcatatggggaacggaggtttgtggttataaatgcatatctcctgctgaattaagtactatggaagataccatagttattattatggttagccattatagggaaataaagaagcagttagagaaaagaaaaataaagtttttttattttggagatttgttttacaatgtttattcagattttcacaagggattgtggtttgaaaaaaacaaagaaaaaatactaaaagtatatgatttgctgcaggatagccagtcaaaaaaaatatataaagaagcaatatgccttcgtattgcgccacaatattcagaaacattgtggggagagatggaaacaggtaatgaatattttaatagtgaaatatttcaatttgggaaggatgaagtattggttgatgctggggcatataatggagattctattataaattttgtggaatgtgtaaattatgaatatgagcatatttatgcttttgaattggaaaagaaaaattacgatgaaatgcttcaaaatttaaaggataaagatataaaaaaggttagtgtttataatgttggaacttcaaacaagtcaaaagaaattagatataatggagagggaacgggaacgcatatagcaggagatgggaaaataggaaaattggatgctatagataaggttataggtgaaaaaaaggttacatttataaaaatggatgttgaaggtgcagaacaagaatctctggagggagccaagaaactaatacggtacaatagtcctaaattgtgcataagtgcataccataggctggaagatttatgggaaatacctttgcaaattataagttttgataatagatataaattatatatgaggcatcattccccgttagcatgggatacagattgttatgcagcattaaaggatgaggatatattttatggagaacagtaaaaaagcaagagcattagagtttacattagcattgggatgcagtttgcagtgcaaatattgtccccaggaaaaattgcagaaagcatatagattacataaagttagaaaaatgagtatggatacatttaaaagatgtttatcgcagattgaactaggaggaggcgtgattatttcgggaatggtagaaccatttcataatgaaaattgtgcagaaatgataaaatatgcttttgataatggatacaaggtacgcttgtttacttcgttaacgggagtgacagagaaagatttagatattttggaaaaaatatcatttgatgaattgacgatacatattccagatcagaagtttaattcaaaatttcgtttgacaaaagagtatcttaatatatttgaacaaacgatgaagaggctgggaaatcaaattagtgcatattcggttcatggagaaattcatgaaagtgtaaaagatatgttacttaaagataaagttattactagttcgatgtttgatagagcaggaaatttagaatatgaagaattgccaaaaacaaaaccaaaaggaagaatccgatgtatggcggggtctgcaacaaatataggtatatggacgccagaagtattgccggatggaacagttacattatgttgtatggattatggaatgcaacatgtattgggaaatcttgtgagacaagaatggaaagagattgctgagggagaggaatatcaaaaaatactaaaaggttttgaggatgattcaataaataatttgtgcagaagttgttcaggagcgagagaagaaaaaaactggccttcaagcatggtaaaaaaaattatcgaacaatacaatgaaaaaggggttcttcccaaaaaaaatgcagaaaaatggagagaatacatagaggcgatagcaaatgcaaagcatattgcagtatttggcatgggaaggctgttttatgatcagtatttttatggggcatgggatgaagtgatgcaagcagaggtcttttctgataataattcaaatatgtgggggcaagagatacagggaattccatgtgttaacccagaaaaattaaaagaatatgaggatttgttagttgttgtatttgtaaaaaatgacatggaaataggtgaacaattaaaaaaaatgaatataaaaactataattcctattatgaatatatactcgatattatagtggaaagcacaacaaggagaaaagtaaaatgtttaatttaggagagtgtcatagtttcaattgcaacatttgatacatgcccaattaagtaaaataattgctaattaaggaggctaaaagtgaaaagatacccattagtaagcatttgtgtaccaaattataattatggagaatatttggaatattgtttggatagtatattaaatcagacttatcctaatattgaagttctttttcgggacaatcaatcgacagataattcgtatgagattgcattgagttatagggataaattccgcgacaaaggtttttattataatgtgtcccaaaataaaaggaatataggaagtgatggtaattcaaattatctatcgagagatatagagggagaatatatattttttctcgctagtgatgatgcaattgaaccgacttttattgaaaagtgtattcgtgtgtttgatgaaaatccaagtgttgcaatggtaatggttcataggagcgagattgatgaatttggaaatattcatcaattacccccattttataatcagaattgtgttgttgatggggaaagtcaggctgcagtgtttatgatggcaggaatagcaataccaggtcagagaatgcagcgagcaagcatgcttaccccgattaaaaaatataaaagaatatttaatgtggcaggagattggtataataattttttggcagcaatgtgtggtgatgtggcatatattaaagaaccactttgccagtatagagtacatacaggaaatgaaacaaatgaatcagaaaagaatttattgggaattttcgaacattatcaattgatacatgcattttgtgatatttctaaacagtttggaatgagtaaacctgcggaacgttatcatgaagcggtagaaaagcttggtagtatgtgcttgcgatatgcattaaaaatgtataaatgtggggaaaaagaggcagctgttcgatatctatttttagcaccagcattaaaaagagatattgttgaagatgaaagatacgctatattaatgaatatggaaagatacattggattagatttgaaaagagaaattgaagaatttgaaaagaaattcaatttgaatcgaactatttcatataatccacccgagaattaccggttattagatatttagagagaaaaagaatggaagaaaatacatatctgagaaaaattgattgtttgaatagttgtttgacaggcgaaaatgcaaaagaaatattgaaagaggtggacgcactggaaaaatggaaacctgtacgggtaccattatatgcattgaaggcaagggcactttattatagtggaatggagtgggatagaataacgactattttgtcagaaaaatgcaatgcgtcttatgattatccaggggtacaggaaatcattaaagtttataaagaattagcaatgtgctgtaaagatcagctagacattagacgaaatgatagaatttctaataattccatgcaaaaagaagcagatataaacacagagtcaattgaattgttgtataaaaacattgtaaacggaaatttttctgaaaatagtttaataaagcttcgagatgagaactatgtatgccaggaatgggtaatgtatcatacgttgagcttggttttgaatcagatgtatcaaataaaagatattacaagagaatggactaaccagatatataatataggatatttgaaagaatatcttctgaataaaaagcaaaaaaaggtctgttttattggaatggtgggacagaataatattaaatttaatgcattaaagaaatgcttacagatgttgggaaaagatgttattgaagttgatacagtagatgaagctatagaagaaattactggttttgctttggtgtttagtactgtaaagaaattcaaagatttagaatttcataaacaaatggggtatttgtatataggatatgaaaagtacgatgatgaaataggctttggatggataggaaattatctggattatttatctgatttatatggagaagattgtaatgccttggtgaatgaagaacctgtaaaaaaattttctattattattccggcacggaattcagcagatactttaagatatactttgaggacgtgtattgagcaatgggatgaaagtgattatgaaattatcataagtgacaattcgacgggacataatgtggatgtatatgaattatgcaaggagtggaatgattctaaaataagatatatgaagaccccacgggatttgccattatcaaaaagttttgaatatgcatatatacatgcaaagggagaatatatttttgctttgggttctgatgatggcttattaccatggggattaagtgcgctagaggaagtaatagaggcctttccaaatgaggaaattattcaatgggaaagagggttttatgcatggccaggatttaatggagggcaacagaaccagttcatgattccacgaaaatacgagaaagatatattggaagtggagtatagagataatattgattatttggcaatgattctgaacaattctcgcgaaatgtattcattacctatgctttatatcaattcctgctttaaacacagctatatggagaccttaatggctaaaacaggacgattatgggatggaatttgccaggatatttatatgggcgtattaacagcgtgtattcatgataaaattttgaatttgaaatatccattgacaattgctggaatgagcagtgggtctgtaggagcaaagtcaaatattggtgaacaaacgaacaaagaatttgaagcaatgatgaaagagagaaaacatgataataatgcgggctgctattgtcagacagaatatgaaaaattgatagcgtttactggtacggacacaagttccttatatacaactttgttaaggatggtaagtatgaatatcattccaaaaagttatttgacggaagtttttgattggaaaaagatgtttcaaaatctttcatcagaattggatattagagatgtaacatttgatcgaaaaattcatgaaatgtactatgcagcctctttgcatggaaaagaattcttagactggtttgaaaaaaatgtttttaaaccaatgctaaaacctgtattagtagatgaagaaagacttaagaaaattgaagagaaaaaaatatatacaaactctcggaatgccgaaggaggggttgttttagatgcagctgaatatggagtgaaaaatgtatatgatgctataaaactgtttgaaaaactgactggattataggaacatatatggatagaaagataaaaaatatgaattatagaaaaatacaattcaaagctagcaaagtattttaaattaggagaagaaagtgcattgcaacaagtggattggagcgggtaaagaaagattttcggtttgaagaccgtatgcggaagattttagaagatgtattataaaatactttataaaaacagctgggagcatcccaaatctctcacatgcgtgaactgtatgatattgatatttctgacagcacaatcagcagaatcacagacaaaatcctgcctattgtaaaggaatggcaggaatgccctctggaagaagtgtatgccattgtatttatggatgtctttaatattccaccagaattatacacctgaatccactttaaaagttgtgtgtgtgaccggattccgtatttcaagcaaatatcatcaagagaacccactccattaagataatcatttaccgcagacatttttagtgtttttgagtaactcttgtttttaagttgattaagtaaacctgctggtccattgcatcggtatatagaaatccatttcctgatactctggcaagcaaccccaagttttttacttgcctgattcaatacaatttctccggcaagatattgctcaactatttttacctttactattggttctattttgctttttctggacatgaaaatacccccatataggacttttatatttcattgtcctatatgagggtagcatatcattacgcaggagctgtttattatcacttctgattatttaattgatttacttcttctatcgaaagattgcaaagttttgcgatttcctttgcatcaaactttcctgtttttaaaagacgaagggcagtatcggtagaagcttgatttaatccctgttcaacaccggcgtcaaattcagcttttctcagttttttctcttcttcaactttatcatattcaaaaatactcatagcaattacctccgcctgattcttcctaagaaaatctgccagaatattttcctgaatgcattcggtgacagccttttgtacggcatcatccaaaggcatttgttctgcaaaggaacgaacctttgcaacatagaaagtgccatatagattgtataatatatgctttttcgcattttaacatagcaaaaagatttggacaagaagaaaaaatgttatatactaattgtaaataaaaaggcaatgaaaataaaaggagccacccccatgaatattttggtttaccgctggaattcctacaattacatagacatcattgcaacattccaatccattggacatcaggtggatgtaattgagcaggaactggaaagctatgatgaggataaagtgtttgcggcacgtttgcatggcatcttgcagcagaaaaactatgactttgtctttacggtgaattattttgcagtgatttccggagtatgccagcagatggggataaagtatatatcctggagctgtgacagcccgctgcttagcatgtatcacaagaatgtattcttggactgcaattatttctttctctttgataagaccaattatctggaattcaagggaatgggcgtaaaacatatctggcacctgccgctggcagtggatacgaaccggctggatgagctatttgcacaggatactatggataaaatgcagttagcagaaacagatagtgggaatgcctcaaaacattcggtgcgggattttgcaggcgggatttcttttgtaggaaatttatatgagaagaacagctatgatgaactggaaacaaggttcccggaatatttgcggggttattttgatgctgtcatggaggcacagcttaatatcagcggcggcaatataatcgaaccgatgttgactgcggatatcttagagcgtgtatcggaatattttgaactgaagaaatcgaaggattctttttctgatctggggctggtatttgcaacaacggtgcttggatttaaaactgcttctttgcagaggcagcgtgcattgctggcactggtggctaaattcccggtaaacctttatacaaatacaggcggagatactttacttcgggtaaagaattgcggctcagtagattattggtcggagatgccgaaggtattccgctattcgaaaatcaatcttaattttacgattccgaatatcaagagcgggctgcctctacggatttttgatgtacttggtgcaggtggattcctgttgaccaattatcaggcagaattaccggattattttgaaattggaaaagatttggcttgctttgaatccgaagcagaactggtagaaaaatgcagctactatcttacccatgaggaagaacggcagcagatagcaaagaacggttatgagaaagtgaagaactgctgcagctatcggaaacgtctgaagtttatattggaaaagattggggaggagtagaagagatacacaaagcaccagcttcgcaaaataaagaacataacctgccaccggcagcaaaaaaataagacctgatttttccttcatgtaaaagtcaggtcttataaatatttatccagcatcaaaccagagtacatagacgtaatataaggtgtggcaaaattcttgcccgggttcttgtaagcaacaattactttgtccacgtactgcatcggatttaaggaagcctggttggcttttgcacttaaggcattcttaaagcggtttaatacatggaaactctcggcggcatcatccgattcgacagcgtccgccagtaaatcccggtcaacggaaatagtagaatcagaatttataataagtccgatggcttcaaaatcatttttaaaatgctgtgcaacaccgctcatatcagaaagcagcttctggctggtcggctgcgactcgcggtattcattagcggtatccaccatggaattataggaatccaccagttcctgaatattatcggcaacggcatccacatttgctttaaaaccaagggtagcaggtctgccttccgggctgactgctttcaggtgtacttcaaaagtattgttgatggtaaatgtattggaataggaactgtgttccataccgtttaacagaaaaacggaattggaagctgcatccgtaaccttgttaataccaagcttatccattgcctgtatggattcgttggaagttcccggcagaatctggaacagaaaatcttcgtcatccttaagaccggtttttctggaagttaagaccagggcactgtggccggagtcgtcttctttaacatctgcgtgaatgccaatgctggcagtattgaaaagctttgccagcttatcctggacactccggttggtatcatctggatttacattgaactggaactcataggaagcactgctggtattcagatcaaaggaataactgcctggtttaaaagcaagctggtcatcctttaagtaattaccgtagtttaactgcggagaagcaagcttcttaatttccatctgaaagctgttggtattctcgccggaatctccgttcccaacataatctgcatcaacgatatcatcctggtcagagacggcaatttttttctgaaaagcctctgcaagactgtcaccggtggataaagaagcaatgacattttttaaatcacgggcatgctctttgatatcgatagcaaacttctgtgcatcagcagaatcttttattttgtaaagaggggattctttattgatttttacaatattattgtaaacagagcgcaactcactcttcttgtgggaatcataccgggaaacggtagacttgccataagttgtaagataataattatacatattatcaagaatagcagatgccataaataaccccctcctttcttccatgaaatgtgcatcttcttgatgctggggtatagtaaaatccatttatacatatctaatatagcataaaaataagaaaaagtcatctacaagatatacaaaaaatgttgtaaaaacgctagattttgtggtaatatatgtactggattacaagtttacagagaatgtgaaaaaagagttgacgctccatgtggtttgtgctatcatagactagcttggaagtaagtcttttttttatgcctaaaaataggcatagaaaacacaaagaaagtaatggaggtggaagttgtgcgcacaaagattacattagcatgcacagaatgcaagcagcgtaattacaacatgacaaaagacaagaaagctcatccagacagaatggagacaaagaagtattgtagattctgcaagactcatacattacacaaagaaacaaaataatttgtgaatgcgtgacaatgagcaaaaaagaaaaggaagtgacaaaatgggagaaaccgaaaacaagaacacagcagtaaaagagagctggttcgccggtcttaaggctgaattcaaaaaaatcatttggcctacaaaagaatcacttgcccgtcagacaacagcagttgttattgtgtcagttgtacttggtctgataattacacttctggatacaatcatccagtatggtgtgaattttctagtgaatttataatggaggcataggtgattatggcagaggcacactggtatgtagttcatacctattcaggttatgagaataaggtcaaagcgaacatcgataaggcaatcgagaaccggcatttagaagagcagatactcgaagtcagagtaccgatgcaggatgttgtcgagcttaagaacggtgcgaaaaagcaggttcagaagaaaatgttcccgggatatgtgcttatcaatatggtcatgaatgatgatacctggtatgtggtaagaaataccagaggcgtaaccggatttgttggaccgggatctaagccggtaccactcactgacgctgaaatgagaccactgggaatcaagtcagacaacattgtcgtagatttcgatgaaggcgataccgtcgttgtaatcggtggtgtgtggaaggacaccatcggtgttatccagcgtatggatcacggaaaacagatttgtacgattaatgtggatttatttggccgggagactccggtcgagattagtttttcagatgtaaagaagatgaattaaaggaggcaacctcaaatggcaaagaaagtagaaggatatatcaaattgcagattcctgccggcaaagcaactccggcaccacctgttggacctgctttaggtcagcatggtgtgaatattgtggaattcacaaaacagtttaatgcaaaaacagcagatatgggagatacaatcgttcctgtagttatcactgtttacgcagacagaagcttcagcttcattacaaaaactcctccagcagcagtactgctgaaaaaggcctgcaacttaaagagtgcatctgcaactccaaacaagacaaaagttgcaaagatttctaaagctaagcttcaggaaatcgctgagctgaaaatgccagacttaaatgctgcatctgttgaagctgcaatgagcatgatcgcaggaacagcaagaagtatgggaatcgaagtagaggactaaatggaaacgtgggagggtaccactcccgataataccacaggaggttatttagaatgaaaagaggaaagaaatatttagaagctgcaaaatcaattgatagagcaactttatatgatccggcagaagcaatcggacttgcaaagaaagcagccgttgcaaaatttgatgagactatcgaagttcacattcgtaccggatgtgacggacgtcacgcagatcagcagatccgtggtgcagttgtattaccacacggaactggtaaagctgtaaaagtattagtattcgcaaagggaaccaaattagacgaggctcaggcagcaggtgctgatttcgttggtggagaggaattgattccgaagatccagaacgaaggatggcttgacttcgacgttgttgttgcaactcctgatatgatgggtgttgttggacgtcttggtcgtgtacttggaccgaagggcttaatgccaaacccaaaagctggaactgttactatggacgttaccaaggcagtaaacgatatcaaagccggaaaaatcgagtatagattagacaaagcaaatattatccatgtgccaattggaaaagcatcctttagtgaagaacaattagcggacaacttccagactcttattgatgccgtaaacaaagcaaaaccggctacattaaaaggtcagtacatgaagagcgtttctgtagctcctaccatgggaccgggtgtaaaaatcaacccactgaagcttgtttagtttttgttattgacatccaagatattaattgctataatagcaaagcatattgccgaagacagtaggtgccgtaaggcgtaaccgtagagaacctaccgaggaaatgcagatacttatgtatttgtaaatgagatttcaaatcctctctgtcttccacagagaggattttttaaggtaatgtacctgtctttcgcaagatgaaaaataaagaaggaggtgcacgattcgtggcaaaagtagaacttaaacagcctatcgtacaggaaatttctgagcagattaaagatgcacagtcagtagtagtcgttgactaccgtggacttaccgttgcagaagatactcagctgcgtaagcagttaagagaagctggtgttgcttataaagtatataagaatacattagttaattttgcaatcaaaggaactgatttcgaaagcctttccgacgtattggaaggaccaaacgcattcgcaatttcaacaacagatgcaacagcacctgcaagagtaattgctaaatttgcaaagacagctcctgcacttgagattaaagccggcgtagtagaaggaaccttctatgatgcagatggaatgaaagcaatcgctacaatcccatccagagaagaattactttccaaattccttggaagtattcagtctcctattacaaacttcgctcgtgttattaatcagatcgctgaaaaaggcggcgcagcagacgtagaagttaaggcagaagaggcagcacctgcagaagaagctccagtagaagctcctgcagaggaagctccagcagcagaataatctgcaaaccaatcaatttattgaaaacaaaaccaaaaacggaggtaaattaaaatggctaaattaacaacagctgagatgattgacgctatcaaagagttaagcgtattagagttaaatgaattagtaaaagcttgtgaagaagagttcggtgtatccgcagcagcaggcgttgtagttgcagcagcaggtggagacgcagcagcagcagaagagaagactgagtttgacgtagagttaacagaagttggaccaaacaaagttaaggttatcaaagtagttcgtgaagctactggcttaggcttaaaagaagctaaagacttagtagatggtgctcctaagatcgttaaagagcaggctgacaaagctacagctgatgacatcaaagctaaattagaagctgaaggtgctaaagtaacattaaaataatttttgattcacaactgaattagaaatgataggaatcggattcatagaaatatggatccgattttcttgtagtttataggactttagacctattgacgaaaaaaggaaatatgtaataatagtagcgtaacttgaaaacaatataagaacaggagattagttatgaacacaggacttaaggtatggctctggattgtatttgtaatcaatatcatttccggagtaatgatgattccgttaatgctcattcagccactgctgattgtcagcctcattgcagaagtgcttattatcgtaggtgccggtctgattttgtttgcacagaagaaggttggattctatctgatgattgcatgtgcagcaataggtctggtaatcaacatctttggcggggttggagtcgtaaaaagtatcatcagcgcagtattgtgcccattaattacatatttgtttatgcagaaagactgggacagcttccagtagaatgagacatcaacaagaagaaccttccggcagaaatgctggaaggttctttgctttatagaaaatatttttataaaagtgatagatttaagacatcagattcgtaataataagtgtagctgcaaaaatgcaaaccatggtgcatgaagcaaaaggcaggataacaatgaagataacagagaagaattatattcagcaattacaattgcataatgaagaagcattgatttatgtcatagatatgtatggtggattgcttaaggcagtcatccggaaacacttatttaccatgccacagaaacaggaagaatgcatgaacgatgtgctgctttccatctgggaacacgcagcatcctttgatgataagaagaacagcttcaagaactgggcggcagccattgcccggtacgaagccatcgactatcttaggaaatataagcgggacttggaacagctttgtatggatgatgtgacagcggcggaaaatgacaggatgttagaacaactgatagaaggggaattaagccgtgaagtagaacaattgcttttgtgcctgaaaccccttgaccggaaaatatttatgaaattatttgtagaggaagaatctgtagagcagataagcgaagataccggacttccgagagatgtcatttacaaccgggtatccagaggaaagcggaaaatgagaaacatgtatttgaaacagaaggaggcatgaagagatgaaagacgataaaatctatgaaatgttaaatgatgcggaaattgatttgaatgaatatgaagtagaagagttatcctccgaagaaaaggaacggtataaaatgagaatccggatggaggtaaaacgtatgaacatggaaacaaggaataagaaaaataaaaatataagaaaaattgcggcaggaatggcagcagcctgtgcggttgcagtaggagtagcaggattttctaattctgcactggcagacagcatctacagcaacacaatcggaaaactgattggcgcaacacagggagataaagatgaaaaggaactttcggatatctattctaccattggaaaagagtccacggaattggtttcggatgatcagtgtgtgctggaaacagaccggagtggagtaaagataagcgtttcggatgtgtattgcgatggttacctgctttactacacaaccacccttagcacagacaatgcagaactgaatgaatcagactggattatgggaccgcagagtgataaggtgatggaaaatgtttctatcaatgaaaccctgattcagtcggcaatcgggcagccttttgaaaaggcagaggacggaagctatgtgaagatggaacaaattgatttatcaacattgactgatgaaaatgataatccgattgatatttcggacttgaaagattttaccgtaacctggagcatagacacattagaaggctatctttccgatgcatgggatgaaaatggagaatatcagaccaccacaaaagtaagcggagactggcagctctccttcccggtgcatgtggatacttccaggaatgagaccatcgcagtaaataaagaagataatggtgttgcagtaagtcaggtgatcaaaaccgatgccgtcttgatcgttgacatgcagctcccggatattaccggcgcaccgtacaatgacccacataatgacccggatatatttattaccgacgaagcaggtaatgcaatgtggtggttaggcggccggtttaccccaaatgaggatggaagccagagtgaacggattatgctgctttataatggagagagtacaatccatatatccgtaaccaacaaaaatggtgcaggtgaaagtattgcagaactggatgtggacttaaaataaaaccggaatcaataaaatagataatgaaatatgtaatagaatagaaaaataaagaaaaaagggtaaagaaaaaagcaactatgggatgcaaagaaaaaagcatttcatggctgctt

SEQ ID NO: 88 - DNA, 31300 bp, unidentified
  source 1..31300: mol_type = unassigned DNA
atgaaaaaattatttaaccatacaaaacgtctggaccgtaactgggaagaagacgtacaggatggttacgattgggatgaagagcaggacggcgaagagtactacgccgacgatgaggagtacaccgacgaggagtacaccggagacgaggacggtgaagagtactatgccgacgacgaggagtacaccgatgaagagcaggacggcggagagtactatgccgacgacgaggagtatatcggagacgaggacggcggagagtactatgccgacgatgaggagtacaccggagacgaggacggcgaagagtactatgccgacagtgaggagtacaccggagacgaggacggcgaagaatattacgccgacgacgaggagtacactggagacgagaacggtgaagagtactatgccgatgacgaggagtatatcggagacgaggacggcgaagaatattacgccgacgatgaagagtactatgccgacgatgatatggcacctgcccgcagtggcaaaaggaaaaagagtaaaaagcagggtggcaataaaatagctgctatctggaccaaattcctgaacatgagtaccatggaccgcattatgacggcaaccggtgtggcagtgctgatcttggccattgtgacaggcagtgtatatgccagcgcacgtatggtggatcatcaggtatcggagttcgtcagtgtgggcagccagctggacggcatccagatgatcggtgagcagggtatgctggcagtggcagatgcaaagcttgcgaagatcgcagcagccaatgcagtcgacgatgagaatgaggaacaaaaagaatatgatgaggccgagtataccaacggtggtaccgttgaactggaactggtctccgtgcagaaggatctaaagatcaaatttaccaataaaaagagcggtaaactgatctccaatgtacctttcagcgtgacgatcacggatcccaaaggtaaaactgatacctggaccgatgatgatatggacggtattatctacaagaagggcattacccccggcaactatacggtagcggtaaataccctgaccgatgaaaaatataaggattacacactgcctaccggtacccagaaggtagaagtcagaaagaatatcgcttataaaaaggtcgatgtggcaaacgagatcaagaaggaatccgagatcaatgcagcaaaagaggacaccatgaaaaatgatactgtggtggagtctattctggaagataccgtgcagtgggtagaaagtaagaaattacctcctacttatagagaggtaacaaaggataccgtggtaaatccggaaaaacagacggcttacaacggaagattcctgcgcatagcaaatgaaaagatcagtatcacggtgggagagaccaggcagctgaatccgccggcaggagccacggttgttagctggagcagcgataatgcgacggtggccagtgtaaataatggtgtggttaccggcgtgaaggcaggtggacctgtaacgatcacttgtacgtatacggaggctggcagtgctacgccgactcctacacctacgccgactcctacacctacgtcgacacctacacctacaccgacaccggagacgacccccacagcaccggagacgacccctacaacaccggagacgacccctacaacaccggctccgggagaaacgaccggtacacctacaggaggaacaggggaagatggtagctcctcaggtgagtcgcagtccgtgggaggcggcagccttcctacagcatatgcacaggtaggaagcacacagaagacctttacctgggaagttactgttacggaagtccaaaagccgaccgctgttttggaaccggcatccctgaacgtagaagcaggaaaagaagcaacagcacaggttaaagttacaaatttcacaggtgcaacttatacgattactgcaaattccaatgataaagcagccactgcggcggtagatgcaaacggtaagatcacagtgaaaggtgtagcggccggtgacgcgaagatcacagtcaccgtaacgatgggaactgagactaagacactggatctggcagtgaaggtcacaaatggaatcaagattactttggataagacagctgtaaccgtttatccgaaatctacggctgctgtaacagcctctgtcagcggaagcggaaccataacggcagattccggagataagaatattgccacggtagctgtaagtggcaaaacgatcaccgttaccggtgtgaaaaaaggaaccgcaaccatcactgtcacatataaggagggcagcgcggaagcaaaagccacctttacagttacggtagcgggcgatgtgaatcccagagaggatacaaaaacaccgttaaaggataccagcggcagacagctgtatgtatccatcggtgacaaccaataccgggcggcagcgtatgcggattattacactgccacaaagtttttcctcatggaggaggccagatataccggctggcagacgttagacggtaaggtatatttcttcaaggcagacggcagcaaggtgaccggtgagcaggtcatccagggtgcaaaatataacttcgcaagtgacggttccctggtagtgggatcaggtactatgggcattgatgtgtccaagtggaacggcagcattgactggaatgcggttaagaattccggagtgaattatgtgatcattcgtgtgggataccgtggatcatctcagggagcattgatcgaggatcccaagttcaagaccaatatcaagggagctacggcagctggtcttaaggtaggtgtatacttcttcacacaggcagtggatgaggtagaagcagtacaggaagcatccatggtactggaccgcatcagcggatataagatttcttatccggtattcctggatgtggaaggcagcggcggaagaggcgatgccatcgattctgctaccagaaccgcagtctgcaaggcattctgcaacacgatcaagaatgcgggatatactcccggtgtctatgccaacaagacatggttgacatccaagatggatgcaggtgctctgagcggttacaagatctggctggcacagtatgccaagaccccgacctataccggcagatatgatctgtggcagtacagatccgacggaaaagtcagcggtatcagcggcaaagtcgatttaaatatcagctacctgggatattaagatttgcaataaagccaagaccgactgctcgcaggcggttctggtgctttattagcaaatcaaacacacatgagcaagtaggacgatagtccggaatgcgaatgggtgtcacggattcgagagcacgaagtgcggagaagccgtgttgatatttacaatgaacagccggtgagactgcttacaggcaggtctggtgctttattagcaaatcaaacacacatgagcaagtaggacgatagtccggaatgcgaatgtgtgttacggattcgagagcacgaagtgcggagaagccgtgttaatatttacaatgaacagtcagtgagactgctcgcaggcaggacgatagcccgtgttgctatccaccccattttatggtagaatatcactatctatagcaaaatgcgcacacctgcgcagaacggagagaaaatgagaacttatctggtaacaggcggtgccggctttatcggttccaactacattcattacatgttcaaaaaatacgataacgagatccgtatcattaatgtggatgccctgacctatgcgggaaacctggagaatctcaaggatgtggagaagcgtgacaattacactttcgtgaaggcaaatatctgcgacaaggaagccatcagcaaaattttcgcggagaacgatattgaccgcgtggtacatttcgcagccgaaagccatgtagacagaagtatccgtaacccggagatcttcgtacagaccaacgtgctgggtaccgcagtgatgttaaactgtgccaaggcagcctgggagcttccagacggcagcttcaaggctggcaaaaagttcctgcatgtatctacggatgaggtctacggatctcttcccgatgatgacaatgctttcttctatgagaccacgccttacgatccccacagtccttactccgcaagtaaggcaagctcggacatgctggtgaaggcatacatggatacctatcatttccctgccaatatcaccaactgctccaacaattacggtcctttccagttccccgagaagctgattcctctgatcatcaacaatgcccttcacggcaagaagcttccggtatacggagacggcaaaaatgtccgcgactggctgtatgtagaggatcatgcgaaggccatcgacatggtacaggagcagggaagcctgttccagacttacaatatcggcggacacaacgagaagcagaacatcgagatcatccatattatcattgagaccttacaggagatgcttcccgattccgatccccgcaaggcacatatcaacaacgatctgatcacttacgtggaagaccgtaagggacatgacagaagatatgccatcgcgccggacaagatcaaggcagagatcggctggtatcccgagaccatgttcaaggaaggtatccgcaagaccatcgcctggtacttcgagcatgaagactggatgaacaatgtgaccagtggcgattaccagaaatactacaatgaaatgtatgaggaaaagtaaagaatatctgctaaatgggaacgatgaacgtcgttcccattcggtgtgttaaaaaacaagtattttaaggaggtttttatgaaaggaattatactggcgggaggttccggaaccagactttatcccctgacaaaagcaatatccaagcagatcatgccggtgtacgataaaccgatgatctattatcccctgtcaaccctgatgctggcagatatcagagaggtgctgatcatttccaccccgagagatcttccggtattcaaagagttattgggagacggcagtcagttgggcatgcgtctcgagtatgcggtgcaggacaaaccccgtggcctcgcggatgcttttatcatcggagcggaattcatcggtaacgacagagtggcactggtactgggagataatattttctacgggcagagcttttcggcagtgcttcgtaaagtagccgccagagaaaaaggcgcgaccatcttcggttattatgtgcgcgaccccagagaatacggcgtagtggagttcgatgagaacggcaaggcactttctatcgaggagaagccggagcatcccaagagcaattatgcagttcccggactgtatttctatgataacgatgtagtggagatcgcgaagaacgtaaagccctccgcaagaggtgagatcgagatcaccagtattaataacgagtacctgaacagaggaaccctgcaggtagagactctgggtcgtggattcgcatggctggataccggcaatcacgatgcacttctggatgcggcagatttcgtggcagcgttccagaagagacagggattgtatatttcctgtatcgaggagatcgctttcaaacgtggatttattgataaagagcagctgctggcactggcagagccgctgctgaagacgaattacggtaaatatctggtagaggtagcaaatggactctaagctgcggaaaatggggatcctggcctccatggcggtgatcctgctggtggcactggcggtaatgtatgtgaacagggaacaactgtcccccacatccggccagaacacggaggtgtccggagcgcagaatgcaggtgacggcgaagcagtggatcccgtgccggaaggcaccggggagacggacaccgcggaagcggatggcaggatcggcaacgacctgaaagcctttttaaaagataatacgttttttgatccggatgtgaatccaatcctggaggcggcgaaagataacagccaccgcctgtcactggtggcgacttccgtggaaaaggatctgcgtatccagatcgtggacaatgaaggtgtaccggtgaccggagagagtttctatgtccgggtggacggtctgggagattacaaggatctggatcaggacggcgtgatctacattgctgatctggattccggcgattattatatggaactgttacccatcgaaggatataaagttcccatcaccgagaccaaagtgcatgtaaaagaaaaagtggaatacctggccattgatgatatttctctgttgatcaagacagaggatgaagtcgatgcggatgccgaggacagtgctgtggcaggagctttggcagatgcggacaagaccgagatccaaaagctgcagactacatccggcaatgcgaaggtcggcatcgatgtgtccaagtggaacggcactatcgactgggataaggtgaaaaatgccggagtacagtttgccatcgttcgtgcgggctaccgcggttcggttacgggaagtctggtggaggatccacagtttgtcgccaacatgaaaggtgcaacagccgctgggattccggtgggtgtgtacttttttacccaggctacagatgagaaagaggcggtggaagaggcttctgccgtgctggagctgatccgtgatttccaactgacctatcctgtatttattgatacggagggtgccggaggaaacggccgggcggacggactggatgcggagaccagaaccctggtatgtgaggctttttgccggacggtagaaaatgccggatatacagcaggcgtctatgccagccgcaactggtacaacaataatctgcagaccgccagactggagaactatcatatctggcttgcggagtaccgtagtgtgccgttatatcagggatattacaagacctggcagtatacctccaagggaaaagtggacggtatcgaaggcagagtcgatatgaatatcacctatgaatgaaaataataaagagtgaggatgaaataaatgggcaagataacagtagaaacatgtgaaatcgaaggattgaagatcattacccccacggtgttcggtgatgccagagggtatttcatggagacttataattacaatgatcttaaagcagcgggaatcccggaagtgtttgtacaggataatcagtctgcttctaaaaaaggagttctcagaggacttcattttcagaagcattttccgcaggacaagctggtacgtgtgatccgcggagaagtctatgatgtggctgtggatctgcgggaaggctccaaaactttcgggcagtggtatggtgtacttttgtctgaggagaacaagaagcagttctttattccgaaaaatttcgcgcatggatttctggtactgtccgattacgcagagttctgctacaaatgtaccgatttttatcatccggatgatgagggcggtattgcatataacacgccggatatcggtgtggaatggcccatccccgaaggtatggaactgatattatccgagaaggataccaagtggggcactctggaacagtacatgaaggaaaaagagcatgaaaaaaagtgtgaaaatcagtaagaaaacaggtattgccctgttcgtgacagcggcagtgatcatggctctgctcatcgtgttccataagaatccgggacctgctgtggatcaaagccaggagctggcgaaaaagatcatctcctgcgttgtcattgcggcggcatgttttgcgtttatccactggtacgataaatttaccggactgccggtagagttattccagaatagacatctgatctggaagctggcgaaaaacgattttaaaaagagatatgcgggttcttacctgggcgcggtctgggcgatggcacagccggtggtaaccgtggcgatgtattacatcgtcttcgacaagatcatgggaaataccagcacacccctgcgggagggcgtggaagtgccttttgtacttttcctgacagcgggactggtgccttggttctacttcagtgaggcactgaacaacggcaccaatgcactcttagagtacaactatctggtgaaaaaagtagtatttaagatcagcatcctgccgatcatcaagattattgcggctacttttatccatgtatttttcgtgtgtctcctgttgatcgtagcggctatttacggctattaccccacaatctacactatacagatcatttattacagtttttgcctgtttatatttgtgctggcactcagctacaccacgtgtgcggtagtggtgtttttccgggatctgtcccagatcatcagcatcggattgcagatcggcatgtgggccactccgatcttatggaatctggacgcgctgtctccggagtggatcatgatcctgaagctgaatccgctggtctatatcgtgaatggctaccgcagtgcgatctacgagaaagaatggtttttccgggatttcttctccacgatgtatttctggatcgtgacggtggtattgttcggactgggtgctgtgatctttaagagactgaaagtgcatttcgcagatgtattgtaatacgaaggactgttaccattccgagaactcgaggaacggagaaaacatattgtaaaaataaacagagcatggcaaaaagcttttataaatgaagaaccttgtggggaggtactgcattacggaactgttgtgggggaaacagaaagggtgaaagtaattgaagggtgctcttgaaaagttaagaaaaatattgttatggaagccggacagggtactgctggcagtgggctgttgcggactgctgttgttagcactgatcccactgtttcgactgacgatttatgcggttccttattatgacgactataactttggaagatttgccagagctgccatggagcaggagcagtcgaaatgggcggcgatctccggcgcactggactgctccagaacccagtggtatgcatggcagggaacgtattcttctatttttttcatgacactgatgccggctgtctggggagaacagtattacttcttaggaccggtgttcattctgttactgcttttggcgggaagcatggtgtttacccacgtgatcctgcggaaagtcttcggaatggagcaatggatcagtttggcaattcaggcagtgatcaccatagcggaatttatgtttatctattccgcgcagagcggcttctactggtataacggcgggatccactatgtgggaatgcatggtttcggacttttgtttttgtctgtggccatctgcctggagagagcagagggcagaaccgcaaaaggtctgttattcactgcatcggttctgcttgccatgattacggcgggaagcaatttcgtcacggcattgcagggattattgtgtcttctgaccatccttctggtcagcgtggtagtggaacggcgcaggacggggctgtggctgctgccgtctacactggtgtatatcataggcttcggcctgaatgtggcggctccgggaaattccgtacgtgcccgcagttatgtgggctggggttacggaccgctggagtccatcggcagatcatttttggaagccgtgaaacacattccggaatataccggaccggtggttctgatggtgatgttattgttggtacctatgatctggcaggcagtgaaaagcacggattaccgttttcgttatccggggatcgtactcgccttgtccttctgtctgtatgcgaccggctatacaccgagcctgtattccctgggacatgcgggactgtccagaactctgaatgcagtaaaaatcacgtatttcatgttgttgtttttaaatgagatctattggtgcggctggcttagacagatactggaaaaaaggacggataagtctgcacagaagctgtctgcacgaaatggggcagcggtctggtggtattatgtgatcatcggtgtgatgtgtcttatgatgtttaaggtatcacctaatcaggcgggtcactattcttcctacggagcctattattatgtgcacaccggggaggcttataatttccatcaggaatatctggagcgggtggcaattctgtccggaccggaaaaagatgtgcagctgccggcctatcagttccgcccgtggtttttgtgcatgggagaaatctccgagaatgcggacaatgaggccaaccgttctctggccatgtggtaccataaagacagtgtaacactgaaagaaaaggattaagacattatgcaggataagagaaaactggcaattgaagttgataatgtccagaaaatctataaattatatgataaaccttcggaccgtctgaaggaagctttcggattcggtaaaaagaccaaacataagctccactatgccctgaaaggcgtgagtatgaagatctatcagggggaaaccgtgggaatcatcggtaccaacggttccggtaagtccaccatcctgaagatcattaccggagtattgaatccgacttccggacgggtgctggtcaacgggcgtatctccgctctgttggagctgggtgccggcttcaatatggaatacaacggtatcgagaatgtctatctgaacggtactatgatgggattttctgaaaaagagatcgaggcaaaactgccggagatcttaagctttgcggatatcggagattatgtctatcagccggtaaagacctattccagcggtatgttcgtccgtctggcttttgctgtggcgatcaatatcgagccggagatcctgatcgtggacgaagcactgagcgtcggcgatgtatttttccaggctaaatgttatcataaattcgaagaattcaagaaaatgggcaagaccattgtgttcgtcagtcatgatctgagcagtatcagtaaatattgcgaccgcgtctatctgctgaaccagggaaatattctgggagaaggcagtcccaaggccatgatcgatacttataaacgggtactggtgggacagtacgatgaatccgaaaatgccggtgaggaatcggagaatctcttagatgatgaagatctgcagagagccgctgcgaaaaaggcggatggcgcagccaaagatgctgctgaggcttccgcggaggcgaagggacagaatcccaatgccctggaatacggtacaaagcaggcacagatcgaagaattttatattacggatgacaggggtgtgcctaccaatgccattctgaagggtacaatgtttaccatccatatgaaggtccggtttatggatcctataccggcaccgatttttgcattttccgtgaaaaatgtcatcggcgtggagatcaccggcaccaataccatgatcgagaaggctttcttagacagcgtggaacctggtgacgtgaaaaatgtgacttttacacagaagatgaatctgcagggcggagaatatctgctgtctctgggagtgacggggtacaatcaggatacctttgaggtctatcacagactgtatgatgccatgaatatcaccgtggtatccgacaaaaacaccgtaggatattatgatatggattccaacacgaaagtgtgggatgcggaggagaaataaagaatgacagagaccatcggcaaagtaacgctgaatctggataagtatcccggagaggattattattgtgacggcagtgtggaagacgagattctggagatcgtaaaaaaatacagtaccgtggaatatgaccgaatcatcgcagagagaaaaagctggccgatcctgtatcatctgtcggctctgcgggaaaatatcgtggattttcttccggtcaaaaagacggacaaagtactggaagtaggcagtggctgcggagccattacaggagccctgtcccggaaagccggatcggtgacctgcgtggatctctcgaaaaagcgtagtctgatcaatgcgtaccggcacagtgaaagtgaaaatgtaacgatccatgtgggcaattttacggatgtggaaccggatctgtccgcagattatgactatatctgcctcattggcgtcttcgagtacggacaggcttacataggcggcagcacaccttatgaagatttcctgaaaattctgcaaaagcatctggcaccgggtggacggatcgttatcgctattgagaacaaatacggactgaaatattttgcgggatgtaaggaagatcatctgggagactggttttccggaattgaaaattatccgaacggcggtgtagtgcgtactttttcccggaaaaaactggagaagatcttcgatgcctgcggtgtggaagagcgcagtttttattatccgtatcccgattataaattcatgaccacggtctattcggatgcgtatctgccgggccggggagaattatccaataatctgcggaatttcgaccgtgacagaatgttgttattcgatgaaaaaagtgcttttgacggaatcgtggaggaggggcttttttctgtattttctaattcttatctggcggtgatcggcaagcctctggatctgaaatatgccagatattccaacgaccgtgcggaaagcttccgcatccgtacggagatcctgcgggatgaccgggggaatcggatcgtgcggaaatatccgctgaccaaagaagcagaggcgcatgtgcgccatatgatggaagcgtatgagaaattaaaacagcgctacgccggaagccggctggacgttaatgtctgtcatccgggagaagaggacggcatcccttatgcggaatttgaattcgtaccgggcagaccgttgtcggaactgatggatgaatgtctggacagacaggatatcgaaggattccacagtctgtttgcggagtatctggagagagtaggattcggagaagatgttccggtagcggattttgatctgatctttgccaatattctggtggacggagatcactggacgctgatcgattacgagtggacctttgaccgtgtcatagatacgaaagcactggcgttccgggccgtttactgttatgtgctggaagatgaaagacgtaatgcgttggaactggaccggatcttagatcgtctggatatcacggaaaatgaggcaagacagtacagagagcaggaacgggaattccagaaatatgtgaccggacagaaattgtccatgggtgagatccggaatctcttaggcggcgaaatctataaacccaccgaatggatcgggcgtttccgtcagtcggaaggagaactgcgggtacagatctatgaagacaagggacagggattttccgaagagaattcttatttcccggaaaatgtctatgttgcggaaaaagaggcagagtttaccgtgaaattcgacggtaacgtacattatctgcgtctggatccggcaatgtgttcctgcatctgtaagattcgggaactgtccatgaacggacagccggttcctctgcaggataagaaagtgttcactaccaacggaaaaatcctgaaatctgaagagggagcggaccatcccagcgtgatatttgccacggaggatcccaatatgacgatccgagcagatgtgctgaaccggcaggcggagaatacgttgtctgtgaaaatggagatcgtacagatccctcaggcaatggcaaaagatatgatgggagtggagaagaagggagcggcagcttgggtattcggacagcggtgaagcaggtgctgatcgcacagcaggataaaaaatacgaaaaagaactggcgcagcttaaggtcacctatgaacagtgggcagcggagcaggaccgggaaagcgcggaacaccgggaaattgcgggacttgtggaattcgtcattttccgacaggcggcgggacgactggcagataatgcgacagagcggatcaacgcttattttacaaaacatccggaagcagaaatcgtctacggtgatgaagacctgatgaatgagaagggagagcgttgcattccctggtacaaaccctgttggtcaccggatctgtacagagcctttttctatgtgggaagtgtcgttgcggtacggagcagtctgctgcagagaatgggagaaaatccggtcgtgacagagaacgagagcaccggaaaagaaattatttttacagatgccggagagatccgtccgctgatggatcgcctgtttttgggagccggagggttcgagagagattgtcattccatcggtcatatggaaaccgtgttgttccatggaactttttctgcagacggaataggaatccagggaccggatgcacgtgcagaccgggacagccgggagtgcactccctgggaaaattaccagctgacgaaggagtcaccgcagctggcggtggaactggcctccagggcggcggaaggtgccaaagagttattcgcaggagagcttaaagtctcggtgatcattccctccaaagataatccggaggtactggagaagtgcctgcgttccctgacgagaaggtctgagggcaggatccctgttgaaattttgctggtggataacggaagcagtgcggaaaataagcaaaaaacggaagaactgatcggacggatccgggaaagcggtgtccctgtccgttatatttatgaaccggcggaatttaatttttcagcgatgtgcaaccggggagctgaactggcggaaggaaagtttttgctgtttttaaatgatgatatagaagtgtgcggcaatgactggctggacaaaatggtgatccgcgccatgcagccttatgtgggaagcgtgggcctaaagctgtattatccggattccgtgaaaatacaacacgacggtattgtcaatctgccggtgggaccggtgcataagctccagttcatggaagacgataagtcttattattttggcagaaatcgctttgatctgaattgcgtggcagtgacgggtgcctgtctgctgataaggacagaggtattccgggagacgggtggattccgggaggcactgcgggtggcctataatgatgtggatctgggattttgtctggtggaaatgggatattacaatgtggtgctgaatgactgttttgcatatcatcatgaatccctgagccgcggaagcgacgaaagtcccgagaaaatgcgacgcctgacggaagagagagaactgctttaccagatgcatcctcagttccgcggagtggatcctttttaccctatgggactgaaccgggaaggactggacagccgtgtggttccggcatatcttacagaccggaatattttacaggagccggcatggagatgtgagagctggcaggagcttctggaaaatgcaagacaggatgactgcctgatggcacgggtggagactgcagggccggagcggatccagggatacagtgtgatcctgggagatgataacgcatgttatgataaacttttagtattgcttcccgaagatacgcagggacagcgggaggcggaccggaaggtatggtccatgaagattttacctgcatatcggcaggaactggaggagaatcttccggaccagaaaaatgtggcgctgggaggtttctgtgtgaaacggaaaacagggcagctgcctccggggaattatggaatcgccgttcttgcggtccatcggatcagtaagctgaaactgtggaatacaacgggaaaatatttgacggaggaaaaacatgtctgagatcaattataaggaagcctacgagagggagcacgaaaaatgtgcggatctggcagacaagatcgtagtgctggaatcggaaaaagaggacctgcagttcaaactggaccggatcaaaaagaataaattctggaaagccacgggtccggcgagaagtctgatccatttcgcacagaggcagagggatcgcttgtcccattgcggcggaccgaaggatatcctgcgtaagatccgcaacaagagtcgccagaagagcctgatggagtcctacggaaccggaagctttcctgatgcggagcagcggaaaaaggaagaagagacgatattcccttatatgccgaagatcagtattctcgttcccctgtggaacaataaaagagaattccagatccagatgctggactgcgtcatgaatcagacgtatcccaactgggaactgtgtctggcggacggttccgacgcggagcactcctatatcgaggaactctgcagggagtacgcggcgaaggcgaatggtcgtatcgtctataagcacctggatcataacggcggtatctcctataacaccaacgaatgttacaagctggctaccggagattatatcggtctgtttgaccaggatgatattttgcatccttccgtactgtatgcgtatgtgaaggagatcaatgagcggggtgcggattatctctattgtgatgagaccacgttcaaggaaaatgatattaataaaatgctgaccatgcattttaagccggactatgcaccggacaatctgcgggcgaataattatatctgccatttcagcgttttttcccgaaaactgttagagggagaggaactgttccgcaccgcatttgacggtgcccaggatcacgatatgatcctgcgtctgaccgacagagcggaaaagatcgttcatgttcccagactgatgtactactggagaagccatgagggcagtaccgcagccagcattgacgcgaagccttatgccattgaggcggcaaagggagctgtggcagatcatctgaaaaagcatggtttcaagcattttcagatcaccagtaccagagcctgcgccacgatcttccgaatccggtatcagatcctgggagatccgaagatctccatcgtgatcgccaataaggatcatgttgaggatctgaagcgttgtattacctcgatccaaaagaacagcacctggagcaattacgagatcattgtcgtggaaaataacagtaccacaccggagatcaaggactattattcccaactgctgggattgtccggcgatgattcttatgaagaaagatgcaagctgcatacagtctgcggccatgacggcggtatcctgcacagcggggacggacggatttccattgtgacatatcatggtgactttaattattctgcggtcaatgatctgggagcgtcttatgcttccggggagtatattttactgctgaacaatgatacggaggttatcacagccaactggatggaagagatgctgatgtatgcccagagagaggatgtgggtgccgtaggtgccaaactgtattatgcggacaagacgatccagcatgccggcgtggtcatcggactgggagcacaccgcacggcaggacatacccattatcgcatcccggtacagaacttaggctacatgggacgtctgtgttatacccagaacgttacagcggtgaccggtgcctgtctgttggtgaaaaagagcctgtatgagcaggtgggcggtctggatgagagctttgtgatctctttaaatgatgtggatttctgcctgaaattacgtaaactgggacttctgaatgtgtggactccttttgcggagctgtatcattacgaatccatctccagaggactggacgatcagggagaaaaggcagagcgctacaacagagaatccgggcatttccgtgaaaaatggaaggctgaactggaggcgggagatccctattacaatccgaatttctctctggatcgcagcgattacgcactgaaggatccggcagttagcggacgttaaataattcttttcagtagagggaatctatggtaaaatatcaccggagagcgtttactgaagatattgaaagatagcgataaaacaggaggataggaaaatgagttatatggacgaactgaatttctggttaaatgatgattattttgaccagaagaccaaggaggaacttctggcaatccgcaataatgaagcagaagtggaagatcgtttttacaaggaactggaattcggtaccggcggcttacgtggtgtgatcggtgcgggaaccaaccgtatgaacgtatataccgttcgtaaggcaactcagggtcttgccaattatattatcaagcgcggtacacagagtaagggtgtggcaatcgcattcgactcccgccgcatgtctcccgagttttccgatgaagcagcaagatgtctggcagccaacggcatcaaggcatacatttttgaatctttaagacctaccccggagctgtcctttgcccttcggacgttaggatgcactgcaggtattgtagttaccgccagtcacaaccctcctgagtacaacggctataaggtatactgggaggacggcgcacaggtaaccgctcctatcgataaggacatcattaccgaagtacagtccatcaaggattatcataccgtgaagaccatgagcagagaggatgctgtggcagcaggactctatgaagtgatcggcaaagagatcgatgacaagtacatggcagagctgaagaagcagatcattcatcctgatgtgatcagggaaatggcagatgacatcaagatcgtatatactccgttatgcggtaccggtaacaagccggtaaggcgtatcctgtctgagctgggattcaagcatgtctatgtagttcccgaacaggagaatccggatcctgactttaccacactggattacccgaaccctgaggatcccaaggcatttacctatgcgcttcgtctggcgaaggagaaggatgcggatatcgttctggcaaccgatcccgatgcagaccgtctgggtgtgtatgcaaaagataccaagaccggcgagtatgtggcatttaccggtaatatgtccggcatgctgatcgcagaatatatcttaagagagaagactgcgaccggtaccatgcccgagaatcccgcactggtaactaccatcgttaccaccaacatgaccaaacctattacgcaggcttacggcgtaaagctgatcgaggtactgaccggcttcaagttcattggcgagcagatcaagctcttcgagcagaccggcagcaacaactacgtatttggcctggaagagagctacggctgcctggcaggtacccacgcaagagataaggatgcgatcgtagcagtgatgtgtctgtgcgaagtagcagcttactgcaagaagcacaacatgactctgtgggatatgatggtatccatgtatgagaagtacggttacttcaaggagacccagtataccatcaccatgaagggtatcgatggcgcaagacagattgccgagatcatggagaagcttcgtaagaatcctcctaaggcattcggagatctgaaggtagagaagttccgtgattaccagaacgatgttatcatcgacatggagaccggagagaagactaccacaggacttcccaagtccaatgttctgtacttcgagcttcctgacaatgcatggtgctgtgcacgtccttccggaaccgagcccaagatcaagttctacatgggtgtcaaggggaccagcttagaggatgcaaaggctaaggtagagaagctgaccgaggatgtaaaggcagtactgtaaggcagtgctccataaatcatattagttttcaaaagagcgaatcgcccgagcagggcggtttgctcttttatgaaaagctggaggtatctgtggcaaagctaaacaaggcaaaccttaagaaaactctatattatctgcaacgtaacggcctgagggaaacctggatctctgtgagggagcgcctgacagatacagaccgctatttttttgtgccctgttcggaagcagagctggagaagcagagccggagaaaatgggaaagaccgattacgttcagtattgtggtacccttatatcgaaccccggaagcttatctgagcagaatgataacaagcgttatgcaacagagctatccccattgggaactgatcctggcagatgccacggaggatcacagtgtggaggaggtactgaagcagcagggattcctgaaggagcagccgacggatggcgagacagaacctgtcgcagcagatcccaggctccactatgtgcatctgaaagaaaatgcgggaatcgctgctaataccaatcaggcgcttccctatgcgaagggagagtatatcggtctgctggatcatgatgatgtattgacaccggatgcgttgtacgaaatggctgatgcgatcatcaaagcatatgacagaggtgtcaaagtcgccttcgcttattcggatgaggataagtgcgatggagaagagaccagatactatgatccaaatcataaagaaaactttaattacgatttaattttaagtaataactatatctgccatttcctggtcatggatgcggaactgatgaagaggctgcgattccgaccggaatgtgacggcgcccaggactatgatctggtactgcgctgtgtagcggaagtgctgacagagggagggcagactgcggagaagagcattcttcatatccccaaagtgttgtatcactggagatgccacgaggcatccacggcagccaatccccacagcaaaaaatacgcttacgaggcgggacttcgggctctgcgggatcatgccgcactgcgggggatccctgcgactgcctgtgagaccaggcatgtgggattttatcgtttacagtataccgatgtattacagaaccgcccggatgtggcagccgtgggaggcagagtattgtccgggaagactggcaagatcatcggcggcagaatgactgcggagggaaaggtgttctacgaggggttgccgcagggattcggaggatatcttcacagagcggaattgtcccaagatgcgcaggcgctggatcttcgctgtattcgtattcagccttcctgccaggaagtattcgagaaaattgtgggagttccgtatactgagatacgaagacacccgggagagcaaccggtattcgatgtaactgtactgccgtcaggagtggacatccgaaccttaagtctgcgattgtccgaagcgttacggcaaagaggaagattactctatctgccggaatatccggaggagtttaaaccattatgagtgaaataacggttgttataccaaattacaacggaatgaaatatctggcagagtgcatgacttctctgtgcagagagcagcaaaatgcccccggatatgaagtgctgatcatcgataatgcttccgtggacggcagcgtggaatatctgcaaaaggaatggtgtggggaaggtgtgcgcctgatatctttaccggaaaacaccggattctgtcatgcagtgaatctggggatccgggaagcgaagacaccatatgtgatccttctgaacaatgatacaaaggcagaagccggttttgtaagaggcttatatgatgctatccgcgaaaatgaaaagatattttccgtcagtgcgaagatgctgatgtgggacagaccggagctcatcgatgatgccggagaccgttactgcgtgctgggctgggcctattcccgggggaagggacgaccggcggcggattatgataagtctgtcccggtgttttccgcctgtggtggtgccgcaatctacagacgatccgtatttgaagagatcggttattttgatgaagaacattttgcctacctggaagatctggatatcggctaccgtgcccggatctacggctatgagaaccggtatgaaccgaaggcggctgtgctgcattatggcagtgcttccacgggatccagatacaatccccggaaaacgttacttgcgtctgccaacagtatttatgtgatcggcaagaatatgccgcttttgcagtgtattctgaacctgccgttttttttgcttggatttggcataaagtttttgtttttttgtaagaaaagaatgggaaaactatatctgaagggactggcagctggcctgagaagatcggtgggaaccacgggaagacagcacaaagttcccttccggtggcatcatctggggaattatgtgaagatccagtggcagctgtatttcaatgtgtttcgaattcttatgaaatcttaagaaatggcttcataaattcttaagttgagaaaaaaacatcgttattgtagaatgaaatcgttaaaaagaagcttttcagacttacagattgggtgacccatatgataaaagacaaccagaaagtctttaacaggcttcttgtgataatggatgcgctgatcacagccatatcctttgtccttgcctattatatcaaattttatatattgaacgacggtcccggaatcggtgtcctgcctgtgcaggagtattataagctgcttccttttattgtacccggttatatgctcctatattaccggtgcagcgtgtattccccgaagcgaaccgtccgccgcagacatgagatttacagcattctgcaggcaaataccatcggcctggcggcattgatcattatactgtatatgatcatccgtgagatcaacttttcacgatccgtcatggcaattttttatgtgctgaatgtatttctgacttcggtatcccgcatcataatgagaaaagcgttgcggacactccggaaaaggggatacaatctgaagcatattttactggtgggctattccagagcggcagaagagtatattgacagaatcttaagcaatccccagtggggatatgttgtatgcggtattctggatgagcacattccgggagggactacctataagggagtgaaagtcctgggaacgttggggaatctggagtatattcttccggagaacaagctggacgagatcgcgatcacgctttctctgaaagattatgattatctggaaggtgttgtggatatctgtgagaaatccggcgtgcatacgaaattcatccccgactacagcagtctgatccccagcagaccttacacggaggatctcatgggacttccggtgatcaatattcggtatgtgccgctgaccaacaccggaaatatgatgatcaagagagccatggatattgtcggctccctgttcggcatcatcattacgtcaccgatcatgctgttgtcggcaattctggtaaaatgttccagtccgggacctgtgatcttcaagcaggaacgggtaggacttcataataaatcattttatatgtacaaattccgcagtatggcaatgcagactgctgcggaggagaaaaagggctggacggtgcgaaacgatcccagagtcaccggaatcggcaagatcttaagacgaaccagcattgatgaacttccgcagctgttcaacatcctgaaaggagatatgagcctggtgggaccgagaccggagcgccctcagttcgtggaaaagttcaaggaagagatcccgagatatatggtaaaacatcaggtgaggccgggcctcacgggatgggcacaggtcaacggtctgcgtggtgattcttccatcaagaagcggatcgagtatgatatttattacattgagaactggaccctcgggtttgacattaagatcattcttatgacattttttacaggatttatcaataaaaatgcttattaacacaaggagaagacaagatggcaacaaattctaactacaatggcggcaatggtcagagaccagccggaagcggaagaagaccttccggaaatggacagagacctgcgggacagcgacctgccggatcgagacctgccggcaacagtaacggacagaggagagtatctgccaagcagcgtgctgccaagaagagaagaaaggttatcatcttcggtgtagagattgcggttatcctgatcatggtagcagtattgtatctggtaatgacccacacaaataatgaaggccccaaggtaacggtattagagacggaagagcttcggattccggaagaagtacaacaggacgaagcaatgaaggggtatatgaacattgcactgttcggtgtggatgcaacgaaggacagccagctgtacaagggcagccgaagcgacagtattatgatcgccagcatcaatatggataccggcgatatcaaactggtcagtgtatatcgtgatacgtatctgaacatcggcacggactcctatcagaagtgtaacgcggcttattcctatggcggagcggagcaggcagttaagatgttaaacatgaatctggatatggatattacgaactttgtaaccgtaggctataagggactgagtgaagtgattgacggtctgggcggtgtctatatcgatgtggactccgaggagatcaagcatatcaataactaccagatcggtattgcagaggtcttaaaatgtgactacacaccggtaacagagaccggagtacagctgctaaacggtctgcaggcgacggcttactgccgtatccgttataccgcaggtaatgatttcaagcgtgccgcacgtcagcgtgaagtgatccaggcgattgaagatcaggcgaagaaggccgattacgatactctgtccaaggtatttaacagtgccatcgatgatgtttacaccagcttggattccaaggatattctggatctgctggctaacatcacaaaatatcgtattgtggacgagggaggtttccctgaagagaccatgcgtgccaccggtaacatcggtgcaaagggaagcagtgtagtacctttggatctggagagcaatgttgtatggctgcatcagttcctgtttgatgatgcgaactacaccgtaaccgacagtgtaaaggaatacagtagaaagattgcgtccgatacggcaccttatctgaataaataagaaaacgaattgacgagggagtcttccggagagcaccggagctccctcgtgtcatatgaaaaagtcttgtgtaacagacggggataaagtataatagaccagagattgagaaagtaaggagcgctctgcaatggagatcgatgtgatcattcccctgtataaaccggggaaagaactatttacattattagataagcttgacagccagagcgtgccggtacatgaagtgatcctgctgaacaccggggaaaaatattttgagcagctgatctatggaaccagatttctggagaaatatcagaacattaaggtatatcatgtctccaaaagagaatttgatcatggcggcaccagacgcatgggtgtgaaaaaatcttccgcagatatttttgtcatgatgacccaggatgccatgccggcagatgacaatctgatcgaacaactgacggaaccgctacgggatcaggtggcggtatcctatgcaagacagctgccgagagaagattgtgcaccggtggaatgttataccagggaatttaattatccggcacagtcacggatcaaatccgcagaagatcttaagacattggggatcaagacatttttctgctccaatgtgtgtgcggcataccgacgggagatctatgaggaactgggtggattcgtaaaacataccatatttaatgaagatatgatctatgcggcgaaagcggtggaagcggggtatgcgatcgcttatgcggcggatgcccgggtgattcattcccataattataccaatgtacagcagttccaaaggaattttgacctgggggtatcccaggcagaacatccggaagtcttcgcagcatatccttcggagtccgagggaaaacgaatggtgaaagatgtgacagcatatttgcggaaaaatcatatgtccggcaagttgctccatttttatatacaatgtgcctgtaaatatgcaggttatctattaggtaagaactatcgcaggctccccggaaaatgggtccttgcttttacttccaacaaagaatactggaaacagaacagaaaggatgtatgactatgtgtggtatcgtaggatatattggaacagaacaggcagcgccgatcattttagacggtctgtccaaactggaataccgtggatatgattccgcgggtatggctatttttgatggtgagaagatcaacaccaaaaaggctgtcgggagacttaaggttctggaaaacctgacacacggaggcgagtctatgaagggaacctccggtatcgggcatacccgttgggcaacccacggtgctcccagtgatatcaattcccatccccatatgaataacgccggtaccattgctgtagtacataacggaatcattgagaactatattccactgaagaaaaagatgcaggataaggggtatcagttcatctctgagaccgataccgaggtactggcgcatctgttagactactattataagggaaatcccctggaagcgatcactaaggtattgcatcgtgtagagggctcctatgcgctgggtatcatgtttgccgatcagcctgataagatcttcgctgcccgcaaagacagtcctctgatcgtaggcaagagtgagagcggcagctttatcgcatctgatgttcccgcaattctcaaatataccagaaccgtatattatgtagataatcaggaagtggtggaactgaaggaagacggtcttagattcttctcagtggacgaagaagagatcacgaaaacccccgtgaccatcgactgggatgccaatgctgcggaaaagggcggctatgagcatttcatgctgaaagagatctacgaacagccgaagacgatcaacgataccatttctccccgtatcaaggataatgatatcgtcatcgaagaactgaatatgagcgatgaggagattcaggagatcacaaagatccatatcgtggcctgcggttccgcatatcacaccggtgttaccgcaaaatatgtcattgaaggtttggcaagaatcccggtagaggtggatgtggccagcgaattccgttatcgtgatcccatcctgcagaagggcaatatggtcatcgtcatcagccagtccggtgagactgcggatacgctggcagctctgcgggaatccaaggaaaagggcttcaaggtactgggtattgtcaatgtcgtcggcagctccatcgccagagaagcggacagtgttatgtacacctgggcaggtcccgagatcgccgttgcaacgaccaaggcttacagtgcacagctgacagcactttacatgctggctatgaagttcgccaaggtgcgtggaaccattgaccaggagaagttccagagtatgctgacagatttaagatgtctgccggatcagatcgagctgcttctgggccagaagcagaagatccagcatttcgccaaccgttatgtgggagcgagagacatcttcttcatcggacgtggtatcgactatgcgatttccctggagggatccctgaagttaaaagagatctcctatattcattccgaggcttatgcagccggagaactgaagcatggcaccatttccctgatcgaagatggcaccctggtagtggctttggcaacccagccggctctgttccagaagaccatcagtaatatggtagaggtaaaggcaagaggcgcttttgtcatggcggttaccatcgagggcaacaaggccatcgagaaagcagcggattatgtggtatacattcccgagacgaatccgtactttaccaattccctggcaatcattccgttgcagctgtttgcttactatgtggcagtgggacgtggctgtgatgtggataagccgagaaacctggcaaaatccgttacggtggaataacaagaaaattccggagaggtgaaaacttcttcggttttttttgatctttcataattgcttcagaaagttatcacaattcggtcacaattgacggttatactgtgttcataaggtgagagtaagaaatgaaataacaacgaagaatggtaaaaagaatttctcacttacagataggataggaggaagcattatgtacgagaatgataatttttccggttacgaaaccggcaatgaaaatacaaccggtacattcagcggtgtaagcgctgcgggaagtgcaaacggttacaccacataccagatgggcggaagcaccggcagcaatacagaacctaagaactccaaaaagcatggaggctatttccggaaagctatggtaagtgtcagcctgggacttttcttcggactgtttgccggtatcgggttctatgcggtacaacagggcaccgggatgcttaagaccggtacggataccgcagtggtgggtgaggttgcttccgaagctgcaacagagagcagccagagtacaccacagcttgcgaccaacgttacttatgtagagtctgatgtatctgatgtggtggagaaggtcatgcctgccatggtatcgattgtgaataactttactgagacagctaatgtcttcggccagcagtatacacaggaagaagcggccagcggttccggtattattgtaggcaagacggatgatgagctgctgatcgtatctaacaaccacgtagtagagagcgcagatacgctgactgttacttttatcgacggcagtgaagcacaggcacaggtcaaaggactggattccgatatggatctggcagtgatcgcagtatctttaaatgatctgagcgatgataccaagaatgccattaccgttgctactttgggcagcagtgatgacctgaagcttggtgagccggtgattgctatcggtaatgctcttggatatggccagtccgttactaacggtatcgtaagtgccctgaatcgtgagatcactctggagaacggtgctaccggtactttcatccagaccaacgcagccatcaaccccggtaattccggcggtgcactgttgaacatgaacggtgaggtcatcggtatcaactccaacaagatcggtggtactgccgtagaaggtatgggctatgcaatccctatcacttctgcaagtcccatcattgcagatctgatggagcgtcagaccagaaccaaagtagctgaggatgaagtcggttacatcggtatctctcggcaggaagtaacttcccagatctctcagatgtacaacatgccggaaggtatctatgtagtatccgtagaggaaggcagtgcagcagcgaatgccggtatcatgaaaggtgatatcattaccaaattcgacggcagcagcatctcgtcctactctgatcttcagaagatgttacagtactatgcagccggtgattccgcaaccataacggtacagagacctcagaacggtgaatatgtatctatcgaactgaatctgacactgggcagcagacctgcagataaaaaataaatatagcggttcccaataccgaatattggaaagacagaaaacccccggaagatcgtctgaatctcccggggattttgtttagaaaaacttcacttgtagcagtcattcgaattagatataataagcgtaggcatgagcagtgcaaggatcgtggattacgaaaaccgactgcttgcaggcgggattacgtaagacacgatacgtgtagggcgaagcccggatatcgaggtagcacgaagtgataccgagataagcactgcgagaagaaagcagcaaggaatagtggattacgaaaaccgactgcttgcaggcgggattacgtaagacacgatacgtgtagggcgaagcccggatatcgaggtagcacgaagtgataccgagataagcactgcgcaatagacaaagaggagaataacatgacagataattacaatgatgattatagagaagtgattcctgaggaagagaaaacagagaccactctgaacgaaaaaaaagataacgaaaaaaatagcgagaacacacaggtagcggatactgcgggtgaaaattccgctgagaaaaagacagaggacaaaaaggacagcagcgagtacgaggatgtctgcttcatctgccgcagaccggagagcaaagccggcagaatgttcaagctgcctaatcatatctgcatttgcgatgactgcatgcacaagaccatggagactgtgagccagttcgactaccagggcatgttgaataatccgagcgatctgaaccagtttggcggacagaacggattcccaaatatcagctttgtgaatctggcagacctccagggagacggcggcatccccaacaagcagaaactcaagaagaaaaagaaagccgaaggtcccaagccggtattcaacatcaaggatattccggcaccacataagatcaaggcaagcctggatgaatatgtggtaggacaggaaaaagccaagaaggttatctctgtcgcagtatacaaccattataagcgagttgcgactgataccatggatgagatcgagatcgagaagtccaatatccttatgatcggtcccaccggttccggtaagacttatttagttaaaacactggcgaaactgctggatgtgcctctggcaattgccgatgctacgtcactgacggaggccggatatatcggtgatgatatcgagagcgtagtatccaagctgctggcagccgccggtaacgatgtagagaaagcggagaaaggtattattttcattgatgagatcgacaagatcgccaagaagaaaaataccaattcccgggatgtcagcggtgaaagtgtacagcagggcatgttgaaattattggagggtgccgaggtggaagtaccggtcggtgccaatagcaaaaatgccatggtgcccctggctacggtgaacacccgcaatatcctgtttatctgcggcggtgcattcccggatctggatgagatcatcaaggagcgcctgaccaagaccgcatccatcggttttaattccgagctgaaggacaaatacgataaagataccgatatcttatctaaggtgaccgtagaggatatccgtaagttcggcatgatcccggagttcatcggacgactgcctatcatctgtactctgcagggactgagcaaggagatgctggtgaagatcctgaaagagccgaagaatgccattttgaaacagtaccaaaagctcctggaactggatgaagtgaaactggagttcacggacgatgccctcgatgccattgccgaaaaggccatgaaacgtgacaccggcgccagagccctgcgttccattattgaggatttcatgctggatatcatgtacgagatccccaaggataacaatatcggaagagtcaccattaccagagaatacatcgaaggtaccggcggacctatcattgacatccgcagtaatgagctcctggagcctgtggagaatctgaagcagattccggtggaagagaaataaattgagagttagtgaaataccacccggatgactttgttgtcttcctgggtgg

SEQ ID NO: 89 - DNA, 27086 bp, unidentified
  source 1..27086: mol_type = unassigned DNA
ccagcgtatgacatggcaggaagctatggatagatttggttctgataagccagatttaagatttggtatggaacttaagaatgttacagacatagtaaagaactgtggcttcggcgtatttacaggggctatcgagaatggtggaactgtaagaggtattaatgccaatggacagggaagtatgcctcgtaagaagattgatgcacttgtcgactttgcaaagggatatggtgcaaagggtcttgcttatatagctattcacgaagatggttcacttaagtcttcattctctaagtttatgactgaggatgagatgaacgcacttgttgaggctatggaaggtaagccgggtgaccttcttttatttgctgctgaccgcaataagattgtatggaatgtacttggagcattaagagttgaacttgctggacagatgggacttcttgataagaatgattataagttcctctgggtaacagaattcccacagtttgagtggtcagatgaagaagagagattcgtagctatgcatcatccatttactatgcctatggatgaggatcttgataagcttgagtcagacccaggttcagtacgtgccaaggcttatgatattgtacttaacggtacagagataggtggtggttcagtaagaatccatcaggctgatgtacagtcaagaatgtttaaggcacttggtcttacagatgaagttgctaatgagaagtttggtttcttacttgatgcgttcaagtacggagtaccaccacacgctggtcttgcatatggtcttgacagacttgttatgcttatggctaagagagattcaataagagatgttattgcatttcctaaggtaaaggatgcttcctgccttcttactaatgcaccagatgtagtagatgcaaaacagcttgaagacttatctatcagaattacagagtcagaacaggaataatattttaagagcatttgaaagtatttaatggatattttcaaatgctttttttaactatatttttagacaatactttgtgaaatctggatgaaaataatggctttatcagcttttttttagcaaaaatattgcatttgaataatcatgggtatatactttttttataaatctttgcaaaactataacaaaagactggagaaaaattatgacagagaatcagtatataagggcaaacaggactgttttatttacagttctcatagtatttggttatattgcgctgaccctgatggcagcattaggagtgggtgacggacataacaaaggaaagattttaatacagtttgttgtggcacttgctgtaattattgtatcagtagctgcttatattttaaggaagaagaccagagtgtgtgaattaacgattgcggtatcaatggcatttggatatgttgttcttatactgcttaattcaactgatggtgtatggacatatgtacttcctttgattatggcttcgatggtatatcttaatgaaaaactaatattgtgggctgatggcgttgcgatagctggtaatgtcataagacttattatggattataatatgtataatggagtggctatggcaagcagggttcttgctatattagtattggttattgttacatgtatatctcttagtgtaacaaagctgcttaagcagttttttgcagagaatatgaataagatagaggcagcagcagttatacagaaagagaataacgagaagatggttgctgtagctgataatataaccagacatttcggacaggctatggatatgcttgatgagttagaaaagagcatagatataaaccacaattcaatgaaagatatagcagaaagcacagaaagcacagcagaagccatacaaagacaggccactatgtgtgcagagattcaagaaaacactgatattgctgaaaaagagataagcgagatggttgaggcttcacacagaacagatgagactgttaatgatagtaaggctatagtagttgaacttaaggaacaggcacagaatgtacatgatgcaagcaatataatcgtagatgtgattaacagtcttacagaaaaggttgatgatgtacagggatttattggttctatcgtagagatttcaagccagactaaccttcttgcattaaatgcttcaatagaagcagcaagagcaggagaagccggaaagggtttcgcagtagtagccgaagagataagacagctctcagaacagactaagaatgcatcttcaagcataacagatataatcaataatctttatgaagatacgaagaaagctaatgagagcataaaagcgtcagttgagtcagttaataagcagaatgaacttattgataatacaagagtgacttttgaggacgtaggaaaaacagttgataatcttatgaacaatatagattctgcagagcagagcattaacaagatactggattcaacttctgttatttctgataatatttcacatttatcagcaacaggagaagaggtagcagctgcttcaactgaagacctaaaagtatctgacacaacagttgaaagtatgaagaactgtaagaatatattacataacatatatcttcttgcagaggatttaaagagttcagtagataactaaatggattgtaagagattaagcagattacaatgtattgcaagactagcagttgattattataagttgtaattaataatataatcaggatggttttgcagggttattaatatttataagacaacagtatgtttattataaggagtgcaaatgacattttatgtctgcattatttataaaagacagctgttgtttttttatgtaatagggaatttcgatagaatttcctatacataaaaggtgctatgtgccgatgatgcacacttgcacgaagatgtaggttgtcgcaagcgacagtgcttagtgtgagaaggtgcttcatatattttatttatataggaatattttatgcttgacttgaagttaactctaaatgctattatcaaaatgtagagttaataatcaggtttaattaataattatatgaggtgattaattatgagaagaaataatattagaaaaacagaggcacttataatggcatttgcattatcagcaagcctgttgttaacaggttgtggcaatagtactggtagtaagaatacagcttctaataatgcaagcattgtaagcagtagtaacagcgtagacaataataatggcagtagtggtaaccaaaatactaatggtgacagtgttaatgaaaataatagtacaacagacgaagctggaattaatcacgattatccggtaatgttgttctcttatgataagaatgatactaattatgaagaaccagaagcgtttaattcagaacatcttggcggcaattatggtgagattgagaagatagaatattattctccaactactaatgctacaagaaatgccaatgtgtatcttccatatggatatgataagagtaaaagctatcctgtagtatatcttcttcacggaatgagtggaacatatgaagattacagggttcttggtgcaagaccaacagcacagaatattgtgtatgaatacaaccgcaacgatatgatattagtaagctttactgtatttacggatgttgacggaaagcaggaatctgattatggattttcggatttaactgcaagatatgatgcctgtgaaaatgatgtgattaatgctcttattccatatattaattcgcattattcaactaagataggcagggaatacacaggaattgcgggatattcattaggtggacgggaagctctttatttatgctttgcacaccctgatatatttgggtatgtaggtgcatttgagcctgttggaggagttgttaatacaggaagcggtgaaacattatatggcaacaggggatatcttcttcctgagcttgttaaggaaagcggggaagcaccacttcttacacttatagtaacaggtgatgaagatccatattgcagggtatcatcagagaattattcaagatatatgacagaacattcaattgaccatatattctattacagacacggcggacacgaggcaggtgtatggaataatggcttatataactttctaaggcggatattctaatgaagattgtattaaataacttaattattgtacaaatgtataattatacattgacttattgctaaataatctataaaattaatagctatacaggttgtataactacaactatagaaaatggaggttgtaatatgtattcatttgatgaagtattgaactatgatccagaattagctaaagctatggatgatgaattagcaagacagagaagccatattgaattaatagcttctgagaaccttgtaagtaaagctgttatggcagctatgggaagccctcttactaacaagtatgcagaaggatatcctggaaagagatattatggtggctgcgaatatgtagatgttgttgaaacacttgcaattgagagagctaagaagttatttggttgtgaatatgccaatgttcagccacattcaggtgcacaggctaacttagcagcattctttgctatggtagaaccaggtgacactgttatgggtatgagccttgactgtggtggacacctttcacatggttcaccagttaatatctctggtaaatattttaatatagttccttatggtgttacagccgaaggttttatagattatgatgaagtattaagaatagctaaggaatgtaagcctaagatgattattgctggtgcatctgcatatgcaagagtcatcgacttcaagaagttcagagagatagctgacgaagttggtgcttatcttatggtagatatggctcatatcgctggtcttgtagcgggtggagaacatccaagcccaattccttatgctgatgtagttacaactacaacacataagacattaagaggaccaagaggtggtatgattctttcatcagcagaagctgctgagaagttcaagtttaacaagtctgtattcccaggaattcagggtggtccacttatgcacgttattgctggtaaggcagtatgcttaaaggaagcccttgacccaagctttaagacttatgctaagaatattgttgacaatgcacaggctctttgctcaggtcttatgaacagaggatttgatatcgtatctggtggtacagataatcaccttatgcttgttaatcttttaagcaagaataagactggtaaggaagtagaaaagcttcttgatgcagctaacattacttgtaacaagaatactattcctaacgatccagcttcacctttcgtaacaagtggtatcagacttggtacagccgcagttacaaccagaggcttcaatacagaagatatggatgtagtagcagaagctattgcattacttgttgatgatgttgatgctaatcaggctaaggctatggcaatggttaaggagcttacagataagtatcctctttacgaataatgctggaatatataagaaatgaacttctggggatgactgataaaggagaatatgcagcatttacatcctcacttattcctggctgcgataatataataggaataagacaaccggtattaaagcaatatgcaaaacagctgataaaggagaataaggatttccggcagctgcttagtgaaccggatatttatcaggaagaaacactgcttagaagctacataataggaatgggaacagcgaaggagaaagactttaagaaggctttaaaagacttcaacacattcgttcctcttgtgaacaactgggctgtaaacgacagcttctgtgtagaattcagggttatggatatgtttcgggacgagtttctgccatacataaaggaatgtatagaatcgtttgatgaatacagggcaagagtagggcttataatgctgttagaccactatttaaaggttgatatgcatggcatgaaaagaccgagaatgaaaaaggttactattaaagatatagaaagcacagatgaaataaattgtgctaatggtttatatcttgatgatatattttcacttgtaaacagggatttttcggcctatggatattatacacagatggcagcaggctggcttcttgcggaatgttttgttacatttccaaaaagaacgtgggaatatcttacagataccgactgcttaaagttagataagttgtcatatcagaaggcggtacgaaagatatgtgaatcgctcacgccggataaagaagttaaactaaaagttaaaaaggatctgaagcagatgtaataatctgtttcaggtctttttttattgctttagtatattttaataatttgaatatcaaaataaccttgacaaacacataagttttgtagtataaaaataatgtttgaaaatcaaagtaagataatcaaattgttagtaagtcaaataaataaggacaaaaaagtatgataagaacaagaatcataggaacaggaagctatgttccaccagatatattgactaacgataatctgtcagaaatggtagatacgagtgatgagtggataaggacaagaactggtatatgtaacagacatatagcaaaagatatggataatgctgatatggcatataacgctgcaagaaatgcagtagaggatgcacgtattgaagcttctaagattggtctgattatagttgcaacgtcaactcctgattatgcttttcctaatcaggcatcacttgtacaggcaaagcttaaagcagtaaatgctatgtgttttgatgtaagtgcagcatgttcaggttttattacagccctggatattgcagcttcaatgttaaaggcaggttcgtataaatatgcacttgttattggttcagaaaaaatgtcagaaatagttaactggaaagacagaagtgtgtgtgtgctttttggagatggtgctggtgcagtggttcttaaagcagttgataacaacacagaagatgttacaggtgccttagttggtcatgaaagaggaattattgacagcaatatctacaatgatggaacaggtgcatctgttttaacaggtggcagaagattttctgattcatgcagcacagatatatttatacatatggatggacaggaagtgtttaaattcgccgtaaagagtgttcctacagctatagaaacacttttacataataataatatggatattaatgaagttgataagttcatattgcatcaggctaatgtacgtattatagagagtgtagctaaaagacttaaggctgataaagataagtttccagtcaatctgaatgaatatggaaatacatcatcagcaagcattcctattctgcttgatgagttaaacaggaatggaagcttaaaacagggagagaagcttgtacttgccggttttggtgcaggattaagctggggaagtattctgcttgtatggtagcacggttaaagatgctaagcttattatatagatatttgcagactgcttactaaaagatatcaggcagccggataagcggcattttaacatatataagatgtttatggcaaaagctttgccatagatatcaaagttgtgggcttttgaccccgacaacatataataaaaaataataagaattaaggagatttaacattatgtttgaaaaagtaagagaattagttgcagcacagttaggtatagatgaggcagttattaagcctgagtctaatttcaaggaagatcttaaggcagattcacttgatctttttgaacttgttatgtcacttgaggatgagtgttcagtaactattccatctgaggagcttgaaaagattcttacagtacaggatgttgttgattatatcgaggctaaccagaaatagttataaatgtcaggaaggaagataagttatgaaaactcgtgtaacagagcttcttaatatagaatatcctgttatacagggcggtatggcatgggttgcagatgctaatctggcagcccacgtcagcaaagccggtggaatgggatttattggagcagctaatgcgccggcagaatgggttaaagaacagatacatattgcaagaaagataacagataagccagttggtgttaatattatgcttttaagtgattatgcagatgagatagcacagcttgttattgatgagcatatagaagcagtaacaacaggtgcaggcaatccaagcaaatatatgaaggcctggaaggaagctggaataagggttattcctgttgtggcatcagttgcacttgcaagaatgatggaacgtgccggagcagatgcagttgtagcagagggcatggaatcaggtggacatatcggcgaggaaacgaccatgacacttgtaccacaggttgttgatgcagttaatattcctgttatagcagctggcggaataggtgatggcagaggtgtatgtgcggcatttatgcttggtgcagaggctgtacagatgggaacaagattcgttgtggctaaggagtcaaatgtccatcagaattataaggacagagttatagctgccaaggatatagattcagtagtaactggcagaagtacaggtcatccagtaaggtcacttagaaacagcatgacaagagagtatcttgatatggaaaaagaaggcgttgagtttgaaaagcttgaaagacttactcttggaacattaagaaaggctgttgtggatggtgatgtcaagcagggaactgtaatggcaggtcagatagcaggtcttgtcaataaggaacagacatgtgaagagattattaaggagcttatgaaggaagtctctgaggtatataattcacataataagctggcataaaaacagtgtatggaaatgaggatttaaaaggtatgggaaaaacagttgtaatgtttccaggacagggaagccagtgtactggaatgggaagagaaagctataatagctgcacttcatcagtaaagtgctttaagaaggctggtgaactgacaggtataaatatggagcatttaatatttgaagaaaatgatcttcttgataaaaccgagtatacacagatcgcgttatatgtaacagaaatcgcccagcttgctgatatggttgagcagggccttacgtatgatgcagctattggactttcattaggtgaatatagtgcacttactgcaagtggtgcgctatcttatgaagatggtgtaagacttgtaagaaaccgtggaatatatatggaacaggaggttccggctggtataggtgccatggctgcagttatcggtcttacatcagatgaggttgacagtgtacttgctaaatataacaaggataaaagcgggaacacagagtctgataatgatatgtatcctgatacagtttccgcagctaattacaactgccctggccagatagtaatatcaggtaaaaaggaatgtgtacaggaggctatggaagtgcttaaggaagcaggagcaagaagaacactccttcttaacgtaagtggaccgtttcattcaaagcttcttaagggcgcaggtgataagcttatgaaggatcttgaaaaagttacttttgataaagtgaagtatccttatgtggcgaactgtacagctgagtatgtagatgagaatacatccagtggatatataaaagaacttctttcaaagcaggtatatagttcagtacgttttgaacagtcagtcagaaaaatgatagccgatggttatgatacatttgttgaggtgggaccaggaaagactttatctggctttgttaaaaagatagctaagagcatggaaaaggaagtagttataaaataacaggcaataaatgcagacaagatattggtaaggctttagcaatattgtatcgatgaaaggcagtgtgttatgtgtatggataattggataaaaagatatgaaaacaagatagtgcttgtaaccggagctggcagaggaataggagctgctatagctgcccgttttgccaaagagggggctgtggttattgttaattacagtggtaatgatgaggcggcagatagaacagttgaaaatattctggctgccaacggaaaggcagaaaaatacaagtgtcaggttgattcgtatgaagaaactgaaaaaatgatcacatatataatggataaatataagagaatagacattcttataaataatgcaggtataacaaaagatggtcttatcatgagaatgaaagaggaagattttgacagagttatagatgttaatcttaagggaacatttaactgcataagacacgtaagcagatacatgttaaagcaaagaagcggaagaataatcaatatgtcatcagttgtaggcatagctggtaatgcaggacaggttaattacagtgcttctaaagcaggtgtgataggtattaccaaatctgcagcaaaggagcttgcatcgcgtggaataactgttaatgcagttgcacctggatatattgatacagatatgacaaaggttttatctgatgaacagaagaagtcagtacttgatatgattcctctttcaagaatgggaagcgtggatgatataagcaatactgtagcatttctggcatcagatgaagcggcatacataacaggacaggtgatatcagtagatggaggtatgaatatctgatgagaagagtagttgttacaggtatgggtgcaataacacctataggtttaagtgtggatgaattctggaattctgttaaagagaatacagttggaatagataatataacaagatttgatacaacagattataaggttaagcttgcagcagaggtaaaggattttgatgctaagaattatatggatttcaaggcagccaaaaggatggagaagttcagccagtatgctgttgcggccgcgcatgaggctatgaaggattcgggacttgatatggctaaagaggatgctttccgtgttggtgtatcagtaggctctggtgttggaagccttgaagctatggaaagcaatcacaagaagcttcttgaaaagggtccatctaggattaatccgcttcttgtacctcttatgataactaacatggcagctggcaatgtatcaatacagctaggtttaaagggtaagaatataaatgttgttacagcatgtgctactggaactaactctataggtgaaggctatagaagcatacagcatggagaggcagatgttatgtttgcaggtggaactgaaagttctatatctcctattggaatcggtggttttgctgcgcttacagcactttcaacatctacagaccctaagagagcctctatcccatttgacaaagaaagaaatggctttgtcatgggtgaaggagcaggtgtggttgtacttgaagagctggagcatgctttaaagagaggagcgcatatatatgcagagatcacaggctatggctgttcttctgatgcataccatataacatcacctatggaggatggaagtggagctgcatatgctatgacaagtgccatgaaggaagcagaagtaaaaccagatgatatcgattatataaatgcacatggaacaagtacccatcataatgatctttttgagacaagggcgatcaagctggcacttaaggatgcagcttacaatgtgcctgtaagttcaacaaaatccatggttggacatctgcttggtgcagcgggtgcagttgagttcatagcctgtgtcaagtcaatccaggatggttatatacatccaaatgtaggactatcagaaacagaggaagaaatggatcttaattatgtcaaggatgaaggaatcgaaaagaacgttgatgtagtcatgacgaattctcttggttttggtggacataatgcaactcttatagtaagaaagtattcataatatgatgaacgcttaaagtacataagtggattgctggtgagatatatggaataccagaatatgaataaaaggtcatgaagaaatggagataatatatggaattagaaaatgtaataaagctcattaatgctgtatcagaatcttcacttacaagctttagcatggaagatggcgacactaagctttcgcttggcgctgacagaagtgacagggcagctgttaaagatactgccggtgctgatgatatagttaatagcgatagcggcgataaatcaggattgaataaatcggacattaaaacttctgatgataatgtgcttactgttaattcaccacttgtaggtgtattttacagttcagcatctccggaagctgatgcatatgtagcaataggtgacagagttaaaaaaggtcaggtaatcggtatagtagaagcaatgaagcttatgaatgagattgaaagtgattatgatggtgtggttactgatattcttgtagataatgaacagatggttgaatatggacagcctatgtttgttataaaaccagtctgacaatacgtcggtatcaaaggcatgggtttttgataccgacattatatatatgaaattcgattatttaatataaggagttaagtatgcttacaacaaaggaaataatggatattataccacacagacatccttttctgcttgtggatacgatagatgaacttgagcctggaataaaggcaacaggatataagtgtattacatatgatgagccttattttgcaggacattttccagctgagcctgttatgccgggggtccttcagatagaggcatgcgcacaggtaggcgctgttgcgatactttcgctggaagaaaacaaaggtaaaacagcatattttggtgcagttaataatgcaagatttaaaagaaaagtagttcctggtgataaacttaagatggaatgtgagattataaagaaaaaaggaccagttggcgtgggaaaggctgttgcgacggtagatggcgaggttgcacttacagcagagcttacatttatggtaggttaatccgtctgatgttataaatataatatgtggattatggaatgattataaggagatgaagctgtgtttaataagatattgatagcgaacagaggcgaaatagctgttagaataataagagcctgtagggaaatgggtatacagacagttgcagtatattctgaggcggataaggaagcacttcatacgcagctggctgatgagagtgtatgtataggaaaggcagcagctaaggatagttaccttaatatggaaagaatattgagtgcaacagtagctacacatgcagatgcaatacatccaggctttggatttctttctgaaaacagtaagtttgcatcattatgtgaaaaatgtaacatcacatttataggtccagattcagatatcatagagaaaacaggtaataaacaggaagcaagaaatacaatgatatcagcaggtattccagttattccaggaaccaaagaaccagttatggatgcagaaagaggaaaagagcttgcagacaatataggttatcctgttatggttaaagctgcacttggcggcggtggcaaggggatgcgtgttgtatatacaaaagaagattttaaaagggaattcgataacgcacagagagaagccgtgaatggctttgctgatggcacaatgtatatagaaaaatatatagaaaagccaagacatatagagttccagatattagctgataaatatggaaatacaattcatcttggtgaaagagattgttcaatacaaagaaatcaccagaagttagttgaggaatcaccctctcctgcgttgaatgatgaattaagaaagagaatgggagatactgcagtggcagtggctaaggcagttaactatgaaaatgcaggaacagttgagtttcttcttgataaaaacgacaattattactttatggaggtaaatacccgtattcaggtcgagcatggtataacggaacttgtgacaggtgttgatcttataaaggaacagataaagatagcagccggcgaaagtcttggtattaagcaggaggatgtaaggatacatggtgctgccatggaaataagaatcaatgctgaaaaccccgaaaagaactttgcacctaatccgggaacaataaagaatatacatataccaggtggtaatggtgtaagaatagatactgcagtttatagtggatatacgatacctcctttttatgattccatgataatgaaggttatgacatatgcaaacgacaggaaaacagtgattgagaagatgagaagtgtccttggcgagattattattgaaggtgtcacaacaaatacagattttatgtatgatatatgccagaatgagaagtttattaaaggtgatgtcagtacagatttcataccagaggagtatccacaggtatgtaaaaaatagttgttcgttatgcacagtaagagtgcgtggaaatgaggatttatatgcagataaaaggcttgtttaaaaagaatatccataaaaataaaatcaacaatctggatagcagtaatataaatgttccagatggattatatacgaaatgtccggtttgttcaaaaataattttaacagaggacatgtatctgaataattgtgtatgtccggaatgtggatattatatgaagctggatgccagaacaaggatatccatggtagtggataagaatacattttcagaatgggatactaacattgaagagagcaatccatgtgaatacccaggttatgaggagaaaatccagaatcttaaaagaaaaacaaatcttgatgaggcagtaataaccggtgttggaaagatagatggcagcaaagctgttataggtgtctgtgatacaagatttcttatgggcagcatgggcgaagttgtaggtgaaaagcttacacgggcagttgagaaggctacagagcagaagctgccggttattatatttacatgctcaggcggagccaggatgcaggagggaatagtatctcttatgcagatggcaaagataagtgccgcattaaaaaaacatgatgaggcaggacttttatatatcactgttcttactgaccctacaactggaggtgtaactgcaagctttgctatgcttggagatattatacttgcagagccaggtgcccttataggttttgcaggaccaagagttatcagacagactataggacaggaactgccagaagggtttcagagagctgaatttctgttagagcacggctttgtggatgcgatagttaaaagggatgagctaaagaagacacttgcgcatctgcttgacatacataagtacagtggagcttatacagaagttaaagaaaatgtggatacataccggagcaattcagatattatgaagaagtatcttgagtatcttgataatatatatttcaaaaagatagatagagaagaagaaaaaaaggctgaggctgataataatctgtataatgagtatgatgtatgggaaaaggttgaaatagcaagaagcagtgaaagacctaatgccgcagattacatagaaaaaataactaaagatttttttgaacttcatggtgacagaaacttttgtgatgataaagcaataataggtggaatcgcaacatttggcggcattcctgtaacagtcataggacatatgaagggtaagactactaaagagaatatatcaagaaactttggaatgcctaatcccgaagggtatagaaaggcactaaggcttatgaagcaggctgaaaaatttaacagaccggttatatgttttatagacactccaggagcatattgcggtcttggtgcagaagagcgaggccagggagaagctatagcaaagaatctgtatgaaatgagcagtcttacagttccggtattgtcaatagtaactggcgaaggtggaagcggtggtgcacttgcactaggtgttgccaatgaggtatggatgatggagaattccatatattcaatactttcaccagaaggctttgcatcgatactgtggaaggattctaagaaagcaaaagatgctgcggaaataatgaagctgacggcagcagatttatatgagcttggcataatagagaaggtcattccggaatatccggttataaatgaaaataatataaaaagagtgacattatatatgaaacgcatgatatgtgattttatgtacagatatattgatatggacaaggaagaacttgcaagacagcggtataacagattcaggaaaatgtaagaaagcactaaatctattacatttttttatggttgtattaatataattgtgttaatatgattatgttaatgtgattgttttaatgtgattgcgtaggaagattacggaattgttatatctaaacagaaagaaggaatatatatgtcatatggatacagacaatacagggatactgctcatagatggacacagataggtgttggtttaatatctgtaatagcaggtcttatacttattgtatgtgtaacggcacctatgtatgtctcaagcatgttaaaggatgcaggactgtcagctgctatatcgcaccgttttatggatactgtttttgattcacttggggataatatggaggcgttatccagaattcagacaagtatagaggattctaagatagtagacagaatagcacagaaatatacaacggctatggttgacgggatgcttaaagaaaaatcctttgatgatatagagattaatatagatgcagagctggatgagcttatggatatgacatataacaaaatagcatctaatatcaatatgggaaatatacaggaaacaatagtcagggcagctcttagctatagtaaaaatgctgcaaatgaggctataaataattatgccagtggtatatatggtgatatatcttatcgtctgcagccgcttataaaggtatatggaataataacgtctgttgtgtttaagatattgatgcttttaatatatatcacattattgattgttatcattgcatttaatcctgtcagggttgtaaggtacacactcccatgtatatttgtcataacaggtggtatatatatttttattgcaaatataattggaaacagatgtatggcggctgtaagtaacagatatctaggaagaactgtgtttatagatactcagattgcttatagggttatgggtgttatgtgtatactggcagcagcttcttatgttattactttgatatatggaatggttgtgaaaaacaggagaaaaagaatatagaaatatctgagattaatgtttgataagagtttattagagtttataagagcttataaaaactcataaaacattataaaagatgaaaaatggagctgctacatatatatgtggcagctcctgattttgttttataatacttgttatataatattttttaaagtattatttgttattcttcttttcgttctcaagcttcttcatagctcttaccttaagtgaaagaccaaagaggttgatgaaaccatcagcatcatggtggtcataaaggtctccagttgtgaatgaagcgatagattcgttatataatgaatatggagatgttgttccggctttgatgatgttgcccttgtagagcttgaacttaacttcaccagttacatattcctgagtcttttcgatgaatgcctgaagagcttcacgaagaggtgtttcccactttccttcgtatataacctgtgcaaacttgttagcaacatttatcttttctgttgttgtatctctgtcaagtatgagttcctcaagctgctggtgagcttcataaagaatagttccaccaggtgtttcatacacaccacgtgatttcatgccaacaactctgttttctacgatgtcgataataccgataccatgctttccaccaagtctgttgagttctctgatgatgtcagaaaccttcatcttcttaccattaacagatgtaggcacacccttttcaaatgtcatagtaacatattcgccttcatcaggagcatcctctggtgagcatccaagaacaagaaggtgcttgtagttaggctcgttagcaggatcttcaagctcaagaccttcgtggctgatatgccatatgttacggtcacggctgtagcttgagtcagggctgaatggaagatgaataccatgctgtctgcagtattcaatctcatcttcacgtgactgaagagtccatcttgaatctctccaaggtgcgatgatcttgatatctggagctaaagctttgatagtaagctcgaatctgatctggtcgttacccttgccagtagcaccatggcatatagcaacagcgccttctttacgtgctatttcaacaagtctttttgctataacaggtcttgccatagaagttccaagtaaatacttgttttcatataccgcatgagcctgtacacaaggaacaacatagttatcgcagaattcatctgtaacatcttctatgtataactttgcagcgccacatgataatgctctttcttcaaggccatctaattcttcttcctgtccacagtctgcgcagacacagataacatcgtaatcaaatgtttcttttaaccaagggatgatggcagtagtatcaagtccgcctgaataggctaaaacaactttctctttcattaaaaagtacctccatagatatttataaactctgccaattataataaactacttatggtgaaaatgcaatagcaaaaaatgaatattatgcaattttatgcattgattatgcataaatataaaaacatatctaataaactctttacataaggaaaaaagttgctataatggaacttatcatttttgttaattcatttttatatgtggattactgatgaaaatattcacacgaatgaataattacacattcagatggaggacgtatggttaaggttggaattatcggtgctaccggatacgcaggtaacgaattagtaagaattcttttaggacacaaagatgttgagattgtatggctgggttcaagaagctatattgaccagaattattcagatgtatatagaaatatgtttaagcttgttgatgcaaaatgtatggatgacaatatggatcagcttgctaatgaagtagatgttatatttacagctactcctcagggcttatgtgcatctcttgttaatgatgagattctttcaaaggtaaaaataatcgaccttagtgcggacttcagattaaaggatgttgatatatatgagaagtggtataagttagagcataaagctccacagtatattgatgaagcggtttacggattatgcgaaattaacagggataaggtgaataaggatacaagaatcatagctaatccaggctgttatacaacaacatcaatccttacattatatccacttgtaaaagaaggaataatcaatccggatactattataatagatgccaagagtggtacatctggtgcaggaagaggtgcaaaggtagcaaatcttttctgtgaagtaaacgaaagcatgaaggcttatggagttggtacacacagacacacaccagagatagaagaacagcttggatatgcttgtggaagagatgaccttaagcttatatttacaccacatttagttccaatgaacagaggaatacttgtgacagcatatgctaatcttgcaaaggatgtaacttatgaagatgttaaggcggcatatgataaatattatgataaggaatattttgtaagagttcttcctaaggatgtatgcccagagacaagatgggttgagggaagtaactttgtagatataggatttaagatagagccaagaactaacagaattattgctatgggtgcattagataaccttgttaagggtgcggctggtcaggcagtacagaatatgaatcttttattcggttttgaggagaatgaaggacttaagattgcacctatgttcccatagaattatataatacaggcggcactataaatattttattcatataagattaataagacgtgattattaatctggacaggaggaagttatgcagattatagaaggtggagttacagcggctaaaggatttaaggcagctggtatggcggcaggaattaagtataagaatggtaagaaagatatggcaatggttgtttcagacaagccttgcgtgacagcagggacatttactcttaacagagtatttgccgctcctgttaaatgggataagaatattgtatacaatgaagattatgcacaggcaattgtagtcaacagtggtgttgctaatgcctgtacaggtgttgagggtgatgaagcctgtgcacttgaagctaagacagctggagaggcacttggaattccagctgatgcagtgcttcttggttcaacaggtgttattggaatgcagcttcctatggatagaatgtgtgcaggaattaaggcacttccggaacttcttgattatactaaagaggctggaacacttgccgcagaggcaattatgacaactgatactgtaagcaagcaggttgcctgcacagtaaatattgctggcaaagaagtaacggtaggcggtatgtgcaagggtgccggtatgattcatcctcatatggctacaatgctctgttttattacaactgatgcagttatagagaagaaagcacttcagaagatgacaagtgatattgttgaagattcatttaatatgatatctgttgacggagatacatcaactaatgatacagtgcttgttcttgctaatggagaagcaggcaatgatactattaaggaaggcagcagtgattatgatacattttatgaggcattatcttatgtacttacagagctttctaagaaaatagcaggagatggtgaaggctgtacatgtctttttgaagttcaggttaagggagcttcaactaaggaacaggcaagaattcttgccaaatcaatagtgacttctaatcttacaaaggcggcaatatttggacacgatgctaactggggaagaattctttgtgctatgggttattcaggcgttgatttcgagccggagaaggttgatatattctttgaaagcaacgcaggaaagcttcagatagttaaaaatggtactgcaacagattacagcgaagaaaaggcaactgaaattctttcacaaaatcctgtaaccgcaatagcagatattaagcagggtaacagtgaagctacagcgtggggctgtgaccttacatttgattacataaagattaatgctgattacagatcataatagttaagaataaaatggcattgtaatattgtcaggaatgaggataataaatgagtacaattaatatggaagaagagttaaagaaggcacaggtgcttgttgaagcactcccatatatacagaagttcaacagaaagattatagttgtaaaatatggtggaagtgcaatggttgatgaagaacttaaaagaaaagttattcaggacgtagtattattaaaggttgttggatttaagccaattattgtacacggcggcggcaaggaaatcagcaaatgggttgaaaagtctggaatgacaccggaatttaagaatggtttaagagttacagacgagccaactatggaaattgctgagatggttcttaacaaggttaataaaagccttgtatcgcttatagaggaacttggcgtaaaggcgtgtggtataagtggtaaagatggcggtatgctaaaggtggaaaagaagtattcaaagggtgaagatataggatatgtaggtgaagtcaaggaagttgatacaacacttatacattctcttcttaaggacgattttcttccagtaatatgccctataggatatgatgacaatttccacgcttacaatattaatgctgatgatgcagcttgtgccattgcaagggcagttaatgcagagaagcttgcattcttaacagatattgaaggtgtatacaaggattataatgataaatcaagccttatctcagaactttcaacaactgaggcaaggcaattattagcaggtggtacaataggtggtggtatgttacctaagcttaataactgtattgatgcgattgaacacggtgtttcaagagtgcatatacttgacggtcgtattccacactgcctccttcttgaaatatttactaacaagggtgttggtacagctatattatcagaaggtgctgagaaattcttcgatactaatatataataacaggagtagttatgcagacagaacagattattaaaacagcagaagaaaagttaatacatacatataacagataccagattgtacttgataaaggtgatggtgtaagattatatgatacagacggaaaagaatatcttgattttggtgcaggtattgcggtatttgcattaggttataataacaaggaatataatgatgcgttaaaggcacagattgacaagcttatacatacatctaattatttctataatgagccagcggtaaatgctgctaaagcacttacaaaggcttctggaatggacagggtattctttactaacagtggtacagaatcaatagagggtgctataaagcttgcaaagaaatacgcttatttaaagacaggaagaacagattcagagattatagcaatgcatcattccttccatggcagaagtatgggagcattagctgtaacaggcaataagcattatcaggaagcgttcggacctatgattccgggaattaaatttgctaattataatgaccttgaaagtgttaaacagttggtaaatgataaaacttgtgctattatatttgaaacagtacagggtgagggaggaatatatcctgcaactaacgaattcatcaagggtgtaagacagctttgcgatgaaaagggtattcttcttatacttgatgaaatacagtgtggaatgggaagaacaggtacaatgtttgcattccagcagtatggagttgagcctgatattcttactgttgccaaggcacttggctgtggtgttccagtaggtgcatttcttgccaaggaagaagttgccaaggcacttgtaccaggagatcacggtacaacttatggcggtaatccacttgcgtgtgcagcagcaacaaaagtatttgaattatttgagaaacagcatatattggataatgtcaaggaagtatcagcatatcttgaagaaaagcttgatgaacttgtagcagaatatgattttataattgagaggagaggacttggacttatgcagggacttgaactttcaatcaatcctaaagatgttattgctaatgcattagacaatggacttatactgttctcagccggaactaatgttatcagaatggtgccacctcttgttataactaaggcggacgtagatgaaatgataacaaagttaaagaaatcattttaataaaggttggatgaataatgaaagtaattaagaagcttgtgtcagttcttatggcaggtgttcttactttatctgtgatggcatgttcaggtacagataagaataagacagcaagggaacttgatatagagactcctgtaacagttaatgtctggtatgataataaggactatgacagctatcttgaaaatgtagcgaaagaatttaaagaggctaacaatctggttactgtcaatccggtatatgttgagtcatcagattttgttgatacaatttacaatgaaactgtaagaaatgataatgtgccagatgtgtatcttatgtcatcagagaattgcaataaggcatatcttttaggtcttatgcttgaaaatgattcttacaaggatgtatacaatgataaagtatatggacaggctgcccttatagcaagctcatataatgaaaagttatatggctatccggttacatttaatatgccggttatggtgtataacagtaagcttgcaggtgcagttgatacatttgatgagataaaagaatataatgataactacgaagttacagaagataataaaagtgttcagaggatatttaactttgatgcatcatcaatgtttcttaattatacatttacaggaagatacgttaatataggcggcaataatgctgaggattcaggagcatttgcaatagatgaggtgcattttaaaaaggctttaactgaatatgtgaagttaaaggacacttatgcgattgatagatataattcatcattgcagtcgtgtgtatcacagtttgcagagggaaagcttatatatacaatagttgatgccgacagcctttcaacaattgatgcttcaggtgttgaatatggaataattccagttccaaagcttgcagatgatttagagtcaaaggcaatgtcagttactacgatggcgatagtaaatccatacacatcaaatattgcggtatccaaggcagtagcaagggcaatatcatatgactatgcagaggatttggaaagtcttagtgggcatatgagtgcaagggcagacataagctataaatcaaagacccagcagagcaattacaatacactgcacacaatatatgctaacagcatcgtaaaagccaaatatgtaggagtaggcaacatatatacaaaatatgagattatgcttcaccagttatgggacggagtggattttaacagtgcatataatgagttttacaaagaaatctccaattatatgacactatcaaggcttaataattaaatatggaataatacattagtgtggataaaaatgtaatttactccaatattagtgaataaaatcctgctatcagtaaatactttattaacaatagagattgttaaaggaggttgtctgatggcaggatttattgttgcaataatctcaggtgcgttaatgagcctgcaaggtgtacttaatacgaatgttacaaaagcgagcagtatatgggtggcggcaggcttcgtgcagtttacagcacttgcaacctgcattataatgtggttgtttaacggaagacctgatattagtggaatatttcaggtagagaataaaatatcattattaggcggtgtgataggagcattcataaccttcaccgtagtaaaaagtgtatcagacctaggtgtagccaaagccgaagtcacaatagtagtagcacaggtaatagtagcctatataatagaacttatgggcttatttggaagcaaaaaagccgacttctcgtggctcaaactcttagccctgataatagcaatgggcggagtatttatgttctacaatacagggaagaattagatggagaaggagattaaggttgtattgaagtgaaaaggtagctgtagtaagtgatgttgggaaagaattaaagttgtaaaactgacggtgaggggatataatgtgcgtaagctacaagccgtgccagacagaaaacttaaaagctgctgtgcttgcacaaagctgcttttaaaatttctgtctgatagggcgacagcccgacagtccaagaaagccagagctttcttggacctgcacggcgaaaccagtgggaaatcaactaaaggcgatgtgcaaagcacgagccagcaaaaacaaatcataagcaggctaaggaaagcaaagtgcaaagcacgagccagcaaaaacaaaccataagcaggctaaggaaagcgaagtgccaaagcacgagccagcaaaaacaaaccataagcaggctaaggaaagcgaagtgcgaagcacgagccagcaaaaacaaaccataagcaggctaaggaaagcaaagtgccaaagcacgagccaaaagtaaaggcaatccgcggcagtacataataagccaaggcaaagtagaagcgaagtgcgaagcacaagcgcaatctatgccaccactgcatttcccaccccaccccaaataaaagagaggacctcaaccaatgaccaatttattcaaaataacaggcacagtaaccctgaaaaaaggcgccggccgtcaattaaaatccggcggtatgtgggtatacgacaacgaaatagacacattttccgaaaccgtagaagacggaggccttatcgaactccatgatttcgatgattactttatgggaataggcttcgtaaaccgccgttccaaaataacagtaagaatgttatcaagacacgagggagagattaacgaagaatttatcaaacagcgtgtaaaagatgctgtttcctacagaatggatactgtcgatacatcttcctgccggcttatattcggagaggcagattttcttccgggtatagtaatagacaagttctcagatgttcttgtagtagagtcacttgcacttggaattgacagatttaaacagcttattgtcgatgacctgaaagaaatacttaaagaatatggcatgccaataagaggcgtatatgaaagaagcgatgccaaagtaagacagcttgaaggaatggaaagagttaaaggctttatcggtgaagaattcgataccaaagttatgataactgaaaatggtgttaaatattatgtagatgttaaggacggtcagaagacaggctttttccttgaccagaaatataacaggagagctatcggcggcttatgcaagggtgcgaaggttcttgactgctttacacatacaggttcatttgcacttaatgcaggaatatcgggagcttcaagcgtattaggagtagatgcatctgaacttgctgttaatcaggcgacagaaaatgccaagcttaacggacttgaggatattgtccgattcaaatgtgcagatgtgtttgacctgcttccacagcttgaaaagagtggcgagaagtttgatgttgtgattcttgatccaccagcatttaccaagtcaagaaattccattaaaaatgcagttaagggatacagagagattaatcttagggggatgaagcttgtcaaagacggcggataccttgcaacctgctcttgttcacattttatggatccggaattgttcactaagacaattggcgaagcggcaagaaatgtacataaaagactaagacagatagaatacaggacccagtcacctgaccatccaattctgtggtcagccgatgagtccttataccttaaattctatatttttcaggttgttgacgaaaagtaa

SEQ ID NO: 90 - DNA, 11630 bp, unidentified
  source 1..11630: mol_type = unassigned DNA
atgactctggcttctccggaaaatattttaaatgtaaccgaattatgccgtatagcaggggtttcccgttccggttattataactggttgaaaaatggtcagaagccaagtcaaaaagaatatcaggatcaggcagactttgctttaattcaggaagcatatgcatttcgaggctatgataaaggtgtaatgggaatttatatgcgccttctgcatatgggtatccgtatgaatcataaaaaaatccgacggctgatgcgaaagtatgggcttttctgtccgatacgaaaagcaaatccctatcgaagaatggcaaaagccatgcagacaaattctgtagcggataatcttttaaaacgggagtttaaactccacggcccaaggaaaatatttttaactgacattacatatatcccgtttaaggacagctttctgtatttgtctgttatcatggattcgtttacggatgaggtgctttcttatgtcctcagcgaaagcttagaagtagattttgttttacaaacagtaaaacagcttattgagaagcatggaatctctcctgattccgaagcactgatacatagtgaccagggatgccactacacaagtacatcttttcaagaggttatagcagatgcaggacttcgtcaatccatgtcaagacgcggaaactgctggaataatgctcctcaagaaagcttctttggtcatatgaaagaagaaatccatcttaaatcaaggagatgggcaactttttccgaagtaaaagaagccattgatgactggattgattattataataatgaccgatataaaatgggattaaagaacctgtctcccaaagaattttataactatatactaactggagagtatccgataaagatgcttcgttaaaattgggcatagaaagagctgactgtccttgacacgggtagtagtttagttcacgctgaggcggaagaagggcacagactagcttgatcctatctcctgtgcccacgttgaggcagaagaatgggcacaggcggaacttgtcctgcctacggcagccctacgttacgagtcatgcactcaattcataaatgtgtcgcaaaggacgctccacatttatttcattgacggctgtcgagtgtgtccgttggacgcacggtataaaaatagaacgaaataacctcttgtgtgagcaagctcccaccgaggtattccgttctatttttgcatggctcgtaactttcaatttacatcaataatacatcgctccctgtaaaaatccccaaaaataatacactccgcatacgaggtgccacaggtaagccatccactgtactgctacgacaatccttctcttccgggtgtcggcattcgctgtcgcgcggagcagtaccagcagcgctcccacaaatgcgaagaagattccgtacatgtagccccaagagaaattgaaatccacctcccggaatcctttttcatacaggaaaaatgccatgaggaagctcatcacatacacctgccaggagaaacggtagatgctgtccttgtgcagttccttgtagttcagcagaagtaccaggatcgggaatccgatggccagtccgatagccaggggcagattgccacaatactgcgcccatacatggccaaaagtaaatccgatgccgccttcctgtccctcctgcggtacgaacactccccggaactggtagagcagatccataaaagtcggaataaaacatactcccagccacaccgtggggacaaaattccggaatctgctgcggaacattctccacagcatcaaaatccccgcagctccgaccagcactatggtaaaactgggtttcgtcatggtcgccaacagcagatataatgcaaacagaatataatctctcttatgctctctgcccgcatttggctgctcatacaccggcagcaattcaccatacttaaaaaatgcaagaattgcaaacggccgtgccgccatataggtggcattgtggaatggattcggcgtaaataccccgagatatttgtatttgataccggggagataaatccctgtcggcggatacaccatcgacacaaaaaacagggataccgctacggttccagtgaggatccccggaagccaaggttttccgggcatagcttcctgtagctttgctcccacatgcttgtccagcatcaccttcagagcgatcattgctccgctgtttaacagcatcgtggccagtgccatagccagctccgctccgccagtaaaggaggcggtcaccagatggatcgtcgccgccagcttgaacaaaaccgggtaagggaagctgtaaccgctgtccagtccctgcatctccagaatatatgccttcatatcggaatgatacagtcccgttcccagcatgctttccacacactgccggtaaaacagccagaacgtaactgccgatgcgatggctaccagtgcagcaaacaccggaatttctatccaatttttcttattttctttcaaaataccgttccctgccactttctgattcattccgctatttcccatgatccggcacggctccacccattgccggatcttatttcagcttcgtgtaataagctaccacctttttcactgcatggatcacatcttccacatcgtcatccgtcaatccgtaatacagaggaatactcatcacctcgttgtaatacttctccgcattggggcacagtcccttctgatatcccagcttctcataataggaatgccagtagaccggcaggtaatgcacctgagggcaggtattttccgcatacagagcatcgaaaaactgccttctgtcgcagttcaggttctccagattcagatgcagcacatacagatgccaggtcgtgtcagactcagggatctccttctgcaggatcagttccggcattttgccgaacgcttcattataacgcttatggatttcttttctacgctgttcaaatgcagggagcttcttcagctggctcaatagcagtgccgcctggaaatccgtcatacgataattgaagcccagctctacctgctcgttgtaccacagcgcatcggtgggatgtaccatttcttccgggtccctcgtaatgccgtgggtacgcagccgcatcagatgacgatacagcttctcatcattagtcgtgatggcgccgccttctccgccggtcaccgtcttgaccggatggaagctgaagcaggtcatatctgccaggcttcccacaggctggcccttatatttcgtgccgatggcatgcgcggcatcctcgatcaggatcagatcgtgctccttacagatctcccggatctcatccagctccactgcctgaccggtgaaatctaccgcaacgatcgctttcgtcctgggtgtgatcagcttgcggatggacgccggatcgatattgtaggtctccggatcaatatctgcgaaaacaggcttcgcacccgcatataatacacagttggaggatgcagcaaaagtgatcgagcttacgataacctcgtctccctcaccgaatcccgccgccagcgccgccagatgtaaagcagcggtaccgttacataccgccactgcgtattttgcatgggtcagttcacacagatgctgctccagctccttcaccttaggtccgctggtaatcacatccgcagtcagcaccttggttactgcctctacatctgcctgatcaatatattgccgtccgtagaaaatcttcttctcacgtaccggttttcctccaaaaatggctaactgttccatattttcttcctcctgtaacatcttcatttcttttctatccgctgctatgatgcaaacatctgcaatttttagtctttttactcttttgccaaatctgaattttcaaaaggctgccactcgtcattcactgcttcatcttatcatattgccgggagaaaaacaacaatggtgttggcagcgccactcttgtgaagtataataaaactatctgaaatcagaaggatcaccggattcgccagatctgacagaaaggatgccctatcccatgaacaaacaaaccatacgtaaaaaatctccctggaaatttctgctttttgcccttgccgcgcttctgttggccggcattgtaaccagcggaattctttatttgaaaatatatgagcccaggaagcgttcctccgaccttggcagattacaacaggaatcctatcagggcatatttttgtccatgtccgcgccggaagctttccccgaagacatctatcccacctatatgggatatgacgcggtatgcggttcccaccggattgcatccttctccgacctgtccgattatctggaaacggccttctcctccggaaatgaggtatctcatgtcttcctcgtgctggatccgctctccctatggaacagcagcctgcacagcgatgcccgcttctctgcctccctggacgaagacctcctgtcctatgtggatacctacgccggcgccgaattcaccgtcattttctctgcgccttccctagaatactggcagtcacatgccaatggagatctggacacttactgcaatgtgttccgggtgctggcttcccctctgtccgccagagagaacgtgacactctgcttccccggccaggaagaatggctgatctcaaatccggatgcctatgacactcccacggaattaactgccgaagccgcccgttcagtaatgctgctggtgctgagcggctccctgcaataccggagcacagaaagcgataacagcttagatcatttttacacactggtacaggatgctgtaaattctccggctgactatcccgacctgtccgactacgagcttatatttttcggcgacagtgtcatgggaaattatcatgattttgcttccatccccggagtcgtccacgctctgaccggtgccaccgtgcataatctggcaatcggcggttcctccgctacccggagtagcgatgacgataattccttcccgaatgtcgtacaggactttttagaccataatacggaagaactttccggtgataaaaaactctgtttcctcatcaattacggcttaaacgattattttgagggatattccatcgccgattaccaagacgggctccgcaccggcatccgggctatgcgggaatcctatccggatgcacggatcatggtcatatcctccaattatattctgtcttttgaaaagggaatggcacgcatcggtgacgaagaaaatgtattagaagactatattgccgcggcagaagaaaccgccgcggctgagaatgttgattttctgaatatcaatgatgctctgcagtggaatgaacataatgccgcagaatatctggcagattccattcatcccaacgaggaaggacgctttctgttcggtgtggaggtgatccgttctgggaaataatccctgtccttctcagaaccttgctgttaccagtgaatattctcccacagtatcgatcacttcataagggaattgcaggtactgcaggtctccctcatagagtaccatcagtccatccccgacggcttccgccagttccgctccggatttttccggatagatgtagtgataacgctgtgtgtaatcctcgctctgataataccgggcatctattctgcaggcatactggatcaggatctccgtggctgactggttgaactgccaccccagattgcctgtgatgtacaaactgtcatatccttccatgccgtcagcttcggctacggcatccaggaaatccctgttgtaatactgtctgctctcttccgcatactctgtaaaatacgttgtaaaaaacaatacactgctgactacatacacagccatgataaccggtaagagtttcctgcatttgtccactgccagtgaaataccataagcgcacaacacaatcaccgggtagaagataatattcacacggttaatgttcacttcataggtgatcaggccaacccagatccccgtgatcaggaatccccacaatgccagcatctgcatctgtttttcaatctgtttttccttaaaaaggcgaattgtaaatacaatgattcctataaatacaaacggtatcgacacatgatataagggtccgaatgccggaatcgaattaaagaaaatgtccgggagctgcaggaacaccctgctgaataatgcccacgcattcctgcccagctgtgcaaaggaaaaatttaaaagcagtatatccgcgcttctgagactatccggaaaatattgcatggtaaaaaagggcgtttcgatggtcctgccaaagtgtatcgcattgattcccaggacgatcacctccggcagggcaaccacagttaatagcactgcgcacagcaacccctcccggaatttcagttgttttttccacaggcaccatataaaaaatacaaacaaaaatgccgtgacggagtacgccgctattccataacaataaaatgtcaggccgaaaaagagcatggataaatacaaataccgccttttctccagtcccaacaacagcagataaaatgccaataaaaatacatgtgggaacagattacagtccaacgaccagcggctctgcatgaactgccagggattcaccgccgtcaaaagcatcgctataaaagcaatcctctcattaaacagcttttccgacactaaatataccagtgcaaccgccccacaggataccagcagcatcggcagtctcactgtcacagtgctaaagccaaacaccttgataaacggcaccatacaataggatagcagaacactcatctgactgtatttccaggcctcaaaatgaaccggcagaaacgtgccataacggtcagtaccgtattttgatagtgcccatgcatccatggctcccatggcttcatcctggttaatcccatccggcactgccgcaaaacggatgcagcgcaagataaacgccagtgccagaatggaccagaacagaacttgcttttttctcattttaaaaaaggcaacaaatttttcctgtgtaataaaactcatgatagtagtatcctcttcaacctgattattcgttgtcttatgcagctgttgtaaaaatgcataagtaaactactatcttatcataccacatttgaaaaaaattgtcgcctattgttctttgtgcctagcattgcccagcattgaaaggtaaatctactttttccttatcctgcacactgatctctttcccgatctgtatttcaatcagtttcagctccgtttgggcgatcacggtgtggttgcatccggcaggcatcgttaccacatccccggctttcacctgcttctccgtgccgtcgatcacggtcattccctctccggagatgacgacccagacctcatcacggtgcttgtgattatgatagttcatggaatgtccttcattcagcgtcactttgatggtcatcgagccgctctcgacgtccagcacgcggaagcttccccagctcttctctgcgaacatgatctgctgttcgaatttatccacgaacggcttgatgtaggagctttgctctttgtcagatacgagaatgccttccggcgatgccgagatcacgacatcatgcaatcccatcgccagcaccggcacatccatctcattcacgatatgcacattggagcagttgtcattcagcactccttttcccacgacagcatcctgcatggcttccgtcagagtattccaggtaccaaggtccttccactgaccggagaaacgctgcacctggattttatcttctttttctactaccgcataatcaaaagaaatcttcggaagagtctcatactttgcaaacaaatcatgataatccgtaaaatcgattaatttatgggcaatctccatgacatacttcagcttataagcaaagacgccgccgttccacagtgctccctgtgcgatatactcttttgccacatccgcagtcggtttttctttaaaagtcgctaccattgcggtctcatccgatgacttcggaatgatgtaaccgtatttttcactgggataggtgggttcgatccccatcagcaccagattcgcctcgcctttgtccgcctgggcagaaagccgcttcagggcttcaaaataatccgcttccacataaggatctaccggacaaacgaccacagattcctccggggagatcttctgtacgtccaccagataagcagtagccagcgcgatggcaggaaatgtatctcttctacagggttccacggagattccgacatcctgccccagctgattatggatcgcggatacctgcgtcttgctcgtagcaatcgtcaccgtcgcttcggtatccaccttcttgatctggtgatagacacgctgcaccatggactcgtaggagccgtcctcctgtttgaatattttgataaactgtttgcttctgacatcgttggataggggccataggcgtttgccggagccacccgacagtaatacaatgttcatatttatctctccgctctcattggattgttcaggaaatcttcatacgccaaccggataccgtcctccagttccgtcatgtaatgccagccaagtttctctgccttgctaacatccagaagctttctgggggtgccgttcggtttcgtcgtatcccacttgatttctccggtgtatccgactacctttgccacaagttcggtcagttccttgatcgtcagttccttgccggtaccggcgttcacagtctcattgccgctgtaattgttcatcaggaatacgcacaggttggcgagatcatccacatacagaaactcacgtagcggagagccgtctccccagcaggtcacctctgtcttaccctctacttttgcctcgtggaaacgacggatcagtgccggcaatacgtgggaatgggtcggatgatagttatcattgggtccgtacagattcgtcggcatgacagagatgtaatctgtaccgtactgcttattcaggaattcacaatacttaaggcccgagatcttcgccagggcatatgcttcgttcgtcttctccagttcggaggtcaggagacagtcttccttcatcggttgcggtgccatccggggatagatacaggagcttcctaagaattccagcttcttacatccgttcttccatgcggaattgatcacattcatctccagagtcatgttaaaccacatgaagtctgccagagcgttctggtttgctacaatacctccgaccttggctgctgcgaggaacacatactccggcttctctgccgcaaaaaattcctctacctctgcctgacgggtcagatccagctcctgatgcgtccgtgtgataatgtttgtatagccctgcctgttcaattcacggacaatggcagagccaaccattcctttgtgtcctgcgacatatattttagcgtctttttccatcattttcttttaccttcttatcctatttatcttccagccactaccgttaccatgtgctatcctcatagcatcaatgttgcgtgtcttgatagttctcactttttgcaatttacttttcagcgttcattcttatttttactatcttagcataggccatttgataatcattacgcttttaaattcttggtagtcttatttcacaacacctttttccaggtactctgccagattggtacggatatgttcttccgctctttccacagcgaccttctccatgtcgtgtttcgtcatcagttctaccagctgttcgaagcttgtcttggtcgggttccagcccagctctgtcttcgccttggtgggatctccccagagattgaccacatctgtcgggcgatagaaatcaggacttacttccacgatgacctgaccgttcgccttgttgattcccttttcctccaggccttctccctgccattccacttcgatgccggcataatggaatgccagtgttgcgaactcacgtacagaatgctgtacgcctgtcgcaatgacaaaatcttccggcttcttgttctgcaggatcagccacatgcactccacgtaatccttcgcatagccccagtcacgcagggaatccagattgcccagatacagcttgtcctgcttgccctgtgcgattctggctgctgccagggtgatctttctcgtcacgaaggtctcgccgcgtctctcgctctcgtggttgaataaaataccggagcagcagaacatgccataagcttctctgtattctttcgcgatccagtagccgtactgctttgccactgcatacgggctgtaagggtgaaaaggtgtcgtctccttctgcggtacttcctctacctttccgtacaattcagaagtagatgcctgatagatccggcaagtcttctccagtccacacactctgacagcttccaatactctcaatacaccggttgcatcgatgtctgccgtgaactccggcacatcaaagcttacctgcacatgagactgcgctgccagattatagatttcatccggtttcacctcgccgatcaattttaccaggctgatcgaatctcccagatcgccgaatttcagatgaaaatgaggagttccctccagatgcgcgatgcgttctctataatctacggaagaacgacggatcatgccgtagacttcatatcctttctccaataacagttctgccagataagaaccgtcctgtcctgttactcctgtgatcagtgctctcttcacttcgttacctcctgcgttttcctatggggtatcattttgcccatatattacatatctcttgcctatcttcctcatttagacctgcatacgctttgcgccgcgtaatgtacgtctcaactatagcctcattatagtataacaaaaaaagaaaccaaagacactttcttcggtttctcttgtactttcttcggatttattgtatctcattaccacattcctcgatattccgtaggcgtaacaccttccacacgtttgaacattctgctgaaatatgctgcaccatttatcccgaccattgttgcaatttcttctgttgtcttgtccgtgaaacgcaacagccgttttgcctctgtgattctcacggacaccagataatctttcagtgctatgccatattgttccttgaacatttccgataaatacgttttattgataaaaaactgtgccgccagtccttccagggtgatctccgaggcatagttgctgtcaatatactctcgtaccctgaccacctgcacccgttttcccttcacggcattgctttccggattccagctatcctccatcaaaagcaccagcaattgtgataagagcgcattgatctccatgtcgcggacataagaatccgaagctgcaaccgttttcattttttcgagaattccccggtattccgaagtcttttgtgaccggaagactgtttttccaccacgaaccttgtatttttcataaatatgtgacatctgtgggccatcgaaatgacaccatacaagcgtccaaagctcttcttccgtcgtatgtgcatacggcagcgtacagtcgaggaatacggaatctccggcacgcagctcataggtctccccaccgtaagtcagtctgccgctacctgacagcaccgtaaaatacaa

SEQ ID NO: 91 - DNA, 18578 bp, unidentified
  source 1..18578: mol_type = unassigned DNA
  misc_difference 12877: note = a, c, g, or t
  misc_difference 12878: note = a, c, g, or t
  misc_difference 12879: note = a, c, g, or t
  misc_difference 12880: note = a, c, g, or t
  misc_difference 12881: note = a, c, g, or t
  misc_difference 12882: note = a, c, g, or t
  misc_difference 12883: note = a, c, g, or t
  misc_difference 12884: note = a, c, g, or t
  misc_difference 12885: note = a, c, g, or t
  misc_difference 12886: note = a, c, g, or t
  misc_difference 12887: note = a, c, g, or t
  misc_difference 12888: note = a, c, g, or t
  misc_difference 12889: note = a, c, g, or t
  misc_difference 12890: note = a, c, g, or t
  misc_difference 12891: note = a, c, g, or t
  misc_difference 12892: note = a, c, g, or t
  misc_difference 12893: note = a, c, g, or t
  misc_difference 12894: note = a, c, g, or t
  misc_difference 12895: note = a, c, g, or t
  misc_difference 12896: note = a, c, g, or t
  misc_difference 12897: note = a, c, g, or t
  misc_difference 12898: note = a, c, g, or t
  misc_difference 12899: note = a, c, g, or t
  misc_difference 12900: note = a, c, g, or t
  misc_difference 12901: note = a, c, g, or t
  misc_difference 12902: note = a, c, g, or t
  misc_difference 12903: note = a, c, g, or t
  misc_difference 12904: note = a, c, g, or t
  misc_difference 12905: note = a, c, g, or t
  misc_difference 12906: note = a, c, g, or t
  misc_difference 12907: note = a, c, g, or t
  misc_difference 12908: note = a, c, g, or t
  misc_difference 12909: note = a, c, g, or t
  misc_difference 12910: note = a, c, g, or t
  misc_difference 12911: note = a, c, g, or t
  misc_difference 12912: note = a, c, g, or t
  misc_difference 12913: note = a, c, g, or t
  misc_difference 12914: note = a, c, g, or t
  misc_difference 12915: note = a, c, g, or t
  misc_difference 12916: note = a, c, g, or t
  misc_difference 12917: note = a, c, g, or t
  misc_difference 12918: note = a, c, g, or t
  misc_difference 12919: note = a, c, g, or t
  misc_difference 12920: note = a, c, g, or t
  misc_difference 12921: note = a, c, g, or t
  misc_difference 12922: note = a, c, g, or t
  misc_difference 12923: note = a, c, g, or t
  misc_difference 12924: note = a, c, g, or t
  misc_difference 12925: note = a, c, g, or t
  misc_difference 12926: note = a, c, g, or t
  misc_difference 12927: note = a, c, g, or t
  misc_difference 12928: note = a, c, g, or t
  misc_difference 12929: note = a, c, g, or t
  misc_difference 12930: note = a, c, g, or t
  misc_difference 12931: note = a, c, g, or t
  misc_difference 12932: note = a, c, g, or t
  misc_difference 12933: note = a, c, g, or t
  misc_difference 12934: note = a, c, g, or t
  misc_difference 12935: note = a, c, g, or t
  misc_difference 12936: note = a, c, g, or t
  misc_difference 12937: note = a, c, g, or t
  misc_difference 12938: note = a, c, g, or t
  misc_difference 12939: note = a, c, g, or t
  misc_difference 12940: note = a, c, g, or t
  misc_difference 12941: note = a, c, g, or t
  misc_difference 12942: note = a, c, g, or t
  misc_difference 12943: note = a, c, g, or t
  misc_difference 12944: note = a, c, g, or t
  misc_difference 12945: note = a, c, g, or t
  misc_difference 12946: note = a, c, g, or t
  misc_difference 12947: note = a, c, g, or t
  misc_difference 12948: note = a, c, g, or t
  misc_difference 12949: note = a, c, g, or t
  misc_difference 12950: note = a, c, g, or t
  misc_difference 12951: note = a, c, g, or t
  misc_difference 12952: note = a, c, g, or t
  misc_difference 12953: note = a, c, g, or t
  misc_difference 12954: note = a, c, g, or t
  misc_difference 12955: note = a, c, g, or t
  misc_difference 12956: note = a, c, g, or t
  misc_difference 12957: note = a, c, g, or t
  misc_difference 12958: note = a, c, g, or t
  misc_difference 12959: note = a, c, g, or t
  misc_difference 12960: note = a, c, g, or t
  misc_difference 12961: note = a, c, g, or t
  misc_difference 12962: note = a, c, g, or t
  misc_difference 12963: note = a, c, g, or t
  misc_difference 12964: note = a, c, g, or t
  misc_difference 12965: note = a, c, g, or t
  misc_difference 12966: note = a, c, g, or t
  misc_difference 12967: note = a, c, g, or t
  misc_difference 12968: note = a, c, g, or t
  misc_difference 12969: note = a, c, g, or t
  misc_difference 12970: note = a, c, g, or t
  misc_difference 12971: note = a, c, g, or t
  misc_difference 12972: note = a, c, g, or t
  misc_difference 12973: note = a, c, g, or t
  misc_difference 12974: note = a, c, g, or t
  misc_difference 12975: note = a, c, g, or t
  misc_difference 12976: note = a, c, g, or t
ctaaaaaatccattcaaagacgattccgtaaagctccctcagataataagttggcagtaaccaccacgctgttttcccgcacaccgccgatggtgttatacctgtatgttctgcgataacagatgcccggtattcatgaaattcatttgttacaataatgacccggaaatccagatgttcctcttccatgatcttctttgagtacagaagattctctctggtcgaagttgaccgttcttccttatataaacgttcttttgcaattcccttttctgtcagataccggtacatgcactccgcttcactgatattctcaccttttccctgtcctccggacagaatacccacaacctcttcatgtgtattcagataatcatacgctgcatctaagcgttccgtcaacatcaggcttggtcggtcgccatttacaccacagccaagcacgatcatgacagtttcatccttcggtgctgtcttcgatgctcgtaccatgcatatcgtacctgctgccgcaaagccgactgcaatcactacgatcagtaaaacgattccgcatattacttttccggtagtccgggtcagccattttttcacccggcaattcaccctgtggaaccatgccgcatataagatcaggcagataccaagaacaactcccgtaagatttcctatgtttttaatccccttcgtaacaaatggatacagaaatataaatactcctgcaaatcctgctatgaataatactattctaagccacaatttcttcaattttccctacatacctcccgtctttttacataattctcctttttccggagtttactccatgtttatagcatccaaatgcatcaaaatgccatcatctctattgcagaggcgttaagatttgtttaaaggctatccctccgactggcaattggtatggttatcatgacttgttccgttttctgttcgatgcacatggctgattcgctcatgctcctgcgcaaactcgtcctacggactcagacatgcgcccgcattcgctgccaatgtgcatctcacgacgaaatactcacaatatcatggataaccataccaattgccagtcagaggggataccagataataatttgcctcacaacatcatgaatatccataccgctaggaaccagaggggaatataaaaataaccgctatggtaagacagcgtctagggattgaccctagggattgtctcgccacagcggttgtttgtgcgattcatatgtataaggattgttgttttgtttatgttaagatttctttagtggttcagacattctttgatggatgcttcaaaaatatcaagaccggctgcaagctgctcatctgtcattacaagcggtgcaaggaaacggattacattgttgtaagttcctgcgccttctactaacagacctttcttcgcacaagtctggatcaggtcagatgtaaatgctgcatccggttcttttgtttcctgatcttttacgaattcgataccgatcataccgccaagtcctctgacatcaccgataaccggatatttcttctgcatttccagataacgctctgtcacttttttaccgatctcacaggaacgctctgccagatgatctctctccataatctcgatcgtctttaaggatgcggcacatgccagtggatttccacaataggttccaccgatcgttcctgccggaactgcatccataacctcagttcttgcaataattgccgacaatggaacacctgctgcaatggattttgctgttgcgatgatatcaggctctacacctgcctcctgccagtaaacagaagcaaacatacgaccggttctgcagaaaccgctctgtacctcatctgcgatcagcaggataccattttcatcacagatcttacgaactgcttttacccattcgatcggagcaggaatgaaaccaccttcgccctgaagcggctcaacaacgatcgctgcgatcgtgtctgctgctgcacactgttcaaatacatcgtagatagatttgatatagtaatcaactgccttatcctcaggcattccttccggatttctataataatatgggaactgtgcacggaacacgccggctgctaacggtcccatatcctttgcatatgctttcttggatgtcattgccattgtaaaatgtgttcttccatggaatgcaccggagaatacgatgatattcggacgttttgtatatgcctttgctaccttaacggcattctcatctgcttctgctccactatttgcaaagaaggctttcttgctgtcgccctttacaggtgcaatgccggataacttctctgcgagcgctacatagccttcatgtgttacgacattgaacatgccgtgaaaatatttatctgcctgtgcttttactgcttcaacgacttccggctgggaaaatccgatattcaataccccgacaccaccgatccagtccaagaacttgttgccatcgacatcctcgatcatggcaccttcaccacgttctataacgaccggatatccgcaacggatcgcatttggaactgcctgcgctcttctgtctataattgcctgtgccttaggaccgggtaaagtctctgttattatttccggtaaatctgttcttaacatatgtatcatcctccatcttcttatacggacgacctttatatctgtgccgcccatttatttgctcttttgaatttactacagtatgtcattcataaaaactgatcaccatatcccatcagcacaaaaacttccgccctgttttgtgctgatagcacaagtatatgtttgacagacacatattttctatgatattgttgggttattgtaataagtagcacaaatcaatggtttaatatattaagtagcagtcggcaaacgccttatataattaagcatatttcgggcagacatacacaaactgcttcaaagcaacaagctgcaaccgactcaatacacacatatcacatttggatcaaactgacttcttatccatagacgagtaataattatcaaacgctgccaagaaaggaatcttaaacatggcaatattattaagagatttatataaagagacaaaaagcacctatggtctggatctgatcgcaggagaagaagggctggataacctcatgaactgggtctatatatcagaagatccaggcacactggaattcctgcacggcggtgaactgatcattacgaccggcgtcctgtgtggaaatgaatactggttatataacttcatcaaagggctgatcgagcataaaacctgcggccttattatcaatattgggggacatctgaaccgttccgatatctccgaccgtatccgtatgctgtgcgaccggaagcattacccgctctttcttatgccatgggagacacggatcttcgatattacacacgattattacaatcggatatttgacgatacacagaccagtcaggctatctcaactgccctttcgcgcgtgatccttcacccaaatgacaaagccctgatggagatcagcctgcctgtcttatatgaacatggttttcagggagatgcacaataccatctcgtatatatatcagatctgagagctacagcatccgtggaaccatccattgcactgacaaatacctctatcccacactccgatcgtttctccaccccacccgcttatgccaacaccgccggaagttttcttcagaatctgttgacacgtctggtcagaatctataatctgccatatacatttgtaggcggcaccaactatactctgctgatctgccccgcgcggtcaaatgaacggctcgaacaggagcttagccggcttctgtatcatatgggagaatctgccggaacaacttccatgtatatcggaatcagtgcgccaaccaaagacctgaccggattaagtcaggcatttttacagggactgtgcgccgccctgatggcacaaaaaaagaacagtagcctgttcttcttcgatgatatgggattctataagcttcttttatctgtaagtgatatggatgttcttagagaatatgtaaacgatactctgggatccatcattacatacgatgagcagcaccatacgaattatctggaaacgctctatcagtatctgctctgtgatggcagtatacaaaaaatcgccggtgccctgttctgtcacaggaacaccgtcaattatcgtgttcgtatattaagagaggacttacatcttgccttagatgatccgtccactcgttttgaactgatgaccgcatttcaggtacgcagttatctggatttgttttcctgaacctgctgcagcacattttaatatcatgtacatcatatatccgatcattaattggcctgttattttctgcgtctgaccgccagtaattctttccatgccggcggatagaacaacaagagcaatgggaacagctccagtcttccggcaagcatatcgaacatcaacacatatttggaaaatgtaccatatacattaaaattcttcgttggtcctaccagctccagtcccggtccgatgttattgatcgttgccgcaaccgcagtaaagtttgatgtcatatcttttccctcaaaggagatcaacagtacggatgttgtaaacaggatgataaatgttataaaatatacatttaccgcacgtaccacttcatgctctaccggcttgccgtccattttgatcttcttgatactctttggatgcagataggaattcaactcttttatcacactttttaccacgatgataaatcgggataccttgataccaccaccggtactgcctgcacatgcaccaatgaacatcagaataaccagtatcgtcctacatgtctggttccacaggtcaaaatccacactggagaatccggttgttgttatgatcgaagcgacctggaacgatgcatgacggagtactgtccagaatccatccattgtatgaatcagattcaatacaagaactacgatcgctgccacaataatgaggaaataggttcgcacctcctccatcttcaatgcctttttgatattgccaaataaaatcagatagtatgcattaaaattcacgccgaataagatcataaagatcgttaccacccactgcagatatggcgaaaagctggcaaagctatcattctttgttccgaatccacctgtacccgctgttccgaatccggtacagaatgcatggaataccggcattttcccggctattaacaagatgatctctatagccgttaatacaatgtaaataacatataatattcgcgccgtatacttgatcttcggtacaagcttaccaacagaaggtcccgggctctctgctttcatcagattgatatttgatccgccactaagcggcaataccgcaagcagaaacaccagcacacccatgccaccgatccagtgtgtaaagcttcgccagaacaacgtcgtccgtgatagtacttccacatcgtttaagatactggctcctgtggttgtaaaaccggagatcgtctcaaataacgcatctgtgaaagatgggatatctcctgatatgcacattggaagtgcaccaaatatactcagtgctatccaactcagtgctgtagcgatacagccctctttcagatagaatacatttactttaggtttatgttttacaatgatggctccaatcagcatacagataactgccatcaccagataatcaattccttcactttcctgataaatcaacgaaaccagacatggcagaagaagcataaccccctccagcatgaccacatgtccgactacgtataaaatcattgaccgattcatagcttcctattttcccttttacaaaaatactcattacttataccagaatatccctgatatcattaaatcctgtatgggtcgttactaccatagcggtatccccgacttcgatcgtatcatgaccggatggtgtaatgatcgtaccgtttcgattgataaacgcgatcagcacatccttctttaacttcagatccatcagtggcttacccgttacctcggatgcttcatccacacggaactcgatcgcctctacccggaaatcaaacatatgatataacgtctgcacacagctgttcatggaacgtgtatttgatttcgcacgaacataagcagtaatagtctccgctgtaataaaactcggataaaatacacttccaaggttcagattattaattatttccttgaaattactacggttgatcttcgtgatggtctttgcatccgaaacatgtctggcatgcagtgtcaggaggatattttcctcgtcaatcccggttaaagcaacaaaggattctgcattgcttaagccttcttcctttaatacatcctgatcggttccgtctgcattgataataactgctttcggaagcagaatactgagtcgctcacaacgatccttctctttctcaatgatctttacattgattcccatattgatcaactgacttgcaagataatatgcaacgtcaccaccgccgacgatcatcgcatcactgacacgatttgtcttgaatccgataaaatcaagaaatgcacggctcatcggacgggatcctacaaacgaaagaacatctcctgcatgcagtttaaaatgaccggatggaatatagacttctccatctctttcaaccgcacaaatcagaatattgatattcttcgctcgatccataagctgctgaccaagatgtgccacagacagtccatctaacatattatgctccggaatcttgatcttcgtcatctctgcctgaccatgtgcaaaggaattgatttccaaagctgtcggcatataaagtacacgcgcaacctccgttgctgtttcaagctccggattgatgaccatggtaagtcccagactctttttcagatattttatctccttgctgtagtccggatttctgacacgcgctaccgttgcgcagtcacgtccctgttttgcgatcgtacagcaaagcaggttcagctcgtcagaattcgttaccgcaatcacaagatcggcattttccacaccggcttccatcagcacgctgtagcttgcaccatttccgcagattcccataacgtcatactgattgacattcatctcaaccttatccgcatttttatcaatgactgttatatcatgcccttccttacataactgtctggtcagtgccgttccgaccttaccgcatcctatgatcaatatattaagacccgttttcttcgtgcctcgttgcttaaacatcacttacctccaccgacttcggctatatattatacataccttttgtgcataaaacgctcactttattatagcgtcaatcttgattgtaacatcttttttctatatgtacagtgatattggaaaattttatttaaagtttagtttgattctgtgttatactactgtctggaggatttgatatgttattttctttatttattaattttttcaaaatcggattatttacatttggcggcggttatgcaatgatcgcacagatccgggaagaagtagttgcaaaacggaactggctcacggaagacgaactgatcgaagtgattgcgatcgctgaatcaacgcccgggccgttggcgatcaacctcgctacttttgtcggttataaacaaagaggcttccgcggaagtctggcagccaccctcggtgtctgtatcccatccgttattattatatttgtcatttctctgttttttgatgctttcattgcaaataaatatgtagcatatgcctttgttggcattaaatgtgctgttgcttttctgatccttacaaccggaatcagcatgatgaaaacactcgaccgaaaaaaaataccggttcttgtatttgtagttacttttataatcatggtgatcggagaactgctttccaaatccgtgaatgcaattcttctgatcctcgcaggcggcatcatcggaattttctgtacctcttttaaaaagatccgaaaggaggatgcagacaaatgatatatctgacattgtttattgaattctttaaagtaggactgttcagcttcggaggcggcttcggcatgataccgctgatccaggatgctgtcatccgccataactggatgagtgaagatgccttttacaatttcatcggtgtctgcgaatctacaccgggtccgatcgcagtcaacatggcgacctatgtcggatcgacacaggcaggacttccgggcggtatcgtcgctactctcggtgtcatcacgccgtcctttttcattatattattaattgccgcagttataaaaaatctgacaaaaaatacctacgtgcagggctttctgtatggcatcaaaccggttatcctggccctgatccttgcaaccggaatcaacatgctgttaaagtctaccgggtatgtcagcttatccgaatatgatgtgaatatccctgctatcattattctgtgcctgcttgcaggaatctatttcttcatccgacgcaaatggaagcagaagctgtcagcgatctctctgatcctgctttccgcggttctgggaatcgtggtatccgtgattgccgaacacatcagataaaaagtcacctgatacaatgcaaagtatcaggtgacttcatatttttcattggcagtcataattatccttttatatcagattgctctgccttttattttcgataggatggagcaagtgcgtatgccggaacatactcctctgctgccacactgttcatggcaaatgcccgtaccagaaacgtaccgatggtttttgatgcattccgaatatagcgtgcatccgtttcattatctccggcctccgtcatatacagtgcatggtttttcttcagatactcgaccgcttcctccacggaatgaaccatttcaccgatccggctcgtttcttcctgttctacatgtccatgtccaaataaaaacttctgaaatccactttcatatgcaacatgttcagaaaatccgccttcaaaaatggagttatgcgcatatgtgaagaaatcctccacataatgaagtacatatccgagtttcaggaaagaatatctgctgttcttccccttttcttccagcttctgtatccggttcactgtattatcaaatgaactcttccaggtatgcttcttaatataggtatgaaccaatatatccggcagaatactgcctaacaataaccacttccttttgttctgtggaacctgttctataatttctctggttacaaataaatgacttctttttttcatatcagtctccttcccacttttaactcggcacaactttttccgttgttcctatctatattttaccgcaggaagtatgaaatacaagccatttcacagaattttcttgaaattagaaaaattttccaacaatttttacacggggcaattctgccctcctgcctgtctcccctgccgcctcccacgccccctgctgtaagtacttgctgcgttttctgttcgcttcacatgccttattcgtaaatactcctgtgcgaactcgccttcggctcagacacgcacccgtatttactggcaatgtgcagctcacgacgaaatacttgcaatgtacttacagcagggggcgtgggaggcggcaggggagacaggcaggagggcagaattgcaagtatatttttgatagaatctgcgtcaccttttgtcattttttacatattatatagtgtacaaaagtttatgaggtgtttatatgaatcgttgtcattgtgatcatcggacggacttcggtcccgatgtatttataacaaatattcaggaaatggcagagcagaataagtgctatcgtacggcactctggaccggctgtcatttgcagatgaccttaatgagcattcctccttgctgtgatatcggtgcagaacttcatccggatatggatcagctcatccgtgttgaaaagggaaatgccatggtcatgacaggaaactgcccacacaatctgaactgtgagcagcatatgtgtgaaggtgatgccgtattcgttcctgccggaacatggcacaacatcaagaacacaggcagatgtccgctcaaattgtctaccatttacgccccaccacatcatccgtttggaactgtggaatacacaaaagaggatgcttaaagcagccttcacttagggattgtatgaaaaacagtttttgagtgacatcttcaagcggtgacaaaaaattaacgaccatacaagagtaagaatgctcctgtgtggtcgttttttatgctcaagtaccgaaatggtagatgagacattaataccctctaattgcactaactatagagtcggtattccacttcacaattacatttgcggcactttttacaacagttgatgttttttcggttccccaagactcgatagcaattatctttttattcatacttttggcaatatcagcttaatggaaaacgagccgatgctacaaacccacaacactattcatcttttgatgaaactgttgaggcatttggtaatggtggttatgcagagttgatatcccggcaggcaaagaaaaaacggcataacctacattgtcgtaagttatgccgtttatttcagagattaaaaatccctaattgaagtcacctaaggaagcttttcttactttacaagataaacctgcctataacataaaaagcaatgctgtctgtatgaatttgccttttggcataaaaaatcatcacttcaaaatgaggtgacgatttttctattattcggttttaattcatgagccaactgtagtccttacggcaatcgaggatatagtccacatatactgtgttatctttgatttgataaagaataagataccacttttccacaaacatcttatgatatttatttggcggtatataagattcttcaaaaaaaggaaaccgttgcggcatactctccaaagaacgcattgcagttattaattctttctttttagctatagctgcttccttattgacctgtgccatgaaacgaatatgcgttccaagcatttgctttgccctatcagaaacaatcaccttatatttcttatctgtcatatactatgcctctccaatcacatcatcaaggtatgaatccagttcatcaagcgtatagccttttcttccagccatcctgtcttcctcaacagcaagcagttcctcccttaatttcaacatcttttcccaacgattgtaagtttcaatatccataacaaccaaatctccctcaccattcttggtcagaaatatcggttctgctgttttacgacacatatcagcaatctcattataattttgacgaattgctgctgacggacgaatattcatattaacacctcctcagaattgttgtaatagtaatattctggctatattatagtcttttaatgctaccaagtcaatatttcagaatagaagttgtctctgaaaaatcttccaaataattcaggcttagaaggatacagtcaataacatcttaaactgttcttcgccatatacagcatgtggaacatcctttggcataatgagtgtctcaccctctgttaagatgaatacttcgccgcctactgtaaaacgtcctgtaccatcaagaacagttaccattgcatctccgccggatgcatgcgtggagatttcttcgcctttgtcaaatgagaaaactgtcacgcttacatagtcattctgaacaagtgtcttgctgactacctgtccctcctgatattctacctgatcctttaataataattttgtctttttttcaatattcttgtacatatttctttgtcctttcgctttcaaaattattttttatttcttttccattatcaaaccgctgtcttacatatgggttgatctgtctgtattcattataccttattgtatgtatttcatacagtttactttttatccgattgtctttaattaatacatatcattataaaagtcttccataccttccggcatctcggtctcataaaagccccgtccatttctggttcccattcggatcgtcatgccgagatcctcatagacactggcgcactcatagtcaatcggctctgtcgttctgacaagcttctctaattcttttgcagccgccatatattcatcaccgtcaaagccgccgatcgccggtcctgacgcgccataatataaagtcagatagatcaccttaccatccttatcttctgccgcgatcgtgtagtccagtaactcctcattattctcggttgtctccttatcgccaaataatgtaacgatctgaccaatgaacagaccatgatattctgcaagtgcttcgtcctcatatacgtttaacaacaaataactgcctgccaggtccacatcatcatttactctgtaaaatgtataattctcgcacgaatatctcgcttcctctgttccatctgtcttttctgttgtgctgtctttttcctgtgcctccatccgatctgaacttccctccgtttctttttctgatgctgcttctgtcttctccgctgtcgcatctgcttctattgtccggtaattctcagttgttccatccatactgtattcggatgtagctacccattctccataatctgtcgtgataccttcatcggcacaccctgtcatcataagcactccaactgcccctaataataaaatcgtctttttcatatccggtgtctccccatgtattttttacccctgtaaacctgtcagatctaatttatatatcgttcgctctaacttcatccgatacagaaatattttttgcaacttttctacccatattatgccccatttttgcaacttttccaaccttattatgccccatttttgcaacnnnnnnnnnnnnnnnnnnnnnnnnnnnnnnnnnnnnnnnnnnnnnnnnnnnnnnnnnnnnnnnnnnnnnnnnnnnnnnnnnnnnnnnnnnnnnnnnnnnnccatttttgcaacttttccaaccttattatgccccatttttgcaacttttccaacttttaccatacgacaaaaggatggccgttttcacgaccgtcctcttatgtctgtcaattttatttataatcattctccagcccgtctgcatcaaagtaattgatcttcatagcagaacgtacatcatgaagagttgctgctgctttcttctgggcagcctcgcttcctgcctttaagatgtcaagaacatccggaatacggctctcccacatcttacgacgttcacggatcggtgtaagctctgactgtaatacattgttcaggaacttcttcaccttaacatcaccaagaccaccacggctgtaatgatccttcagttcatccagattcttataatccggcaggaactgttcaaaatgctccggacgacagaacgcatccagatatgtaaatacggaattgccctcgatctgtcccggatcctctacacggatatgatttggatctgtatacatggacataaccttcttcttaacttcatctgcttcatcggaaagataaatgcagttgccaagagatttgctcatctttgcttttccatcgatacccggaagtctgagacacgctttgttagacggtaatacgatctcaggatctgtcagagtttcgccatatacggaattgaatttgtgaacgatctccttgcactgttccagcataggaagctgatcttcaccaaccggcacttctgttgcacggaaagccgtgatatctgctgcctgactgatcggatagcagaagaatccaaccgggatacttgcttcaaaattacgcatcttgatctcggattttacagtaggatttctctgtacacgagatactgtaacgagattcatataatagaaagataattctgtcagttccggaaccatggactgaatgaagatcgttgatttctcaggatcgatcccacatgccagataatcaagtgcaacctggataatgttctgtcttaccttctccggatgctcggcattatctgtaagtgcctgtgcatctgcgatcattatatatatctcgtcatagtttcctgaattctgaagctttacacgctcagatagggaaccaacataatgtccaacgtgaagtcgtcctgtaggacggtcaccggttaaaataattctactcatcttaaaaagtctccttcatttcttcgttcgataatcctgcccccaattataccgcgagatattgtcatcgtcaaggaaaccctactgttcactgatgatctttctgccactgaaataggtgatcaggaaatatccgccatagatcacaaccagaacaacaacggtcataagcatggctgctcccatgtcatctgttcccatcagcgaaaggatctgtctgctgaatttcaatccaaatattgaatgaatgactgcaagtgcaagcggaaacaggaagaacagacccatctgtgcaaataacgcatgattgatcatcttctgatccacacccaactttcgaagcatcttatatcgttccacattatcggtgctttctgacaattcctttaatgcaaggatcgctgcaccggagatcaggaagatcattccaatatataagccgataaaggatgcaatcgcgccaagtccgatactggcagcttttacattttctttcgtattcagactcagcctgacatccgggtcatcgtccagattgatatgttcatttcttgccatgatcttatccgtatcggtcgtattatagattgcaagcaagatttcagagattggagttactcctgtaagcaccccatccggcacaataatgataccggtattaatggcctgcgttgagatctggacatcaccggcctgacatttgctcattcccggcttcagttcataaccatttacctgaatcgtcgtaccggcctgcaatgacatatctctgtatttcaccatctgcttgtaatttgccacaactccgtattcatcatctttgatcgacacagtttcaaaaccacacagctttgccacacgattataatcggacactgtcatgacattttccataacatccatcataccatacaccggctggtcaccaaggaactcaccctttgcctgctcactgaacgtatccccgtatgtgaaatccggcaatgagtatatatacacatcttcataggctgaaaacatagacggcaaatcaattccatattccttatatatatcgcaaatatcgcgtttatcccatgtcggatcataataagcatcctcatccgcacccttaccggcttcaacatcataatcggagcttcttacctgtctggtaatatttacatcaacggtagcataccttcttaaaccctcattcaaaccatttcggatcgtaagcgccgaagtcagcacgcagatcgtaacaaatagcataatacaaatgatcgagattgacagtacatttgtatttacacggctgctcatctgacggatgacaaatgaattcagccctttataataaacacgtttcatggaagaaactaaccggaacaacataccggaaatcgaccagaaaaacaaaaatgtgcagacacatccaagcccgatacagaaatagatatctttcatatagagctctgttgtatttgaattgatctggtaatatgcatatccaagtcctgctacggaaaggagaaatacgaataccgatatccacggatttttcatcttaacagtctctgatcttctgcctctctggaacaggtcgatcaatttgcagcgtccgatcgcgatcgtattaaacaggatcacaaccacatagatgatagcaaaatagaaacaggtctttacaaatgcagaacttgaaaatacaaaattataagaagacatatccgcttcaaacatatttgcaactaacagactggtaagctgggaaattccgacaccggaaagaagcccaacaccaagtgaaaccagaccgatgatcagtgtctcgataaacagcatctttgataccttccatttgcccattccaagcagcagatacaatccaaattctttgttacgccgtttcatcaagaatcggctggcatatatgatcaggaaaccaagcacaaatgcaatgaatacgctgacaccggaaatgatatttgccatcagctctacaatttctctggtatctttggagatcctcatcatcgccgtctgtgtctcgatcgcattaaaaatatagaagattgctacgccaagaactaaagtgaagaaatagattgcatagtccttcaggcttttcttcatattactaagggataacttaaagagcgtcatttaagtcacctccaagcaaagttacgacatctatgatcttgttgaagaattcttttcggctgtctgctccacggcgaagctcatggaatattttaccgtccttgatgaacaggatgcgaccggcataacttgcggtaaaggaatcatgtgttaccatcaggatcgtagctgacagttcttcattcagatgtttcagactttcaagcaacagctttgcggatttggaatccagtgctccggtcggttcatcggcaaggatcagcttcgggttcgtaatgattgctctcgcagatgccactctctgtttctgtcccccggacatctgatatggatatttattcagaacttcttcgatcgcaagctcctttgcgatcttctttatcttttcgtcaatcttcttcgcaggcgtgttctgtatcgataacgccagtgcaatgttctcatatgctgtcagtgtatctaacaggttgaaatcctgaaagataaatcccagttcttcccggcggaagcggttcaactggttgccgcgaagctttgtgatatcatctcttcctacatagatatgaccgctgctgacacggtctatggtggaaatgcagttaagcagtgtcgtctttccacttccggatgctcccatgatcgcaacgtactcacctttttctacactaaatgaaatgttatcaatggcttttgtaatgttggatttgttaccgtaatacttttcgatattctcaatctttaaaattgtttccacttttatctcctatctgtggctgaacaaattctctgttccatcctgtacattgcttcatttgtataggttgtttcggtattgatcatcccgtaaaatcacgtttgcctttccttatgttctgtcatcctatctgcacatgtctctgtcgcgataaaaccattgctccgacgacatggcacaggatggcagaacataaggtcggctgctctatggattttagggataaccaatactcaaaacagcctacacaaatatttttccatcttaatgatggaacagagaattttctaccacacaatcattattttttggataaagtgttggttgttggtttcattgtcaacacctcatctcctgtttacaagtgtgagtatatcgttttcaagggagagtgtcgtttttcttatgttacagaaggttacagttttgtaaggttaagacatttggcattctttatctgtctgtcagataaggggcacatggtaaagtatagttttattcatccaccagataatagtcgtttcctccaaaggttactgcgacttctgttccgatattttctttggaagtgatggtaagatggtgtcctagctggtcgcacagaccttttacgatatataagcccatacctgttgacttggcaaaacgacgtccgttctcgccggtgaacgatttttcgcaaacgcgaggaaggtctgcttcggaaattccgattccattatctctgatatggagtgtgatatcgtcacctgcttttgtcgtccagatccggatctgccgatcctcatccggcttcatatatttgatgctgttgctcatgatctggtttatcatgaattccagccatttggcatctgtcgtaacgctgacatcaacgtcatgcacatccagacaaatgtcactctccagcaacatatctttattcttcaacgccactttattcacaaccgacttgattcgcactgaatcaaaccgataatctttgctcgcatgttctgcccggacataatacagcacttgatcggcatatgcatccagacggttcacctgatcttcgtatttcttcggtatcttatcctgattattgtggcacatcaataccagacttgcgatcggcagtttgatctcatgcacccatatttcgataaaatccttgaaatcatctacactctgccggtactccttcacatgctctgtcatggatttattaatctcatataacgcctcatagaccagctttccttcatagaagcccggctcctctaacgtatccatgaccagatatttctgatccaactgctccatatgtgcataaagggaattatagaaatgtctgcgttttatatagtctgttaatatgacagttaccagaagcaaaactgtcagcacaagaaagatcaccgtcagctcccctggtgtccgcatcgcacgaaaagcaattaacatgatcgctataaataacagataaccgatcagaatacccgctttatcttttatatattcacaaattctcat

SEQ ID NO: 92 - DNA, 17457 bp, unidentified
  source 1..17457: mol_type = unassigned DNA
tctgccgcacctcgctcgccgtatcggcacttagaattatgcggtattgcctaaatttcaatttcaaatgctgtgccgcatacgacagcaaaccattgcttgaaattagtcacattattatacaataaaagccaatccggcacaagagcagtcaacactttaaatatcatcccaatcactaagaggaaattccccaagtacttttttcaacgcttgcaaataaaggcggatttacgcctgagtttgcaggcgtttttatctataggtggcggaattgtcaatagacggagcgggggagtgccctcacccaaagtattgcattgcgtctacctgtcagcagcaatggcagcgctgcaggggatgatgctgtgcgaatttttgcatgatgttcgcttctggtatagagaataagagatcagcataattagataaatatttttacctaacaatattgacatacaagacaaatgtgatataatagccttgttgacaattgagtcaatatttttagataaataattacgaggtataaatcatgagctttgaagaactgaaagaagtatttgttgataccctgaactgcgatgcagacaaagttacgatggaagccagcctgaccgaggacctgcaggcggatagcctggacgcggtggagctgaacatggcgtttgaggacaagtttggcatcacgattgccgatgaggacctgggaacgctcaagactgtgggtgatatcttcaactatctggttgcgcgggcagcctaaagggtattagggatgaatgccattgaaaagctgttcccggtcagccagcaggagcgcagcttccagctgaaagtccgccgcgatgctggtacggctgcgcccggctgggtgcagccgcaatttgttgaatgtaaaaaatgcggccgccgcgccacccgccaggtctggaccaaaagcctgtatgtatgccccaattgcggggtacatctgcccattggagcctattaccggctcagcacgattttggaccacggaacctttaaggaactgaatccagaccttgcccccaacgatgtgctgcagtttcccgattatcaggaaaagttggccgctgcttcggtcaaaacgggcctgaaagaagctgccgtcaccgcaaccggcaggatcgggggcgtgcaggcggtggcagctgtgctggacagtcgattttttatgggcagcatgagcactgccgtgggggagaaaatcacccgtgcaatcgaatatgctgctgataaacggctcccgctggttattttttctgccagcggtggagcgcggatgcaggagggcattttcagcctgatgcaaatggcaaaaaccagtgccgcgctggaacggttcagccgcagcggcgggctgtatgtcagtgtgctgacccaccccaccaccggcggtgtcacagccagttttgccagcctgggagacatcacgctggccgaaccgggtgcgctgatcgggtttgccgggccgcgtgtgattgaacagaccatcggagaaaagctgcccgatggtttccagcgcagtgagttccagctggaacacggctttgtggatcaggttgtgccgcgcactgaattaaaagaggttttgacgcggattttgcagctccatacacaggggaggaaatgcagatgatcaaagaggttttgcagcagctggaaccgctggacgcgcagattgatgcattgtgtagcagcaccgatgatgccgaaatggcgaatacgactacccatgccgctgagctggcagagctttccgcgcaggaaaacatgcttttgcagcgctgcacatcactgacgccggaggacagagtttttctggcgcgccgccctgaccgcccgcatatcggcgaaatcatcgacaacctgtttaccgacttttttgagcagtgcggtgaccggcaatgcaaggaggacgcggccattttgtgcggtatcgcgcgattccatgggatgcccgttacggttttggggcaccgcaaaggaacgacgctggaagaaaacctgcgctgcaactttggcatgccgggaccggaaggctaccgaaaggcgctgcgcgtgatgaagcaggcggaaaaattcaggcggcccatcatcacatttattgatacccccggtgcttaccccggtaaggatgccgaggagcgcggccagggggaggccatcgcccgcaacctgatggagatgagcggtctgaccgtcccggtactggccatcgttacgggcgaaggctccagcggcggcgcactggggcttggcgttgccaaccatattctgatgctggaaaacgccgtgtattcggtgttgagccccgaaggatttgccagcattttgtggaaagatgcctcccgcagcggcgaagcctgtaccatgatgaaactgacggcgcaggacttgtatacggatggaattgtggaagagatcatcgccgaaccgctgggcggtgcacagcgtgggcggcagctgcttttcagccggttggataccgccattgccgcgcaccttgccgccttgtgcaagatgagtggaaaggcattggccgaccagagatacaaaaaataccgccgtatcggagaaatgaggggagcatgaaaggcttacagctgctggccaccggcggggcactgcccggccgtgtagtgacgaatgaggatttgagccgacaggtggacaccagcgatgaatggatcacgacccgcaccggcatccgccagcggtattactgcaccgaaagtgaggatgccgccacgctggccattgccgccgcccgccaggccctggcgcgtagcgggctggcagcaagcgagattgcctgctgcgttgcggcaacgctttcggctccaacggctacccccagtgttgcctgccgtgtgcaggcggccttggggctgccggagaaccggcccgcttttgatgtaaatgcagcttgttccggttttatttatgctattgctgcggcccacgggctgttgaacaccctgggcggacgctatgcgttggtcatcggctgcgaagcgctgtcccgcatggtggacccgaccgaccgaacaacctgcgtactgtttggggatggcgctggtgcggctattctggaactggccgaagatgtgccgtttgccgtcacgttgggcgcgcgggggagcgaagccatccgtgtcggcggccccgcagcctgcgatacggccccgatcacgatggatggcaaggcggtctttcgttttgcggtggaaaccatgccgcgttgcctgcaaaccgtgttggagcgcagtcaaaagaccttggctgacctggattgggtcgtctgccatcaggccaatagccgcattattgaccattgtatcaaacacttgcacgcagaaccgtcaaaattttataaaaatatggaccgccatggaaataccagtgctgccagcattcccattgccctgcatgaaatggtggaaaatgatttactgcaccccggccagaccctggcctgcatcggttttggcggcgggctgacctggggcggaatgctgctgacgtatgagggtagaaaatgaagctgctcaatgaaattttaggtacgaaatatcccattatccaaggtggaatggccaatatcgccacgggcaaatttgccgctgcctgctctaacgccggggcgctgggcctgatcggttccggcggtatggatgccgatgccctgagggaaaacatccgccactgccgtgcgctgaccgaccagccttttggtgtcaacatcatgctgatgcacccgcaggcagatgaatttgccaaaatcgtggaggaagaaggcgtaaagatcgtcaccaccggggcaggaaatccgggaaagtacatggcaatgtggaaagcagccggcatcacggttatcccggtggtagctgccgcaatcttagccaaacacctggaaccgcttggcattgacgctgtcattgctgaggggacagagagcggcggccatgtgggggaaatgaccacaatggcgctggtgccgcaggtcgttgatgccgtccacgtgccggtcattgccgcgggcggcattgctgacgggcgcggtttggccgcagcgctggcgctgggggcctgcggcgtgcaggtcggcacctgtctgctggccagcaccgagtgccccatccacgaaaactacaaggcagcgctgctgaaagcccgcgacagcgataccattgtgaccgggcggatcggcggcaccccggtgcgtgtgttgaaaaaccgaatgagccgcgagtatgtccggcaggaaaaagccggggccgacaaaatggcgctggaacgctttacgcttggcagtctgcgcaaggctgtgtttgacggcgacaccgaaaacggaagcctgatggccggacaggccgcggggctgctgcatgaagtccgcccggtagaagagatttttgccgcaatggtaagcgaggcaaagacctgcatcacggggttgtacaaggagaccatctgatgaaactagcatttttatacgctgggcagggcagtcagcatgccggtatgggccaggacctttatgaaacctttcctgccttccgcgccgcctttgacgaagctgccgcagcggtggattttgatttgaaagaagtctgctttaccgacgcggcgggcgtactgaaggaaacgcaatacacccagccttgtatgacagcttttgccaccggtctgaccgctgtgctgcgggagcagggcattatgccggattatgcggcgggcctgtccctgggggagtattccgctttggcctgtgcgggggtgttcgatatgcagacagcggtcgctttaacggctttccgtggcaaagcgatggctgctgccgctgccgggcgcacctgtgggatgacagccgttttgggattggatgaaacatccttgcaggcatgttgcagcgcagccgccgaagagggcgttgtacagatctgcaattacaactgtcccggccagctggttatcggcggcgagaaagctgctgtagacaaagctgccgacctggcgcttgccgctggggcgcggcgctgcctgccgctgaacgtcagcggtgcgttccatacgctgctgatgcaccccgccggagatgcgctgcgggaaaagttccaatccatccattttgcgccgatgcagttcccggtgctgttcaactgccttgggcatgaaatggcagagaatgacacggtcgccacgctgctggaaaaacaggtgcagttcggcgtacgttgggaagccaccgtccgccgtttggcggaactgggggtggataccgccattgagatcggccccggcagggtgttgaccggatttgtgaaaaagacggtgggaaatgctatctcgtgctatccggtggaaactgctgcacagctgcagcagttgctttgcaccatgaaaggagcctgaccatgccgcaaactgaaagcatgcgccgtgccgctctggttacgggcggcgccaagggcattggtcgtgccgtctgccttgcattggccgaaaacggcatgaacattgcagtcaactacgcaggcagcgcagccgcggccgaggaaacagcggctgcctgccgcgcctttggtgtgcaggccatcacgctgcaagcggatgtgcgcagccccgaagcctgccaaaatctggtggaagataccgctgccgcttttgggcggatcgatgtgctggtcaacaatgcgggcatcaccgcggataaactgctgatgcgcatgaccgaatccgactttgacaatgtgctttttaccaacctgaaggggacgtttttctgcaccaaagcagcttcccgcttgatgatgcgccagcggtatgggcgtatcatcaatatcagcagtgtggtcggcctgcacgggaacgcgggccaggccaactatgccgccagcaaggcggggctgatcggcctaacgaaaagcgttgccaaagagtacgccgcacgcaatattaccgccaatgcggtggcacctggatttattgaaaccgatatgaccgccgctatgccggaatctgcccgcgccgcagccgcagcggccatcccggaaggcagaatcggccgtgctgaagatgttgccgcggcggtggctttcctggccggggaacaggccggttacatcaccgggcaggttctttgtgttgacggcggaatgggaatgtgaggtgcagctatgaagatagaaaagaaacgccgggtcgttatcaccggccttggcacggtaaacccaaccggcaataccgtggcggaaagctgggccgccgtgaaagctggccgctgcgccgttgggccgatcacggcttttgatacaacggattttaaggtgaaactggccgcagaagtcaaagattttgaccctgccgaacgtattgaccggcgcgaagcccgcaaaatggcgcggtttacccagtttgccgtggccgccgctgacgaagccatccacgacagcggcattgcactggaaaatatcgaccacacacggttcggcgtgatcctgtccagcgggatcggtggtctgcccacgatcgaggaagaacacacccgcggccagcagcggggctttgaaaaggtcagcccctactttgtccccatgtccatcggcaatatggcggcggggcaggtggccatccgctttggcctgcagggtatgtgcagctgccccaccactgcctgcgcaggcggtaccaatgcgattggggatgcgttccaccgtatccgcgatggatacgaggaccgtatgctctgcggcggcagcgaaagctgcatcagcccgttgggggtgggcggcttcgccagcatgaaagccctctgcaccgcagacgacccggcccgggcctcgatcccctttgatgcccggcgcagcggttttgtgatgggcgagggcagcggtgtgctgctgttggaagaactggagaccgctaaagagcgtggcgctaagatttacgccgagattgtgggctatggcgctaactgcgatgcttaccattttaccgccccggcaccgggcggtgcaggcggcgcgtcctgtatgcggctggcattggctgatggcggagtggagccggaacagattggctacatcaatgcccatggaacttccacgcatctgaatgacagctgtgagaccgcggccatcaagtcggtttttggcagccacgcgtataagctggccgtatcctcgaccaagtcgatgaccggccacctgctaggcggcgccggcggggcagagggcgtgtttaccgtgctggccctgcacgatgcctttttgcccgctaccgtcaacctgcaggagccggacccggaactggatctcgactatattcccaaccagggccgcgcgttacaggtggaatatgccatgagcgacagcctgggcttcggcggccacaacgcctgtgtggtgttcaagcgttgggagggatgaggatgaactatacacccaatgaaccgccccggaccctgacggcggcggaaatcgaaaagatcctgccgcaccgttacccgtttgctctggtggataagattcttgactatacccccggccagtgggcgcgcggaatcaagtgcgtgacccgcacagagtcgtttttccagggacatttccccggccatccggttatgccgggggtattgattctggaagcccttgcccaaaccggcgcggtggccgcgttgagcctgccggaaaaccgtggaaagattgccctgtttggcggggtaaaaaatgcccgtttccgccgccaggttgtgcccggcgatgtgctgactttggaatgtgagctggtagagcagcatggcccggtgggcatcggcaaagccaccgcctgggtggatggtgtgcgcgcggccaacgccgagctgacatttgttatcacggatgcctgagggctggttttgcatggtggattgtgctataataaattcattaacctacagggggattctcgccatgctggatcagacatttgggcaggtatacacaaaattcaagctgcatttttataaacagatcttcagccgttttgaagaccgtgaagccacgctgacgacggtagaatctttctgcatggaagtcatcatggcactgggggaacccacgattgcgcagttcagccacatgatgaatctttccacccccaacgcagcttataagatcaactccctggtcaaaaaaggctatgtggagcgcatccaatccaccaccgataagcgggaataccgcctgcggccgacccaaaagtacattgattactataacatcagctattcttacctgcatctggtcatggagcgtgccaaacagcggttcagccccgatgacctggccaagctggaagaaatgctgcagatcgtatccgatgaactgatgccggaaattcagctgccgaaataaaatatacattacgataacaaaatgcgaaccacttcgtacaacgtggttcgcattttgtgtttatatgattattctgttggtaactcttggaccttttgaacagattgatgccagccgtacaggacattgcaaaagaacaatctcgccaaaatcaataatccatatcaaacaggtgggccatcgggacagcgtcttcccgttcagcggtcagctttttcaaacgcagcgggtccgtattccagcgtgccgacagtggctgcctttttaagttccatgcgttttccttcttaaggtgtatcagaaaacaaagaaaatgacggatatttcgcaaacacaagcagaatttaaggctttttaacgcaaaatccggccgtgtttgtagaaatagactaaatttttgacttttcagatacaccctaggttgccgtgctttcgccccgccgcaaaactcctaactacatcacgcgttccattctttcggaaggtatgcgcgggtattgtgcagcatggtgtcaaacagttctttgccctggttccagttcagggtcacctgcgggtcgttcataaaggtggtcaggccaagggtgcggtcgcaggtcagggcagcggttagggtgttctcctgattgtaaacgtggcgggctaccagcggcagaatattggcgggcagcgggccggcgttcacggactgtacgccctggcggctgaacagcgcgttcacttccaccacggcatcccacggcaggttggcaatggcaccgtggttgggaatgttcacgttgctgaccaggtcgcccaggccgagcagggctttcatcagcaggtggccttcctcgccatcgggcttgatctcgatcggctcttcaccggtgcgcaggcggcggctgcgggccaggcgctcctgcagctcatttttgcgccacgcaacggtggtcaggccaaacttccattcgcgcacggcttcgggactttccagataagtcttgcccggcataaactctgccagatggcggtcgcctgcggcggcaatgcagccatagcgcaggaacaaatcaaatttaacgcggttggcgcaggcaaaggaactgttcatccaattcgtgtcgccgtactcataaccggattcatagtgctcttcggcaaatttgcggtaaatggggaagaggtccatgcctttgtaagtagccttatcgaaccaagtaaagtggttgatgcccttgacgttgaccttgatatcctggcgggcaacatctttcaggcccagttcctcatccagaatgtgggtcagcagcgtctgggtgccaaacacctcgtggcagcagccgaacgccttgatcttggggaacacatgatacagggtacgcacgcagagggtcatagggttggtgtagttgatgacccaggcattgggactgtaatcgcggatcgcttcagcgatggtgacatacatggggatggtgcgcatggcgcgcatgaaaccgcccgcacctacggtatcgcccaccgactgatagatgccgtaagcttccggcgcgtggacgtcgctttccatctcgtcaaaggtgccgggcaggatggagatgacgacaaaatccgcgccggtcagggcctgctgcagcgtatccgccacagtatacttccagtgtgaaaccgcatccgggtgggcagagatcttgttgccgatgatctcgttgtgctcggctgcttcgtggtcgatatcatacagcgccacggtgccttccatctgggcatccgcggcaaggtccatcatgaacccccacgcccacccacgggaaccaccgccgatgtaggcaactttcaagtcttttacgcggttgtcttcataatacatggattgaaacctccgtttgttttggtccgtaacattgatgcgtgcaaaaccgcaaaatttgctttttttgccatattcttgctatcagtatacaccaaataaaggaaaatgtcacgaaaaaagtgaaaaaaattaaagaaaaatgggcaaaaagtgaagagaaaattaggaattagtaatgagcaattagaaattaacagaaaggcagagcccggtacaatcgcaccgggccctgtctctatatcaattcctaattgctaatttctcatttctaattgagataactcctaactcctccctcctaactcctaacttatccttccactttcacattctcgcaatcgctctccgcgttttcatccgcgtccagcgtgatatgtacaaaatgctccggcttatcgtaatctttcgtttcgccgtcatcagtgtaatactcataggcggcaccatcgggggcatgggcgaacaggcgaagatccgcaaaattcacgcttgccacattttgaatacgatcgccgcccttggcgatgggcaggatatgccccttgcgcacaaagaacaccacttcgtccagctccaccgggatgtaatgatgaccagcgggcagaacggtggtttccatgcggtcgttctcactgcactttacccgcacctgcagcatttcttccggcagatagacataccggccgcgggcgttctgctcgtaaacgggggcaatcagcaggctttcgccgatcattacctcgtcctctacctggcgtgcaaaggcgtcattggggaaagcaaaggccagcggcatacagtacataccgtcgcgcagggcagctttcatgtactcgctgtaaatatagggcagcagcaggtaacgcagctgcagaataccggcaaaggccgccttattcttaaagcggtagggctcctgtttgcgggtaccggcggcagagtggttgcgcagcaggggagagaagatgcccacgccgtaccagcgcagcacaaggtcctcggtggtgttgctgccaaagccgccaatgtcggggccttcgtacaggaaaccgcacatgttcagggagggcatcatgtgcaggctgagcagaatgtggctccaccaggactggttatcgccggtccagataccgccataccggtgcataccgatgcaggccgagcgggagtacattaaaatgcgcttatccggctccagctgctcaaaggcttcacccgcagcacgggtcatgttgtagccgaagatattatgcactttatcgtgccgcatgcggccctgtttggtgttgtgatagaacagcttgtagtcgttttcgttgttggaaagcccggccacaagattcttgaacgcaaaaaagctggaaatatccaggttctgggtgcggtactcgtcaattttggcaaaggtctttttcagcgtttcttcagagtagaagatggcaggctcgttcatatcgttccagaacccctcaatgccctggttcagcaggaacttgtacttgctgccaaaccaggcgcgggcttcggggttgagcatatcagggaaatgcacccggcccggccacacaccggccacaaagggggtgccatcttgattggtgcagaagtaaccgttcttcacgccctcttcgtatacatcgtacccgtcctcaattttaacacccgcatcaatgatgggcacaaggcggatgccctgggctttcatctcggcggcaaaatctgcaaaatgggggaagcgctgctcgtccaccgtaaagtccttgtagcgctccatgtagtcaatatccagcaccacggcgtccagcggcatgttgttggtgcggtagttggccacaacctcgcgcacctcgtcctcgttcatgtagctccagcggctctgggtagcaccaaaggcccatttgggcgggatgtagctgcgccctaccagctggcggaactggtgcacaatatcggtcgggctttcaccctcaatgatgtaaaggtcgtaattttcttcggccactgtcacccgcagggtgtccagatcggtgtagccgcagtcaaagatgaccttgccgggatagtcgataaaaaagccaaaagtggctttgccggacacgatcatgaagttgtaagcgccgtacagtgaggatttgctttcggtatggttggggtcatcgctgcatttgctctcgtacacccagccgcgcttgttgatgccgcggatgttttcacccaggccatacaggatatcctgcgggtccatggcataagagaagccgtccggttccctggtgagatatggaatcgtttccattgcgggtacaaaagaacccaccacgctttcggtatcaaatgggtggccgtattgctttttgtaaatcaaggcagtttcctcccgaataaatttgctttggggctgatttaactatagcaaattgcgggcagaaagggaagagggaagtttagttaggagttaggagggaggagttaggagttttgcggcaccacaaggttggtgctggacgaattaggaattagcaatgagcaattaaaaagaataaagaataaagaataatggcggtggatcgcggcgcggagcgccgctcggagatattaggtttgttacgattcaatacacgggtagtagaaagggaaaacggtgcccacttataacaagagctaaaacccagtgcctacctattttatatattatatatccttatgctcaaattctgccgcgtatacttctacacgtccaactcctccctcctcaatcctaactgttttctcttttcgctatatcaaaaaaccgataacgtatcatgtcgcattttcgatactagcgctcgcaaaattggtggaggaggtatcgggatttttttataatatatacaaagaacggcgtaagggacgccggataaaaggaagctctgaaaaaggaggaggacggtatggcacagaaaggcgagaccttggtcgaagtaaaagacctttgcaaaaacttcggcgtgacgatcgcactgtcccatgtggattttgttgtcaaaaccggtgaaattcgcggcctgatcggtgagaacggttctggtaaatcaacagtatcttccatcattgcaggtatgcagccggccagcagcggcgagatgttctacaagggcaaaccgtggaaacccgctaccatgctggaagcgcagaaagccggtatcggcatgatcgtgcaggaggcaggcacgattgcaaacatctcagtagctgagaatattttccttggcaactatgataagttcaaaaagggccccatcatcaacaaggtggccatgatctctgaagcccgcaaggcactggaaaagatcggcgtaaccaacatcaaccctgcgctgcccgcccgccactatgacatgcaggaacgcaagctcatcgagatcgccaagtgcatgtacaacgaccccgaactgctgatcgtggacgaaaccaccaccgcactttcccagagcggccgtgacatcatctaccgcatcatgcacgagatggccgatgccggcaaggcggttatgatcatcagccacgacctgaacgaaatgatggaacaatgcagcaccctgacggttctgcgcgacggcgtgatcattgacaacattgaaaaagaaaactttgatcccgacgatatcaaacagaagatggtcggccgtgagatcaaaggccactactaccgcgtggacaatgatggctacagtgatgaagttgtgctgaaagccgactgcatcaccactatggaaagtctgctctgcttcgatttggagctgcacaagcaggagatcttgggcatcggtggtctgtctgactgtggcatgcacaccttgggccgggcactgtacggcctggacgagatcgtagacggcgaagtggtgctgcccaagaccggcgtgaagatcaagaacgcacaggttgctttccgcaacagcatgggttacgtttctaagaaccgcgacaccgaaagcttggaactgaacgcttcgatttttgccaatatcgcctctaccggttatgacaaaaacaacatcggccccttcatcctgccctggaaagaaaaagcctacgtggacaagcagatcaaggcgctgcagatcaagtgccagaatgcttaccagccggtgcgcgcactttccggcggcaacaagcagaaagtcgtcttcggcaaatggtgcgctgacgatgcagacgttctgattctggactgccccacccgcggcgttgacatcggcgttaaagccgctatgtatcagctgatttacgatatgaagaagcagggcaaatctatcatcatgatttctgaagagctgcccgaactgatgggcatgtgcgaccgcctgctgatcatgcgcgacggtgccgtttccggcgagttttaccgcaaggacggctacaatgaccgcgaactgatcgagcggatgatttaacggaaggaggcagcagccatggaagcaacaaaacagaccaaaatgaccaaagaggatctgcacctttcctggaaagacaaactcaacatcatccgggataaccgctacttcctcatgctgttccccattgtaatgctggcggtcatgatcctgatcttcggcgttgcaacggcgggacggttcttcaaactctccgtcatgaaaggcatcctgagccaggccatcatcattggtacctgcgcaacgggcgttgcctttatctactccaacggcaacctggatatctccatcggtgcggtgcttggccttgccgccacactgggcgttaaggcttatagcgtaacacagtccgttgttgtcatgattttggcaacggtggccgtggccctgggcctgatggcgttcaactgcacgatgtccgttgtgtgcaacatcaaaaccatcaccgttgccatcgtggttacccagatttacggcgcaatcagcaccctgctgatcggcggcagcggcaagatcgaccttgatatgagcgttgccgctatgctggaagacggcggcttccgttacgttgcattcttcgggtactttatcttctgcgtggtcatttaccactttacccgtgttggccgtgagttgcggttcctgggcggcaacgaaaactgcgccgcacagaccggcatctccaactctcgcgcaacctacatcagtttcctgatgaccggcgttggcgttggcctggccgccgtgttcagtgtgatcaatgtttccgcagtcagcgttgagactggcagtggccttggcatggatgttatgctggcaaccgttctgggcggcatgtccatcttcggcggttcccgctccaatgcttacgctggcctgctgggcgctttgaccgttgcagccctgaacaagggcctgctgatggtcggtgtttccagcgcattcatccagggcatccgcggcgtgatcttcctgctgctggtctggatgaacagcgaacgccagaatctgctgccttcccgcgtgcagttctgattccccactgcaaaattgtatatcgggtgcctggcacccttgaacacacatgaaaaacaaattcaaaggagaaaacaccatgaaaaagaacaaactgttccagtccgcgctttcgctgatgctggtaggcggcatgctgaccgcctgcggcagctctgcttcctctacggcagcttccaccgctgcctctaccggcagtgacagcactgcagcctccactgcttccgactccgctgcaccggctgctaccaagcagtatgtcatcggcattgccgaagcccaggccaacgacgaagttaccacccgccgcgcttacctggaagatttcatcgcccccacttacaacgtcaagttcatcttctccgagaccctgaaggacgatgcagccaccaagacctttattgaaaactgcatcgactccggcgcagacgccatcatcgatatgaagtctgcctccggtcagatggctcagctctgcatggataacggcctggtttacaccatcaacggcaactacacccagcatccggagctgctcacaactgattataccaactttgcaggttgcatcggcgctaacaacgctcagatcggttccctgtttggagactggctggaggagaatgccagcgaggacggcagcgaaggcttcctgatctccaccagcctggctgcccagggcaacacccagcacgttgagatcacccgcgctatcctggaaggtctgcagcagaagtacggcatcacctataccaagagcatcgatgacctgatcgcttccagcgaaaccaccaatgttgagaacgataaaaacatcctgatcaccctgtaccctggttcccccaacaaggatacctggctgcccggcatctccaccctgctgcagaccggcaactacaagatgttcctgagctccggccagacctacaaccagagtgctaccgtggttgacgaagtggaaaagagcttcggcatcaacatcaaggtcgccagcgtcggcgccctgggcaccaccttggaaaccgcattcaacaccaaagactcttccggcaactccagcgttgacctggttgctatcaaggctgtttctacccagaccgcagctatgtttgccgctacctacaacgcactggtttccggtgcggagtgccgcgcctgccgcggcgaagacggcctgcccgtttacttcaccttcaacttcatccccatcaccagcgctgagcagctgactgaaatgtccggctgggatgcaaaagaaaccggcaactggattgccaacaaggacttcgttgatcagatgctcgttaccgtcaaccccgacgttacctctgatgacatcaatgctatcatgcagagcctgagctatgaaaagattaaagagatgatgggctgatccccgcaaaaggtctgcggcggcacgcctgaacggataaggagagaaaaacaatgagcaactggcaatcctttaagaaaaaacacgttctgctcatgaacgctgcatttactgtggcaattccggcagcggtgtggcttatcatggagctgctgaacctcgccttctgcggcgtgcacaccctgaattccacggtagactacaccaccctgatgcgcaacctggtcacgtccttctgctttgcgctgggcctgaactgcaaccttcccgttggccgtatggatacctccaccggctcccagatgtacc

SEQ ID NO: 93 - DNA, 18686 bp, unidentified
  source 1..18686: mol_type = unassigned DNA
ataacgcataaaaacaccctccttactggttgtccagtaaagagggtacatatcactatcagatttctcccatcggggctttgttatttcttttatttcacataatttttgtctacgttgaccacgatatgatactgttcgcccagcttttcctttacctgatgctccagttcttttaacactgcttcatcactggaacggtagccaaacggaatcactacatcaaagataagattggtatgggtcggtccctgaaccatacggaaatcatgcatggtaatgacctcatcaatatccttcaaaatacctgtaaccgtttcttttatctcggtcagttccttgcttccggtaatcaccggatccatatgtatgacagcctcacaattcagttcctttttcaatttcatttctacattgtctatcatatcatgtattacaaggatattcatttctgccggcacttccgcatgtagtgataccatcagacgtcccggcccataatcatgtacgactaaatcatgaataccgataatcattttttcttccaacaccagatgttctatctcttttacgaattcttcctccggtggctgtcccagcagtggatttaaagtctccttcgctgcattaattccaccatataagataaacagtcctaccgccacaccacagtagccgtcaatattgactgacgtaaattctgcaatcaatgtggtgattaaaaccacagatgtggtaatgctgtcgcttaagctgtccatggccgttgcccgcatagccgctgaattaatcttctttgcgactctcctgttgtagaaggtcatatacagctttacagcaatcgatatcagcagaattacgataattaatgcagagcattccgttgcttccggatgaagaatctttctgatggaatcctgtatcagttccactgccataattaaaataactgcagcaaccacaagcccggaaacgtattccattcttccatgtccaaatggatgctccggatccggctttgctgctcccagtttaaagcccagcaatgttacaatggatgagccggcatccgacaggttattaaatgcgtccgctgtaattgcaatggatttactgatggttcccgcaataaattttcctgtaaataataatacatttagcaaaatacctacaataccacataaaataccgtaggcaagccgtaccttctccggcttatcatcttcccggataaatatcctggctaataatgttatcataaatcttctccttttgctcccttattcgttccgcactaattcaatattttaaaattcttcagtggccaatatcggaaaatcgcttttccaagtattttacttttcttcacataggtattggtccagtatcttccatcataggagttattccggttatctcccattacaaaatagctgtcctccggcacttcaaaggtatacggtcctgtagctaccgtccatgtctctttgagataatcctcctctaagagttctccgttgacatatactttgccactttctatctttaccgtatctcccggacagccaatgacacgttttacatagttctggctctcatcatccggaaacttaaagataatgatgtctccccgctccggtccggaaaacagatatgaccatcggaatccaatcagcttatctccggtcatgattgtattttccatggaaccggatggaatctctgcattaattaacacaaaacgatttaaaaacatagcaatcagcaccgctgctacaatcgtaattacccagcttagaaattcccctgccacagaagctgcattctttgtatcggattttcttcctttcttcctgcgtctgccgccttctgaatattcctcttctggttcttctaattcttcccggttgtcctctgactcttccggttcttcgatattctcaaagtcatctatatattctaattcttcatttctttcttttttctgcatctaaattgcctccggtctctttccttcccgttgttcgttctattatactccaagcaggaaagaaattccactggaaatgctttgcgagtttctcgtgtaaattaaaaagtccccgaaacataacgtttcggggatgttttctatgtgttcaatgacatccactcggctaagattcaaacttcgtctgcgactcgttttcatcaagtctcgggatgggctttcacactaagttcacgcttcgcctatggctcgcgttctctaagtgttcaatgcctagcaaacgccctgggcaagcatagcctcagctactttttcgaagcctgcgatgttagctcctgctacatagttaccttccatgttgtaacgttttgcagcatcatcaatgttatgatagatatttaccataatctgttttaacttagcatctacttcttcgaatgtccagcttaaacgctctgagttctggctcatctctaatgcagaagttgcaactccacctgcgttagaagctttaccacagatgaaccatactccgttatcctgtaagtatttggttgcatctaaggttgtaggcatgttagcaccttcacaaactgctttacatccgtttgctactaactgttttgcatcatcgataaggagctcgttctgtgtagcacatggaagagcgatatcacatttaatctgccatacaccacggccttcatgatattctgcactctttcttgcagcagcatactcagtaagacgagcacgttttacttcttttacttcttttaataatgcaacatcgattccttccggatcataaatccatccggtagaatcagaacaggtaacaacttttgcacccatctgctgcgctttctggatagcgtagattgcaacgttaccagcaccggatacaacaactgtcttaccttccatagattcaccatggcatttcattaattcttctgtaatgtataaaagaccatatccggtagcttctgtacgagctaaagatccaccataggtaagtcccttacctgtcagaacaccttcgtacattccacggattctcttatactgtccaaacatgtatccgatttctcttgcgcctgttccgatatctcctgccggaacgtcaacgtcagcgccaatatatttgcaaagctcggtcataaagctctggcagaatgccattacttcacggtctgattttcccttaggatcaaagtcagaaccacctttaccaccgccgattggaagtcctgttaaagagtttttaaatacctgctcaaatcctaagaatttgatgattccgatatttacggaaggatggagacgaagacctcccttgtacggtccaatagaattgttgaactgtactctgtatcctgtattaacctgaacctgtcccttgtcatctacccaaggtacacggaatttaagctgtctatccggctcggttattctctcaagtaatgcttctttacgatatttctcctcatttgcttcgattaccggtcttaaagactccagtacttcttctactgcctgaaggaattctggctcagaagcgttttttgcttttactctttctaatacttcatcaacgtagctcatattatatctcctttacatattaatttgagtattatatatacatcaacactactattttagtatgaaatgaattttttcgcaacgtttttttcatatttgtgtcaaaaactttatacttttgtgtactttttcttcttttttgcaagttttgtaccagtaaaattcatttttataattaaaaagaagtagaaaacagttttttatttcccttctccacttctttttttgtataaatatactattttttatttttcaaatatgattcatatttcttctggaagaacttcaccagttttcccagtgttccaatcagaatctcactctcctggtcagtcaggctttccttgatatcatgtatcatattgctgtgaaaacgtgcatgatgctcatatgcccggactccggaatcggtgagtgatacacggaccacccttttatccctgtcatttctgcaacggtttacataacctttctgttccagtgcttcaattgcttttgtcagggttcctgttgtaacattcatcttcgccgccacttccgacatccgctttggttcatccagaccaattgcttcaataatatgcatatcatttccggaaatgttcatgaattctccggagattaagcatttttcctcaatttccatcaaatcattaaacagctttaccagaatgtcatttaaggttttatccgcattcattcttatctccttttaccagaccagtaccgctgcgccccatgtgagtccgccgccgaaaccagccagtacaactttatctcctctatgtatcataccatgccggttgatattatcaagtaaaatcggcacacttgctgccgaaatattgccacattccgtcaaatttaccgggaatttctccatcggctgtttcaatcgttttgctaccgcttcaataattcttaagtttgcctgatgtaatacgaaaagtgaaatttcctctgcctctaaatccgtctcttccagcacctttgtaatggttgccggaactgtgcggacagcaaatttataaacctcctgtccattcatgcttacataacccagcggactttccatcttatgatatggattattgaccggacggttctcacatgccagtaccagtcccttcgcaccgtctgagccctgcaccacatgacagatattttcttcgtctgcccggactaccgctgctcctgcgccatctccaaaaaggacacaggtgctgcggtcattccagtccataattttagaaagtacttctgctccgattaagagtgcatttttaaatctgccactggcaatatatgcctgtgctgtactcaatgcaaataagaatccggaacatgctgcaccaaggtcaaaggctacggcattcactgctccgatttccctctgcacttcacaggaaagtgtcggcacaagatgatccggtgttaccgtcgctgcaatgataagttccacttcttccggcttcatgtctgcatctgcaagtgctttttttgcagcttctgcggcaagtgatgttgttgtctcttccgttgcaaggtgtcttgcttttattcctgttctgctggaaatccattcatcggaagtatccataatctgacttaaatcgtcattggtaatttttctttccggtaacgcacttccagttccacatattcgaatgttcatgctctgctcctttaaaatttacggaaacgttcataacgtgcttttgcaatctcttctccgctttttccttcatatgattctaaaaattcgcggatacatttatgcatataaactgcaatggaactcaatgcctcatcatctgctccaccatactccggtataattttctcgataatgccaagttctaaaagatcctttgctgttatcttcattacttctgctgcttctttggcacgcttgccatccttccagagaatagatgcaaagccttccggagaaagtacggaataagttgcattctccatcatgcagacttcatttccaactgccagtgccaatgcaccgccacttccgccttctcctatcataaaggtaataaccggaactttcaaccctgacatttcataaagatttcttgcaatagcttctccctgtccgccttcctctgcttccataccgcagaatgctccggctgtattaacaaaggtgataaccggacgatggaatttttcggcctgcttcatcaggcggattgctttacggtatccttccggagatggcattccgtaattatgacgcatgcagtccttcatgtcctttcccttctggattccgattaccgtaaccggttgtccgtcaaggtatgcgataccgcccacaattgccgggtcatccctgtaataacggtctccatgaaattctatgaatttggtaaagatactgttgatataatcctctgcggacagacggtctaccttacgtgccatcttaaccttttcccatgcactcttttcttttgtattgtaagcgcgttcccgcatcaactctgtcggtcttccgtctacttcagttgccggatcaaatttggcatatccacttactttatgcatacgaaggatttcatacagacgtttctttaaatctttccgctctacaatggcatccacaaaaccatgctctaactggaactctgctctctggaatccctccggcagtttctgtccgatggtctgctcaattactcttgctccggcaaatccaatcagtgcgccaggctctgctaaaataatatcacctaacatagcaaaacttgctgttacacctccggttgtcgggtcagttaatacggaaatatataaaagtccggcatcggaatgtttctttaaagctgccgctgtctttgccatctgcatcagggatacaataccctcctgcattctggctccgccggaacaacagaaaagaataaccggaagtttttcttccgtagcacgttctactgcccccgcaattttctctccgactgcatggcccatgcttcccatcataaatctggcatcgcacacaccaatgactgcatcttctccgtaaatcttacctttccctacggttactgcttcttttaatccggttttctcacggactgccgtcagcttatcgacatagcccggaaaatccagcggattcgttccatgctcttcggcaaaccattcttcaaagctctgtgggtctaataccatcttcaggcggtttccggtttttacgcggaaatatgctccacactcataacagacatagcggtttcttactacctctgctttgtttaccattttgccacaggctttacaaagtacttcctctttctttttttcttcctgtaaaataccttctgtggcatcctttacagctctattttccttgattttatccagtaatctgctcactttactcaccacttccaatcgcaaatgtcaactctgctgttgcagctatttttccatctactgttgcagttgcctttccaattccaatcggtccctttacttttatgatttctgtctctaaaacaagtacatcccccggaaccacctttttcttaaattttgcattgctgattcctgcaaaatatgcggtttttcctttgaattcatcctgacagagcattgcaaccgcgccggtctgtgccagtgcttctataattaaaacacccggcattaccggttctcccggaaaatgtcctgcaaaataaggttcatcaaaggtaacacattttttccctactgcacgaagtcccggcaccagttcttcaatcgtgtcaatcagaagaaacggatgacgatgtgggatgatttccataatttctttcgttgtcagtactgacattgttcccttctcctttatgcctgatattttttcagaagcagacttgcattatgtccgccaaagcccagtgaattgctgatggcatatggcacttcttcttcatatgcctctttgcaataattcagatccagttcttcatccggtgtctcataacctacggttgcatgaatgtaaccttcctcgatttcctttacacaggtcaggcactcgatggctcctgctgctccaagaagatgtccaatcatggatttggtggaattaatccggatatcctttgcatgctcaccaaacgccagcttgattgctcttgtctcaaataagtcattatgatgggtgctggttccatgggcattgatataagtaatttcttccggatttacaccggcatccttcattgcatttatcattgcggttgctgcgcctgcaccatcctctgccggagatgtaatatggtatgcatccgaagaacatccatatccggttacttctgcataaatctttgctccacgttttttggcatgttctaattcttccagaattacgattgcggcaccttctcccataacaaatccacttctgtttttatcaaacggaatggatgcatgttttggatcatctgaagaagtaagtgcggttaaagatgtaaatcctgctattccaagcggagtaatgcagctttctgttccacctgctaccatcacttctgcatcaccatactggatggtacggaaggcttcaccaattgcattcgttccggatgcacaggcggtactgatatttaagctctttccttttaatccaaactgaatggatacatttcctgctgccatattggaaatcatcatcgggacgaataacggatttactcttcccggtcccttttccaataatttgctatgctctctttcgattgcctgtaagcttccgactccggaactgatggaagtacccacacggtatgcatcctctgcttccatggaaagtccggaatcctccagtgcttctccggctgccgctacggcaaactggcagaatgcttccattctctttgcagagcggaaatccatatattcttttgcatcaaaatcctttacttctgctgcaagatgacatttatagtctgttgcatcaaaatgtgtaatctctccaatacctaccttctgctgctttactgcagaccagaattccggcacattatttccaatcggggtaattgcacccaatcctgttactacaactctacgattcatgttcttatcctctctatctaaacaatccatctctcgtcattcgtcatccgctgttctttctagctttttcatcagccagtattatttctgcatctacatagtcattccgccatctacagccagcacctgtcctgtgatataacctgcctcttcggatgctaagaatgcaactgctgccgcaatttcttccggctttccgattcttccaagcggaatgttatgaagcatattttcttttaccgtatccggtaaatcctttgtcatatcggtctcaatcattcccggtgctactacatttgcagtaataccgcgggaggaaagttctctcgcaacacttttagtcaatccgatgactccggctttggctgcacaataatttgcctggccggcatttccggtaattccggatacggatgatatattgattatccttccacttttctgttttaagaaatagcgggatgtatgatgaatggtatggaatacaccctttaagtttgtctcatagactgcatcaaattcttcatcattcatcttcatcacaagattatctcttgtaattcctgcattatttacaagaatatccagatgtccgtatttctttatgatatctctgagcatggcctgacatgcctcgtcatctgccacattgcactgataggattctgctctgccacccatatcggtaatcatttttaccacttcttcagcccgttctttactgccattgtaatttacaattaccgttgctttgtcttctgccagacgaagtgcaatggcacgaccaatccctttggctgcaccggttaccagtgctactttattctccaacataagctttataatcctccagtttttcaatgcttaccgttttgacatcccggttgattttacgcataaatccagataaagtatgtcccggtccgatttctacgaattcatcataaccgtctgctatcagacgctcgatgctctgctgccatcttacagaagaagatacctgcttctgtaacagctcttttaccggttctgttgtggtaacgtaatctgctgtcacattggttacatacggaatgctaaattcctgcagctttgtatttttcaatacttctgctaatttttctccggctccggtcaacatggcggaatggaacggtccgcttacttttaacggaaccacacgctttgctccagcttcctttaatgctgcaccggctttttctactgccgcttcttctccggtaattacaatctgtcccggacagttataatttgctatagatacaattccttcggtattgctgcatacttcttcaattgccttcgcatccagtcctaaaacggctgccattgctccgccggttggtactgcttcctgcataaagattcctcttgcacgaatgacacggaatgcatcttccatattcatgacaccggatgcaatcaatgcaccgtattctccaaggcttaatcctgcacaagctgccggttcttttccagctttctttaatgctgcataaattgctgcctctgtggtcagcatggcaatctgtgtatactctgtaatattgatttcttcattttcttcaaaacaaagctttgcaatatcaagtccggttacttttgaagcaagctcatatacggctttactctcttcacaggcatcatagaaatctttgcccattccaatatactgcgctccctgtccagggaacatgaatacaaccttactcattttcttctccttatttccgattcatcagacgttctgcctctgatacgatagaagtaataatttccttacaggacaattcatcctgtatcattccggcaatctgacctgccatcagacttccatttaccacatcgccgtccatcactgctttgcggagggaaccaagggtaagctgttctaattcatctaatgttgcgccttctttttccatcttcagatactcacggctcatcttattacggatgacacggattggatgtccggtactggaacctgttatttcagaatcaatgtctttggattttatcagcttctctttgtagtttgcatgtacgatagattctttagctgccacaaatcttgttcccatctgaactgcttctgcacccagcataaatgctgcagccattcctcttccatctgcaattcctccggctgcaatcaccggtgcatcaatggcatctgccacctgtggcaccaatgccatggttgtagtggaaccgatatggccaccggattccattccctctgccacaacagcatctgcgccaccgcggaccataagttttgccatagctacacttgctactaccggaattactttaacacctgcttctttccagaggctcatgaatttggctggatttccggctcctgttgtgacaaccggaacctgctcctcaactaccacctttgccacttccggtgcattcggattcatcaacatgacatttacaccaaatggtttgctggtgcgttccttcaccttgcgaatctgctcccgaaccacttcaggtggagcactggctgcaccgataataccaagtccacctgcttcagatactgcagcagccagatgatattctgcaacccatgccattccgccctggataacaggctcttctattcctaacagttctgtgattcttgttttcatattttattcctcaacgccctttgcttttaagtagtcaataacatctcctacagttgcgattttctctaaatcttctgacggaatctctacaccgaattcttcttccatgctcataaccagttcaaacaagtctaaagaatctgctcctaaatcatccttgaaattggattctgcttttacctctccatcatagtttaactgctctttgattaattctgctaatttctctaacattattttgttctccttttttgtcttttctttgataatactttgagtcgcaaatattttgattgtcaaattatttgtaactcaaagtatatacataagcatttctgttgtcaactatatttttaccgactcgcgtaaactacgagaaacacgctttgcgtatttctcgagttatcgcgtaaaaaagaatgtgccttggcacattctcgcgcctgcggcggtcgcttgcgacatctaccttatacgccgcagtgcgcatcctcgcagagcgtttttactttacaggaaagcaatttcctgtaaagtaaaaaagacagtgtcggaacttttctgttctttcactgtcttatgttagttacttcttttattttttatcacttatgcagcttttttacgatttgatactacaaagtaaacacctactaataatactccgatgcataagaagaataccggattgataccgtcacctgtcttcggtgtgctgtccttctcatggctgcctgaagttactgtcttaccggaattgctgtacttggttgcgccaatcacatttccgccagtcactgctgtgcctccaccggttactgtagtagcggaaccacttccgttgttgctgttggaagtatctgttgaaccattgctattggaattatttccattatccggagtcggctgtggattctctcctccaaggctctggaaactgattccatttccggttgcatatacctgtgcctgtgttcctgaataaccggaaattgtggatggactccagctgctctggcttccgattgacgttacactcgccggaatcaaaattgtactgatactgctgccgctgaacgcatctgtttcaatggtattaacagaatccggaactgtcagtgaagtaaccgacttgcagtttgcaaaagcacctgctccgatggttacagtactggtcgcaatttttgcaccggattttccctccggacaacggattaacctggtcattgctttgttataaaggcatccgtcactggatgcatatgtaccatttcctgatgcagcactgatggatgccagtctgctgcagccggtaaatacattgcttccgatgctggaaacgccagccggaattgtaattccggttaaagacgtacaatcataaaatgctttatccccgatgcttcctacggattcaggaattgtaaactgggataatgaactgcactctgcaaatgcctgggaaccaatggatgaaattgaagttccaatagatacactggtaaggcttgtacagttataaaatgtctctgccggaatagaaccgatatctccttctatgctgacagaaccaaggcttgtacagttatagaaaactgcggttcccattccagtcacataagatggaatcgttacacttgtaatggatgtattggatgcaaatacaccacttgcaattgtagatactgactctggaattgtaattgctccaccggctccgctgtaggcaaccagtgttccactgtcatctactgtaaatccattttcatctgttgtctcgtctgcccggactgtctgtcccggcatcactgccagcagcaaacatactgctgcaaaaatagaaaatccttttttcaatatctgcatctctcatctctcctagctttatctgcttgatacattatacttcttatctgcttactgtacacgctttgccagtataaacattcttccgtcctgtgtataattattgcaggtagaaagagtcagcagctggtctccataagtactgtctatctctgtgccatatacagaaagctgtgccacattatttaaatattcctgatattcttcttcggaatctgcattcagaaaattataataccggaatacattttcatcctgatactggacctccgataatcccacttcaataatttcatagactcctctttcataaagagtattaaattctatcgtcttatgggcattgtagaaatcttcgtccagatatttctttaattcgccaaacatcattccgcttttcatattatgtccgtaaatgatgatattggtatccctgtttatgtaatcatttctggcatcgataaaaagggtgccattcaggtcgtcatttttatcaaaatcatgtttcagataataatccggttcttcctgtgaagactgcatgaccggataatcaatatccgtatccggaatatgtaaccatccgattaattccggattttccgcatacagggaaacataatcctctaacataatcagtggctgctctgttgtctctcctgtttcagttgcatcttctgtgatttccggattcatctgctccgttcctgttacaaggtgctctactacattattctgtttcttattctgtaaatccttaagcctgttagcagctttataatccgcatattccgaaatcgcataatatccgatacaggctgtcgcaacaatgatgcatacgatgccgaccaccttctgccaggtaaaatgaaatggcagctttgcttctgcttccgcttcttccttggcaattttttcttctatcatgttctgcgaactatccgcaacaatatctgaaatgcaccagaagaacgattttccgatttcacttttaaaacggattttcttcgtgcgcatcatggtatacaaccggattgctacttccggatcataaatatccagttcatcggtaatatacttgattttctttaaatcttcctgcgcctgcctgtattcccttaaggtttcgaattcataatcacctattttataaatcttttcatccataatttatgattcatctgccttatcttctcatggtccaggtagttttattataggtcattttgtcatctttcgcaagatttttccgcaagatatacacaatgtaccacttcttatttttatatcgtctatatcttgcgctttctttagtctaaattggatttttccagcaaataacggaacatctgctccgctgcttccttatgttcggagccaagggcaataccaagaatacattccttttcataataaccgtgttcaaccggccagcttccggctccaagacggatgcctgctgcaaaagtatctccggtgtccttatcctctacatagaagatataatcctttaactgttccagctcgtctttggaaaagtactgcgccaaatctgctatggcaccggactgggcaagattttcaaaaaccatttcatcggcacccaaaacatctactccaccgcctgcaatcactgtctgcagggactgataggaatagagattactggtatctgtgctggttaaatccacataatatgcatcatttaccacaacctcctgggctgctgtatcatacccatattgctccatgaattctgagaaatccggttcttcatctgctggcatactctttgcatttactaatacaatctgggaaatatcttcctttgtggtcatataatgatgtaccgtcataccaatcaaaataatcactgcaactactgccagtattacaagtctgtaatagtcccagacaaatccgatccgctgtttccaggtcattgtctttaaatcagctttcttttccatattatcgcctttcttcctctgccggagctgtattatctcctgtagtgtcattctctgctgcattaccctctgtcacatctgtgccactctccgcatcagcatcattgcctgtgccaagaggtgccacaaaatctgcatacggtaattctttatgtaaattttccatataatcataccagatttctcccggatagctggctcctgtcagtcctggaagttctgccggaatatcatatccaacccagacgctggtggtgtaatactttgtatagcctacaaaccagccatccttattggaattggtggttcctgttttcgctgcactggcagtctcggacaatgccagtccctttgctgttccttgtgtcagaacaccctctaatatattggtcatccaacgggctgcattggttttataaacctgcttttcatcgacaattttctgatagattgcatttccgtctgcatcctgtatctctacaatgcaggtaggctcccggtattttccatcattttctatggtggcataagccgccgccatttctaccggagagactccattggtaaatccacccagagatgccgccggtctttcatcctccggggacagctttgcgaaattcatctccttcagataggaaattcctgtaacgggagtcatctcttctaaaagattccacgccactgtattaatggaattttctactgcataacgcaaggttacgctgccaagatacctgccactggcattttccggtccatcctcaatcggtgcatcttccaccacagtatccggggtatagccccgctccagcgccggtgtgtatacaatcaacggtttgatggcactgcccggctgccggtaactctgataggcgcggtttagcatatgcccgtcatattcctgacttctgccgcctacgattgcctttacaaaaccggtctcattgtcaatgcatactgccgcactctgcaatgtataaatgccctcttcattgacatcggtaaaatcctgcagcttctcatccactgcattctgaagctgctcttccatatttaaatcaatggaagtatagattctatagcctcctgtataaagagactgttcgcaggttttatactgctcctgataggcatcttcataggtctttcgatcttcctccgaagaaaaatctgtccggaattcaaagccctgctgctccatcaatgcccgtgttgcacaatagcaggcataggtctctaccgcatcataacgctttgttggctctgctgtgctgagtacaatcgtttcctgtctggcatccttatattccctgcggctgattttgccatcctcatacatgttttttaaaatgcggtcacgtcttcctaacgtattatccgggttcttataaggattatacatcgtcggattattcggtatcgcacaaagatatgccatctgggacaatgacaaaaatgaaacatctgtatcaaaatatccccggctcgccgcctgaatgccataatatccatttccaaaataaatattattaagataaaactctaagatttcatccttggtatatttcttttccagctctgtggcaatgaatatttcttccatttttcgctgccacgttctgtcattatttaggaaaatggttcttgcaagctgctgcgtaatggtacttccgccctgggttacttctccgttacgcaccattgcccagactgcacggataattgccttaaaatcgattccgccatgactgtaaaattttttatcttcaatacttaccatagcttctttgacttcttccggtatctcatcactggtcagatagcttacatccttggtgccacgaagtgacatgattctcgttccattcacatcataaacctggctggtctgctccgcccgaaatgtgtccttcgtcgactcttttacaaaccggactgcctcttcatgcatggcactgacctgactggcatacccgccaaaatagtaatacgccagcccgccgattaccagaagtatcagaactatctgcagctttacaaaaagccagaaaccacggtatttctttttcctttttttcttctctttatgggacatgggattcctccatattgctctattttacactgttccataaaaagttacaaggctactgttccatttgtcttcctaaaaatcccgctgctgtaatagcaagcttgctttcggtttctcccatttttgccgcatcatttttctcatataaaacgactgctccgatggcatctccctcacagataattgtactgattgcctggtcatgatagtttccggtatcatctaaggtaatacgtacaaatttgctgtctccctgctgcgcaagaatatttttccggtcttcgatcagttcctctaactgcctgctgattggttttccttcgaattccttctttccgtttcctgcagccgcaatcacatggtccctgtcggtaatacataccagatgcccggtgctctgtgccaggctctccgcatactgtccggcaaactggctcagttctccaatcggagaatatttcttaagaatgatttcaccttcccggtctgtaaaaatttccagtgggtcaccttcccggattcgcagtgtcctgcggatttcctttggcactacaactctccccaaatcatctattctacgtacaattcctgttgctttcattaaaaattcctcctgtttcctacatactttccatttttgtgctgtatgggtagtatgtggaaaacaggaggaattatgcaaaccttcctcgtatttacatttttaaatcactggtgtttttattagccaaaatcaatcttttttcatttttggctaatagttcatttatccaataaccaatccgcaatatcgactatcttgattccctcatattgatatgcatcatgtctcgttctggcaataacatacttagggtatgcatctttaatctgcagtagtggtgatacctctctttcaaaagtcttatcatcacttatgttatcagatacctgaatataaattttttcgctacgtttaattgcaacaaaatctatttcctttttatacaatattccaacgtaaacctcatatcccctacgaagcagctcaattgccacaatattttcaagtattcgaccataatccatgttttttgttccaagttttgcataacgaaaagtatggtcactcagatagtatttatcattgctcgacaaatatttttttcctttaatgtcataccttcttactttgtaaaatgcgaatgcgttgcacaaatactgcatataagagcctacagtcgtatgatgaattttttcatgcatacttcctaatgtatttgtaatactacgggcagatgacaaatttgaaatattatccattaaaaagtccacaattctatccataagctgcacattccgtattttgtatttttttctgatatcccgtataatcagagtatcaaatacatcag

SEQ ID NO: 94 - DNA, 7920 bp, unidentified
  source 1..7920: mol_type = unassigned DNA
ttatttaccctcgtatgctgcctgaatctcttttttgaactcttcctcgcccactctctgaagagtaagtctgaaacgctcaccaccgtttgcatgcttctcgaagaaactaattgctgcatctgtcactctgaaaagagtttccttgtcgcggataatcggaacaagctgctctcctttatagatgtggtttccgaaaagtcctccaaacgatacgatatatcccggagttcccttccatgcatctgtcggacagctctttacacagcgcgcacagttgttacatttgtctctgtcgatgacaatcctgccatcctccatgctaagtgcaccctcgcggcatgccttcacacatacaccacactggatacaatcgtcatggctgcactctactgtcattccgcccttgattccgacatcgttttcctcagcctttaagcagttgttctgacagcctgtgacaccaaacttgaacttgtgaggaagctctcttccgaagtatctttcatcaagttccttagccagagtgtatgtatcgatacatccgctaggacagatttctgagccctgacacgctgtgacagtacgtactctcggtccgcagacacctgttcctacaccgccctttgccagttcctcttttaccacattgatatcctcaaccttgataaaaggaatctcaataccctgacgcgatgtcatatgaacatatccgtgtccgtatttctcagcaacctctgctactgttttgatattttctgctgtaagatttcctcctacaaccgcaattctaagcgagaaacagcccttttgcttctgtctcatgaaaccgcccttttttagggccgcgtaatcaactttctccgccatttttaatctccttactgtgtaaatatgttaatgttttgttttatatgtaaatgcatatgcacgctctcatttgcatacacattgataccttattatgatggcttaatcagctatatttgcaaaagcctgtgcaaaatcctccttcaggtcatctatatcctcgatacccacactgactcttataagatcctcaaatactcctgcatcctccttctgcttatctgtgctgtgaagactgattgtggagcccggatgaatgacaagtgtctttgtatctccgatattgctgagtgtgtatggaatcgtcagactgtctataaatttaaatgccttttccttgctgccaaccctgattgtaaggattgctccatagccgtttgtgagctgtttttttgctatttcatgccatttactgctctcaagccccggataattaacctttatgtcaggataattgttttctatccacgacgcaagctcgagtgcattagagcattctctttccattctaagaccgagtgtctcaagtcctataatatttaagtatgcattcaccggagctaaacaggcacccatatttctgaaaagactgtttctcagctttgcgacaaatgccataggtccatacttcacataatctgcaaaacccggatatctgttcttgtcccatttgaacttacctgagtctgtcagaataccactgattgcattgctgcttccattgatatatttggaagatgaattgaccacgatatcagctccatgctttaaaacctgtatcaggtaagctgtcgatgtggtattgtcaactacaagcggtatatcatgtgcgtgtgctatctctgcaagcttctcaatatctgtgacatccagacagggattaccgatagtctctgcaaaaatcagtctggtatgctcattgatactgtcctctatctgctgccagttgttgttctcgacatatctggttgtgatgccgaaggcctcaagatcatggaacaaatctattgtgccaccgtagaggctggcgcttgagatgagctcatctccactgcttagtatatttaagaaggtattcatcagtgccgccatgcctgatgcgcatgccaccgatgctattcctccctcgagctttgttattctgttctcaaaagctgtaatcgtaggattggcaactcttgtgtaacagtagcccggagctttgttttcaaatattttttccagatcagccgcgctctcctgctcgaaggcgcttgtctgatataccggtggcagtgtagagccatttgtctcttttgtcacgccggcatgaagtaagcttgtattaaatctcattgttttcttcttctcgttaattcttacatagtctattgtgttactaggaattgatgagattattatacaaacgtgtgtgttgaaagtcaatgctatcagttatacaaattatttgtgcgtggttatatattttgtttataaccattaatgtcccttaaatactctgcggctgtcgttgcggcatttgcgccgtcagatactgcggttaccacctgacgcagtgtcttggtacggacatctcccgccacatacagtcccggctggacgcttctatcatggtcaccattttttgttgcagcatatgtgatgccgtcctcacctgccactacatatcctctctcatcaagctgcaccagattctttataagctctgactgcggtactgagccatatgccacgaatactccgtctacagccagtgtcctgccacttttaagctttatacctgttggctttttttctccatatatttctgtcactgcttcgtttaggacaagctctacattttctttctgctttaagagctcaactgtgctctgcgcaccgcggaagctgtctcttctgtgaaccagatagaccttctcacatatatcggacagatataatgcatcatccaaagcggtatctccgccgcccagcactgcggctgtctttcctttataaaatgctccgtcacagattgcgcagtaagatactccctttccggtatactcatcctctcccggcactcctgcctttctcggatatgctcctgcggtatagatgagcgctcttgcctctgctatcgtgtcatcatcgaatttcactctgtatatcgctggttcttctttctcaccattttgcactgcttctatctgcactgcttctttttcgataaattctacatcaagagatactgcatgctccctgaatttttctcccaggtcatatccgtttatgtttggaagccccagatagttgttcacatttccgctctcggctatctggcctgtcccctcgtattctttttctgctactgccacattcagattggctctctttgcatatattgctgcagacagtcctgccggaccactgcctattattattatatcaaacatggaattggttcctttcatcgtccattgaattttttcggtaacttattatatacattatccttaaaaaatacaataataccgcctgcttttataaaacacctttataaaaacaagcggtatcaattttatctatcgtatatacatcctggcctcataaggtctgagcactgacatatcagaggtatccttataatttgaaatcagcacctccatgccctcacactcctttgcaagcggcattggtatctccttgtcaaagaaattgcacacaacaatcatggttttttcttcattctttctgctgtatgcaaaaatattctcatcatcctcaagtaaaagtgtgaatttaccatcaacaaataccggataatcctttctcagctgaacaagcttcttgtagcagctaaagattgaatcagggtcatccacctgtgatttggcatttattttgtcgtaattgtcatttacctttatccaaggtgttcctgtggtgaagccggcatttgccgagtcatcccactgcataggtgtccttgcattgtcacggccctttgcgtaaatggacttcatgatttcatcctttgagtatcctttttcaaggcgctcatggtacatgtttatgatttcacagtccttataatcctcgatatcatactgtacatttgtcatgcccagctcctcgccctgatagatgtatggtgtaccctgcatgccgtgcagcaatatagcaagcatctttgcagattccactctgtactccctgtcattgccccatcttgacacgatacgcggcaggtcatgattgtcccagaacagactgttccagccacagttgtagagctcattctgccagtgagccattatctttttgagctttttaaacggaagcggtgcaaggtcccatttctcgccgccctccttctggtcaagccctatgtgctcaaactggaacaccatagaaaactcgctgccatccggattgctgtagagctttgcgcgctctgtgtctgcgccccatgcctcacctacagtaatcaggtcgcccttctggaaggtctccctgctcagttccttaaaatattcctgaagccttggtccgtttatggtgattctcttgtccggctcttttgctatctggtcgattacatcaagtctgaagccgccgactcccttgtccatccaccagagaatcatatcgtagattgctcttctgacctttggattctcccagtttaaatccggctgctccggtaaaaactgatggaaataatactgtccgatttccggcacatattcccatgcgcttccaccgaaacaagccttcatatcacttggcggcacgccttcatctccgtctctccaaatatagtagtcatggtatggattgtccttgctctttttagcctccttgaaccacctgtgctcgtttgaagaatgatttaagacaagatccatcataatccttatattgtgcttctttgcctcgtttatgagctcctccatatcatcgagactgccaaacgtcggatcaatatccctgtaatccgaaatgtcataaccgttgtccgcctgcggtgatttgaataccggcgaaagccatattgcattgattccaagcgtctcaagataatccagtcttttgatgataccctgtaaatcaccaaagccgtctccgttagaatcctgaaagctctttggataaatctggtaaactaccgcctttttccaccatttttcgttattgtttttgctcattatgccctccttgtctcttcattatctctttttgttatctcttttagctgtctctttttgtaaaaattcagcctggtttctttaatgctgtatcaaattatgctattttacaagcaccaccaaaacctcacagctttcaagcttaagctcagatgctcccactgaaacagtgctcttttcagcatcatttgtgttggacaaaagcacctttttcacactgccatccagcctgatttgtgcctctttactgccaaaatttgccacaaccagcacgcgcttattttcatcctctctgtaataagccatgatgccatctgtatcctcatatgccggaacacatctgccgtaggtgaacagctccttaaattcatctgactttcgcagtgccacaagccttctgtaatagttcaaaacagatgaagggtccttttcctgcgccgcaacattgatagccttatagttttcattgaccttaagccatggctttgctgtggtaaaaccggcatttgcctcatcactccactgcataggtgtccttgcattatccctgctcatccttccacaggctgcaagtgcctgctcctctgataagcctgctgcaagtgctgccttgtactgatcctttgtgctgatatcgtcatactcatctatactgttccatttagcattttgcataccgatttcctgtccctggtatataaacggaatgcctcgaagcagtacgctgacagttccaagcatcttgattccggcaggattttgagcatgctttggtaaaaatcttgaggcacctctcggctcatcatgattttctatgatattggccttaaagccgtacttttctgtctcaagctgtgaaccaagaatggtctttctccatttgtcaaaatctattttcggtgcatcataccatccatgctctccatcacttaagcactgtgcacaaaaatcaaatatcgttgaaaaatgcccattctcaccgataaactccggcagctcctcaggcttcatattgaatacctcgccaaccgtaaatgcatcatacttcttaaatgtattgttctttaattcctctaagagctctccgacaccttctgcactttcaaccatcttgtagcaggcagccagtccgtcctctgcatccggctcaaaatcagggaaatcgagatttttctttatattgattatcgcatctattctaaatcctgacaagcccttatcaagccaccagttaatcatctcataaagcttttgtcttagcttttcattctcccagtttaaatccggctgctccttcgcaaacatgtgcagataatacttgtccgtgcccggcaccttctcccagcagcttcctccaaaataagagcggtaattgctcggcggattgccgtttttaccttttctgaaataaaagtaatcagcatactctccatccggatccttaagtgccttttgaaaccattcgtgcttatccgagcagtgatttataaccagatccatgatgatgtgcatatcacgcttctttgcctcggcaaggagctcatcaaactcctccatagtgccgaattcttcagctatcgcatagtaatcagatatgtcatatccctgatccacaaatggcgatttatatatcggagacagccatatgatgtcaattccaagcgattttaaataatccagctttgaaatgatacctcttaaatctcctattccgtcaccgtttgtatccagaaagctctttggataaatctgatatgctaccttgtcatgccaccattttctctccataatgtgtacctcttatctaatcataaattttgcactcatttacagcttgagcacttcgccttgatgtattatactgctattatagaaagtgtttagtataaattcttgcaatattttttcattttataacacaatactgctcttataattttaaagggtatatttttaaaagctatggagaaacaacaatatgaaaaacaataatccgcctgccctcgggcagaaagaaaacgcaaagcacggagaagtattttttcctgttcagaaatatataacaagacttgcagcagattaccctgtcatcactacacactggcacgatgaggcagagctcacactgattacaaagggctcatgcacctatcagattgatttgctcgaatatgaagcaaaggaaggcgatatcatctttatcccgccactgctgctgcattccatttcaataagggactgcgacgaattttactcggaaacgtatgtattccatatcaattttttaggtggaaacaataccgatatatgctcttcaagatatctgactccgctgatcaaccatgagtttgccatgccttacctgattgcaccgaagcatccggcatattcatccctttgcaaatgcttcatgcgcataacaaagctatactccggtcaggaattcggctatgagctggctctaaaggcatttctgcttcaggcaatatttctattgctgcaatatagtgaaaaaaatgctgatttcggtgtcaacacatcctccgataagctcaaaaatgtgctcgattacatcgaggtgcactatgccgaaagcatccaggtttcagagcttgccgggctttgctatttcagtgaataccacttcatgcgtttcttcaaaaaacacatgaacatgacctgtgtgcagtatatcaacaatgtgcgtcttgaaaaatccgtggaacagttcgagcgcggcaacacctccattttagatgtctcactgtctgtcggatttcacaatctgagctattttcacagggcatttaaaaagagatatcatatgacacctctttcctttatcaaaagccttgaataa

SEQ ID NO: 95 - DNA, 12834 bp, unidentified
  source 1..12834: mol_type = unassigned DNA
ccgtgttttttgtttgcaaaaaatccggcgagccctaaagcaccaaatgccagagggtagtctaaaatcatctgtggaacggtatagaaaattggctccataacaaactgaacaagaccgtaggcaacggcagtcataagaccaacataaggaccgtaccagtaaccgatcagtgcgataaacaacatgctgaataaagtaacggaaccgcccattggcagattcgcaaacttaatcatggagcatactactgcaagcgcaatcgcaacggcagagtagacaagctgttttgtggtgagaattgtttttttctctgcatttctgtggcggatcactgctgcgacaacaacgagaagtgcgataatgactactacaactgcgattccaggtgcagtaagacgtacagagccatcatcccaggctccgatcgtggtagtaaaaaattctttcataaataaaatcctccttgcgtttcagatcttttgcgccaggaggaaaaaactctatcgtctgatgagaaatatcataaaagcttccttacgccggtattatccggttcaagtaataagggttgatgaaaaatcatctctcagcgttggaatgtctggtaaatgcagcattttttgcgcccctagcgtttttgattctgttataaatactgttaaggtctatgatgccttaacgagtatcaatatagcaagatgcagcgggaaagtcaacatgaaattttcataaaagttcttgaaatcacaaagactcacaaagatcacaaagattccaacaatttgtgggcaaagcaaaagccgcagaacaaaatctgcgactttcttttcagatataaagatcgatattacttccaagatatggtgtgacggaattctccatcatctgaaccatgccggcacctaatgtctgtgtcatatctaaagattttccgagcattgcaactccgatatcttcctgtaatgtaacagggcttgtggaagaaccgatgtcatatgcagaaaccgtacttaatgctgcgtctaaacctgtaatatccataaatcctacctcactttcatttccaatttttgcatataaaatgcaatcattcatgactcattgaagcacttttaatatagcacagatcggtcgttctgtatatagaaaagaaaaatgttactgtacacgcagcagtaaaacacttgctgttttgctgcgtaagaaagtgattcagaaaaatcctcttgacaaataaaacagaaatgcatatactttgcctatcaaatagtttgacaatcaaataattagaaagtcaaacaaactaatatgaaaaacaacaggcgaaagccaggaaagaatgaggaaaagcaaaatgttagaaaagatgaaaccgattattgcagaacagttaaatgtaaatgaggcagagatcaagccggaaacaaaattcaaagacgatctgggcgcagattccttagatttatttgaaatggtgatggctctggaagaagagttcggaattgagatcccatcagaggatcttgagaatattgtaacagtcaacgatattatgggttatctcaaagaaaaaggtgtggaagcttaagaccatttacaaatattcaaagagaggcaggaaacaatgaaaacgagaattacggatttgcttggctgtcagtatcctgtgatccagggcggaatggcatgggttgcagagtatcatcttgcagcggcagtttcagaggcaggaggaatcggactgatcggtgcagccagtgctccgccggaagtagtcagagaacagatcagaaaaacaaaagaattgacggataaaccatttggagtcaatgtgatgcttttgaatccaaatgctccggaagtcgcaaaagtggtcgtggaagagggcgtaaaaattgtgacgacaggagccggaaatccgggaaaattcatggagatgtggaaacaggcaggcgtcactgtaattccggttgtagcaagtgttgcgatggcaaaaatgatggaacgcgcaggggcagatgccgtggtcgcagaggggatggagtccggcggacacattggttcacagaccacgatgacgctggtaccgcaggttgtggatgcagtgaccatcccggtcattgccgccggaggcattgcagacggcagaggaatggcggcagccatgatgctgggagcggaaggtgtgcagatgggaacaaggtttgtggtcgcaaaagaatcgatcgtacaccagaattataaggaacgcattatcaaagcaaaagacatcgattccgaagtgacaggtatgagtaccgggcatccgatccgggtactgcgaaaccagatgacaagagagtatctgaaattagaaaaggaaggtgcctcttttgaggagttagagcagttgacactcggctctctgcgtaaagcggtgatcgaaggggatgcagttcatggaagtctgatggcaggacagagcgccgggcttgtgaaaaaagagcagacctgtcaggagatcatagaggaagttgtcacagatgccagagcgctgcttgcaggaagaaaatgacctgacaggcgcagatttgaagatttgagaaaggtgtggttatcaggatgggaaagacagtatttatgtttccgggacagggatcccaatatattggcatgggaaaagaattttacgaacagatccctatttgtaaagaagtgtacgatcttgcatcagaggtgactggattggatatcccggcactgtgttttgaggagaacgaaaaattaaatatcacagagtacacgcagatctgtatgctggctacggaagctgcaatttatatggcgttggaacagaacggttatcagccggatgtcacagccggattgagtcttggtgagtatggagcgttgatcgcatccggagtcatgactgctgaggaagcatttgaactggtgcggaaaagaggcatttttatgcaggaagctgtcccggccggtggagcaatggcagcagtgctaggactggatgcagcggcaattgagcagatctgcagagagacagcagagcagacagggagcgaggtttccatagccaattacaactgtcctggacagatcgtcatttccggtcaggaggaagcagtgcatctggcaggagaaacatgtaaggcgtctggggcaaaacgcgttgttccattgaaagtcagcggcccgtttcattcgaaaatgctgcggggcgcaggagaaaagttaaaagaagaattaaaaaaagtagagatcagtgattcatttgttccttatattgcaaatgtaacggcagactatgtcacaaaaaaagaggaagtgaaaccattgcttgccagtcaggtatcttcttctgtgcgctggcagcagaccatagaacggctgcttgcagatggtgcggatgaatttgtagagatcggaccgggaagaacattgagtggatttgtgaaaaaagtgaaccgggatgtaaaagtgagcagcattgataaaatggaagattttattcagtttatcggaagtcatgtggaggcgggagcatgttaacagattctttgaaaaataaagtggcacttgtcacaggagccggccgcggaatcggaaaagagattgcaaagacactggcatcatgtggagcgtttgttattgtcaattataacagttcgccggacgcagcagaacagactgtaaaagaaatcataaaacagggtggaatggcagcgcctgtacaatgtgatgtttctgattttgatgcctgcggaaaaatgatggaaatgatcataaacaactatggacacctcgatattctggtcaataatgcagggatcacaagagatggactgatcatgaaaatgagtgaggaagattttgacagggtccttgatacgaatctgaaaggtgcattccatacgatccgccatgcttcacgttatttcctgaaacagaaatccggtaagattattaatatttcttctgtttccggtgtcatggggaatgcaggacaggcaaattacagtgcaagcaaagccggagtgatcggtcttaccaaaagtgtggcaagggagcttgcgtcgagagggatcacatgcaatgcagttgcacccggatttatcgaaacagagatgacagaagctatgccggaggctgccagggaagcggtaaaaaaacagattccgcttcagcggacagggcaggtgtcagatgtggccagtgtggctgcatttttagcatcggatctggcagattatatcaccggacaggtgatctccgtggacggcggcatgcacatgtaaagaatatatatcatgaggagaacaatatggcaaaaagacgcgtagtggtaacgggaatgggagcagtcacaccgatcggactgagtgtggatgaattctggcagaatgtaaaagcacagaaaaccgggttttctgaaattacaaaattcgacaccactaattataaatgtaagcttgcagcagaagtaaaagagtttgatgcaaaaaattatatggatgcaaaagaagcaaggcgcatggaactattcagccagtatgccgtggcggcagcgaaggaggcaattgaggatgccgggcttgaaatggatcaggaagatccgtatatggcaggctgtgccattggaagcggcgtgggaagccttcaggcgatcgagcgcgaacatacaaggctgatagaaaaaggaccggggagagtgggacctttattcgttcccatgatgatctctaatatggcagcaggaaatgtttccattcattttggattaaaaggaaaaagtatcaatgttgtgacagcctgtgccacaggaacgaatacgatcggtgaggctttccgtgccattcagtatggtgaggcagacattatggtttccgggggaaccgagggaagtatctgtccgaccgcaatcgctggttttacgtcactcacagcactcacagcagaaaccgatccgaagagatgttccattccgtttgataaagaacgcagcggctttgtcatgggagagggcgcagcggtggtcgtgttagaggaattagagcatgcaaaacgccgtggcgcaaagatatatgcagaggttgtgggttatggctgttcttcggatgcgtatcatatcacatctccggcagaagatggcagcggcgcagcaagagctatgttaaatgctgttcaggatgcaggaatcgcagtggatgaggttggttacatcaatgcacatggaacatccacgcaccataacgatctctttgagacgcgcgcaatcaaacttgcatttggggcgcatgccggtgaaatgaaggtcaattccacaaaatctatggtcggacatatgctgggagctgccggagcgatcgagtttatcacttgtgtgaaagagattgaggaagactatattcatgccacagttggctataaagtgccggatgaggaactggatctcgattattgcaaagaaccggtttcgatggaggtgcagtatgcactgagcaattcccttggatttggcggtcataatgcaagtattctattaaaaaaatataccattgtatctgacaaagatatcaatggctgcagataaggaggcagcgatgtcagtattaaacatcagtcagatcatggaaatcctgccacacagacagccaatgctgctcattgattcggtagaagaaattgagtatggtgtccgtgcagtggcgaagaaatgtgtcagtttcaatgaacctttttttgcaggacattttccggaagaaccggtgatgccgggggtgctgatcgtggaggcactggcgcagaccggtgcggttgcaattcttggaaaagatgaaaaccgtggaaaaacagcttattttgcgtccatcaattctgcaaaatttaaaagaaaagtagttcccggagatattctcacgctggagacggaaattataaaagtgaaaggaccgatcggggtgggaaaagcgacggcaaaagtcggagatgaaattgcatgcattgcagaactcacctttgcagttgagtaacagaatagaaaggcattacatagaagctgtaacagaaaggaaatattatgccagcaattttgagaagaagaaagctgatatccataaaacctgaaagaaaaaatgcagtaacttaccgcaaagaggaagtgcaggcggaagttatgacaccaccaccggcagcggatcagcagaaaataccgggaagtatagtggtctgccccgcatgtaagagagaagtgaacaaggcggaagtggaaaagaataagtatgtctgctatgagtgcggaagctatttccgcgtgcggactaaaaacaggatccgcatggtggcagatgcaggaacctttgaaccatggtttgaatatctggaatcagaaaatccactggattttccggaatatacccagaaggtggaggcagccagggaaaagaccggactgcatgaggcagtgaccatcggacgatgcaaaatatatggggaagagacagttcttggaatctgtgatgccagattcctgatgagcagcatgggacatgtggtcggagaaaaaattgcgctcggtgtggaacgggcgacagatttaaagcttccggttattttgttctgctgctctggtggggcgagaatgcaggaaggtattatttccctgatgcagatggcaaagacgtccgcagctttaaaaaggcattctgatgcagggcttttgtatgtgccggtattgacagatccgacgaccggaggtgtgaccgcaagttttgcaatgcttggagatattatcctggcagagccgggcgcattgatcggttttgcaggtccccgcgtgatcgagcagaccatcggacaaaaacttccggagggatttcaacgtgcggaatttcagttagagcatggatttgtggatgccattgttgagcggaaaaatctgaaaataaccttaaaccgtattttaaaaatgcatcacagcagggaaggatttgctaattttgatccattgcgcatggatgataattacgagccgacagagttgatgcgggagcgcgcggcaaggacaaaaggactgacgccgtgggaaaaggtaaaagccgcaaggaaagtagacagaccttctgccactgattatatggaaaatatttttgatgaatttatggagttccatggtgacagatactttcgggatgatccggcaatcgtaggtggagtcgcatatctcgacgaccagcctgtgaccgtgatcggaatccagaaaggaaaagattttaaggactgcatgaaacacaattatggaatgccgtcgccggaaggataccggaaagcgatacgtctgatgaaacaggcagaaaaattcggacgcccggtgatcacatttgtaaacacagcgggagcatactgcggaatggaggcagaggagcgtgggcagggggaagcgatcgcccggaatctctatgagatgtctgcattaaaagtgccggttctctgcatcatgatcggggaaggcggaagcggcggagcgcttgccttagcagtcggaaatgaagtatggatgatggaaaatgcaacctattgtgtgctttcgccggaaggatttgcatccattttgtggaaagacggaaaacgtgcaaaagaggcaagtgagattatgaaaatcacggccatggatttaaaatcgctgggtgtcattgaacagatcatcccggaatatggcgtggcagacgcaaaagcctgtgaatcaatctcacgctatctgaaaggaaatataaaaaagtttcttgagaaacaaaatggcaggacaggagaacagtttgcgtccgagcgctatgcgagattccggaaattttagcaaaatcacagcggctatgtgcacagagagtacgaatcgttttgtgaccggacagagaagagaggaatattatgaaggtaaaaataacaggaacgggaagctgccttccgaagcttcgcgtgacaaatgatgatcttggtcagatcatggaaacatcggacgaatggatccggtcgagaaccgggattattgccagacatattgcggtagaggagacaaccaccggcatgtccacagaagcagcagacaaggcgttgaaaaatgcagatatttcagcggaagatgtggatatcatcattgcggcaactgtttccgcagataaatatcttccgggacttgcctgtgaggtgcagaaaaatatcggtgcagaaaatgcagttgcgttcgacatcaatgcagcgtgttccggttttctttttgcactagatactgcggcgctgtatttagaacatggcggatatcagcatgcgcttgtgattggagcggaaacgctgtcaaaaatgatggactggacggaccggagcacctgcgtgctttttggggacggcgcaggggcagcagttctttctgtaagtgaagaagatggcattttatccatggtgcagggttcggatgggttcaggggcgatgtcttaaactgcatggcgagaaaagtgaacaacccttataaaaaaaatgacacggcactttcctatatttccatgaatgggcaggaggtgtacaggtttgcagtgaagaccgtgccaaaggcggtcacagacgcagtggaaaaggcaggcttacaactggaagagattgatttattcctgctgcatcaggcaaattacaggatcattgaagcagtttcgaaaagacttggtcagcctatggaaaaatttccgaccaatctggaggaatgtgggaatatttctgcggcgagtgtgccgattttgcttgataatgtcaataatcatggtatgatgaggaaaggaatgaaaatcgtgttggcaggatttggagcaggcctcacctggggagcaacggtgataaactggtaaaatcaggcgctgaccgcagaaataggagtagatcggatgacaacagatgaaacattaaacgaattattggtcagattgtttaaagacatcatggagatcgagggaaaatgcctcgtgacagaagaattcaaagatctcagttacaatgatttccatgtgatcgaggcaatcggagtcaatgaaccaaaaactatgacgacagtggcaaaactgatgaatgtcacaaccggaacgttgacaaaggcaatggatggactgaccagaaaagggtatgttatccgtgagcgcagtacgcaggataaacgtgtggtatgggtttatctgacagacaccgggaaagctgcttacaaacatcatgaagagtttcatcacgagatgatcgcacagatcaaaagccagcttaccgagcaggagacgccgatcctgatttatgcgctggcgaaacttgccgattattttcaccttgtatacaagggtgagaaagaataaagaacagaggtcattgcatcgaaaaactatttttttatgcgatgacctgttttgttataagttgaaatgatattaattataacctgaaaatataaaaagtaaaattcattgattttttttatgcaaaatgaataatttgaagtcgaatcctgcaaaaaaatagactaatcattagaaaacttcactaaattaaaggaataaagaaaaaaatattgcgtccgccgtcattttataataaaatgtacgtgttgatgagaaatctgcagccggaatcaatgccggagcatttaaaaaatgccggatatctgatttcacatggttgtaaatatatttttaaaggagaaaaaaaatgggatacgttgatgaagtactcgcaaaagtaaaagaaaaaaatgcttcagaacctgaatttttacaggctgttgaagaggtattagagtctttaagacctgttattgatgcaaatgaggaattgtacagaaaaaatgcaattcttgagagaatcacagaaccagaccgtcagatcatgttccgtgtaccttgggtagacgataacggacaggttcaggtaaacagaggttatcgtgtacagttcaacaatgccattggaccatacaagggaggattaagacttcatccttctgtaaaccttggaattatcaaattcttaggatttgaacagattttcaagaattcccttacaacacttccaatcggtggtggtaaaggtggttctgactttgatccaaagggtaaatctgacagagagatcatggcattctgccagagctttatgacagaactttctaaatacatcggagcagatgtggacgtaccagcaggtgatatcggaaccggtgcaagagagatcggatttatgtttggtcagttcaagagaatccgtggttctttcgaaggtgttcttaccggtaaaggacttacatacggtggatctcttgcccgtacacaggctacaggatatggtttattatacctgacaaatgcattatggaaagatcacggcatgagccttgaaggcaagactgctgcagtttccggttccggtaacgttgcaatctacgcaattgagaaagcacagcagttaggtgtaaaagttgtaacatgttctgattctacaggatggatttatgatccggaaggaatcgatgttgcattattaaaagaagtaaaagaagtaaaacgtgcacgtttaacagagtacgctgctgcaaaaccatctgcagaatatcatgcaaaacagaatggtgagcatggtgtatggcagtacaaagtagatttagcccttccatgtgcaactcagaatgagttagacattgaggatgctaagatgctagttgcaaatggtgttacatctgtaacagagggcgctaacatgcctactacattagaggcaacaaaatacttacaggagagcggcgtattattcgtaggtggtaaagctgccaatgccggtggtgttgctacatctgcattagagatgagccagaactctgagagacttcactggacattcgaagaagttgatggaaaactcaaaggaatcatggagacaatctacgctaacatttctgatgccgctaagagatacaatgcaacagtcggcggacagacagattatgttgccggtgcaaatattgcaggctttgagaaggtcgtggaggctatgattgcccagggcgtgtgctaataaattagcaacaaataaataattattcaaaaattgagaaccctacacattgcaggaaaacgcaaaagtgtagggtttttgtgttttgccagatgcatgaaaatgcagtaaagtaagcggtttatacatgagagaaggagataagttacaagtaatatacatataatatacgcgtagtatacaaacggttttgcataatatacaaggatgattcgactaaaatgtatttttataaaatagggtaaaaacatagcacaggataatcaatgaaattacgatttattttgaacaagaattttgaaatggagattgtcagtttatgtaaattgtgatacattaccgacatgagaagtaatcgtgtacagagtggtagcctcccagactagagatagaggggaggtggtgctgatggatatgtatgaagttttaagcctgttatttttaggcggttcatttctaatcgcactgcttgcctacatagataggaacaacaagcgaaaataaataagccactcctgtcttggcggacgagtggcttattaaataaccatttacgaggctaaccactttgtgggcggttgcttctctttatgtttattatagtatgaggtggggaaattttcaagacataaatttgtggaagttggatttagtttatttcagagtgagatagtagtatacgcgtaatatacaaaaatgtttgaaatccccatgaatactgaatacctgtgctgaggctatgcttgcacagggcgtttgctaattaagaatttctaagataatataagatattgagaagtcctggaaatgttgaatttctggggcttttctttatgtactgaaatgacaaaagaattgtcagaatattcataaatagaagataatttacgttattttgaggtcgttatatacacgcggtacacaagtgatatacaggtggtatacactcgtttttactgattttgaatgcttttggaagcatttcatcctttgcttttcaagatgatttaggctgaacataagtgtgacgttaaataaaagaaatatcataagtgtatccagcaatcagtcttgatttattgttttatatcttgttcacttctgtaagaagttcttctaaagtcttatgggtgtatgttcccttggtggtgtcgtttttcatactgtgtcccataatcagtttgatacatacgtcatttgctccggcgctgtccataagtgaagcaaaggtgtgtctgccatcgtggggcaggtgtttcattttgagttttcccatgcatgtattaaaattgccgttcatgtaggttccgtaggtgtaatgatttcttcatcggaatacctatcatgtatctgctccatagagtttgtccattcataaaccagaccttctgttaaatccttgcgtattttaaaagaattgaaatagtcatcgatgattgcattcacaaaatcattggtgcatttgcaatattgcattaaatctccattttcattaggaataaacgcttctatggaggacgcagaaggcgatgctgaagaagcaaccgttgatacataatgggtaaacagagttgccagtgcgggattgtgtgggaagtattactctaagcggaggaaaaggtagtgtttgatttatttgatatttttgaaaggagttgagataaaatattggtttaatagtttaattcgttttaagaaaaaatgaggaatcttttaatcattttaagtgcataacccgttattatata

SEQ ID NO: 96 - DNA, 8057 bp, unidentified
  source 1..8057: mol_type = unassigned DNA
ttactggttctcagcagattgcggtgcagtgggctgtgcggctgcatcgtctgcggggtcgccgaactggtcgtgatagctgttcagcagggtcagctcctgatggcgctgcaagccgtggatgaccagctttttgatgacatcgtagataacggcaaacagcggcacacccacgatcatgcccacgaagccccacaggccgccaaacagcagaatggcgaacagtacccagaagctggaaaggccggtggtgttgcccagaattttaggtccgatgatgttgccgtccagctgctgcaaaaccagcacgaacagcacgaaccacagcgccttgatggggctctggatgaggatgagcagcgtggcgggaatggcaccgatgaaggggccgaagaagggaatcacgttggtcacaccaatgatcaccgataccagcagcgcactggggaacttgaaaatcaggcagccgatatagcacagcacgccgatgatggcagagtccatgatcttgccgttgatgaagccgccgaacattttgtctgcgtacttcacttcctcagtgatcagctgcgcccagcgggggcggacgatgctgtgcagcaccagcttgccttgctgcacgaaccgcttgcggctggccagcatatacaccgccacgatgatgccgatgatcaggtttttggccaccgtcaccacgttcagcacaccaatggctgcaccacttacgatattctgcatggagggcagcagggtgttcttgagccatgtgttccatgtgtccagattggtattcagggcagcgtaagccgaattgagcagctccgtgatctgttcgttcttttcaataaactccagatggtttgcccagttcatgaactttgtaatgttggcctgcgcggtgtagtacagggtagtcacgctggtgatcagctgcggcacgatcatcatgacaagcgcatacaccagcaaaagcccgaacaggatggtaagcgccacggacagcgcgttgatcagaccgttcatcttttccgggatgaaccggcgcagaaagttttcgatgctgttgcacaccggcttgagcagataggcaatgacggcaccgtagataaagggcatcaagatgccggtcagggtagagatggccgagccgaagccgtcaaagcggtaaataaggaaaaagaagatgatgctcagtgcaatggcaccaaaccctgcgagcatcccatagagatacggtttgatgtgcggctttttgtccatcatgacaaactccattcctgctgcgggcagcgggaatgcccgcagcgcttattaaattttgttgcttctgcgccagatgtgcaacttttcagcctcgcggatcagctcctcacggaagtccgggtgtgccacgctgatcagagcctcggccttttcccaagaggtcaagcccttcaggttcacgcagccatactcggtgcacagatagtgcacgttggcgcgggtgtcggtaacgatgctgccattctccagcgtgggacggatgcggctttccagctgaccggtctttttattaaagaaggtggaggacaggcagataaagctcttgccacccttggaaaggtatgcgcccagcacgaagtccagctgaccgcctgcgccggaaatgtgcttcacaccggcgctctcggcgttcacctgaccaaacaggtcgatatccacggcattgttgatggaaataaagttgtctagtgcggaaatgctacggatgtcgttggtgtagtccaccggggcagacatacactccgggttatcgttcaggtaatcgtacatcttctgggtgccggcaccaaaggcgtagacctgacggcccttgtccagctgcttgcggctgccgttgatcttgccggccttggcaatatccacaaaggcatccacatacatttcggtgtgcacgcccagatccttcagatcgctctgcgcgatcagcccgccgatggcgttgggcataccgccgatgcccagctgcaggcaggcaccgttaggaatctgcggcacgatgaggttggctaccttcaggtcaacctcggtagcggcaccggcagcggccatctggccgatggggggatttgcgccctccacaatgccgcttacctgagaaacgtgtacgcagttctccatgccgccaaggcagcgcggcatattggtgttgacctccacgatgatcttcttggccttttcgcacacagcacccagatgcgaagcgctgggaccgaagttgaagtagccatgctcgtccatgggggtcacctgaaatactgccacatccacggggtcgctgctctcgcggtagtagcggggcagctcagagtagcggatgggggagtagaaggaaaagccctgcgcaatagccttgcgctcaatgccgcccatgtgccagctgttccaggtcatgtgggcagcagggtcgttgatctggaagatctccggcacccacatcagaatgccgccccggaagttgactccttccaactccggcaggcgttttgccagctcggcgtccacggccacaggggtgttcacagcccagccgtaatccacccagtcgccgcttttgaccagagcggcagcctgcgcagcagtcataagcttctgtgcgtacagttccttgcaatccattataaaccatcctctcttaaaatacataaaagaattgtaaacaattctgtgcggacaaattacgcagctgctttacgcctgttttgcggaatgcacaccgttttgccacatctgtatggtaaccttataaacaaggaggcagtgtgtgctccgctccgcgcagaacagctcaacttagttataacattaacaaagtgtagaatcaatagttttggctaaaaaacagtcagtatagcataatgaacagttttcttggctttatgtggggattgtttggtacgcaaaaaacaaaaaagttgagaaaaagacttgataaaattttgacgatgtgctttactaatagcgtgggaagcaactgcggagcagtgcgggatgattcgtttaaaatttaacgataaaacgcaccgcagcagtttcaggttgcacccaaggctggaaagtgctatcatggcagaaccacatcgcgcttagtaattacagcgcacaaggaggacactgaccgatggcaacagcagtttatcccgggtcgttcgatccggtcaccaagggacaccttgatatcatcaagcgcgcagcaaagatcaacgaccacctcattgtggcggtgctgatcaacagcgccaagcatccgctgttcacagtggaagagcgggtggctatgctacaggaatgctgcaagaacatccccaacgtgaccgtggaaggcttcgacggcctgaccgtggagttcgcaaaaaagcgtcacgcatccgtaatggtgcgggggctgcgggcggtaacggactttgaaaacgagatccagcttgcgcagaccaaccacgcactgatgcccggcatcgagaccatgttccttgccaccagcatcaaatggagttatctttcctccaccatcgtaaaggaagcagcgtactacggcagtgacatcagcaagttcgtcacacccaatgtggaaaaggccgttaacgaaaaatacgcacagcttcgggagagggaagaaatctgataccgcaaaaatgccgcagggcgttttgataaatgggtaaccgataagtaacacacatacacaattcaggaggctattcacatgaaaaagatcgttatcgcatctgcatgccgcaccgctatcggcaagttcggtggcactctggccaacgttcccgctactgagctgggctccatcgtcatcaaggaggctctgaaccgtgcaaacgtcaagcccgagcaggtcgatcatgtttacatgggctgcgtcattcaggctggtctgggccagaacgtcgctcgtcaggctgccctgaaggctggcctgcccatcgagacccccgctgtcaccgtcaacgtggtctgcggctctggtctgaactgcgtgaacatggctgctcagatgatcgaggcaggcgatgctgatatcgttgttgcaggcggcatggagaacatggatatggctcccttcgcactgcagaaggctcgctatggctaccgcatgggcgctcccatgggcaagagcgagatcgtggataccatggtcaacgatgctctgtgggatgcctgcggcttcaacaagcacatgggcatgaccgctgagaacgtctgcaccaacgagacctatcagaagaagtacggctacagccccatcacccgcgagatgctggacgagttctcatacaacagccagctgaaggctgacaaggccatcaaggacggcgccttcaaggacgagatcgttcctgttgtcatcaagggcaagaagggcgacaccgtgttcgataccgatgagggcccccgtctgagcgctcccgaggttctggcaaagctgaagcccgccttcaccaaagacggcatcgtcaccgctggtaactcttccgccatcaacgacggcgctgctgctctggtcgtcatgagcgaggagaaggctaaggagctgggcgtgaagcctctggcaacctgggtcgccggtgctctggcaggcgttgagcccgaggtcatgggtctgggccccatcgctgctaccaagaaggtcatggccaagaccggcatgaccgttgctgatatggatctggtcgaggccaacgaggcattcgcagcacagtccatcgctgtcggcgaggctctgggctttaataaggacaagctgaacgtcaacggcggcgcaatcgctctgggtcacccggtcggcgcttccggcgctcgtattctggtcaccctgctgtacgctatgaagcaccgtggcgctcacaagggtctggctaccctgtgcatcggcggcggcatgggctgcgctaccatcgttgagatggactaagcactctttctctgaatcctgactgaaccacagacccggagcgccggagggaaccggagagctctcccgcgttccgggggctgttttgaaaaaactgaactgtatgaaatggaggttttcacaatggcatttgtaaaaaccgaggtgcagggcgctgttgagatcattaccatcgaccgtcccaaggcactgaacgccctgaaccccgaggttctggctgacctgaaggctgcttttgaggcagtcgatcaggagactgtccgctgcatcgttctgaccggcgaaggcgacaagagcttcgttgcaggcgctgacatcggctccatgagcaccatgaccaaggccgagggcgaggctttcggcaagctgggcaatgatgtgttcctgatgatcgagagcttccccatccccgtcatcgcagccgtcaacggctttgcactgggcggcggcaatgagctggctatgagctgcgacatccgcatctgctccgacaacgctgtgtttggtcagccggaagtcggtctgggcatcaccccgggcttcggcggcacccagcgtctggctcgtctggttggcatgggcatggcaaagcagctggtctactctgctctgaacatcaaggctgacgaggcttaccgcatcggtctggtcaacgccgtgtatccgcaggctgagctgatggagaatgtcctgaagctggccggcaagatcgcaaagaacgctcccattgctgtgcgcaactgcaagaaggcaatgaacgacggcatcagcctgcccatcgagaaggctgttgaggtcgaggagaagctgttcggcgattgcttcgagacccacgaccagcaggagggcatggcctgcttcctgtcccgtgagaaaccgaagcccaaggcagtgttcaccaacaactaatccattacataatttttgatattaaaggagagatttcctatgaagatcggtgttatcggcgctggcactatgggtcagggcatcgcaaaggcatttgcacaggttgagggcaacactgttgctctgtgcgacatcaagcaggagtgggccgagaatggtctggcaaagatcaagaagggctacgagaagctggtcgctaagggaaagatgactcaggagaaggccgacgcaatcgttgccgccatcaccccgggcctgaaggaagatctgtgcgcagactgcgatctggtcgttgaggctgctttcgaggatatgaaggtcaagcagaccaccttcggcgagctggataagatctgcaagcccgagtgcgtcttcgcttccaacacttcttctctgtccattaccgagatcggcaagggtctgtctcgtcccctgatcggtatgcacttcttcaaccccgcagaccgtatgaagctgatcgaggtcatcgccggctgcaacactcccgccgagaccgttgagaagatcaaggagatctccgttgccatcggcaagagccccgttcaggtcaacgaggctgccggctttgtggtcaaccgcatcctgatccccatgatcaacgaggctgccttcatcaagatggagggcgtttccgatatcgctggcatcgacaccgctatgaagctgggcgctaaccaccccatgggtcccctggagctgggcgacttcatcggtctggatatctgcctggccattatggacgtgctgtacaacgagaccggcgacagcaagtaccgtgcctgcccgctgatccgcaagatggtgcgcggcggcaatctgggctgcaagaccggtaagggcttctacgtttacaacgcagaccgcaccaagacccctgttgaccagctgtaaattctgataaacatttctcccggctgcggggaaagcggtcgggaggaatttgtttgcaccgggctattccggtaaatgaaaaaagacctgttaggaggatatagcgatggattttactctgtccaagcagcagcagatggtgcagaaaatgtaccgcgagtttgctgagaacgaagtcaagcctctggcaaagaaggttgacgcagaggaatacttccccaaggagaccgtcgaaaagatgggcaagctgggcatgatgggcatctatttcccgactgaggtcggcggtgcaggcggcgatgtgctgtcctacgtcatggccgtggaggagttgagcaaggtctgcggcaccaccggtgtcatcgtctctgctcacaccagcctgtgcgctgctcccatttacgagaacggcacccccgagcagaaggctaagtacctgccgaagctgtgcagcggcgagtggctgggcgctttcggcctgaccgagccgggcgctggtaccgatgcacagggtcagcagaccattgccaaggaagatggcgattactgggtgctgaacggctccaagatcttcatcaccaacgccggctttgctgatgtgttcatcgtcattgccgttaccgataacgtgctggataagcgcggccgtcccaccaagctctgctccgccttcatcgtggagcgcaccgacccgggcttctctgttggtaaggcagaggacaagatgggtatccgcggttcttctacctgtgagctgatctttgaggattgccgcatcccgaaggatcgtatgctgggcgtgcgcggcaagggcttccagctggctatggctacgctggacggtggccgtatcggaatcgcttctcaggctctgggcattgccgagggcgctctggaggagaccattgcttacgtcaaggagcgcaagcagttcggtcgtgccatcgccgctttccagaacacccagttcgagctggctgagatgaaggctcgtgttgaggctgctaagtatctggtttatgctgccgctctgaagaagcagcaggctatggatggcgcaaaggttcgttacagcgtcgaggctgcacaggctaagctgatcgcggcccgcaccgcaagcgatgtgacccgccgttgcctgcagctgttcggtggttacggctacacccgtgactaccccatcgagcgcatgatgcgtgatgccaagatcaccgagatctacgagggcaccagcgaagtgcagatgatggtcatttccggcgcgctgctgaagtaa

SEQ ID NO: 97 - DNA, 25616 bp, unidentified
  source 1..25616: mol_type = unassigned DNA
gtgaatattctaaaaataacatttaaaagcgtaaaaagaagatacaggcagattataagagctgcacttacaacattatttgcagtattttttgtaacagcagttcttatatttcaggaaaatatgtatcagtggcagatgcagtccaataaagacagatttggcgactggtttattatggatataggaagcaggcagccagatagtaatcttacagaccacatttatattgaacagccggtaaaggtgtcaagaagcgttaatgttcttaacgatgactggcagagtacaggcttttatgtaggaagcttttcatcagagtttcttgcacagtcacatataaagcttgatgaaggaagacagccagaaaatagtggtgagatagcaatggactggaacacccttctgacactcggttataacggtgagattggtgagagcattaatcttaaatattgtgacaataacagcataggcaacaaagagaaaagaaacacaaagacttatacacttgttggtatatacagaaattatactaatatatggaataatggaaagcagataccatcagcagttgtagtgaacagtgaattatcacaatttaattatgatatacgttcggtgttcttatatcctataaagccttcaataaaaactgatgactacaaagcagtatttgactctataaaggagaagacatcaaaaagttatacatataattcaggtgtatatgattataagccttggggttcaacaagcatatacctttatatgtatttaatagttatggcaataggaataacagcactttcttaccagcttattgagtataagaatacaagaaagtcatcttataagaaatatgcttccttaggtgcagacagttcacagcttagaagaatgtatattattgaaaatgctttgataatagttccagcagcattgataggaataattgcagcatttttggctggaggaattgcaggaggcatacttgaaggcaaggcaggattttcattttatacaattaatgtttctattgtgttaaaaagtattgcttctgttgtaatagcagttgtagttgaggagatagtaggactgttatctaatgttatggatacagttaaagagaagcatcttaaggcaggaagcaaaaagcagatagttaatattgaggttcgtaataagaatacatcaggcagaaaatccaagattaaggtatctaatgtaagccgtgtaattacaagcaggcttatgaagcgtgatggtgtaggaatgataataggtgtaagattattttcactgtttatctgtgttgtacttgtattcagtgttttgaagataactacatcatttgataaatataagaaaaataattcacttcctgatatatatggatatctggacataccatcatctaattatagaactgatatgatatatatatcttaccttaaagattttgataactatccagctaagtcgttaaatatggacgaatttacacaggttgatcttatcaataaagaatacaacagcaggaatagatataatattccgtatgatgaattacgccagttgatattagataatggtatgacagcattatttacatctataccatataattcaccagatagaattataaagtctaattgtgcaataatgaattcgcctttggctaaagatggtaataatagcattatagaaggtgtgtcatctgatgttatagatggtttaaatgaaataccgggtatagtttcaattgattattctatatttgagtcagaaagaacgtggtactgggataaccaggactatcataagatgggaattgacaagattatagctgcacagaaggcttcatctatagctaaaactatgaaagatccgacttatggaagccggtatttatttgcaacagaatatgtaaatccaacaaaggaaatatatgatatagcaagcaaatatattgataaatccaatattaattatgatgactttgcaagtggaaagcaggttatagtatttatacaggataactgtgagggtgattatgatgatacattaaaagctggtgatacattatattataattattataacgttccatttggacagtgtaataaagcagggtatattacatcaagcaatgcagtgtatccatatgatattccatttttcaataaatataataatagtggaaaaatagatttacaggtagaactgaaagatgacgataatcctaatacagcaagtacaacatatagtttcacacagactgatttagaggtagaaacgatgtttggtgcctgtgtagcacctcaggtggcagcagttattaaagttacagatgaagttaaggaagattttaatggtataatgccagattatggttattatacaacacttgcaagtacgcaacttgctaagcaggcggttgataaccagaaagattttatgctaagaattacgggagaaggactgacagacggaatagattttgaattacagtataatcagataaagatagattacgacctgtcatcaacattttctgctactaacaacaaagttgcactttatcttaagagtaataatataacttataagtcaaatgttgacagcaagaatgtatacagaacgcagcttgtcaataatatactgcaatatggaataactataatggcggtaataattatccagcttcttataatggcaataattataagaaacaggatagaaagcagacacggcaagttcattctctttagaaaaatggggatgacaagagggaaattacttggaatatgtatgcgtgaagcacttagggaatcactgtggtgcatagtaacacttccgcttatgcttatattggaagtgctgatatattcaagtaatataaggaaattatagttatataggcacaggcagcttataaatatatatttgattaggtaatattaaaaataattatatatggaattacatatatgcaattagagatatagaaatggaggataagtatggaggctatattacaggctaaagagatatccaagacatatcatacaggaagtgtagatgttcctgcattaaagcagtgttcccttgaattcgggaaaggcgaatttacagctattataggaaagagtggttcgggaaaatctacattattaagaatacttggaagtatggatacaccagatacaggcagtatattaataaaaggcgaggacataacacatatgaaggacaagaagctgtctggtttcagaagaagaaatataggctttatatatcaggattacagcctgtttccagaatttacatcatatgaaaatatagttatgccaattctacttgatggaaaaaagccagatgatgcaaaggttgatgagatattatcagaattagagataagccattgcaagaataaatatccatcagaaatgtcaggtggagaacagcagagagtggcaattgccagagcacttattacaagtccggcggttatatttgctgatgaacctacaggaaatcttgatgcgggaagtgcagaaacagttgcaaagatgttatcaaaagcaagtcagaaatacgagcagacaataataatggtaacacacgacagacagatggctgattacgcagacaggataattactatttcagatggacagatacagtaatattacatagcaataataaattgtggcagtacataagtgcttagtgttaatctattcgggggatagtagataatgctaagcactttattttaagtattagagattaatatattaagcattaacaatccattaaagcattatatattcaatcattaaagtaccatatatccagtcatcaaagtatcatatatcaatcatcaaagtaacatatatccaattaataaagttataataaagtataatatacttaaatattttcgtatcgtggaagttcaactattatggcttcgtggtggacagccgggagaaacttatccataacttcgcttgtctttaacttaaggcttgaagtattgatacaagggtgacagccaagagaagcttcttcaagtacttccttgtcaataagtaactggacgtggttgtcagtatcattcataagccccataatagatactgaaccaggtgttatatcaagatattctttcatatattcctcatcggcgaatgaaagtcgtgcagagttaatctgctggcttaaatctttagtcttaaatactttatctcccggcatcataagaagatagaattgtgttttctgtcggttgcataagaaaaggttcttgcatataagtgtgccaagaattttatcaatatcgttgcatacttccattgttgttgctggttcgtggtcggttctgtaatattccattcctaactggtcaagtaaatcatatactctgatttctttatcaagtctgtcagcttcattggctggtctgccttttattagttccatagtgttcttgtagtcctttcttatgattatagtgtatacaattgattataatatataaaatataataaaaccagccatatgatgtcatttcccataaaagaggcaggggatatcatatggctggttttataaagttaaacaatgaagaatattaatacatttgattaacagatgtatcgtaagttaatatctgattactggaaatcacatatgtcaatcatagcctcaagcatttccttttcttctggctttttcttagtaagtcttgcggcggctacgataggcatccacttatcaacgtaacgcttatcagtagaagtcttttcacagaacattgatatgtacttatcggcaagggcttcatcgctaagcttaagtgtaaggtaagtattagccgcatcggcagaagcattacctttagtagcgtgtacccagtcaacagcagtaattgcaattatctggttgttgtcatcagtctgtactataatattttctggacaataatcaccgtggcataatttagtatgataaggaagccctgaaagtcttgagtccagctcatatttcgtgtcagcaggaatattaagctcattaatctgtcgctcaagcttacttttcatatcgactaaaagagggttgctgtgcttattaatagctatctggtagtcaaccatagcctctatgtaagcatctgcattttcagggtgtttagctaacagctcttttaaagtttctcctttggcatattcgcttgtgatagtccatttgccatctactacagatacattaagaagtcgtggtatatcaagtcctgtatcttcaactcttgcagtgttaagtgcttcatataatacatcggatttgctgtaagatagtgcaaatactttctcagccttatccttatcaacgtatacagattttagagttcctttatatatacattttttcataataacctccattcctgcctattactatgtaggcattcaagttcatacgcagatgtcaattctgcgagagggcaatctttataaagattgccacatatccattcatatctttatataacgggacaagtggtattgtacatatcacaagcccgttgtgtctgtcagtgagaataatgttatctgacattgacaatatattatcataataatatatatataatttatattgattatttatattacttagtctttatatcctctggattaacctcttttccatagtaagccttaagatacatagcctttatctcactcataagaggatatcttgggttagcacctgtgcactggtcatcaaatgcattttcaaccatctcatcaagtgtagcaaggaagtctttctcatcaatgccgtagtctttgatagtcttcttaattccaaccttatccttaagctcctcgatagcctttaagaagttctcaaacttctcatcatcgttcttgccggcaataccaaggaagttagcacattcaacatatcgttccttgcagtgaggataagcatactgtgagaatgttcccatcttagctgggacttctgcggcattaaagcgcattacatctgtaataagaagtgcgttagcaatgccgtgaggtatatggtggtaagcaccaagcttgtgagccatagagtggcatacaccaaggaatgcgttggcaaatgccataccagccatagtagaagcggtagccatctgttctcttgccttggcatcgtgaggtccattctcatatgccgctggaagatattcaaatatattcttcatagccttaagtgcaagaccatcagtataatctgtagccataatagaagcatatgcttcaagagcatgtgttaatgcatctataccagaagcggctgtaagtcccttaggctgatccatacacatatcagcatcaataatagccatcttagggagcagttcgtaatcggcaagaggatactttatgccagtcttttcatcagtgataactgcaaaaggtgtaacctctgaaccagtaccagaagaagtaggaatagctataaagtaagccttttcgcccatcttagggaatgtgtagatacgttttcttatatccataaatctcatagccatatccataaagtcaacttcaggatgttcatacataacccacataatcttggcagcatccatagcagaaccaccaccgatagcgatgatacagtcaggctcaaagctgttaatagctttagttccttcgatagcacattgtaatgtagggtctggtgcaacattgaagaaggttgtgtgtgttatgccaagttcatcaagcttgtcggtaacgcacttagtgtagccattcttatataagaactggtctgtaacaataaatgctttcttcttgcctaatacagtctttacctcgttaagtgcaacaggaaggcagcctttcttaaagtataccttttcaggtgctctgaaccacagcatattttctctcctctcagcaacagtcttaatattaataaggtgctttacgcctacattttcagatacagagttaccgccccacgaaccacagccaagtgtaagagaaggtgctaacttaaagttataaaggtcaccgataccgccttgtgaagaaggtgtattaataagaatacggcaggtcttcatagcttcctcgaacttagcaagcttgtagttttcagttgcagaattaatatatatagaagaagtatgaccaaatccgccatcagctattagacgctcagctttacttatggcatcatcaaaatcctttgctttatacatagcaagaactggagataacttctcgtgtgcgaattcttctgaaaggtcaacagaagtaacttcaccaatgagaatctttgtgctttcaggtacttctatgccggaaagctttccgatattataagcactctgaccgacaatcttggcatttaacgagccattgataatgatagtctttcttactttatcaagttcagtcttattaaggaagtgacagccacgcttagtgaattcctctttaacctgcttatatatagatgagtcaacaattactgactgctcagaagcacatatcataccattatcaaatgtcttagaatggataatagagttgacggcaagtataacatcggcagtgctgtcgataatagctggagtgttaccagcacctacgccaagtgcaggctttccagatgaataagctgccttaaccataccaggaccaccagttgcaagtataatgtcggcttctttcataagagtgttggtaagttcaaggcttggaacatcaacccagccgattatgccttctggtgcaccagcggcaacagcagcctcaagtacaaccttagcagcagctatggtgctttccttagcacggggatgtgggcttatgataatgccgttacgtgtctttaatgaaataagagtcttgaatatagcagtagaagttggattagttgtaggaataacagcggcaacaacaccgataggctctgcgatcttcttaatgccataggctttatcttcctcaataacaccgcaggtctttgtatcgcggtatgcgttgtaaatgtattcagcggcatagtgatttttgattaccttgtcttcaacaattcccataccagtttctttaacagccatcttggcaagaggtattcttgctttattagcggcaagggcggcagcagtaaatatcttgtcaacctgttcctgtgaatatgttgagaagatacgctgtgcttcttttacagagcttataagctcttcaagagactggatgttgtcaactactaaagatttttctttgctcataattagttccccttttcttagataatcatacatatactttgttagtgatgtatagtgttacacgaagtaactatcttaataaaaataagattgataattaattaacaatcattatggtcacactttaacacttatatatgcagatgtcaataaattattgccgttttatagaaagtttagaagttaataatttatcagttcccaatttagatatggataatcaggtatttgaagtctgaaggctgaaaatataagttgacagtgcaaaaattgatgttacaatagttgcagatacaacaattggaggtgcattttaatgcttaaaagaatattttcttatatgaaacagtataagaaatatgcctgtctggcacttttatgtattgctgttgaggcagtgcttgaacttatggtgcctatgattatggctgatttaattgataatggtgttgctaatggcgacacagcttatatttatactaagggcttgcagatggcaggatgtgcggttctggcacttatccttggcattggaagtgcaagattttcagcacttgcaggacagggacttggcgctaatataaggcaggcagaatatgagaaattacaatcatattcatttgccaatatagaccatttcagggtttcttcgctggttactcgtctgacaagtgatgttacgaatatacagaattcggtatcaacaggtatgagaccatttggcagaagcccggttatgcttatatttgcatcgtcagtagcatttacaattaacagaacacttgcattcgtgtttttcgtggcactgcctatacttgccgtgcttctcataattattattatgaatgtccgtccactttatggacgtatgcagaatgcaatagatttagtcaacagaagcattcaggaaaatcttactgcgataagagtagttaaagcatatgtaagaggtgattacgaggttgcgaagtttgaggaagttaatgctaatcttaagaaagagtcagagaaagcattcggtatagcagttcttaatatgccagctatgcagtttgttatgtatggaacgattatatcaattctctttatcggcggacatcttattaatgcaggacagttaaagattggtgagcttacaagctttttaagttatgttcttcttatacttaattcacttatgatgatgtcaaatgtatttcttatgatgacacgttctttagcctcagcttcaagaattgtcgaagttcttgatgaaaaaatagacataacagatgaacaggcagaggatataagtgttaaaaagggttcaattgagtttgaccacgtatggtttaaatacaagaaagaggcaaaagaatatgttctttctgatgtttcatttaatatagaagcaggacagactattggaataataggacagacgggttcagccaagacaacgcttgtatcacttattccaagattatacgatgcaaccaaaggaacggtgagaatagacggaatagatgtaaaaaaatatcctatgagacatttaagggatgctattgcagttgtattgcagaagaacactttattctcaggctcactgctttctaacctctactggggtaatgagaatgcttctatggaggagataaatgaagcctgccatattgcctgtgtagatgaattcttagacagacttccacaggggtatgatactgatatgggacagggcggtgtcaatgtatcaggtggacagaagcagagaatatgtattgcgagagctatattaaaaaagccaaaggtgcttattcttgatgactcaacaagtgcggtagatacagcgacagaagctaagataagagaggggcttgctaagaagcttcctgatatgaccaagattgtaatagcacagagaatatcttcggtaaagcacgctgaccagattatcatactggacaggggaaaggtagctgcgataggcacacacgaaacacttcttgccaataacaggatttatcaggaaatatatgaatcacagaaggaaggggtggatttataatggctaaatatgttggatataaaagacctaaagataccaagaagacattgaaacagttattcgtatatcttggacattataaatggatgcttatattagtagcatttcttgtattcataagtgcaggagctaatgttacaggaacatatcttattaagcctgttgtcaatagatttattgttccgggcaatatgacaggacttttaaaggctgttatagctatgggcgtaatgtatgcgtgtggagcattatcaacacttggatataaccgcattatggtgaaaatgtcacagaaggttatacaggatataagaaatgatttatttaagcatacacagaagcttccattaaaatatttcgatgcacatacacacggcgaacttatgagccgttttactaatgatgttgatacagttcaggaagctatgaataacagttttgctatgataatacagagttttattatgctgtttggtacacttacgatgatgatggtattaagcatacgtctttctatgatagttgtcgtatttcttattataatgttcttctttatcaaatttaacagtaagcacagtaagaaatattttaacagacagcaggaagagcttggtaaaatcaatggattcgttcaggagatgatggctggacagaaggttgagaaggtatttaaccacgaggaaaaggattacgggaaattctgtgaaatgaatgaaaatttcagaaaagagtcaactaatgcactggcatttgctggaatgatgattcctacaattgtaagtctttcttatcttaactatgcgatatcagcctgtgttggcggtatatttacattaaagggacttatggatttaggtacgctttcagcatatcttgtatatgtaaggcagagtgcgatgcctcttaaccagttcacacaacaggttaatttcctgctttcagccttatcaggtgcagagcgtatatttgatatgatgaacgaagaacctgaggttgatgaaggcagggttacattatgtaatgttacgaaaaatgaagctggtgaacttatggaagcttcaggtaatacaggcatatacgcctggaaggttccagcgacgaaagataaagcaggctatcttgttgagttaaagggagatgtgcgatttaaagatgttgtgtttggatatgtaaaagaaaagactattcttaatgatgtaactttatatgcaaagccgggacagaagatagcatttgtaggctcaaccggtgcaggaaagacaacaatagttaatcttattaacagattttatgatatccagtcaggaacaataacttatgacggaatagacattaaggatataagtaaagatgatttaagaaggtcaatggcaatggttatacaggaaacacatctgtttacaggaactattgcggacaatatacgatatggaaagcttgatgcaacagatgaggaagtaagggaggcagctgtaatagctaatgcagattcatttataagaaggcttccagatggttatgatacaatgctttattccgatggaagcaatctttcacagggacagcgccagcttcttgccattgcgagggcagcagtagccaagccacctgtacttattcttgatgaggcgacaagctcagtagatacaagaacagaaagacttatcgagaatggtatggatgcaataatggaaggcagaacagtattcgttattgcacacagattgtcaactgtaagaaattccaaggcaattatggtacttgagaaaggacagattactgagcgtggaagccacgatgagctgatagagcagaaaggaagatattatcagctctatacgggacagttcgagcttgaataaatcggacattaatatagcttgaattattgtaatttgaaataaataaataaaaagaatataatcaaaatataaaaaaatagttaaagaggtgttggtattgaataatctgattgagtttttgaagcaggaaggtgtttctgcacagcttgtagaagaagtccggcattattcagaagaacatactgtagatgaagcattaaaaaaacgtattcctgtaccacattttcattattatggcaataaggtatgggaagaggctcttgcagtgcttctgtgtggcagaaatcttttgctggcaggagagaaggcaacgggaaaaaatgtgcttgcacagaatcttgcagcagtttttgaacgtccggcatgggatatttccttccatgttaatatggatgcggctgcgctgataggttctgatacatttcacgatggcagggttacattcagacccggaccggtgtattgctgtgcacaaagtggcggctttgggattctcgatgaaatcaatatggcaaggaatgaagcacttgcagtcttacattctgtacttgatttcagacgtgtaattgatgttccaggatatgacaggatagaggttgcagatgatacacgttttattgctacgatgaattataattatgcaggtacaagggaattaaatgaggcacttgcctcaagatttgtagttatacagatgccgccactggcaaaggaagatcttgagagactgttaaaggatcagttcccttcactggttactaagtataacaaacagtttgcacttttatttaatgaacttcagaaaaaatgtgaaaatggtgaacttacagagaaagctttggatctgcgtggattaattgatgctgtaagtcttataaaaaagggtattccaatcagggatgcattggatcttggaattaccaataagatatttgacagctatgaaaaagagcttatacgtgatgtcatagcttcaaggtttcccttaaagctgcataatacggaggtgtttgaataatgcgtaccatttcttatactgctaaggaaagacgggctgctaatcaggtatggaatgcggcggaacgctataattttgatccattgtttctggctgttgaaacaggggatttagattcagatttatatatgaatcttataattggactggcatataagtattatggtgaaaagacaatcagcactttatttggttattggaacggagatatcagtcaggctatgctggatgatctgacatggctttatctggaacatgtactgtatacagaggaagcattaaaacgtccgtctatgactgatctacgggtttattatggaaaggctttttttgcaggtgaatataagctgtctaggcaggagtggatgagcaaaaaccggcttgtatataatatgcagtcagccagatggagcagtgtgtcagggaaaaagaaggttctgctgacaccaaatgaacaaaagctgtatgcagaactgacaccacagataatgcctgaaacagaccggttgatagatactgtgctggcaatttatcgcaaatttaatctttttgatggcgtaaaacatgaaaaaaaagcattacgactgcattttacaggggcatttgcccggataatgacaagaataatgcctgtcagctctgtaagaaataatcatgtaatggttatgcgttcttctgaggcggacaatatgactggtggagcagcttacagtaaaaagaaagataatataacatataagaaagaaaatgatgactgctcttatattgagaattgttttggaagatctgttatatcagagcagactcttactaaaatagaaaaagaactgtgtacaggcagtcatacaggatgccatttatggtttactgatggaaaatatataacaaagaaaaatataccgaaggaatttcttcatttaagagaacagtcacagctgcaggttgaaagaaatcattcatattataataaaaatgtacggctttatgatagtcttattgcacatatggtcgaacaaatccgtaatagcgaatatataagtcagaagacagatgtaatatcagggcagagcggaaggcttgatacaaccaaagtatggcgtgcagaatatatagaagataacaggatttttcacacatatgaggatgataatcaaccgtcctttacagtggatctgcttcttgatgcatctgcttcaaggcttcagtatcaggaaatgcttgctgcgcagggagtaattatttccaaaagcctcgtggcatgtaatataccggtcagggtaacaagattttgcagtgtcagaggatatacagtttttcatatattgaagtcttttagggataagaaatgcgacaatattttcaattattatgctgccggttggaatcgtgatggccttgcttttcggggaattggcaaaatccttgatatgaacccgggggtggctgacaggcaccttgtgattattttaacagatgctgcgcctaatgacagccagcgtattctgccatcacaggacagcccgtttggacatgattatagcgacgatatttctgttaatgatgcagccgaagaggtacgtgcactgcgtgataaaggaatacatgtatcagccgtttttatgggaaatgatgcggcggccaatagcgcagaaaagatatatggaaaagaatttacaagaatacgtcgtattgatgagcttgcaaaggcggcaggaagacttatacaaaaagagattcagtcgttgacaagataattgcaaatgtgtatgtgattaggaatggagataatagggtgttggtattttatatttttaatataattgtgaaaaatgtatatatacataaaatgacaactaatataaaataaaaaaacaaaagaaatggagaatgtaatgtactgtaaaaattgcggaatgaaactggagaatgggactaagttctgcggcggatgtggaatgccagtcgataatgagatttttgaatgaaaaaatacttgattatatggagaggacaataattaagaaaagagggtcattatgaaaagtaagcagaatgtaagacattacctgtttgacgtggaaatgctaagacgaagattattaagaccgtattttatagaacttggactgacagttggacaggggcagccacgcatattatatgagttaagaaaatgtgatggaatgagccagaaagaattgtcagatgcctgccttatagaggtgactacgatgtcaagaacgcttgacagattagagagtatgggacttattaaaagacagaataatccagagtgtaggcgttcgtggattatatctttaacagaagaaggaaaggaaaaagctgacagggtatctgatatatttgatatggctgaggaagtgttccgcaaaggtataggcgaagaagagctcaacagtatgtgtgcaacgcttgaaaagatagagaataatcttaatgaagctatagaggagcaaagcacggaggggaataattaacaggtaatagtatctgataatagtattcaattatattattttcaaattatattgcaaagtagtattatttgtattacaataactaatacaaataatactacttttttatttgccttattaataagattgtgaaaaggttatatttgtttaatgtaaggttcataagatatcggttaggtcaattctatgttgtgaatattgtgtcaggaaaggagttaatacaatgattattgaattagatatgaatagcagtacacctatatatgtccagcttcgtaatcagattgtaatgggaattggacgtggtgaattaaagcttggcgagagcctgccaacggtaagacagcttgcacaggatattggagttaatacaatgacagtgaataaagcgtaccagatattaaagacagaaggatatattaaaatagaccgcaggcacggagcaatagtatcagataatattgatatggatattgtattcagggaaaagcttgaaaatgaacttgaattattattagcagaagcagctattaatggaatggataagagagattttctaagtatgtgtaatgaaatatattcaaaaatcaaagtgtcaggtgacagtgaaccaaagacaacataaatacaaaagtaaaagcattttggtgactggacggggaggataatattatgggaatagcattgtttgtgatagcattggtaagcaatatatttacaattttaattgtgagatttggatttataggcaattatgaatataagcagggaatgattcttggtgttcatataccacaggagaatattggtgatgaagaggttgcaggtcttattgaaaagacaaagcataattataaaatattccagaatgttaatgcttttttgggtatagcaatatgttttgtgaattttcttaatatgataatatttgtgcttatctggtgtgtgtggcttattggttatgctgtaggtatagaattattgatgattataccacatagaaaaatgtatgatataaaggttaagaataaatgggttatagagagccagaaaaggatatatgcagatacttccctgtcagcggtcagaggagaagttaagttgtattatcatttaataccaataggtgctgagattgttacaggtattattctgtgggtagtaagtggcagaacaaaggattttaatcaggcacttatattattacttaatacgttgctggtatcgctgatatcatttgtatttaatgtggcatttaataaaagagaaagaaatgtatacagtaaagatacggctgttaatcaggcagtcaataagatggttaaaaaatatatatttaaaggagtgttaataactaacataatcaatgctttctcgtggctatatatatttattgaatatataggacatagcagaataacagatgccaactattatgtatatataggaattcaatttatgtatacacttgctattttatggatgattattgttattggaaagaagaaagaggagatacttaacagagatgacgagccgttatatgtagatgatgatgagtattggaaaactggattctataataaccctgctgatcctaaagtattagtcaagaacagactgagtgatatgaattattccttcaatcttggtaataaagctggaaaagcaattatgtggtcacttgaggctgtcgttgctggatttattatatggtttgtggctattatgataccatatattaatgtccatatagatacagaaattaaagataattacttcacggtaaaagctgtgggatatgagttctcaatcaatattgatgatattgaggaagtacagcttatggataaaatgcctaaagacagctttacaagaactaatggcggggcaacagaagagtataatataggtaattataaaggcaatacatatggaaaatgtatgctttttatatggaatggctatggacctgtggttatgataaagggagataacaagatagtatttgttaattataaggaagatggagcggcattaaagctttatgagcagttgtctggtgcaggcacaatatgactacttggtagtcacttagaagtttctacgaaacttcatatgtgctgaaaaacgcgcagaatataatgagcatatcaaaataacattttacatttaatgataaaagatgtataatctgtgttaatgaaaacctaattaataaatatcgcgatagattagatttcactatttatatttataagggaggaatctgatatgttatttaagaaggatattaacaaaaaaatcgaacatcttgtaaagaagaatgatttctatgcagttgcagattatgtgtatggaactaaggaagagaagcttgacctggctaaagccttaggaactaacgataataacagcagtgttgatttattgttaagacttgttgatgataaagatgatgatgttgtatatgcggcttgtgaggcattaagaaatgtcggatcagaacataatactgcggatttacttgagaagcttaataatcttccaaaagaaaaagagcatttaagggaagaaatcagcaggactgtacaggaattacatcatagaaattaatatatatgatatataagacttattgaaatatatcagaaagataaaatatatgtaaactgtataaaagtgtatggtggttgtataatgaagtttatagatagctgataacgttataataaaaagaaagggtactggaattatgttttcagtacccttttttgagttttgtaattgataccctttattagttattgttggttatggacgctgtccaagcccaccctcaagtgtgagagtttcacctgtcatatacttaaagtctggagatgcaagctgtacgcatacacgtccgatttcaagctcagcatcaccgaaatgtcctgccggtggagtatgaacatttttatcaaatgcatctggataagcgttcttgaactgctcaagctgtgatgtccacgcaagagggcatataatattaacattaattccgtctttagcccattcagttgcagtaactcttgtaagacctcttataccttccttagcggcggcataggcacactgtccaaagttaccaaaaagtccagcaccagaagcaaagttaattacagaacccttactttccttaagataaggatagcagactttcatataataaaatgcggcataaagacctgaatacatagcaagattgaactgctctgtagtatgttcagcaagtggaacgccggaagcagaagcctgtgcgttattgataagcacatcaatatgtccaaatgtatcaattgtctgcttaacgacattagctacaacagcttcattatcagcagaggcattaacatctgcctgaattgtaagaaccttgatattgtaaagcttttctaattcttctttagcggcggcaagcttgctttcattacgtcctgtaatgacaatattagcaccctctttagcataagctgtagcaattccatatccgatagaaccacatcttccgtcatttaatacggcacggccagcccctgttataatggcggttttacctgttaaaaatcccataaatctaatctccctgtctgtgatatttacgataatcaggaataagttaaagcacacaatgtactttcgataaattccagtcgtggttttataataacatagtcagactaaacaaacaatataattatgcgaaaattattatcaaaaagaagaaaaatactaaaaactatttaaaataacagtaatgttaaaaaaatatcaaaattatatcataaaatactgttaattgataatttgttaacaaaaagtagttcagcataagattaaagagctggatacggcaattagctgtgctgataaagcagtttcttcacattaatatagtgtatacataaaaataatgttgaatttaataaaggtttgcaataaaataataaatagattattaggtgaaaaagaatatgcgttaagatgaaacatataaggatatatgattattaatatgtttggatgcgagaagtatgcagagtttggtaaattgacgggcaacagctttaagggaatggttcaccctgatgatataaagcgtgttgaaagtggaattgacagacagataaagacttctgataataatatggattatataaagtacagaattataagaaaagatggctctataagatggatttaagatttcggacatcttgagaatgctggtcttatggctgaaagttgatattattatgtatttatagcagatataacagatacaataacagaagcccagaagaaccacatatatatgagaaacaaatattacaacaatactaatgagaattaatatcattaatatataattgtattgacaggaaaatatataaagtaatataaatataacagtgttatataacactgttatatgacggcttaggttatatgccagccggaataaggagaggtatgaacacattagataatatacataaagctgctaagaaagaatttcttgataaagggtttcagatggcttcgcttcgtaatattgtaaagaatgcaggtgtgacgacaggtgcattttatgggtattacaagagcaaagaggagttgtttgatgcacttgttggaaagcagtatgagcatataatgaagatgtatattgatgtacagaatggctttaaaaagcttgatgccaatacccagcagacgtcaatgggtgaggttgcaaaagactgtatggacaatatgcttgattatatgtatgagaatgaagatgagttcaggcttatactcttaagttcccaaggcacaagatatgagaatatggtgcacgagatgtcagagattgaagttacggcaacgcacgattttgtagacactatgaagcgtaatggaaagcctatcaaatcggtcgacccaatgcttgaacacgtacttgcaagtggaatgttctttgcattttttgaattacttattcataaagatgatatcaaggaagccaagacttatcttaagcagttgagagcattttatacggcaggctgggcaaaggtattcgagatgtcgctggaaggttaataatattgccttccattattttaacacaatagtttgaccaaactaactctccttagtttaacctaagcataatgacaattaatagatttgatgaacaggataatataattaaatgtcagaataacatagtagaataattaattagtttactaaatggaagataatattatttaattcattagatttatggaaaagaggttaatgatgaaaaaggaaaaacaggactcagctttttcgcagcttatgaactatgctggcagttataaaatgtttacttacacagcattagttctttcagcagtcagtgcggttcttgcactgtttccctttgtgtatttatggagaattattaaagctgttataaatgctgcatcagattacggtaatgcagacggaatagtgcataatggctggatggcagttattatggcacttgtaagtatgcttatatattttgcggcacttctttgctcacacagggcggcgtttcgtgtggcaactaatataaaaacaacagcacttacacacataagaaagcttcctattggtccgcttgaaagccttggaagcggcaaagtaagaaagatgatattagagtcagcggcggcgacagaaacttatcttgcacaccagcttcctgacacagccaatgcaatggttacaccattggcaatgatagttattttatttgtatttgactggaagttaggactgcttagtcttataccagttgttatagcatttcttaatatgtttggaatgttgggaaaagctatggcagaggatatgaaaaagtatcaggattcattggaagatatgaacaatgaggctgttgaatatgtaagaggaatgccggtagtaaagacatttggacagtcggtatttacatttaagagattcagggattcaataagcagatatagcaaattctgtatttcttatacgaaaaggtgccgaaggcctatgattggatttgaaattgcaattaacagcgtatttgcgtttatgacctgtgcggcggtactggttacaagaaatggagttgtagacgaaaagtttgtagtcaatttcatcttttatgtaatatttactccaattatatctacaacatttacaaagataatgtttatgagtgaaaatgatatgcttgttaaagactcactccagagaattaacgagcttcttaatattgaaccattgaagaaatctgacattaataatgccggggttaaagattattctgtagagttaaaaaatgtaacttacagatatgcaggtgcttctaaagatgcactttctaatctttcactcactgttccgtcaggaaagatggcggcactgataggaccatcaggtggcggcaagagtacaacagccgcacttatagacagattttttgatgtcacagaaggaagtatccttataggcggtgttgatataatggatatacctaaagaagaacttaataagatgattgcgtatgtatttcaggataataagctccttaaaatgtcaataaaggataatcttaaattagcgaagagcaatgctacagatgatgagattaacaatgcacttcatcttgcacagtgtgatgatattattgcaaagcttcctgacggcgttaatacaatgcttggaactaagggcgtatatctttcaggtggtgaaagacaaaggatagcgatagcgagggcaattcttaaagattcaccaatagttattcttgatgaggcaacagcatttgcagaccctgaaaatgaagcacttgtccagaaagcatttacacagataggaaagaacaagaccgttataatgattgcccatagactatctacagtaaaggatgcagatataatctatgtattgcagaatggcagagtatctgagagtggtacacataacgagcttgttgccaaggaagaaacacaggacaactacagacatatgtggaatgaatatcagaagtctatagcgtggaaagttgtgtagttaatacagtgcacaggaatggagttcagtatggaaaagttaatgaaaagatatgcgcttaccagacagggggcgaaagattttattatatgcacaatcgtaacgacaatacagaatattatgcttatggcaccggttgctattctttattatattacaagtgatttaatatcagacagtatatcaaagagcaataatgtggcatatgtaatagcgtgcgtaattatgcttgttgttatgggtgttgtattttattttcagtataatacgtcatttttctcaacatatattgagagcgaacatagaagaattaatcttgccgagaaattaagggagcttccgctttcattttttgaaaagaaggatttatcagatctgacatcgacaatacttggcgactgtacagtgcttgagcataatttctcacacgttatgccacagttctttggctcgataatatcaacaattattatagcagtaagcttattcttctttaactgtaagcttgcagtagcagctttgtgggtacttccaatagcacttattatagtgggctgttcaggaaaggtacaaagaggcatatcaagaaaaaagagaaaagttgtgcttgcacaggaagaaggctttcaggagtatcttgaaactgtgaaggatttaaagtcgtataacgcagaggatacttatgttgaaagtcttaaagagaaaatggataatcttgaaaaggaaagcttcagggctgaattaggaacgtctgtatttgtaataagtgcttcctgcattttaagattaggaattggtacagttgcacttgttggagcttcacttcttgttaaagggcagattgatataatgatattttttatgttcatacttgtagtgtcaagaatatatgaacctatgcagggaacacttatgaatcttgcggctatcatatctcaggacgttaatgtcgagagaatgaatgagattactaattatcctgttcagagtggtgatggaagtcttgatgttaattcgtatgatttagagtttgataaagtggcgttttcttatgttaagggagaaaatgttcttacagatgtatcatttactgccaagcagggtgaagtaacagcacttataggaccatcaggtggtggtaaatcaactgtatcaaagttagcggcaagattttatgatgctgataagggtacaataaaattaggcggcagggatatttctacaataaatccggaaaatctcttgtcagcatattcaattgtatttcaggacgtaacattatttaataatacaataatggagaatatccgtattggaagaaaaggtgctacagatgaagaggttataaatgcggcgaaggaagcacagtgtgatgagttcataagaaagctgccacagggttaccagatggttataggcgagaatggctgtgctctttcaggcggtgaaagacagagaatatcaatagcaagggcattgcttaaggactctccaataattctgttagacgaggcaacagcatctcttgatgcagacaatgaaacacttattcagcaggcaatatcacgtcttataaaagacaagacggtaataataattgcacaccgtatgcgtacagtatctggagctgataagatagttgtactggaagacggtattgtaaaagaacagggcagaccggaagatttaataaagaataacggaacttatgcaaagatggtaaagcttcaggcagtggattaatatgctggggaaagtcagcaggctgggcataattggtctgtatcgtggatataggcattagatgtaattaatctgctgggtgaattctttttgtttttgacacttatatcatattaatgtagaataaaatggtttattatgataatatcttgtatacactattgttgtataatattccacggaagcttcatactggtgcgcatagggtatgaatgattatggacagaggatatgcgcagaaatgaggattattatgtcagatataaaaggaagaattcattcagtagaaagttttggttcagttgatggacctggtgtaagatatatagtatttcttcagggatgtcatatgagatgtaaatattgccataatccagagacctggaagttagaggatggcgaactccagacaccgcaggaagtatttgataaggcttacagataccataattactggaaagataatggaggcataactgtgagtggtggagaagcacttcttcagattgaatttgttacagagctttttaagatagccaagaaagaaggagttcatacaactcttgatacatcaggcaatccatttacatttgaagaaccatttataagcaagtttaatgagcttatggcagttacagatctttttatgctcgatattaagcatattgacgatgaaaagcataagaaacttacaggctggactaataagaatatattagatatggcaaaatatctttcggataataacaaggatatgtggatacgtcacgtacttgtgccaaaggttacagatgataaggaagatttacaggcactttcagatttcgttaagtcattaaagacagttaagagatttgaaattcttccatatcatacacttggtgtatttaagtggcacgatcttggtgtgaaatatgagcttgaagatattatgcctccaactaaggaagaaatacagagagctgatgatatacttcatacaggtgattacaagggatatcttgaaaaatga

SEQ ID NO: 98 - DNA, 14768 bp, unidentified
  source 1..14768: mol_type = unassigned DNA
ctacttaattgtcacaactcccaactcaacctgattattgattctggggatgaatacggggttgctcagacctgcgcagacaatcatttttgtgccgtcaaggtcaaattcgcctttgtcatatttcggaaaaagtccctgattcggagcgattactccgccgatgaacggcaattgaatctgtcctccgtgggtgtgaccgcagacgattaagtctatgtcggttttctttgcgtcctcggcaatgtattcgggctggtggtgcagaagaattgtgaaattgttctttgctttttcggcaaattcttcccacagcgttcttgacggaacatcgtcatcgggagtgtagaactcataataagggtagtcgctcattccgccgataagcacactcttgccgtttttggtgaattttatgtattcattatcgagcaatacagcgcctgttgaatttgtttcgcttttaaaatccgttccgaatttggcggcattgtcacgctcatggttgccgagacagcagtatgtgggtgcaatttttgaaagcttttcaagcacatctttcatcttcgttgtgtcgggatcgccacggttgaccatatctccgcaaactgcaataaaatcgggattttgttcctttacaagctctgcaaggtctgcgttcttttctccgtattccttgttgtgcaaatccgtgatgacaacaaatttcagctttgcgtcgttcttagcattgtttacacagtaattcgtgattgcaattgtgttgtcacagtaaacaccccatattacgagagtcacaaacagcgcaagtattattgctccgagaattatcgaaaaatttttcattcaattcaccgctcatattaagtatggtattattttaggctcgttttgtgcggttgtcaacaaatgtgtgtcgaacaagtctgattattactgttccttgtgctttgattgtcggattttaagttgatttaggaattgctttgtttgacattccttttgcactgttgtataataaatcataattgtatttatatgttactcgggaaatttacacaaagttaaacagaagaggtatgggttatgaagaagattaatttgcgtaagatgtttctggctctcgcagatgtgtttattatcgttgtcagcggtattcttgcaaattatattctctcacttgtcggttacataggtactgcttcaagcaaaggcttgttgagctatattgttattgatcttgtcatgtgtctgtttacgctttatataagcggaacatattcaaaattgtggcgatactttaacgcaaaggactatattgtgtgtggaactgccgtcttttcggggtttacgctcggctttgtaatctcgttgtttttgcagattccgcagagaaagattttttgtatagtacatttcgcaatagcccttgtcggaattcttgcattccgttttgttttcagaagggcttttcttgaccttaccgaggcaggaagggcagagggcggagagcgtacccttattgtgggcgcaggcaatgccggcagaatgattgttcgtgaaattcacaatgcgaaagagcagggtgatgttaataatccttcaaaaagcatcattccggtatgctttgtcgatgatgatttgaaaaagctgaatcagaagatcgaaggaatccccattgtcggaacctgtcccgaaattgttaaaatatgtgatgaataccgcatagacaatattattgttgcagttccgtcatgtgaggaagatgagaagaggaagattcttgattactgttccgcaacagagtgcaaaatcaagattatcccttatctcggcgagcttttgtttgatgacgggcatacacagcttatttcacaggcaaaggaaatcaagattgaggatcttctcggcagaaaacccattgagtttgaccgaaaggagattcatgaccttatcaacggaaagatttgtcttgttacaggcggcggcggttcaatcggcagtgagcttgtaagacagattgcaaagaatgatccgaaacaaatcatcattgttgatatctacgaaaacaacgcatatgatattcagcaggagcttgtgcttgaatacggcacaaagcttaaccttgtaacgcttatttcatcggttcgtgattacgacaaaatggagcttatcttcaagacatatcgccccgaactcgtattccacgctgccgctcacaagcatgttccgcttatggaaaccgttcccgaggaggctgtaaagaacaacatcttcggcacattcaatgttgcaacccttgcagaaaagtacaaggcaaagaagtttgttatgatttcaaccgacaaggctgttaatccgacaaatgttatgggcgcaacaaagcgtgcgtgcgagatgattattcagtacaaggcgcagcacagcacagataccgaatttgtaacaacaagattcggtaatgttctcggctcaaacggctcggttattccgctgtttcgccgtcagattgaaaacggtgctcccgttaccgtaacacatcccgatattatcagatattttatgactattcccgaggctgtttcgcttgttcttgaggcaggtgcaatggcaaagggcggtgagatttttgttcttgatatgggtgctcccgtcaagattacaacccttgccgagaaccttatcagaatgtacggtaaggttccgtacaaagatgttccgattattttcacgggacttcgtccgggtgaaaagctttttgaggagcttcttatggacgaagaaggtcttaagtcaacacagaacaagaaaattttcataggaaatcaaattaaaatagacgaaacagatatgctgtcaaagcttgaggttctcaaaaagaccgcagaaaacaatgacagtgaaaagacagttgaacttttggcagaacttgtacctactttttgccacaaggtcaatgattaaccgaaaaggagaaattttatgtgcggtattgtaggttatgtaggacctaaggattgcagtgaggtgcttgttaatgctctcacaaagcttgaatacagaggctatgactcggcaggtattgcggtttttgataacggagaaataaagaccgtaaagaccaagggtaagcttcaggacttaaaggataagcttgcagaggtcggcactccgaaaggtcatgtcggcataggtcacacccgttgggcaacccacggcgagccttcggatgtaaactcacatccacacagcggtgcaagggttacaatcgttcacaacggtattattgaaaactatatggagcttaaagacttcctcatctcaaagggaagaacttttttaagcgacacagatacagaggttgttgctcagctcctcgactataaatacaacggaaatcctcttgaaacaattgacagcgtaatggctgagcttaagggttcgttcgcactcggaattatgttcaaggatttccccgacagagtttttgcggttcgccgtgaaagtcctcttatcgtaggcgttgcagaaggcgagtgctttattgcgtccgatgttcccgcaattcttcagtacacaagggattattatcttcttgcccatgatgaaatcgtaacactttcacctgacggtgtttcgttcgttgacgaacaccttgatccgattgaaaaggaacttcagacagccgactgggatatggaggctgccgaaaagggcggttatccgcactttatgattaaggaaatcaacgaacagcccgaggctatcagaacaacgattatgccgagaatcaaagagggacttccgttccttgaggaatgcggcatcacaacggaaacaatcaagaatttcaaaaatatcacaatcgttgcctgcggtactgccatgcacgcaggtatggtcggcaagtatgttattgaggatctcgcaagagttcccgtaaatgttgacattgcgtccgagttccgttacagaaatccgattgtaggcgagggcgaccttgtaatcatcatttcacagtcgggcgaaacagccgacagccttgccgcaatgcgtcttgcaaagcagaagggtgcaaaaactcttgcaatcgtaaacgcaaagggcagttcaattgcccgtgaggcggatatgctcatctacacactcgcaggtcccgaaatttccgttccgtcaacaaaggcatacatcacacagctttccgttatgtatctctttgcctttgagcttgctcttgcaaaggaaacaatcagcacagccgagtgcaagcgacttgtttcggctcttacaaaaatgcctgaggcagttcagtatgtaattgacaactgcgaggatacctgcaagttcgttgccacaaagcttgttgcaaccgacagcttgctttacataggcagaggtcttgactatgccctttcaatggagggttcgctcaagctcaaagaggtttcgtacattcactcagaaagctatgccgcaggcgagttaaagcacggcacaatttcgcttattgacgaggatgttcccgttatcgccgttgcaactcagacaggtattatccccaagacaatcagcaatgttgttgaggttaagtcaagaggtgcaaaggttattcttgtttgtacagacgcctgtgcaagagaactcaaggacggtgttgcggattatgttatcgaaattccgcatacagacgagcttcttatgccgattacagcggttgttccgctccagattcttgcttattacacatcaatcaacagaggtattgatcccgataagccaaagaaccttgctaagtcggttactgtagaataaacggcggtcttgtatttaattgaaaatggaaaattgaaaatgtaaaattatggtcgggaaggcaatttgcaagatgcaaatcattgtcacccgaccattttttatttatatgaaagtatatgcttaattgtgggagcgtccaatgaacgctcctacataacttactcttgttttcaaatttaaacggtaaaaaccttgtatttttttgacagattatgtataattaattagatatacattctaaaaagcagtattgatgaatctaatttagtttcgggggaatatacggacatgatgaaaactgtttttaaaagagctgtaacgcttgcaatttgtgccgtaacggtattttgcggtatttttgcctgttcaggcgcaacaaaagattacgagattccgcagattgacgatatgacgctttcaatgcctgacggtatgagcgctgttacaagggacagtaaaagcacagataaatatttttccgttttcggtcttgattatgacacaacaatgaaaacctttcagaacggaaatatctatcttcagggtatggataatatgtcatcggttattctgaccgtgacaatgacaaaaaatgagagcagcgagaatgtcggcaactatgctcagctttcttcaagcgagctttcaaatatacgcaacaattttcttaattccgacgagtatctgagctgtactcccgaccaaaaagaaaaagctgtgtggcttgtgtttgacgcaactgctcagagcagtaagggcgatgtgaaaacctttattgccaacacggtttatgacggtatgaacattaatatcacaatgcagagaacagagggtgatgttacaaccgttgactacgatactttttccaaaattgtatcttcggtaaaattcagcgacctgccgttttcaaagggatttattccgtacataatcatcggcggcggtgttgttatccttattttgattgtactcatcataatttttgccgtgagaatcagaaagcataaaaaggctaagaagaataacgctattcttgaggagcttgcagtcaagtataaactcggtgaaaagggtacggactacgacattgacaattttgacgattctcccgaaaagcccgataaacgctcaaagaaaaagcagaaatatgcggaagaggttgaagaagaaccggctttgccgggcagaagatatgctcccgagccgataatcgaaaatatggaagaaccggaagaaattacaagtgagtattcaaactttggttatgacacggatgatgccaaggaaaaagaaattgacgagataatcaactccgcaaaggcttacaagagtgagcttgagcgtgaggcatataaaaacaactacggttacgaggaaaacagcacggaggacgaaaaaaaaaaggagcctaccgcagcagatacctcagagactgaacccgaaaaaattgacgaaaacgaaaaagataacgcagaaacacctgaaaaacacgaggacataagctcttcgtcaggtcctacactcgttattcccgaacccgaacacgatctttttgaaacaagcgagcctgacgatatcgaccgtgaggacgatgccgatgttgaagaaaccgaggaggtttccgaacaaaagcatccgcttgaaaaaaaggttgacaagtacgcaaacatcattttcggcagtgacgatcccgaggagaaaaccggggaagaggttgatgatgaggagcttgtaagggcaaaggctaagaaaaacaagtttgacagcggttatgacttttttgacgaagctcccaaaaagtcaatgggggttatcaaaagctcagacctcagagatgccgaggacgttgatgttatcggcgaggttgaaagaaaagcagaaaccgtaaagcagaacgctcttgaaaaagagaataataaagaaaccgagggcgaaccgaatgataaacggtcaacggaagaggttcttgccaatgtaggcaaaaacatcggtaacgctctcaggggctttgcaggcggagttaagaattttggcattcactgcggatatttctgcaagaatgtttcaataatgataaagcataagcgtgcaattgccaaacgcaaaaaggcagaggaagagagaagagagagagaaagacaaaaggcagagcgtgcaagaatgcgtgccgaaagaggcgaaagtgacggacttgttcaggttcacagcagaaccgaccgccgcccccagcagaatcgccgccctgcaaacagaaacaagagaagataatttcttttcttaacggaggaaaaacatggaaatgctaattaaaaacgcagtggttgtttcccctgccgacaagcttaacgaaaaaacagatattctcataaaggacggtgtgattgccaaaatcggcagcggcattacatcagacggagagattattgacgcagacggtctttgtgccgttccgggatttgttgatatgcatgtgcatcttcgtgatcccggtcagactcacaaagaggatattatcacgggatgcaaggcggctgccgcaggcggtgttacaagcctgcttgcaatgcctaacaccaacccgacaaccgacagccccgaaattgtaaagtatattcttgacaaagctaaagacgccgacagccgtgtttatgttgcggcaagcgttaccaaggggcttaaaagcgaagaatccacagacattgacgctgtgaaaagtgcaggtgcaatagcacttaccgatgacggcagacctgttgaaaacacaaagtatctgagtgacgcaatgaaaaaagctccaaagctcggcatgacaattgtcgcacattgcgaggacttgtttcttgccgacggcggtaaaattaacgagggcgaggtttcggaaaagctcggtgtcaagggaatccctgccggtgccgaggactgcggaactgcaagagaaattgcacttgccgccgctcttaacgagcctattcatatctgccatgtcagcaccaaaacaagcgttgcacttatccgtgatgccaaaaggagaggtgttaaggtgaccgccgaaaccgctccgcattatgtttcgctcacggacagggagcttttaagaggtgacgctgattacagaatgaatccgcctctcagaactcaggctgatgttgacgagattatcaatgggctttgtgacggtacgcttgatgccatagcaaccgaccacgccccgcacacacccgaggaaaaggctgattttgtaaaagcccccaacggttcaatcggcatggaaacctcgtttgcggtctgcaacacatacctggttaagacaggcagaatgacgctttcacagcttgttgagaagatgagtgttaatcctgcaaggattttgaaaatcaacgcaggcacactttcagtcggtgcaaatgccgatgttgttcttataaatcccgatgaagaatggacagttgatgccggtaaacttcacggcaaaagcaaaaacaccccgtttaaaggcagaaccctcacaggtaaagtcaaaaagacaattctcggcggtaaggtagtttttgaagattgagtttgttttaattgtagatgttgatacgattaaaattgtgcaaacggtagctgtactacgctcgggcataaatgttttttatttgtcaaactgtctgcacgaattggggacggcggctcgccgtgttcgctcaccaaataaatttaatttaatataaactttaacataaaggagtaaaattatggcacagaaaggcgacctcctgtcggtaagacaggatatcagagtagtagacgcaacaatccgtgacggcggtctttgtaacgatttcagatttgacgacaaatttatcaaggctctttacaatgcaaatgttaaagccggtgttgattatatggaattcggctacaaggcatcaaaggaaatctttaacgaagaagatttcggtaagtggaaattctgtaacgatgcagatatcagaaaaattgtaggcgacaacaagacttctcttaaaatcgctgttatggctgatgtcggcagaacagattttaagaaggatattatcgcaaagaaggacagcccgattgacctcatcagagttgcaacatacatcaacgcaattcctgcggctgttgaaatgattgaggacgctgcaaagaagggctacgaaacaacaatcaatattatggctgtttcaaaggcaagaaccgaggatattacagcggctcttgaaactctcggcaaaactcccgtaaacgctttctacattgttgacagctacggcgcactctatcccgaggagtcaagacgacttgcagacctttactgctcaattgccgacaagtacggcaagtcggttggtattcacgctcacaacaaccagcagcttgcttttgccaacacaattgaggctatgactcagggcgtcagctaccttgacgcaaccgttgacggcatgggcagaggcgcaggcaactgtgcgcttgaacttctcctcggttttctcaagaacccgaagtatcaggttgctcctattctcaaaatcattgaggagtacacccacaagtttaaggctgagggcgttaagtggggttacgatattccgtaccttctcacaggtcagtacaacacacatccccgtcctgcaattcagttcgtaaaagaggacagacaggattattacaagttctcaaatgaactttatgatattatcaacagctaattaaatttgtagcggcgttcattgaacgccaatcgaaccgattgccaaatcggttcgaccatacaaacgatttgaattaaagtaattaaccacgatataacaatacatttgttgtttattcgttttggtttcacaaccaaaacgattggcggtcattgaccgccgctacggttaagcaatgacattgtttaaatcaaaatatgaacgaacaaattgtttttacattacaaaaaatgaggagaatcactatggcatttgacagacttatcgaaaatattgtaaaaatgcagaatcctacggttgcaggtcttgaccctaagcttgactatgttcccgaatcaatcaaaacaaaatgctttgaaaagtatggcaagacgcttgagggtgcggctgctgcactttttgaattcaacaaggcgcttattgacgcactttatgatattgttcctgccgtaaagccacaggctgcatattatgaaatgtacggctggcagggtgttaaggctctttgtgacacaatcgcttatgcaaagtcaaagggtatgtttgttatcacagacggcaagcgtaacgatatcggaacaactatggaggcatatgctacggcacacctcggtcatacagatgttgcaggcgaaagtattgacgcattcggtgcagacgcactcacggtaaacggctacctcggaacagacggtatcaagccgcttgcaaaaatttgcgattcggacgacaagggcatttttgttcttgtaaaaacttcaaacccaagctcgggcgaacttcaggatatgaagcttgaaacaaatgagagcgtttatgagcatatgggtaagatgtgcgaaggctggggcgaagaccttatgggtaagcatggctattcggcagtaggtgcagttgtgggtgcaacatatcccgaacagctcggtgaaatgagaacaaaacttccgcacacattcttccttgttcccggttacggtgctcagggcggcggtgccgatgatgttaaaaacgcatttgacgaaaacggtcttggtgcaatcatcaactcaagccgcggcattatgtgtgcatggaaaaagcagggacttacagaagatgactttgccgttgccgctcgtaaagaggctgagcgtatgagagatgaaatcgttggttgcatcggcaaaattaagcttggctgattcatttgcacaacagaatcacgaaatttttcgttttttatgctttagtgctatgaatttattgactttagcgtgctaaaagcgtataatttaaatgtatttatttttacaactatatttttaaattttctttaaaaagggagatatcagaaatggcaagagtatataatttttcggcaggtccttcaatgctgcctgagtctgtgcttaaaaaagcagcggcagaaatgctcgactacgaaggcagtggtcagagcgttatggaaatgtcacaccgctcaaaaatttacggtacaatcatcgagggtgccgaggctcttttgagagaggttatgaacattcctgacaactacaaggttcttttccttcagggcggtgcgtcaacacagtttgcggctatccctatgaaccttatgacaaagagcggtaaggctgattatgttattacaggtcagtgggctaaaaaggctcatgcagaggctgcccgttacggtcaggctaatgttgttgcttcatcggctgacaagaccttcacatacattccaaagcttgatccttcaacattcacaaaggacgccgactatttctacatttgcatgaacaacacaatttacggtactgtttatcacgagcttcccgacacaggtgatgttccgctcgttgcagatatttcttcctgtattctttcaagaccgattgatgtttcaaaattcggcgttctctatgcaggcgcacagaagaacatggctccggcaggtcttacggttgttatcgttcgtgaggatcttatcggtcacgctatggatatcactcctacaatgcttaactggaaaactcacgctgacaacggttcaatgttcaacacaccgccttgctacacaatctacattgcaaagcttgttcttgagtggattaagaacgaggttggcggtcttgataagatgtatgaaatcaacaagaagaaggctgaccttctctacggtttcctcgattcttcagagcttttcaagggtactgttgttcccgaggatcgttcgcttatgaatgttccgttcgttacaggtgacgctgaccttgacgctaaattcgttaaagaggctactgaaaacggtcttgttaatatcaagggtcatcgcacagtcggcggtatgagagcttcaatctacaacgctatgccttatgagggcgttgaaaaactcgttgagtttatgaagaagttcgaggctgaaaacaagtaattattgaatattatgatataacgggcgaacgctgttcgcctgttattgtaaattcttaaaataaaaaattaaaaaggattgattttgatgtataacattcttacattaaacaaaatcgccgctatcggcacaagccgtctcggtgataattataaatacggtgacgatgttcagaaccctgacgcagttcttgtaagaagtgccgcaatgcacgatatggaatttgccgacaaccttcttgcaattgcaagagcaggcgcaggcacaaacaacattccgaaggataagtgcagtgagcagggcattgttgttttcaatacaccgggtgctaacgcaaacgctgttaaggagcttgttatcgcaggacttcttatttcaaatcgtaaggttattgagggttatgaatgggcaaagactctcaagggtaacggtgcagctgtcggtaagatggttgaaaagggcaagagtcagttcgtcggtcccgaaatcaagggtaagactctcggtgttatcggtcttggagcaatcggtattcttgttgcaaatgccgctgttgctctcggtatgaatgtaatcggctttgacccgtttatgtctgttggcaacgctctcaagcttgctcctacagttaagctcatgaagagcgcagaagatgttatggtaaattgcgactacctcacaatccatgttccgcttactgacgacacaagagatatggttgatgccgatatgattgccaagatgaaagacggtgttcgtattctcaatttcagccgtgacggtcttgttaattcaacagcagttcttgaggctgttaagagcggcaaggttgctaagtatgttacagacttcggaacagacgatatcctcggtgaagagaatattatctgcctcccacacctcggtgcatcaactcccgaaagtgaagaaaattgtgctgttatggcttgtgatcaggttaaggagtatctcgagaacggtaacatcatcaactccgtaaactatcctgcaatttcacttgcaagaacaaatgctgacgatacccgtttctgcgttgctcacaagaatgttcccgagcttctcaagaaggttctcacacagatcagcggcaatgttgaaaatatgctttcaaagagccgtggcgactatgcttacacaattattgatgttgcaggcgccggtgcagatgaccttgcaaaaatcgcagcagttgacggcgtaatcagagttcgtgcaatctgattttaattaaaatttaatcgttgaaaatttaatctatgaaaaaagtccgaacacgcaaaatgttcggactttttgtttgtgtgaatctaaatatgtagcggcgttcagtgaacgccaatcgaaacgattgcaaaatcggttcgaccgtatttcaaaatattggtgtatggttgatttggctttgcagccaaatcaaatggcgatcactgatcgccgctacgtatcgctatatattaaacttttaccaaatgatatttctttgcattggtaattataaatgttacggaaattgcaacggcacacaattctgcaacgggcaatgccgaccatacaccgtttatgcctataaacatcggcaaaatcagcattgcggcacactcgaaaacaagcgttcttgcaactgaaattacggctgaaatcttgccgttgttgagtgcggtgaaaagtcccgatgcgaaaatattcattccgcacaacagataatttattgcaaaaattctgaatccgctgagtgcaatctgctgaattttttcgtcgcctgccgagaaaattccgacaagcggttctgcaaaaaattcagatgccgtaatcattgcaaccgaaattatcagcgtgatttttatgcataatttgaacagcttttgcagtttttcgtggttttgtgcgccgtagttaaagctgatgacgggtgaaactcccgaagtgaatccaaacgaaaccgcagtgaaaataaagtgaatgtacaaaatagcacttatagccgcaacgccttttgcgcctgcaaagtgcatcatctgaatgttgaacagcgctgttgtcacggctgttgaaagatttgtcacagcctctgacgagccgtttgccattgcaaagaggatttcactgaccttgaattcaggcttgccaaagtgcagagtctgctttttgttgaaaaagagcaaaagcggaattgcacccacagccattccgataatggtgccgagtcctgcaccgattattccaaaatcccacactgccataaaaagaatgtcaagcacaatgtttgtgcaacccgacagtatcgagaaaacaagcatgatatgtggcttgtccgctgttacaaggtacgattggttgagcatttgccagcacattacaaagccgtacggaatcataacgctgccgtagtcaatgcagtaggggagaattttttcgtttgagccgaacatcatatacataggttcggcaaaaattgtgaacagcacagcaatgataacagaaatgaccgttgccgtgattgcaacaccggacataagtcggtttgcttcctcctgtttgccttctcccattttctttgcgattatagcatttgagcctgttgaaaacattaagcccacagccataaatacgagtgtgaacggatatacaatattgattgcggacaatgcgtcacttccgacacagttcgcaacaacgattccgtcaacaaccgtgtaaagtgacataaaaaccatcataagaacggttggcagagtgaacttcagaatcgtttttgctttgataggttttgcataaattgatgttgccat

SEQ ID NO: 99 - DNA, 18615 bp, unidentified
  source 1..18615: mol_type = unassigned DNA
agtcatccttctcccaaaattcatgctcattcaatttattaaataaccatttatcgcattgatttcgatatttttttatatttatcccaatactatcaggtacacttactatatccgcattatagcagatattcgtgtaataatcaatgaaatttccttgaattttcgcactaatcaagacgattattttcgccaacctctcacaatacaacgcaaacaccgcaatttcagcattttacattgctcgtcatcagcttgtaaagctcggtattgcgtgggaatttattgacaaacggaacaagagagctgctaaccttgagaacccccctgtcctgcacggacattcgtgatataactgagctgaaagtcggagatattaaggagcttgcaaactcaatacggcggatacttgattgataaccgtcaaatccgtagccgtattgaaggttacgccctttctttcattgtagcacactttcccgaaattaaaaaagtgtgcaagctatttttctaacttacacactttattttagaagctcttatcagatcaccatgggagctaccgctcacagtatatcacaatttcatccagctttacagacgctttcttgccttcattactgcacaatatatcaagccgccaatcattccgcctactgtattatagaagatgtctgatagctggaacgttcccaagcgaagcaataactgcaatatctcaatgcttatcgagaagatgaacgttatcttcccactttgccacagtattttcttccagccgtttcctatcttctttccgaatgaccacagcactgctgctgaaaacggcaccatcataatcacattctcaatgcactctgtcgtcagctgcttttctccgttcactgtcttccagatgccccatccgcccataacatcagataaaggattcatccaaaggctccggtttaacagggttcggaacagaataaatgaggtcacaaaaaataagaaaaacaacttccgaaaaaacacactctctttaaatttctgataccacgttactatggcactcttccaccctttgccggcttcggtagggtgataagcatataagtagaaaaacatagcgaagaacgagagaagcagtgagaatccaaaaggttcataaagagcagtcaggatgtttgtgatgatctttccgagtaaatcaatcgtttctttcatcatcgtttacaaatcactaaacaagtcagccttgtatacaccgttctccagcatcttccggaagctctcctttacggaagctacatcttcgtggtaggtcatgccataccaggtatcgttggttttcaatactttgacagacatctttccctgctccagcagttcgccgatgaagataggaatcagatactcggctttcttaggattgctcggtacttctttctcaaaaaactccttgaaaccattttccagcacatccagaaaatcaggagtcaagccccacatattcatggataccagagaattcacatcaacaaccacaccgtctgcctctgctccgtccactgtcttgacgatgttcttggtttccactacctcagtcaagtttccattctcatccatcttgcagatgccgcgagtcacaccgccgttatcggacagagtgttcttcagaacgaaaccagccatacaagattttccaccgtttaccagataatcatggactgccttgaagccttccttgccatagtaatcatctgcattgatgacgatgaacggagtttcaattacgtccttcgctgcaagcacggcctgtccggttccccacggctttgtacggccttccggaagttctcccggaatatcgttgatatcctggaaagcgtagtccacagttacattatgagaagagcaaatagcggcaatgcgattaccgatggcatctttgaactccttctcaatatccttacggataataaataccacatgattgaaaccagcctcaatcgcatcgtgaattgagtagtccatgataatatggtttgcatcatcgaccggctccaactgttttattcctgttccaaatcggctgccgattccggctgccatgataagtaatgttgttttcattttctctcctatgttcgtgctgcttttatcggacataccttaatgcattgacagcaccgcacacacttgctttcatcaatctgcggatactcaaagccttcttcatcctcgaccatagaaatagctttttcgggcagatggcataacatgccgtgcaaccacagcattcttccttccttttatatagtaccggtatttctctttccatatccaatcactccaccgtcacactctttgcaaggtttctcggcttatccacatcgaggccctttgccacagatacatagtatcccagcaactgcagcggaatcacggccagactgccaatgaaatgctcgtctaccttcgggacatagactgtgaagttcacctgatcttcaatctcgtacttgccataagtagtcagtcccatcagataagccccacggctcttgcactccaacatattgcttacagtcttctcatacagttcactctgagttagcacaccgatgaccagtgttccctgctcaatcagactgatggtgccgtgcttcagctcacctgctgcgtatgcctcggagtggatatagctgatttctttcagcttcaagctgccttccaggctgactgcatggtcgataccacgaccaacaaagaacacatcatgagcgttggcgtactttgccgcgaaccactggatacgctctttgtcttccagaatcttctgtatcttctccgggatagtctgcagttcagaaatataatagctgtactgctcatccgtgattttgcttctgaccttcgcaaactgcactgccaggcagtacatagcggcaagctgtgcactgtatgcctttgtcgtagcaacagagatttccggtccagcaagtgtgtagaacactttatcagcttcacgcgcgatgctgctgcccaccacattaacgattgccattgtggtgatgcccttttcttttgcaagacgcaatgctgccagtgtatccgctgtttcaccagactggctaacaacgatcaccagtgctttctgattgagcggcatcttacggtagcggaactcagatgcaagttccacacgcaccgggatgtctgccatatcttccagcacatactgagcagccatgcccacatgccatgcagaaccacaagcaacaatataaatctgctcgaaattcttaatctcatcttcggtaatctccacgctggacagattgataactccgttcttgattacggaattaagagtatcctggacagctttcggctgctcatggatctctttcatcatgaaatgctcaaagccgcccttttcagccgcttctgcatcccacttgatctcggtggtctgcttttcgatttcatcaccattcagatcatagaaatgagcctcacccggaacaagttttgcaaactcaaggtttccaatataatacacattgcgagtgtatttcaggattgccggaacatccgaagccacataagtttcaccatccgcaataccgatgatcatcgggctgtccttacgcgctacccagatctcgcccggatagtcacggaacatcagctccaaagcataggaaccacggacacgaaccattgtcttcgcaatggcatcgatggggccaaggttatactttttataatagtaatcaaccagtttaacaactacttccgtatcggtctggctgtagaaagtgtaaccgtgcttcagcagcttttccttcagttcggtatagttctcaataataccgttatgtacaccaacgacctcggattcgaccgggccggaaccagatctggtgcaattaccagatacatgcggatgtgcatttgtctggctcggctcaccgtgggtagcccagcgggtatgtccgataccacatgttcctttcaatgccttaccgccatctgtcttttcgatcagattggacagacgcccctttgctttcacgacttgtgccagattctctccatcacggacagccagtccggccgaatcatatcctctatattccagtttcgacagaccatccagcaggatcggtgctgcctgtcggtttcctgtaaaaccaacgattccacacataggtttatccctcccgatatttacttctctcgtctattacactttccctcttatgcaaaacgactccgggtaattgccagagtcgtcattgactttacgctgccttatatcccttttcgcaaatcacattaaccacttcgtcaacatacttctgacaagtatcatgatctggtgcttccaccatgacacgcaccacaagctcagtgccggactcatgcaccagaatacgaccagtgcttcagcaaccttagacacagcttcctgaacaacaggatcattctgtgcagccttcttatcggtcacacggacattttccaacacctgcggataaatatcttcagcggttctgcccccctataaatttcatattatataacacggtctttacgatatttttcaagtacttcttagggaaacatctttttactgctttcttaaatccatacccctttttcaattccttaaaaaacacttcccgttgcttaggcttctgagagggctgatataattgatgattgctttctatagcttttttcaaatcaacatctacaagagttaaatctgcttgatctataagttcttttcccttttcattttggcaaagcactaaagaaatacccttatcttgggtgcttttttcaagttcactgccccatgaatcccccagggtaatatcaccgggcctttcaatcttggcatattgacattgataacaattctccgtgtatgttgtcgagttcaaaaatgtcatcaaataattatcagttgttatcggaactgcaaaacgctttccattctgttccaatttataattatttttctcccgaaatctaatgctttgaacttctgttaatcgaatcccataatcaaacaaaaagctgtccaaaatttgtggtgaaggtgttccatgacaaattaaatcagcggtatacaaattttgatgattctttgtataatgcctgaccgctgaaacttgacatggcaacccaataaaaagcacctttcttcccaatttgagtttttctaaaattttcttatatactccctcaggattacttttcacatattttgaacctgtaaatttatatacttcatcttctgtctcagcaaaatcaaactcaaactttccaaaactaaatgtgcagctacaaacaatccctccattttttatgaaagctcgtcctactgctgttgcaactcctccagatgaagagcgcatacgaacgcaatcatcttgcgcccatccctgtttccaataaatcggtttagttagtacttgttcggcgttgttttggcatgcactatggcatgcattacattgaatacatttctcagaatcaattactgcattatattccatccatgaatcaattacttttatagcttttttagggcaaacatcaatacactccatacaccctgtgcacttacctttatcacatactgtagtcatatcatcgtcttccttttaattttagtatttttctcactatggggagccagatatctgaaaacaaatatatagtaacggctagaatgacacattgtagtaaaaagccaagcctattatcaatgaacatcaagcccgcagacaacactaaagccgtacttcccactataaattctttattatttatattatattgaatatattttcttgtatgaaaaaatcgaaagacaaatacaagtatataactaatacatgtagcaattgcagcaccataaacgcctacttgtggaattaatataaaattcattgcaatattaaatattgctccaaaagtaccagaaaaaagatagccaaaactatctttgtgaaccgtatagcttgtagccataaaactagccattgtcaaatatacgcatccgactgtcaaaaacggtgtatattgccatgcagaataatactctttttccacatacacacttaaaaacggtttcataaatgttaacaaacctattccaatcaacataacaattccaattagaactctaaatattttattattatattcgctttcatcttctgttccttcttcacgaattgcagaataactccacgcttgattgaatattgttgtcaatgtagaaactagcgtagggaacttatatgaaacggcgtaaattccattggctgccacacttatcatgctagacaccataatgcgatccgaggaattcataatccaccacataaatgaattcggaattaataccacggaatatttcgccatcttgatcagtagatctctatcaatccttgaaaatgagaatgatttatatccttttcctacaataattgcatatatggcagtgagtgtatttgctataatgtaagcttttaaatacccatcaacaccttctttaaagaccaagaggaacagaatatttaacaccgcaataaaaaaagtatgtagaacatttcctatcgagtaataaatcaacagttctttcccgcgcaaatcggacaaataaagctgacttgctgccaaagaaacgacatagaaataaacaaacacggcatattcagaaatcttgtcaaaagaacgacatatcggaaaaatcaataacccaaccatcattccgattaacagtattctcgtccctatttgggtaatttttctagtattagcatccttatccaatgcgaacctcataacagactcacagatatttaaagtaagaagtggaaccgcaactgttccaactgtcgcaaccaaatcaacgacgccatattcagcagttgtaagtgcatttgtatataacggaatcaaaaaaaatgaaataaattttgatccaagatttcccaaagtaaatataatagtgttttttatcaaataactgtttctgctatttctcattctctaccgcttgctccttgattatttttatagtcatctttcattcaaaaatgaaatccaatcaaattcatcaagccaacgttttccagtaaatctactttgataatcacaaagattttttacattttgtatatctacttcgcttttcggaatataatacgccgaacgatactgtggatattcttttaccgtaaaaatgactttatgtttaaatttcaaactatcgaatgaacaaatatcctgttccgtacatccatctttttgcaccataataatataaagattgtccatattcagccgtttcaaacgttcgatccatttctgttttgccagttcaaacgtttcataatgtgtaaaatagacatggatatcttctaactttccaaccggataaccgtatttttcactgtttttctcatccatttctattttgcaatcatataaataatgctccaattgactcaaaaatttgatgaattcctttggagtaaaccaaagatttacagttggtgagttgaatcgtaatcccaattcatgactcaccaccccccctacacagttcattgaaataatcgagcaatccttgttttttatttttctttgatactctttatccatatgcatacgaagaattcttctataaatcttatttattttttccatcttcgtcacctatttataagttttctttcaaatacttcaatgatttttctctttccaaacccagtatctcaccgatttttttcttatccagctcttttttcagcactgtatccaattgagagatatcggtaataacatgactctgtatttgaaggcgttgcgttaaatcctctaatttattctggttactctctcgaatcaataccgccattctctttccaaattttgcaccaaacagtgttccgtgaaatgtgtccgttacaatacattctgcattctgaaaagctttcaacaactcaaacggagttagtgtttcatacgacggtatccatttctgccttccaaacggagccactatcttcaaattgtacttcttgcagtattcagaaattgccttaatttcctctgggtcactaaatctctcggcataagaataaacgatgcaatattttttaggaagtttagaattcactgagacattcctgatttcatcatcaaagtttcctacagccaccggatctaaattatatacaggctttttttcggaaatttcctctacaaagtctgcagtgtttttatcccgcacggatacaactgacaaattcgacatcgcacttttaatagcttctctcaattcgtccgacaaattatccacttttgtcgatccgcaacttgctgcatatgtgattaccctttcagcagcttcaactttcccaaatagctgcgaagaaaaaccccatttggatttttgtaagcagttgaaaacctcatcacttcctattacgcatgtatcaaaatgctcgtcgccgttcacactattcagacctgtgctatttctaaattcataaaaaactctccgcaaatttcttccaagtattttgcccttaacgcgattccattgtgtttttaaccagctatcattttttttgtcaatatcctttttttcacattgtatacttagagcatcatccgttcctttttctatcgcaagaaacttcaccccattacctagactttctatcatttttttcaatgaatacgcttgtaagacggatccgtaattgttaacctgttgcattgataaaatatataccttcatatttaatttctccttcaatcactcgaccgtattgaaccatcggcatcgcaattccatcgaattagacataaacctaagaaaaaaaaccagttcaaggccacttcaaaaattgatgcaataatcattccatacacaataattgaaatataaaaagacttatctgtcttgagagtatttttaaagctccagaagacagtaacaattaatgaaactacactcaaaaatcccatattcaccatgatttcaagtaatccgttctgtgcatttgcatataatcctgtcatattcttcatcatcgaattgccatacccatatccaaaccagaatctacttctaatgatattcagcaaataatcattatatatttccaaacgcccagtcacggtgtaagatctgttgaagtatccaaatacgatattatttacaaattcatttttaagaatttgttccatcaccaaagcaaccagtgcagacataattagtgctgttaccgcaaatctttcatttaacagcaacattctgatttttcgaaatggaactattgttgctataaacagcactgccaaagttaccgtagccgtagcacaacctatgtataaggtaagtgcaattgaacttataaacaatgcaatatagcaaattttatttttccataaaatcatctcatgtgttgcaccatataaagcaataagaaatataaataaatatgaagatgtgaatttatttccaaagatatatgcagactgattgctgttattcactgtaccgaccaataatattgaaataattgtcaatatacaatatagcctaatgatattatataagcattttattgtctcgttaaattgacccttttgcttgcaaagtccaataaacgaataaatatcataaaatgtaacggcatagagaagtgcatccaaaaagtctttatcctgatatccacctttaagatatgcaataaccgctgaaagcaaaacacagccagaaaataacaacgacaaatttacaattctttcttttttttctcttgaaattgtaaacaaaaaaacgcttatgagaataataattttacttgcctgccttagttctgcaggcaaaaaatatggtttaataattgcaaataccaacaaatatgtcaacaagttatatacattgattttatatttaatcttcattctcttatccttgcatcttcattatattaatcctatagtacaatcttaaactaaatgcaaacagaatggcttttattctgtcttttttaaagcaaaccttacgcaatggataaaaccgatcaatctccatattcgtttgatacaatcttccttctgtcatacctttcatataaagcatcgcaatgtgattatccatgtatttttttaattctggattcttaatttcatttgctaatatatctaatttcttacaaatacggagcatatcttgcccatgttttgttttgtttctcgatcttgtaatagatccattccttcttaaataatggtaaaacacataatctgatgtatatactttgtttgctctcaatataacttgtggcgtccaaagctcgtcttcatgtagaattcctgactcaaagtataattgattttctacaataaatgctcttttgtacacaccgaagcaagccgccgcatacaaattcctttgctttagttcctctagtgcaaacttctcacctgtaaaagaacaatttttagccgacacatacccatattttattaattgtttatcggtactttcgtattcttcacaatacccaaaatatataatatcaggtgtatttttcttttcaattataccttgtattttggcaatgcatccattttctacataatcatccgagtctaaaaacataatatattgcccacatgattcttttattccaacatttctagtatcagataaacctgaatttctttccttagcgattacttttacatttgtatatttttcatatttttttgcaatattcaaagagccatctgttgacttatcgtcaacaacaagaatctccatatctgaataatgctggttcaacaaactttctaaacatttgtccagatattcttcaacattatatactggaactatcactgaaataaacatttttcacctctataatataattaagcatcattcgcttaattatattttcgtaaataataactttccatatattttgcagttgcgtccatatcaaatcctgcatcaatcacacactgctgcatattggtatgtgctttcagattctgtgccatttgaagtgctgcattcgcccacttttctgctccatcactcaacagcagtttccggtagattggtgtaatatccgtttccggcggcaatccttcagagcagacaataggaacccccgccgcctgtgcttcgattgcaacaatacccagaccttcaaacaaagatggaaaaacaaacacatccatcgcttgataaattctgttcatatcctttctatttccaagaaaatgcacacaatttgaaagtcctttttctgccactttgcttttcactttttcctctaatggtccggtgccaacgaggattaattcagcgtccggttttttcctcttgatttctgcaaaaacatcaatcaggaaatcatgatttttctgagggtgcagccgtccaacatggccgacaacaaatttatcctctaatcccagctcttttctgatttcttttctgacatctgcatctgcaataaaattctgcgaatcaatcgcatttttcagcacttgaaacggcttgtctttgaacagatattttccagcttcttcagagcaggcaaaaagatctgttgcgtttttggtaaacattcgctgcatgaacagcttcggtaaatattttatatcgtgtactgtctcattattatgtgaatgagcaattctgacggggatacctgctttctttgcagctttcaggcagaaatatccaatcgtgtaggcgtgacaatgaacaattttatattcgtgatgctgagcaaagaaaactgccaaatctttttgaaatttaggaaagttcaaatcctcccggaaagacagtttgtaaacatgtccacccattttttcaatttcatcatcgtaaaactgtttttccttataaacgaccaaaaaatcaaactgtactttcgttctgtcaattttccggtatatattcatcaacaaagcctgcgtaccgccagcttccattcgctgcaagatatgcaaaactcttatagcctctcccatgtattcttcctccacaaaatctcaaagggatttgattttttgaatcagtttattcggcagcacagatttcaaccgtgcttttggctgaaagccaacctttatattctctataaagcctggttcatcgatgctcttatagaaagtatctctagtcacaggcctgttgctcggctgcaccagattatgctgcttcaccatgccctcttccaacgttgcttcttctacttctgcaagaactcgcaccatttcaaagagcttttgacctttttcggtatttacaaatacactggacacgccctttggagaattaaagctcggatggctctttgcaattccccagaaatcacccactgtcaaatctcctacacggctcgtattagcataagcacacttataacagctctctctatagcagtcgctatccataaaatgttttccatagcgatcaagggagagtgtctttgtctttgcctttgtctttgtttttgcctttagcaggtattgtgttccccaacctctcttgtctttggaacggaagttgaaatagattactctgccagccgtctgtttgttctggtattccagatactttttgaagaacttcggcgaaggcacaccgtggcaaatcaggtcaactgtatatagattttctggattgccacccaaaaaagcatacagacctgcaatctggcagggagttcctgtaaaaagtaccgtttttccctctgacaaacgctgtttgacctttgtgtagctatctttcgggtcagactgaacatacttagaggactgtagtttctctctttctgcttcatctgtcacttcaatgtggcttactgccagctgctcgtcataggcagcaccataaaccacaccgcccatttgcaatatagttttcgctgcactatccgccgcaccgccagacgcagagcgcataatatccacatcatttttattgcgccacgcccaaactttatgtggctcattccgatgaaattccgtattttctactggacactttttcaagcacaccttgcactcgatgcagcttttttcatcaacagacggataccaaaatccctctttgttttctaccatagagatacagtgttttgggcagctttgctcacagcttttacatcccacacatttctcttttatcctcgatatgttctccattttattcctctaaattttttcttagatactccttcgccacttctctatgtgctttcaacagctcatcaactttcacgtaatcaatcgccttttcattgatgttttctgcatcttcaattttcgttgtcatccgattggccagtcccagtcgctttagcaaatcgctcaatttttcttcattgccatagctgttacctacactcttgcgaatcaatgttgtaaacggccgatgtgtaatcaccgagaagatgctaccgtggaaggtatcggtaataacttcttctgcatttctgaaataggccagaacctcaaagggtgagcagtccacgaatcggtctgcacatttttggataccaccaattgcatataccttcaaattctttttctttgcataagcagcaatccaatctgcctcatcattggaaatacgacctgcatacgcatacagaatcaaatacttctcattagtctggacctgtgggattttgtcgcagcagttcatgtaatcataggtcagaaccggatccagattgtacactggttctttcccagtgagctgttctacaatagttcctgaattagcatctcgtacagaaatcgcgtcaaacttcttcaacaaagctccgacttcattggcctttttatatttttccagctttattaatgttgtattgccgaaagacgctgcataagtgataagtttctttgcatggttattttttccaaacaattctggcgaatagcccacattggaatttttttgaatacagttaaaaacctcatcactgccaatcacaaggcaatccactgtcgggttgtagttcatttcgtctgcaattcccaaaagcggcatatacttttgagcaaaggactgtttatatcggatgaacgataatttgtgtgcaagaggagccggataccgaaaggtttccagccccttttctatctttcggacaaccttgtttttactatctgcatcttctgtaattactggagcacctacatggtagtccacaaattctacattacagccaacttcctcaattagttgcttcaatgcatatgcctgcaaaaacgaaccgtagtttgcaatgcgctgcatcgacatgattccaacttttctcatccacccatcctcaatacaattcatctaccagtttttcaagttcttcattaaactttgcattgttactgctcataccatgtcccatgccagcaacagtctgatcatagttcgttatgatctctcccaatgtttcaatatcctctaccgggataatcgttcccattctctgagccacgtttctcgcaaactcaacttgatggtcattcacatgctcattgaactgatgctgacgtggcacaacaataggagtcttacctatctgtagtgccataataaaacttgcagggccaccgtgagtgattacaatacgggcatcggacacatttttcaccatctgatgatatggaatcaacttactccactgacagtatttcggctcgtatgtactaaagccagtctggataattacatcttcgtttataatgccgtctttctttaattcatctattttctgaatcagccgattaaatggctgctcatgtgttcctaccgtcacaaaaatcattttctcgtcccctacttagaatatgcttccaaggttaaccgcctttggataaacctttttctgctcttcccactgcacaacaaacttgtccacaatggggtaaaccatctttcctgtcattgtcggtttatcaattcgatcaaaaacctcgatgtagaccaactttgcgcccatcattttaccaatataaaaaaacgggaccgcaactgctgcaccacaagaaataatcaggtctggcttttctttatgtaacacattccatgcaatcttggtattcttaataagagcctttggactccggtttgtcggataataacaaggatacattttttcaccttcgagcaggcttcttgcatcctccttatcaaaagtgacccagaaatgatctttgtccttccaaaatggctttaacatatataaatgtgtcaggtgtcctcctgacgaaccaactaaacatactttcatgtcctctgatctccttcatcccaagattttttatgtacacattccgaaagattgtatttcctttttataagtaactgtgttcatcatacactcggctaagtgttttcttatgctgtcgtatccaattaccccgacaatcatattgcccttgttttctactccataaaatatcagttaagtacactcgcatctatttctcagtaaccgaagtgctgttttatacagtcgaaccctgtataccctgcaatgatgttttttctaagtgttggattgttgaatcgaacactgtcagtgtatgaatcttgttaaaactgtatataccattcaatccggttttacaacttcttcaaaatcggtaatatcacttcatcggcttacctgccacatgacggataaagtcgggtaccggaaccgccggctaaaattatgcctttcatatgtacctcccaaatcatcttccttgtttagtaagaactgcgataattgttttaaatatgattttccagtccacgagaaaactgcgttcacggatatactgtatatccatctcgacccattcatcaaaagaaatgtcatttctgtttggctgaatttgccagtaacacgtaagacccggtgttataaacaatcgctgggcttgataagcagaatattgctcaacctctctgggcaaagcaggacgaggtcccacaatgctcatatctccttttagaatattaaaaagctgtgggagctcatcaatacttgtttttcttataaattttccgactcttgtaattctcggatcatcggtaattttaaaaacaggtccatccatttcattttctttcagtagttccttaagcctgtcttccgcatcaacaaccattgagcgaaatttatacattttaaactctttaccgttttttcccactcttatctgcgaaaaaacaggacctcctttgggatcatcaataatgatagaaataactgtaatcagcataacgggagaaagaacaataatagctatcagagagaataaaatatcctgaaatcttcttagccaccggtaaccgtgtcttgtttttaaggttgcataataaatattattttcaggcataacctttttttcgaaaatattgttttttctttcatttgcatatattcttttcgccaaaactacacccctctaacaaaaaaattaatagccgtattcgccgtagtaaccgtatttgtatcctccgccgtatttgcgtttaccgacaggctcaacatcattaaatataacaccgataatattagcttcggagcgtttgagaatatcaattgtttttttgtagtccctgatgtcggtaacattatctctgactataacaacaacaccgtcagtttgctttattataggtaaagcgtcaattactacgccaattggcggagtatcaaatataatataatcatattgttttgaaagctctttgattaattctttcatgttgtcacttgataaaagctccgacgggttcggaggaatagtaccgcaacagatagcgtcaagattgtccaatttagaagtgtaaactatatcagatacctcacattcaaaattgaggtaatttgtaattcccttgtcaacaggtatttcaagcaccgattgaattcgaggtcttctcaaatcacaatcaataatcagtaccctggtatcaacctgctgtgcaagtgcaatagctatattaactgcagtaatagtctttccttcggattttgaagagcttgtaacagacaccattttacagcctttttttacaattgaataagcaatatttgttcttgcttttttataagactctttaatctgaaagccgacagcttctgcattgagttttacatcttgaaaagagcctctttttggatattttttcatactgactccctcttatctttttttttgttagatttatttactgcgtcaaattttggaatagctgcaagaatcggaatatctccaatcatagtcatttcctcgttgtatctcatctttttatcaaggaacgctctgagcaatgaaattccgacagatataagaagtcctactatcattgtaattattacgttctttatttcattcggagatgaaggagcagtaggcaactgagcataatcaactatctttagcgttgctttggatttaagtcttgaaatagcctcaggtgcaacctttccaaccgcatcagctataagctttgaatcatttggagaagaagtagtaaccttagcgtcaaatatctccgtcttttcgtcactgctgaaagaaaccattttgctaagctgtttaggggtatatttgttgtttatatgctcagaaagctctgcgtaaaaagtatttgtgttcagcattttaatatatgtagcaacaagattctgtgcataggtttgctcataaagtatattgaggctgtttttattttcatcatcatttgacgtatcaacatataactgaattgaagatgtgtatgactttggaataaaatatcttgttataaaaaagcttccgatagcacaaataagcgtaactacgataataaaagctgcatttttcttaataatattccatacatctgacaatgaaataacaatttcatccttttcttccataggactacctccgttttacatattcattcgttttttgcattattgattattattataatccaatatccaatttatttcaacaacaatattttattttttccactattgacaaagtttgtgtgactaatttattattgtacactcagatatcaagaaattagtaattatcaccataaacacataaaggcttttcggagagaaagttatgtaagtacagttgccttgctttttgttccttttgaatgcggtgctttgtcggactttactgtccaagtttctgcaccgacctttgcctgtgcagttttgtcaatatcggttaaatctgtgagcataaaaccgacttgaccgatgtggcggtctgcgtttgttcctgttgtcttgttacgctttttaaagcgttttacaagcggtcgtgtcacaataagcgaaacgagtgacacaacaaggaacaccgtcgactggattgttatgtcgcttgtgaatatagttgtaatggcggcacaaaccgagccgagaacaaaccatattgatacaagctgtgttgtaaagccttcgcaaagcaacataaatattgcaaagcctatccacactatcggcatatattgctccatagagctgtcac

SEQ ID NO: 100 - DNA, 11906 bp, unidentified
  source 1..11906: mol_type = unassigned DNA
atgaaaaattcgcggcgcatcttggcgcattcttatctggaaatagtataacgcttccatcagcaaatcgttttccgcgtccgttttcaccgccaggcgcagataattcgcgggcaagccgaacgaatcgcacgtccgcaccaaaatgcgctgcgcccgcaggtgctgcaccgttttcgtcatatcgtgcccgaaatcagccagcaggaacggtacgcgccccgctgtcacacgcacgcccatctcctgcaagcaccgcgcgaaccgctccgcccgcgcctgattcgcctgtgcatccgccgcaatttccgcctgatgacggggcagctccgccgcaaccgccgacgccagcacgttcagcgaccatgtgactgcccgctcctgcaagcgtgcaatctgttccggcgcagcgcagatgtaccccagccgcacgcccggaatgcacagaatcttcgtcaacgacccgaccaccgtcaaaccatcctgcacatggtggcgaaccgtcgcatccgggcaatagtcgatgaacgcctcatccacaatcagctcgccgccgctgttccgcacgtcccgatgcatccgcagcacgtcattcggcgaaagcagcgtgcctgtcggattgttcggattacacacaacgaccgtgtcatccgcctgaatcgcctgattcgccgcaacccgccgcccatgcgccttcgcccgctccgcatattccccgaacgtcggctgctgcacatgcaccgcgccgcgccgaacgccgagcgtcaggtcaatcgccgccgcgccgcccgccgtcggcagcacgcagctttcgtccacgccgagatacaacgccagccccgcacgcgccgcccgcatcgcgcggtcaggataatagcacgcctgcgaaagcgccgcgcgcatggtgtccatcacccacgcgggcgttccctctggtcgcagattcgcggaaaagtccagccaatccgctggctgaccttcccaaacattgccgccatgcctcaatgccgcgtcctcctgaatcagcagaaataccgagaatgattatagcaaaattacgggggaatttcaacagcgggtgggcaggatgatgaatccgcagttatagaatagaaagaaaactgacaggcatacactccataagtacaattgtacttctttcgcttttgccaattgtaaataattgcgccaaagaattgactttttcgtgaaaaggcgtataatcatggaaggaaggggtggaaattcatgagaacgacgaagctaatggcgggtgtgctgacgctgctggtgctggtcggcggcggctgccgagacggtgcaatcctccgaaggcacggtgtataccctgccggcgaatgtctcccgcatcgaggagtacgcgttttacggcgacggggaactgcgggaaatccgcattccggagggcgtgacggaaatcggagattatgcctttgcaaactgctggtatctgacggaaatcacgattccggagagcgtgaccaagattggcgcacatgcctttgacagctgcgtgagcttgaaaacggtgcagctgtccgacaacatcaccgaaatgggggaaagcgctttttatcgctgcctcagcctgacggaaatcaccctgcccgcgtcgctgacgggcatttcggcgcatatgttcgagaactgcgaaaaactggtgacggtcacggtgccggaaggactgctggaaatcggtgattctgcctttgcaggctgcaagaagctggaaaactgccctctgccgccgaacctgacgcgcgtcggcagctacgcgttcgacaagtgtacgctctggaacgccgagctgctgccggatacgttgacggaaatcggcgagtacgccttccgccagtgcaagaaactgacagaagtgacgattggcgaaaagctgctgaatgtcggcgagggtgcgttctgcgactgcgacggcatcaagaaagtggactggcaggcgaaagtgacgcgcattcccgaccgcgtgttccaatcctgctactatattgaaaccgtgaagctgccggaaacagtgacggaaatcggcgagtactcgttctattcctgcggctatttgacggacattggcacgtttgagcggatgaagcgcatcggcgcttgcgcgttttcaaactgcagagcactggtgaatatcggcacgctggacgcgatagaggaaatcggcggcggcgcatttatgctcgaccaaaagttggtactttcgctggatggcttgcagcacctgcgcattatcggcggctacgcgttcggcggctgcccgaaagtgaccggactgcgtgatttgccgatgctggaagaaatcggcgcgagcgcactggacagcgcgaacatcccggaagttgcgaatctgccgcgcttgcggaggattggcgcatccggtctgtccaatcggtcgctggtgacggtgggcgacctgcccagcttggagtatatcggcgactcagcgttccggaatgcaacttcgctgaccacgttcggcgcagcaccgaatgtgacgtacattggcgcgaatgcctttgaagaatgccgcaaactggagacgcttggtttggatggtgttgcggcagaaatcggaagggaagcgttcatcgcctgcacttcgctgaagtcgcttgatttgtcgaatgtcaccagcattggggagaaggcgttcagctactgcggcacgctggaaacggtggtcagcctcgaatccatcaccagccttggcaagaatgcgtttgaggaatgcagatcgctggtgacggtcggcaaaatcggcaatctgacgcggctgccaaacgaagtatttagggaatgcaaagcccttgcaaatgtcaccctgccggatacgatggagacgattggcacagcggcgttcaagcattgctatggtctgcctgaaattgtgattccagacagcgtgacgaccatcgaggaagaagcgtttagcggctgcacctcgctgcaggaaatcattgtgccagattctgtggtaaaaatgggcaatcatgtgtttggcggatgccgaagcgcaacgcggattgtattcccgaaatacctcacgtacctgcccggctatggtgtgagcttctgcaactatatggtggaatttgtattcccagagaacgtgaaatctatcagcgattacttcttctacggctgcatttcactgaaagaaatcgtgattccggatacggtgactaccattgatttccgtgctttctgggattgcacttccttgacgcgcatcacgattccggcttcggtcacgaaaattgattcgacagcgtttgacggctgcaagaaggacaaactggtgtgggtggtcacgcccggttcgtatgcggaaacgtacgccaagaagaattattaccattacacatacgcgaagtaaaccctgttgggagattgccctgcgcagtctcccgtttttttgcgtccagcattccataacattacccaacattcgccaaaataccccttgatttttgcagtgctgcgttgtacaataatttacaggggcgcaaccctgcccccaaagctgctgcaatgcaaaaggagtcgccatgggcaattcgtattcgttgttcctgcgtcagtcgtatctcgacgcgtgggaggactatcgccgctcgctgcacagggctgatttcccggtctgggattatatcatactcaccgcgtccaatgaggcgcaggcgaatgcgtatcgccagcagattgccattcgccgggcgaaaaacctcctgcctgagcggacgcactatgccgttctgcccgacccggacgggctgcgcgtgggcagcggcggcgcgacgctcaatgcgcttcgttatgtctgcacgcaggaaggcacatttgcgggcaagcgcattctgtgcatccattcaggcggggacagcaagcgcgtgccgcagtacagcgcgtgcggcaagctgttttcgcctgtcccgcgtgagctgcccaacggcaggcgctcgacgctgtttgacgagttcatcattggcatgagcggcgtgccatcgcggattcgggacgggatgcttgtgctgtcgggagatgtgctgctgctattcaatccgctgcagattgatgcgcccgcatccggcgcggcggcgatttccttcaaagaggatgtggaaacgggcaagaaccatggcgtgttccagatggatgaacagggtaacgttggcgagttcctgcataaacagacggtggagacgctgacgagccgaggggcggtcaatgcgcagggcaaggtggatattgacaccggcgcggtgctgttcagcgcggatttgctggcggatttgtatacgctggtggatacgcccgcaaagtttgcggcttttgtgaatgaccgcgcgcggctgtccttctatggcgatttcctctatccgctggcaagccgttcgacattggagcagttctaccgcgaaaagccggatggctcgttcactgaggagctgcacgcctgccgcaccgctgtctggcaggtgctgcggaagtatcggatgcgtctgctgcggctggcgcccgcgtcgttcattcactttggcacgacgcacgaactgcgcgcgctgatgacagacggcgtgtcggcgtacagcttcttggactggaagaagtgtgtgtccggctgctgctcatcggcgaattatgcgctgaataacgcgatggtggaggaggactgctgcatccatgacgattgctatctggaggacagccatgtgatgggcggcgcgattatcggcagcggtacggtgctttcgcatgttacagtcagcggaaagaacattccggcgaatgtcgtcctgcacagcctgaagctggcggacgggcactttgtgacgcggatttacggcgtggcggacaatccgaaggaaggtacgttcttgggcggctcaatggcggcgttcgggaacgtgtgggatggggatgaccattcgctgtggcaggcgaaaatctacccagtctgcgattctatggcggaatcggtggatgcggcgctgaatgtctacgcgctggcaatgggcgcggggaattatgatgcgtgggcatcggcggagcgcgtcagcctgtgcagctcgttcaacagcgcggacacggcggcgattctggaatgggagacgcacctgcgcaaagccgtgaaggtcgagcgcttcttgtctgtgattcgccgcggcggcacaatcgaggaagcgaagaaaatttttcaggatgctgccatcagcgcctatcagcgccgcctgattgcggaaaaggcggcatcggcagacgtgttcacacggatgcgaatcttctactgcctcggtaaagtactgggtgattcgcaggaaggggaggcgtacatcaagcgggcttttgaggagattcagcgcatggtgcttgcgggagcggcagcgcacggcacggggctttgcgcacatcatcagccagtggaagaagaagcagcggtgcgtctgccgctgcgggtcaactggggcggcggctggagcgatacgccgccgtactgcaacgaaaagggcggaacggtgctcaatgccgcgattctgctgggcggcgagtatcccgtggaggtgcatgtgcgccgtctgccgaagccgatggtcgtgctggaaagcgcggatatgggcgcgcatggggaattcacggcaatttcggacttgcaggagtgccacaatccctacgacccgtttgtgctgcacaaggcagcgctgattgcctgcggcgtgattccgcgcgagggcggcgaattgacggatattacggcgaaaatcggcggactgtacgtctctacgcagatgcacggcgtgccgaagggtagcggtctgggcacgagcagcattcttgcaggcgcgtgcgtcaaagcgcttttccagtatttcggcgtggcgcacacggaggacgatttgtatgagcacgccatgtgcgtcgagcagattatgtccaccggcggaggctggcaggatcaggttggcggcatgacgccgggactgaagctcatcaccgcgcccgcgggcattcagcagaaattgaacgtccgccatatcgctctgtcggaggacaccaaggcggaactgaacgcgcgtttcaccctgatttataccggccagcgccgccttgcgcggaatctcctgcgcgatgtggtgggccgctacatcagcaatgcgccggacagcctgtacgcgctggaggaaattcagcgaatcgccgtgatgatggcgtttgaactggagcgcgggcatgtggatgacttcgcgaagctgctgaatcgccactgggagctttccaagacgattgacgcgggcagcaccaacacctgcatagaccagatttttcttgcgattgacgacctgattgacgggcgcatgatttgcggcgcgggaggcggcggattcctgcaggtgctgctcaagcacggcgtgacgagggagcagctgaacgcgcgcctgcatgatacatttcaggactgcggcgtggacgtgtgggactgcacattggtttaaggaggtacgatcatgctgaagggtatttccccgctgatttcgccggaactgctgaaagtgctgtgcgagatggggcatggggacgagattgtgctggcggacgcgaatttccccgcagaaagcatggggcagcgcgtcgttcgtgcggatggcatcggcgcgccggaactgctgcgcgcgattctgccgctgttcccgctggatcaatatgatgaaagcaactttgtgctgatgtcggttgtgccgggtgacccgacagtcccggtgatttgggacgaataccgcgcgacgctgacggcttatgagccggacgcgaaaatccagacaatcgaccgctttgcctactacgagcgcgcgaaaaaagcgtactgcattgtcgcgacaggcgaaagcgcacagtacgcaaacatcctgctgaaaaagggtgtcattcggcagcattgcaaatgatatgaaacctaagattatactgacaatagtttctatacccccttactttttgaaagcaaattctttataatagcagtgtatctattttcaagaatagctgatgaaaagaggaaatttcaagacgatggcgaaaaaggcgctgattaccggcatcaccggtcaggatggttcctatttggcggagttcctgctcgaaaaagactatgaggtgcatggtattgtccgccgtgcgtccatttccaacacggcgcgcattgaccacctgattgagaagaaggcaattcacctgcatgacggcgacttgtcggattcttccggcctgattcggctggtgggcgaaatcaagcccgacgaaatctacaatctggcggcgcagagtcatgtgcaagtgtctttcgacgcgccggaatattcgggcgacgtggatgccttaggtgttctgcgcgtgctggaagcggttcgcgtgtgcgggctgacgaaaagctgcaaggtgtatcaggcttctacctccgaactgtacggcaaggtggaggaggttccgcagcgcgaaactacgccgttccatccgtacagcccctacgcggtggcgaagcagtacggcttctggatggtgaaggagtaccgcgacgcgtatggcatgttcgcggtcaacggtattctgttcaatcacgaatccgagcgccgcggtgagaatttcgtgacgcgcaagattaccttggcggcgggccgcattgccgagggaatgcaggatcatctggagctgggcaatatggactctctgcgtgactggggctatgcgaaagactatgtggagtgcatgtggctgattatgcagcaggagaagccggatgatttcgtcattgcgacgggtgtgcagcataccgtccgcgatttcaccgagaaggcgttcgcggcgaatggcatcagcatccgctgggaaggcaagggcatcgacgaaaggggctatgacgcggcgaacggcaagatgctggtgtgcgtgaatccgcagtggttccgcccgacggacgtagacaacctctggggcgatccgacgaaggccaagacaatgctgggctggaatccgcaaaagaccagttacgagcagctggtggagatcatggcgaagcacgaccgcatgttggcgaagcgcgaaaaggcgatgcggacggcgctgtaatttgggcttgaagagcagaaagagggacagccatgatgaaaaaggatgcaaagatttacgtcgcgggtcatcgcggcatggtgggttccgccatcgtgcgagaattggaacgtcagggctatacaaatattatcacccgcacccacaaggaactggatttgacccggcaggaggcggtcgaggcgttctttgcgcaggaaaagccggcgtatgtatttcttgccgcggcaaaggtgggcggcatcgttgcgaaccagaacgcgctggcggatttcatgtatgataacatggtgctggaaatgaatgtcatccatgcggcgtggcagaatggctgcaagaaactggagtttctcggctcatcctgcatctatccgcggatggcgccccagccgatgaaggaaagctgcctgctgacctccgaactggaaaagacgaacgaggcgtatgcgctggcgaaaatcagcggtctgaagtactgcgagttccttaatcggcagtatggcacggattatatctccgtcatgccgacgaacctctatggcccgaacgacaactatcatccgacgcacagccacgttcttccggcgctgattcgccgcttccacgaagcgaaaatcaacggcgcggaaagcgtgacttgctggggtgacggcagcccgctccgcgagttcctgtatgtggacgatttggcaaacctttgcgtgttcctgatgaacaactactccggcagcgagacggtgaacgccggcacgggcaaggaactgaccatcaaggaactgatcgaacttgtggcgaaggttgtgggttacaagggtgaaatcaagtgggatcccaccaagcccaacggtacgccgcgcaagctgcttgatgtttccaaggcgacgaacctcggctggacgtatcggacagagctggaggacggcatccgccttgcgtatgaggactttctgaacaaccccatgcgcgctgaacgttaaggcactaccgcacaattcgtcggcagcgctggcgatgccttttctgccatctgcttcttgcagaaatctcgatttacctccagtaaaccttcgatttctgcaatcgcatctgacaaaaaatgcattcgccatcgcaccaactcatttgtgcggtattgccttaaggcaacaccgcacaactcggcgtcaccttaatccgcgaaggaagcaacgggggctgcatggcaaaaagtgcagccctcattctgttttggaggagaaacaaacgatgaacattatcctgctttccggcggctccggcaagcgcttgtggccgctgtccaacgatattcgctcaaagcagtttatcaagattttcaagaaggaagatggcgcttatgagtcgatgctgcagcgcgtctatcgccagattaagcaggtggatactgacgcaaccgtgaccattgcgaccagcaagacgcaggtgtctgctatccacaaccagcttggtgagcatgtcggtgtgagcatcgagccatgccgccgcgacacgtttcctgccattgcgctggcaacggcgtatctggtggatgtgctgcatattgacccgtcggaatcggtcgtcgtttgcccggttgacccgtatgtggaggacgcttacttcgaggcgctcaaggaattatcggcgcaggcggacaagggcgaggcgaacctcattctcatgggcattgagccgacgtatcccagcgaaaagtacggctacattattccacagaacggcgaacatatatcgtcggtagataccttcaaggaaaagccgacggcggatgtggcggcggagtatattgcccgcggcgcactgtggaacggcggcgtgttcgcttacaaactgtcctacatgataaacaaggcgcacgagctgatagactttatcgactatcaggatttgttcagcaagtacgctgcaatcaaaaagatttcttttgactatgccgttgcagagcatgaaaaacagattcaggttgtgcgttttgcgggcatgtggaaagatctcggcacatggaacaccctgaccgaagccatggaagaaacaatcatcggcaagggtgaactaaacgacaaatgcaggggtgtgcatatcatcaacgagctggatgtgccggtgctggcgatggggctgcatgatgtggtgattagcgcatcagcggagggaattctggtatccgacaaggagcaaagttcctacatcaagccattcgtggacaagtacgagcagcagattatgttcgcggagaagtcgtggggcagcttccgcgtagtggatgtggagatgaactcgctgaccatcaaggtgacgctgaaccccggtcacaacatgaattaccacagtcatcagtaccgcgacgaggtgtgggtggtgatttccggcgcgggcagaacgattgtcgagggggtagaacgtccggtcaagacgggagatgtcataacgatgacagcgggtcagcgccacacggtcattgcagacacggagctgaagatgatagaggtgcagctgggcaaggatatcagcgtccatgacaagaaaaagttcactttgtgattgacaggacgcataaattggtatatgctgtctctcgaaacggaagcaatgccaaaactactggaggcggaggatgccggatgagtaaagtgcttctgattacgaatatccctgcgccgtatcgggtggatttgttctactatatgcagacgcatcagcagacgcatgagtttttcgtcatttacacgaatcgcaatgaggacaaccgccagtggacgattgacgagcgcaaactcctgcaatcgacgattctggaatctaaaatcatcaagcgcaagggcgaaggtgatgtgcactacctgcatattccgcagcacctgacgagggaaatcacgcgcatcaacccggatgtggtgattgcgtgggagtacaacccgtccgcgctgaaagcattgctctggtgcaagcgccacggcaggaagttcatccacctcacggacggcacgctgcgttcggagcggaacatcgggcgcgtgcagaaactcatgcggtatatcatcatccgccacgccgacgcgtgcattgccagcagcaccaaagcgaaggaaaagctgctgcactggggcgcgccggagcggaaaatcttccttagcctgctgacggtggatatttcccgcttccgctatgccgaaaagcacgaaaatcagcatacgctgctgtttgtgggcagaattatccccctgaaagggctggatttgctcctgcgcgcgctgccgaaagtgcatcagccgtttgaactgctgattgtcggcgacggcgaggtggaggagaaggcgaaattgatggcgatggcggaagaaacgcacgttgcgcagcacattcactggctgggattccagtctggcgagccgctggcggatgcctatcgccgggcgagcgtgtttgttctgccgacccgcgaggactgcttcggacttgtgctgctggaagcgctctgctccggtacgccgattgtcgcgtcgaagtatgccgacggcgcgtatgacaccgtgcatccgggcgaaaacgggctgattgttgacccggaggatgccgacgcgctggcggaagccatcgacagcattctgggcagcgaggaaattcagcggcgctattcgcagaactgccgccagtatattccgcaattcgagtttgaggcggtcatgcaggggtatctgcaggcgattgcgtccgtcacatcaggcaacaaataa

SEQ ID NO: 101 - DNA, 19969 bp, unidentified
  source 1..19969: mol_type = unassigned DNA
  misc_difference 13910: note = a, c, g, or t
  misc_difference 13911: note = a, c, g, or t
  misc_difference 13912: note = a, c, g, or t
  misc_difference 13913: note = a, c, g, or t
  misc_difference 13914: note = a, c, g, or t
  misc_difference 13915: note = a, c, g, or t
  misc_difference 13916: note = a, c, g, or t
  misc_difference 13917: note = a, c, g, or t
  misc_difference 13918: note = a, c, g, or t
  misc_difference 13919: note = a, c, g, or t
aaggacagtctggcgcaccggctgttcagggaggcacaggaaatcaggaagcaagtggacaatcctaattcaaaatgactgcactatggcaacaatcaaaaccaaattcaggtcctcgtccgtggaaggcagggagggaacgctctatttccagatcatccacggaagggtggcgcgccagataaacaccggctacaggctgttcccttcggaatgggacggacgcatgtcggaaatcatactgccggtatccggtgatgccagaagaagccttctgcttgcgttaaaggagcggatggaaaaagacatccgccgtctggaaagtatcattgccggactggaacgttccggcggtacctatcccgccggcagggttgtcgaactttttcacaacccgccccctgaggacagccataatttcatggccttcggaaagaggctcgtggaggaactggagcgtgtcggcaagaagcgcaccgccgagaggtacaccaccgtactgaacagcttcacgcgctttcggggcagggacggcgacatcccgctggaggatatcggctccaccctcatgctggaatacgaggcatggctgaaggacaaggggatatgtccgaacagcacctcctattatatgcggaacctgcgtgccgtctacaaccgtgcggtggacaaggaactgacgatacagcgcagccctttcaaacatgtctacaccgggatagacaagaccgtaaaacgtgctgttccgttgaaagtgatccgcatgatacgcgatctggaccttcgcatttccccgggcatggaatacgccagggacatgttcatgctgagcttttatacccgtggcatgtcgttcgttgacattgcctacctgaaaaaagctgatctgaagagcggtgtgctaacctaccgcaggcagaaaaccggacggcgtctgtccattaaatgggagaaacccatgcaggagatactggacaggtatggccacaatgacagcccctacctttttccggtcatcaaagatacggctaaggatgccgtgcggcagtacaggagcacagcgcatttcatcaacgggaaactcaaagaacttgggaaacggctcgggctcggcatgccgctcacgatgtatgtagcgcgccatgcctgggcgagtattgccagaagcaaaaatgtcccgctggcaaccatcagcgaggcgatgggacatgattcggagaacacgaccaaaatctacctcgcctcactggacacctcacaggtagacaaagcaaatgacatcatacttaaatctttataacgggaacaaatgcgacacgcagaatactgaataaaaggctataccgatcctgcttctctttttaagagaaatattagacattgcaaagataggtaaaatataggaaaatatccacctgtatgataaaaaacagttttcttcgaaagaaaatgtttcaaattccggtttaattgtcaaacaaatccttgtcaggttccatatatagcatctgattatcagaactatccctttccggtatttctcttaaaaagaaaagtaccggaaaagatctatgaatacagtggcagaatactgttggaaatgttcttattgacaatttaaaaccagatgcgtttgaaaggtttttgaaagcattttgtaatataataaaaattgttgagcatacggctcattttcttggcaagagaaatattacaatgtgcaaagttatgtaaaatattgaagaaacgatagaaaacaggtgataaaatataaccaaaacattcatacagagtgtatttgcttaacatatattggataaacgccacaatgccacttcgcttttctacttgtctatcaattaattacataaaatatggtcctctaatatttctcttgccaagagaagtagtgacggaagccccggaaatgaggtctgtacactttgtcaaaagtatggaactaacaatggatattatgggaaaagggaacgtaatccattgtaatacatgccaatatgtaggttggcatgaactaggtttatatccacacctataaaatgtttcggaatatgagtacgagtctttttacagcggaggaaaaaaggcaggtccgatggttcgtcatgcgcgcctacaagaatgagaaaatggcagaggacaggctgaaagacaaggaatatggtttggaatattttatcccgaaacattatgccgtaagaacttatcatggagtgaagtcaaaaaagttggtgccggttataccgagtctgcttttcgtccacgccagccattcgcagatcactgaattcaagaaacgatacaatttcttgcaattcaccatgtgggaaaagagcacgggggcggaatatattaccgtaccggatgaccagatggacagcttcatcaagatagcttctcattatgaggaggacactgtttattataggcccgaagaaatagacttgaaaagaggaatgcgtgtatgtatccacggtggcaagttcgataacgtgaagggcatgtttgtgcgggtgcagggcaagagaaaccgtagggtggttgtcctattggagggtgtcatggccgtttccgctgaggtgcaccccgatctgattgaagttctttcctaaaaccgctggcttttacgggacttcgcaaaaatcacgataaaaattaattgaaattacaaattagaaataatataaactgtacagatataaatatgaagaatcgatttttgatttatctctttgcgatagtgttgtttacatcctgtcacacttcgaaggagattctttactttcaagacattgctgtgaatcagcctgaagcgattgtgggtgcaagagacatcaccgtgcagcccaaggaccaaatttccatcatggtatccagtaaagacccgcagttggcagcgttgttcaacctgacacgtgtccagtatcgggcaggaactgccgatttacgtagtagcaacaataatggtgaaatatccggttacacgctcgatgacaagggaaacatagactttccggtcattggtacgcttcatattgccggtatgaccaaaagccagattgccgcccttatcaagaaacggctgatggaagaggacttggtgaaagatccggtagtgaccgtagagttcatgaatctctatttctccgtgttaggtgaggtaaaaacccccggcaagtacaacataaccaaagaccagatcactttgcttgaagccatcagcatggcgggcgacttgaccattaccggtaaacgtgatgctatctttgtcatccgcgaggaaaacggtgagcgtgtcacccactgggtagatcttcgtagtaaggacatttttaaatctccggtctactatttgaagcaaaacgatgtgatttatgtgcagcccaataagatgcgtgccggtcagagcaccatcaacgagaataacgtgaagtccgtatcgctatggatcagcgtcgcttcattcctcacttcgttgggtgtgctaatattcaagtaaccttcagaaaaggaatcactttatatttttataatatgacagaaaagaaaacaaccgccagcaagcctgctgacgacttcatacgcatacaagacctgtgggggattttcatgccccggtggcactggtttgccctctccctgttcgtaaccctggcgacagccgccttgtacctgctgggcaccccgaacatttacacccgtaccgctgccattttggtgaaagatgattccaagggaggaacatccaccaatgtggtcagtgaattttctgacttgggtatcttcaagtcgaataccaatatcaacaatgagttgctcaccctgaaatcgcccacgctgatgaccgaggtggtacagcggttgggattaaacgagacctatactgtccgcaaaggactgaaagatgtggaattatacaaaagttcgcctttagcagtcacctatcgccacttggatgaaactcctgtcggttttacaatagatatttcatccaaagaaacgtttgtcatatccgacatggaagtaaacgggaaagcatttggggaagatttctccggaaagatgggcgattccatccgtactgaaataggcacacttgtcatcaatttcacaaaatattggaacgattcattcgtgggcacttccatacgttatagaaaaggtaatgtgtgtgccgtcaccgattattatacagccgctttgcatgcggaattgggaaacgaggatgccaccattatcaatctgagtatcaacgatgcctccattcagaaggctgaagacattctgaacaccctgattgaaatgtacaacgagaaatggattcaggacaagaaccagatcgccgtcagtacttcgcagttcatcggtgaccgtctgagcgtgatcgaaaacgagctgggcaatgtagatgagaacatcgccggttacaagagtgagcacctgctgccggatgtgcaggcggcatccagcctctacctgtcccagtccgccgagaacaagaaggagttgctggcactcaacagccagctttccaccgcacagtatatccggaaagagttgaacaacaagaaactcagccagctgttacccaccaactccggtatcgctaatgtcaatatcgagagccagatcggtgaatataacacgatcgtgctcgaacgtaaccgcctgatcgccaacagtagcgagaagaaccctctggcaaaagacatggctaactcactgcaaagcatgcagcgtaccatcattcagtcggtggacaacctgattgtttcgctcaatacccaaatacgcaacatccgccaacaggaagccacgaccaccagccaactggcttccaacccgaaccaggcgaaatatctgctttctgtggaacgccagcagaaggtgaaggaggaactgtatctttatctgctccagaaacgtgaggagaacgagctttcacaggctttcaccgcctacaatacacgtgtgattaccgctccgagaggcagcatgcttcccacagccccccgaaagatgaatatccttttggtggcattcgccatcggtctgcttgttccggcggtgattattttcatgaaggaaaacatgaataccaaggtgcgcgggcgaaaggatctggaaaacctaagcattccgttcatcggtgagatcccccaatatctcagtgctaagaagaaattgggattcgataaacacacacagtctgtcatgaaagccatcgtggtgaaggaaggcaaccgtaacattatcaatgaagcgttccgcgtgttacgttccaatattgactttatggcaggcaaggacagcggtcagaacgtgttcatgcttacctcgtttaatcctggcagcggcaagtcgttccttgccatgaacattgccatgagctttgccatcaagaaaaagagaatattggtgatagacggtgacctgcgtcacggctccacctcctcctacgtggattccccgaagactggtttaagtgattatctgggcaaccgtgtcagtgactggaaggagattatcgtgaaggatgaaaaatacgacaacctgcatatcattcctatcggtactgttcccccaaacccgacggaactgttggaggacggcaagctggccactttgatagaggtgcttcgcagcgagtatgactatatctttattgactgtccgcctatcgatatcgtggccgatgcgcagatcatcgagaaactggctgaccgcaccgtctttgtagtccgcagcggtttattggaccgtagcatgctgcccgaactagaaaatatttaccaggagaaacgtttcaagaacctcagcgtgatactgaacggtacagaaagtgccggaggccgctatggctatagatatggctatcgcaacggctactcttcctattatggaaataaaggaaaaatgggggggggtaaatggatggtcatcaagtgattgattttgcatgttatcgttctcgtaagaacttttaattttaactcaactatcatgtggccctttcgtaagacaataaccttcgcccggagcggtatcctgaaaggaatgaccgactgtcacagccatctccttccgggagtggatgacggagtgggaacattggatgaatcactccgaattctagatatgatggaaaagcatggagtcagaaaggtatggctcacgccgcacatcatggaggacatccctaatgaaactgtgaccttgcaggaaaagttccaagaattgaaacggagttataacggcacactggaacttgccttggctgcggaatacatgatggacaatctctttgaggaacggctggaaaaagatgacctgctgcccctagaggaggggaaacgttacctgttggtggaaacctcctatttcaatccaccaatggaactgctctctgtcctgcaacgcatccaaaagaaaggttattacccgttgcttgcacattcggaacggtatgaatatatgcagaagagggattatcaggccttgaaggaagagcatgtctccttccaactcaatttgccctcgttggccggaatgtacggaaaacatgtacaggaaaaggccgaagccctgctgaaagccggaatgtacgaccgtaccggttgtgacatccatgccataggctgttacaagacattggtcgcttcggcagtaaaatcggaagtcattggaaccttacagaaacaaagtgatcaatgattgcaaattttgcattgacgagccttgtaatccgaaaggatgaccgctggaacaggaacgtactgcgcatcttgaaacaaggtgaacaatatcagttcaatggctatggtgatgagtgcaggtcgcttgaaaggaatttctttgctgcgggggtgacaataagtgccattgtcggcaagaatggaagtggcggaagaaattatctggaaacgtaaggcatgggataagagctatatgaagatgatggaaaatcaatacgatgggatgaccataactccttcccttcagaaacgtatcatttttggttttctggagaatgacattcatctacgtccgttgactaaattgcaacaagacttgtacaatcaacaggatttggtataatctttaatcttagaataaaagacactgatatttttatatccaatgttgttatgcatggtttcactacggctcatgccataacagctatggctttggtccagacagtggtcggatacgaagctgcattaacaacattgacgataatcacgattgttcctctatcaaagattctgttgtccttcgtgtgaggaatggaacttcttcgtcatgcccccacaagtatgtcttaggtgaaatagaatagatgcgatcaggaaacctcttgattattagtcaaatgtatagtgctttgtgcttacgataaattataaacaatatacttttatgaatgttcatcttataagggaaaacgaaaatcaaaatgatggttcttatatccacttgtatcggaataaacagatcggtgcatggtgtgcatacggttattccgcatacggtttacgtctttttgataaacaacaaggctacatgaattttcgtagttactcagactgtcttcagatgccgtgtacggttacatccggagaatcccttgtttcattgttgcaaggttctgttgaggtaggttcacaaactgagacctatataaagttaaaaatggcagatacaataaattttaatgcttatcagaagtggttgcataagctgaaaaaggatgacccgaatgatgatgcaataattgtcaccacacatgtcagccaatatgtgccacgggacagtttcattcccgatggaatgtccgcatttgcgcgcaatgtaaagcgtatcggtgattttatcctgtcattgattgcattgatcattttttctccgctattcctgttttgctacattgccattcgcagggaagatggaggaagtgtcatcttcaagcaagaacgtatcggcagattcgggcgcccgttctacatatacaaattccgctccatgcgtctggatgccgagaagttcggaccgcagcttagtcataccgggggtgaaaatgattcccgattgactaagaccggtcgtttcatccgggcgcaccatttggatgaattaccccaactctacaatgttctgcgtggcgatatggcattcatcggtccacgtccggagcgtaagttttatatcgaccagatacttgaacacgacaagcgatatacttatctttaccaaatccgtccgggcgtaacatcatatgccacactatataacggctatacggatacgatggagaagatgctccgacgtttggaatatgacctttattatttaggacatcgctcatggtggttcgactttaaaattctgttgaacacattctgttcaattgtactcggaaagaaattttaaaagattaataacttatataacagattgataatgaaagcttgttttatgggcttggggtatatcggattgcccacagccattatcgccgccaagcacggcattcagattacaggagttgatattaacccccaggtagtggatatgacgaatgcaggacatctgcatatcattgagccgggtatggaggagatgttgcaggaggtggtgaatgccggctcgttgaaagcttccataaagccggaggtgagcgatgcttattttatggtagttcccaccccgttcaaaggaaatcatgaaccggacgttagttatgtggaagccgctacacgtgccgtattgccattattaaaggaaggcgacctttatgtcatcgagtccacttcacccgtaggcaccaccgaagcgatggcccgcctcattttcagcgaacgtcctgaattggaagataggatttatgtggcttattgtcccgaacgtgtattgccaggcaatgtgatttacgaactgatacataacgaccgggtcataggcggtttaaatcctgaatctaccgataaggccattggattttattctcaattcgtgcagggaacacttcatagaaccaactgtcgtactgctgaaatgtgcaaactgacggagaattccagtcgggatgtacaaatagcctttgcgaatgaactttccttgatttgtgacaaggccggtatcaatgtgtgggaacttatcaatcttgccaacaaacatccgcgggttagcatcttgcagcctggttgtggcgtgggaggtcattgtatagctattgacccttattttatcactgctgattttccagcagagagtaaattgattgccgatgcccgtgaaattaacaactacaaaagtttttggtgcgcagaaaaagtgaaaaatgccatgctggaatttgaactgaaacatcatcggaaaccgtgcgttgccatgatggggttggctttcaaaccgaatatcgacgatttgcgcgagagtcctgcaaaatatattaccacgaaagtgatgcagagttgcaataatgccaatatcctggttgtggaacccaatgtaaaggagcaccatgtgttcaagttaacagattacaaagaagcctacgacaaggcggacatcgtggtattccttacagcacacactccgttcaaagaattagaatggcgagaggataaggtgatattggacttttgtggaatatttaaaaaatagtgaatatatgaatattttagaactgacaggtatgaaatcgactaaatacggcggagtagaatcctacttcgctgaattggtcaagatatgccgtgttgataaatttatttttgtatacgagtcgatgccaatcagtgaaaactatgtaaatgacatcaataagtggggggggggtaatactttgtaaacaaagcatttccacatttcaatatttcaaatttgtgataggtgtcatcaaacgtgagaaaatagacattgttcattttcattttggaagttatcttattgcaccattcttgcgaattctgtttccccggattcggattatttcaacccgtcatagtgaaatctttgtttccaacaaacttaaaaaattatatctgaagttctgtttttttccttttgaaagattcctttgtgtcagttgtggcgtaaagaaagaaatgattgaaggcgtaggtttttcttcaaagagtgaagtcctatacttgggagtccggaaaaaaaagattgtcaacccaaatctgaaaaaaacattggacataccaaagggggtagtcgtgttgactacaatcggattcaatattcgtatcaagggattcgatatacttgtcaaaagtattcagagtctgatggactccaacagacttaaaaacgatataatagtgcttgtcatcggaattagcgaaaattctgaagacagtaatagcttgaggcaattgattgccgaggccgaattgaatagaaagattatgtctttgggaatacgaaatgacattaatgatattttgaatatttctgatatttacttgcagccttcccgtacagaaggactttctcttagtattatggaggccctaaactattcgttgcctgttattggtacacgagttgggggcattcctgaaatcgtacatgagggagaaaacggatatctttttgaaaaagagaatgttgaagagcttgctgacaggattgagatacttgtcaataatcgtgaagtccgagaaatgatgggtagaaaatcaaaagtaatatccagtcggttcacgcttgcagacggtgtggaaaagttagcttctatataccatcagaccaattgatttgcccctgacactctattgtcattcaggttgcaattgagattaaaaaatgtaggatagttataaatgcagtcatcaaacaaacgcatagcacacaacacgttaatgctttatatacggacattcgtaatgatgcccgtatctctatatacttccaggattatattggaagtgttgggagagaacgattttggagtatacaatgttgttggcggctttatcgcacttctgtcttttattaattccgcaatgacaaaagccacccaacgttttctgaacgtggaattgggaaaaggcaatcatgacagagtctcgagggtttattccatgagtcttctgatacattttgcaatagcggtatttatcggcttcgtattggaaactgtggggctctatttctttgaaacaaaattgaatattcctccggaaacacaagatgcagcacgggttgtgtaccatatttctgtagtgaccgcttgtcttcattttatcaggattcctgatgagtcgagcattattgcatatgagaggatgtcttttttcgcttatgtcagcatcattgaggtaatggcaaaattgggaacagtatttctccttttctgggctgaagacaatcgtctggtgttgtacgccgttgcccttatgaccgttgggatattgttgaatatcatttatgccatttattgcaagcgtaatttcacgacttgcagattccggttctattttgacagaaagctgctgaaagaaatgcttttcttttcttcatggagccttttcggcggtatagcccatgtcgcatccatacaaggcatatcaatacttttgaatatttttttcacggttgctgtcaatgcggcaatgggggtagcctcgcaagtgttcagtgctgtcaatactttggttacaaactttcagaaagcggtgcagccacagattgtccagtcctatttttcaggggataaatccagatttctggaacttgttttccgctcgtcaaaattctcgtatttcctgctctttttcgtcgcttatccgttgattttgatttgtcggcctgtcgtcgagttatggcttgtctgtgtccctcaatatacagtacagttcattcagctttatctcatcttcctgcttattgatgcattatccggaagtctttgggtgtcatctgaaacaataggcaatatagccaagtatcagtttaccgtttcttcgatgataattatgaatattccgattatatatatattgttcaagttcggttgcagtcccgtctatgcggtgattgtcagaattgccatcaatttcattactcactgttacagaatattctatctcaaacacaaagtgaatttcccggttaggaggtatgtcgtggaagtgatgtttaggtgtctttgggtgtcggtctgcatcattccggtcccattctttttgcataaatttctaacctcaagctggggtagccatatacttgtcgtattgaccagtcttatcatttccggacttgttatctataaattcggacttgatgctaaagaaagagggttcgtaatcagtacggtaacaaataaattcatgttcttaaaaaaacaataaaatgtagggaataaaggtggtggcaacagtatacaatacactccgttgcggtttgtatccttttaaacagcagcttgttacggggcttttggaattccttaatttggtcaaattgcaatgtttgttaccggcggttcgtttcatgcgctcgttttttcatatgccgttctttgctgtcaatagagataaggacaactgcatgattacttttctcgataatatcggtttgcagaaacgtactatcagtgaaacagataaagaggaaaaatacaaagaagttctttgggcagattatagtgctgcggatgtatttcttgcagaagaaaggaagaggaacttaaacttttgaaataatggaaagggacattcgtatagacatacttaaaggcatcggcataatccttgtcgtttggggacatgccaccgcaatccttataaaggaaatttgtattttccatatgcctttgtttttctttttggccggtatgttttatcatcccaaacaaggatttattcaatcaagagcaaaacggttgcttattccctttggggaatattctctgatattcgctgtattttattttagcatggggttgcagggaataccgcttgataaactgagcatccatcatatcgccgcatttgatggtccgttgtggttcttggtcgctcttttttatatatgtgtcatatattattttttggacaaaaccgttaaggaaaaaaacgttattcttatcgtttcttttgtaattgggctggctgtcgcatattccaagatcaatttgccgttttatatcgggcaggggctgttctctttgccattctatgctgtcggcaaatggatgaacgacaaagggctgacacaagcagagggggcaattaaaaaagcaaccgttattgctatagccggatatatcatagccatagcgttctgccgtttggcacattatcaatttgatatttcgcaactgaaattttccagtttcccgtttatattctatgccggagctttctgtgccatatatcttttgttgaatttcaagcctttcaacaagataacaactacaaacagaatattggcatctttgggagctaattcactcacgataatggctatacacgctccttttctgtggttgttcagggattttatcagaacaaacagtagcttttataacacaaaactgggggggggtaatttcaaacttaatcacttttgttatcttcataacattgagttatttaattgcccttggaatagaacaattaaaaaaactgacagctaaaaatcatggataatccgaaagtatcaatcattgtaccgatttatagagtagaggaatatattgagcggtgcgctgaatcgttgttcgcccaaacgtttgatgacattgaatacatctttgtggatgattgttctccagacaagtcggtggagatcttgcagagaactctggaaaaatatccgcatcgaaagaggctgacacgaattgagaggttgtcgtcgaacagcggcctgcnnnnnnnnnngacgacaagggattcaattggcctctggtgattacacggttcattgcgatagcgatgactggatggatgtgcatgccataaaggaactatatacttttgccctatccggccattacgatatggtcttttatgatttctatcgtagtgatggtgtttctacatatgcttccgccccgcgcaaggtttctaccaataataaagacttcctgatgtcatcattgctttgcgggcggttgatggggagcttgtgcggcgctttgatcaaacgtagtctttacgatgggataacatttccaaggcaaaatatgaacgaggatctggcgacgataatccaattggtttggaatagccggaatgtaggatacttgatgaaaccattttattactatttttttaatcctgcgtcaattacaagttatggcagtgctgagatccagattaataaactcaatcagcgtaaggagaatcttgatctgattttcacctttcttcgctccaaaggtatttatgaaaagtatacagacgagataaatgcgctgaaagttggttcaagaatgtatcttgatagatatatgctgatgccgcgaatccgtcggatttggcacaatacatatccggaaatcaacagtattacagtcattcgtcacagcaagatgcgtactctcagtaaaatcgagtatttcggttctttgcttggtgtatatcccatattcaaataccttaaaaatatatggaaagacttaaggaaatagatattatcaggacgttcgtaatcattctgctcgtgctctatcatgctcttgcgccctattgcggtggttgggatatgccttcctacgcccaacccaatgaaggattttattggggaggaaaactggcatacagtgggatgctggaaacttttgtcctgatttccgggtatgtatttgccttttcgctccaaaagaaagtcatttctttccgattattactagccggtaagctgaaacggctgtttgtaccgtgtatgtgttggggcattatcatgacattgatattctttggtccgtcaaaacttcttaatctggaacatttttggaaaattattgggggatacggacatctttggtttcttccgatgctcttttggtgctttttaatggaatatggcatacagcactgtctcaagggacgtaacttgatgttagtactcatgattattgctattctgccttggccgggaattccgttccgttttaatcaatcgctttattatctgctttttttccatcttggtggaattttctttagaaatcgtgagcggctgagaactgtcaattggtcaacaatatgcattttatcggctgtttatatggggttattcattgcggtaacattggttttgggaatggacgggatgcgtccggaactggcatcggacttgaaagtaaaagttttaatcctgtttgtccaccatactcttaaaatggtaagctatggattagtcacaattatctatgtcgctgtatttataaaactggaaaacagatgcaatggaaaactatacactgtatgccgaagtatcgcaatgaattcgatgggaatatatgtgatgcaagaaatagttctgagacttatctattatagaatgggggggggtatttttgtataccaaagagttaactccgttggtcgccttcgtgggcactttcatcgtctgctatgtatcaagtgtgattatagccggatgcaaatacaccaaatttctgtgttagtatgaatgtgtcctattttatttacctaataaattacaacgatgaaatatcattacgaggcagttccggtactgttcaatatacttctgttttttcttatgctgtatccgtttccgaatgtgtatagatatggctgtgaatttagaaaacgatatacagacatcttggattatgcagtatacggtgtcctgctgatactgttttgcactttcggctatgcggacaacgatttctatcactacgaggggcttttcaaacgtatctgttcaaccggattaaacgtgcatcttgaacccgtttactattggttgatacggaatgtcacttcaaactatctggtatggcggtttatagtgtggagcggaacggtgattttgtcgttatggacaataaaacggctcaaacttgatgtgaggataggattgctgatatttgtgctgttttatatcaacattatttcagtaatgcgcggaaatttgggaattgccatactgttttttggcttttcattcattatcaggccctctcataataggttattgtcattcctattcggttgtttgttgattttctgttcattcttctttcacaaaagtatgttgttttcgattgctgcactttcggtaacacctttttatctgaataggaaaacggtaaaaatcagtcttgtcatattccctttcctgaccgttgtgactactttactgctggattatattattatgaacggactcatcggttttgatatagcagacatgaatatagggagctcgatgacgggatatgcgagcggcacaatgcggcagtcgaatatttttggtaaactgaaccaaatgataacctatatgccggtatacgcatctttggctcttatgactaagaagatagtttttgaagaaattgatgttccacggtatataaaggcattgttcatctattggtatgcaataacttatattgccagtctgtttttcttccaagaaacttcggtatggctctttatacgtttcataatgatgagctattttcctctttgtattgttgtgggttattattattctaatttcaagatgacacgcgagaaaagaatcttgatgcttttggcaatccttcctatctgttataaacttttctatgccttctataagaggttggtatgggaagggtacgtctttttctgacatgtttcgttagtttacacgtattaggatcacaataaaaaaattaaaaaacaatctgaatgaaaatcttagaaataattcctcaacttagcagtggcggcggagagcggtttgtggttgacttgtgcaatgagttgtcgaaagaacatgatgtgacattgatggttttgcactcacttgacaaggtggatttctatttgaaagaggtatcgaataatgtaagggtggtatcgatgaacaaacggatgggacttgacatcggtttgttatttagagtatatagatatatccgtagagaaaagcctgatgtggtgcacacgcatttgcgtgctattatgtatattgctttcgcaatcatgcgaaagaatggcgttatgcactgtcatacagtgcataacgctgctgataaagaagccggaggctcctttatcagcagcggaatgcggaagttctgttttcatcatgggtggattacacccattaccatttccgccgaatcactacatagcttccgaaaatattatggaatggatgctcctatgattttcaatgggcgcaatgtggatgctggtatgcttgtttcagacgaggtcaaggaacaatttaaacagtatagacatacaaataagacgcgagtactgataagtctcgcacgtattgaccctgtgaaacggcaaactctcttggcacgtgtggtaatgcggttaaaacgggaaggatacgacctcactgtattgtttatcggaggtgaacgtgatgcacagatgaccgcggaattgcgttcgtacaacgatgaagcaatacaattacttggagaactgcacaatccgcttgaataccttaaaatgggagatgcttatgcactttgttcctcgtatgaggggatgcctatttcgttgatagaggctattggtgttggctgtataccggtatgcacacctgtgggcggtatagtagatgtggtacacaacggtgaaaacggttttctgagtgacggtatcggtgaagaatcttattacaaaacggtaaagagatttctatccctcaccgatgtacagcttaaagacatgaagcaaaaagctcttgccacttatggtccattcagtatgtacgaatgtgctcgcaactacgtaagacttttcgagaaaggaataaagaaatgaaacggaaaaaattactcgttgtaggctcaattcccgatgagagcaacttattgaattatggaggtgcgacggtgttgatgaaaaactatcttgactatctagcctctcagtctgaatatgaatataggtttgtacaaaacaaccggtattcaaatcttcgcactcgccagcgtagtatgtggcgcaattattcatactttttcccggcatttttgtggagactgtttgggtgcgatattgtaatgttcaatttttctgatcatggtacaatttattatttcccattattgagcaaaatagctcgtttggcacacaaaaaagtcgtactacgtaaattcggaggttcatttgagttctacataaagaaaattggtcaaacccaattacaacgggcacttgatgctatcagacaaacagacttgatattctttgaaacccaacagggtattacacacctacaacagttaataggaaagagtgacaatatacattggttccctaatgtgcgtaaagcttcaacaatacgaaagaacccctcagactttcatggcagatgtgttttcatgtcgcatatcaacaaagaaaaagggatagaagatcttatagcggtatccaaactgttaccttcgaattatacccttgatatatatggtgagataaaagaggataaatatcgcaatatcaacttcaacgaaagcggaataacataccatggggttgtctcttccgaacaggttttaaaaactttagtagaatatgatttactgctattaccttcttatcgcgagggctacccgggcattatcatcgaagctatgtctgtaggcattccttgcgtatcaacctatgcaggtggaatacctgaaatcgtagaagacggttacaatggtcgtttagtaattcccggtgatgtagatgcgataaaacaagctatcttatcgattaacgcaacaaactattctcaatattcagggaatgccttgaagaaatttgaagaagagtttgaatctgataagacgaataaacgcatacttgaaattataatgcactaaatcaaatggctaataatattcttattgtcaatacaattaaacatcttcggttaaaacaaatctattatcaattatattatagactattttctcataagttgatggaatataatgttccccggcaatcttcattgcggatggtctcagttatcgcaaagtggtattgttacaatgtacccaagacatttacattcctaaatcttataggggattttaagtcatggaatgatgttagtcatgggatgctttgggcatacaatctgaattatatggattggttgttgcaacctgacatgacttttgaacaaggttcagaatgggttgaacggtttataactgatttgccaacaaacaggatcggtcttgatccttatcctatcgcactgcgaagcatcaactggatcaagtttatcggcaggcatcataaaaaagtggagagcaatcggttgcaacggtggaacgattccctttatgcgcaatgtaaattgctcgaacggaaactggaataccaactgcttggcaaccatcttttagaagatgcttacgctttgtttatcgcttcaatttatttttccgataaaaaaatgtatgacaaggcatcctgtctgttgtataaagagcttgatgaacagattttgcctgatggctcacattacgagcaatcaccgatgtatcactgcattttgctcgataggttattggattgctataatgcctcgattaatagaggtcatgagaaaatgtgtgagcttttgaaactgtatgtggtaaggatgttggggcatttggagagcatcgtgtggaaagacgatacgattcccttacttaatgattcggcatatgggatagcaccgacagtttccgaattgagagcatacgccaaaagattgaagttggaat

SEQ ID NO: 102 - DNA, 18868 bp, unidentified
  source 1..18868: mol_type = unassigned DNA
tggtcttgtcaatgacatcctgcggcaggtcgtagttgctgtcggggttggccttcagccagtcgcggacgaactgcttgtcgaaggagggctggctgtgacccggctcgtagccctccagcggccagaagcgggaggagtccggggtcagcatctcgtcacccagcaccacgttgccgtcctcgtccagaccaaactcgaacttggtatcggcaatgatgatgccgcgggacagtgcatactcggcgcacttcttgtacagggcaatggtgtagtcccgcagcttggtggcgtactccagaccgtggccggggaacttcttctccagcacgtcgatgctctgctcgtaggagatgttctcgtcgtggtcgccgatctctgccttggtggagggggtgtagatgggctcgggcagcttatcggactcctgcaggccctcgggcagctggatgccgcacaccttgccggtcttctggtagcttgcccagccgctgccggtaatgtagccgcgcacgatgcactcgatgggcagcatggtcagcttgcggcacatcatgctgttgccggtgaactggggctggcggaagaactccggcatatcctgcacatccacgctcaacatgtggttgggcagcagatcgcgggtgtaatcgaaccagaacttgctcatctgggtgagcacggtgccctttttggtgaccttgtttttcaggatgacgtcaaacgcagaaatgcggtcggtggcaaccatgatcaggctgtcgccattgtcgtagatctcgcggactttgccttctttgatgggtttgaactcagtcataatcaaacactccatttttccatgttctcagcagcgcagcagcgcagcgcagttcttactctattattctaccatactgccgcgcggtttaaaaggaacagaataaaagaaaaacgggcaagttttgtgtttttatcgtgaaaagtgcgcaaaaaacagcaggaaatttcagcgttttgacgataaaagtcgtactttatccccaaatgcacgcacctttgcaaaatgcagtcatggacaagcgccgccggttgcggtatcatagtagtatgcgtatatctgcgctccgcaggggcgcaaaagtaaacaaggaggtaaagagtatgggcaaatttcccaagggctttttgtggggcggcgctaccgccgccaaccagtgcgagggtgcatggcaggcagacggcaagggtctggctacggtggatgtgacccccttcggcccggaccgtttcccggtggcaacgggctatatggaaatgctggattgcgatgacgcacatttctaccccagccacgaggccattgacctgtatcaccattataaagaggatatcgccctgtttgcagagatgggcttcaagtgcttccggctgtccattgcatggacccgcatcctgcccaacggcgatgacgctcagcccaacgaggcaggactggctttctacgacagcatttttgacgagtgccataagtacggcatcgagccgctggtcaccatctgccactttgacactcccattgccctcatcaaaaaatacggcggctggaaagaccgccgcatggtggacgcctacgtccactactgcgaggtgctgttcgaccgcttcaaaggcaaggtgaagtactggctcacctttaatgaaatcaacatgctgctgcacctgtcctttaccggcgcagggctggtgttccatcccggcgaaaatgtggagcaggtcaagtatcaggctgcccatcacgagctggtggccagcgcaaaggcggtaaagctggcgcacgaaaaaatgccggacgccatggtgggctgtatgctggcggcagggcagttctacccccgcacctgcgccccggaggatgtgcgggcggcgcaggaggccgaccgggacaactacttctttaccgatgtacaggtgcgcggcgcttaccccgtgtgggccaaaaagcggatggagcgcgccggggtgcagctgtgcacccagccggaggatgaccgcacgctgcgggagggcacggtggattttgtgtccttcagctactattccagccgctgcatcacggtggataaggagctgatggcggcagagaatgcggaaggcaacgccgtgtctgcatcggtgaagaacccctacctgaaagtcagcgagtggggctgggccatcgacccggtgggtctgcgggtgaccctgaacaccatctacgaccggtacgaaaagcccatgttcatcgtggagaacggtctgggtgcggtggataccgtagagccggacggctccatccacgacagctaccgcatcgactacctgcgggcgcacatcgaagagatggaaaaggccatcaacgaggacggtctgcccctgatgggctacaccacatgggggcccatcgaccttgtgagcgcctccaccggcgagatgaaaaagcggtacggctttatctatgtggacaaggacaacgacggcaacggcacccttgcccgcagccggaaggacagtttttactggtataaaaaggtcatcgcttcagacggcgaggacctgacctgagcaagcgccccggcactgtttgcggtatggcagcgccggggcgtaaacgtgtgaggacgaaccgataacggagaaaatttatgacaccacaaatcattgcacaccgcggtgcttcctatcttgcaccggaaaacaccctgacagcctttaaaaaagccatggagattggcgcggacggcgtagagatggacgtacagcagaccattgacgccgggcttgtgatccaccacgactatatgatcgatctgcacacggatatttccggcaagatctacgatatgaccatgggcgatctgaaagagctggattttggcagctggaaggatgccatctatcaggacgaaaagattgctaccttacaggaagccatggagctgtgcaagcagatgccggaatgcaccgtgcatctggagctgaaatctaccatggacaacgacccggactttgtgccccgggtgctggaagtgctgcagcagaccgagatggtagaacaggtgatccttgtttccttcaaccacgcgctgctgcggcaggcaaagcagctgatgcccgaactgcgggtgggtgcactggtatacggcgagctggaaagcatgctgctgccgccgcccatcatctggaaggatctgggactgaccaacggcatggaggacatggatgccatggacgctgccctgccggagagcgcagccgacgaggaaaactgtagctggatgacccgctggatgaccgataaggtaagtatgctgcgggcaaactttcccggcgaaagcctgaacgagatctacaaaaacctgatggcgcagcgggatctgcccggctatatccgcagtctggactttgtgccggagtgggtcagctgtgagtaccacaccgcctacaaaaacgccagtttcattgacaaactgcacgagatgggcatcaaggtgtctttgtggacggtggacacggaagattccgtccgcagcctgctgcgcaccagcgccgatgcctacatcaccaaccgccccgaccgtgtgcgggagtggatggaaaaggaacaggcagcgaccgccccaacagaaaccgccacggcagagtctgcccccgctgctgcggcagacgccgggacagctgccgcagagtaaaccgaccggaacagacacaaaaaaagagataggctttcccgaaagggatcgcctatctctttttgcattcattttattctgctgcgtcggtcagcacaaaggtcagctctgcggtgacggcgcacttgccgtccacccatgccgaggccttgcctacgcccacagcgccgtgctgctgcaccagctcgcagtggagggtgagcatgtccccgggggtgacctgtttgcggaagcgggcactcttgataccgccgaacagcgcaagcttgcccttgttttccggcaggctcagcgccgccacagcgccggtctgtgccagtgcttccagcagcagcacgccgggcatgaccggctgcgccgggaagtggccgttgaagaattcctcgttgcgggtgacgcacttgcggccgatggcccactgccccggctcgtagtccagaacacggtccacgagggcaaaggggtagcggtggggcaggatctccgcgatctgcacgctgttcagagtgttggcgttttcacgcacggtacggggctctgccatgggtcagccctcccatctgcgcagggcgatgcaggcgttgtggccgccaaagcccaagctgttgctcagcgcgtactgcatctcctgctgccgcccggtgttgggcacatagtccagatcgcactccgggtcgggctgggcgtagtggatggtgggcggggcgaactggtcccgcagtgccagcgcggtaaacacggcctcgatgccgcccgcgccgcccagcagatggccggtcatgctcttggtgctgaccacggtcatctccttggcgtgtgcgccgaacacggcgtggatggcggcagtctcgcaggcatcgttcatgtgggtgccggtgccgtgggcgttgatgtgatccacctgctccggtgcgatgtcggcatccaccaaggtcagcttcatgcagtcgatggcacctgcgccgccgggagccggagcggtaaagtgataggcatcgcagttggcaccgtagcccaccacctcggcatagatgtgtgcgccgcgtgctcttgcgtgctccagttcttccagcaccagcacaccgctgccctcacccatgacaaagccgccgcggcgggcgtcaaagggcaggctggcagcgtccgggtcggtggcggtagaaagtgccttcatgctggtaaagccgccgatgcccaaggggctgatgcagctttccgcgccgccgcagaccatcaccggctcgtagccgtcccggatgcggtggaaggcgtcgcctacggcgttggtgccgccggcgcaggccgtgaccgggcaggtgcacatgcccttcagaccgaagcggatggccacctgtgccgctgccatgttggcaatggccatgggcacaaagtagggacttaccttctccatacccttttcctcgccgcgggcgtgctgctcctcgatcgtgggcagaccgccgatgccgctggacaggatgacgccgatgtccttgccctcggcctcggtatcaaggccgctgtctgcaatggcttcggtggcagcgcccagtgccagcagggtgaagcgtgccattttgcggacttcctttttgtccaccacgctctcggggtcaaaatcctttacctcaccagccagcttgcacttgaagtcggtggtgtcgaactgggtgatggggccgatgccgcatttaccggcacgggctgctgcccagctgtcggccacattgttgcccagcgggttcaccgtgccaaggccggtgatcacaactctgcgtttttccataagggttctcctttacattgccatgccgccgtccacacagagcacctgcccggtgagatagctgctttgttctgcggcaaaaaacgccactgcctgtgccacatcctccggctggcctgcgcggcctgcggggatgccctgcgtcatgccggtgcgcaccgcctccggcagcacggcagtcatgtcggtgtcgataaagcccggcgctaccgcgttcacggtcacgttccgcgcggccagttcccgggcaaggctcttggtcagaccgatgagccccgccttgctggcggcgtagttggtctgcccggcgttgccccgcagcgccaccacgctggaaaggttcacgatgcggccatagcgctggcgcaccatgcggcgggcggcctccttgcagcagagaaaggcgcttttcaggttggtgtccagcaccgcgtcaaaatcctgctcggtcaggcgcaaaatcaggttgtcccgggtgatgcccgcgttgttcaccagcacatccacccggccaaaggcctcggcagcggcatcgaacagcgccttgcagccctcggcggtggatacatccgcctgcacggtcaccgcctgcacgccctcggcgcggcagagcgctgccgtctgctccgcaggctctgcgccgtggcagtagttcaccaccacgttgcagccctgctttgccagtgccacgcacactgcgcggccaatgccccggctgccgccggtaacaatggcggcgcgggtcagcttttcttcgctcattctgcttccttccatgcggtcagcaccgcatccagctgttccggggtctccactgcggtgcagaccaccccgggcagggtctttttcacaaaaccgctcagggcgctgccggggccgacttccagaatgtggtccacgcccagttcacccaagcggcgcagggtatcttccatgtagacgctgctctgcacctgctttaccagcagctgcgggatgctgtcggtctcggccttttcatgccccagacagttgaacagcaccggcgtctccatggtgccgaagttttcgcccgcaaagcgctgtgccagcgcatcccctgcgggagccatcagctttgtgtggaaggggccgctgaccttcagcgggatgcagcggcgggcaccggcttcctttgccagcgcggcagcctgctccacagcggctttttcgccgccgatgaccagctgccccgggcagttgtagttgcagatctgcacacagcccgccgcagcagcctgctcgcagcaggcagacagtttttctctgtccaatcccagcacggcggtcatgccgcaggcaaggccctttgcagcctcggccatggccttgccccggaaggcggtcaactcgatggcctgctttgcggtgaacaccccggctgcctgcagcgcggagtattcgcccagcgaaagccccgccagataggcgggttttacgcccttttcggccagcacggcggtcacgccgcaggcaaaggccaccatgcagggctgggtgtattcggtctgattcaaaacgccgtccgggtcctcaaagcagacgcggtgcagatcaaaatccagcgctgcgctgtcaaaggccgcccggaaggcgggagatgcttcgtaaaattccttgcccatgccggggtgctgcgcaccctgaccggcgtaaagtacggcaagcttcataagttctgcctccattcggtcacaagttcgtccatcagctcgcgcacggtgcgcatccggtcaagccgacccacgttttcgccgcagaagaagagtccttcctccacgttgcccttcaccgcctcgatgagggcgtgggtgatgcagtagggcacggcggcggggtcgcaggtcttgaggcaccgggcgcagtgcttgggcgggaagcgcttgccctcggccagcgcctgcaccagcggggtgttcagcgcacgaccgggcattcccaccgggctgtggatgatgcgcacatcctccggctttgccgccagcagcacgtccttgtaggtctgggaggcgtcgcactcgtaggtggggataaagcgggtggcaagctgcacgcccgcagcgccaagctttgtaaaatgtgccatgtcggcaccggtgtacacgccgcccgccacgaataccgggatggcgtggccgtattgctcctcgtagggttttacctcggccagcaccccgggcagaatctcgtccaaggtctggcagcggtcggccagcaggtcctcctcggcaaagccgagatgcccgcccgccttgcagccctcgatgaccacaaaatcggcggtgcggtcaaagccctttgcccagcggcgcaggatgagctttgccgcccgggcgctggacacgatgggtgcaatggctacttcttttgtgcccacgatgcccggcagctccagcggcagacccgcaccggagaccacggcatccacccccgccgccacggcggtgcggatagcctcgacatagtcccgggtggctaccatcgcattgatggctaccagacccatgcctccagctatggccttggccttttggatctctgcggtcagggcgcggtggtttgctgccgccgggtcacgggcaaaatccggctcgcggtagcctgcatcggcggtggagatgcaccccatgccgccgcaggctgctaccgcaccggccagcccgcccagcgagacgcctacgcccatgccgccctgcaaaatgggtacttgcaggggcttgccgccaagggtcagcattcggtgttcagcgcggcgatgcgctgcctcccgccctgccacaggtcggcaaggatgtcggccacggggcgcacctcgtgcagcattccggctacctgaccggccatcaggctgccgcttaccgtgtcgccctcaaagacggcacggcgcaggctgcccagcgtgtatttttccagctccatcttatcggcgcccgccttttcctgacggacatactcccggctcatgcggtttttcagcacacgcaccggtgcacccacggtgcgtccggtgacgatggtgtcactgtccccggctttgagcagcgcggccttgtagttggggtgaatggggcactcctcgcttgccagcaggcaggtgcccacctgcaccccgcaggcgcccagcgccagcgcagccgccagctgacggccatcggcaatgccgcctgcggcgatgaccggcacgctgaccgcgtccaccacctgcggcaccagtgccatggtggtcatctcgcccacatggccgccgctctcggtgccctcggcaatgacggcgtcaatgcccagcggctccaaatgccgtgccagcacggcagcagccaccaccggaatcaccttgataccggcagctttccacatggaaacgtattttcccgggttgcctgcgccggtggtgaccacggcgactttttcctccaccacgatctgggcaaactcatctgcctgcgggtgcatgagcatgatgtttacaccaaagggcttgtcggtcagctcccggcagcggcggatgttctggcgcagggtatcggcattcatgccgcccgcaccgatgatgcccagtgcaccggcgttggagcaggcggcggcgaactcgccggtggcaatgttggccatgccgccctgaatgatggggtatttcgtccccaggatctcgtttaaaagtttcatggtctttatcctttatattccacgatcatgccgccccatgtcaggccgccgccgaagccgatgcaggcaagggtctgtccggggtgcagctggccgctttcagccagctcgttcagcgccaccgggatgctggcagcactggtgttgccgtggcggtccatgtttttgtagaactttgcaccgtcggcgtgcagcgccttgacgcagtggtcgatgatgcggctgttggcctgatggcagaccacccagtccagattgtccagcgtaaggccggtctcgtccagcacggtgtgcaggcatttgggcagggcatccaccgcaaagcggaacactgccctgccgtccatgctgatgggtgccgagcctgcgcggctggggccgccggcatggatggcggcatcgccccgggcacccagcgtgatggcaaagggcgcggaggtgtcggtcagttcaaacactgccgcaccggcaccatcgccgaacagcacacaggtggagcggtcggcggggtccatcaggcgggagagcgcctctgtaccgatgaccagcgcgtactgcccgcccagcgtagccagcaggccgcgcgccaccgccgtgccgtacaaaaagccggaacaggcggcgttcacgtccagtgcagggcggttttccggcagtgccagcgccgcctgcacctgacaggccacgcttggggtggcgtccggtgcggaaagggtggcacagacgcagcaggcaatgtctgccggggcaaggccgctgcgctgcagcgcctgctttgcggcagcaatggccagtgtagcggcgttttcgccctcggtgcagtagtgccgggtgcggatgccggtgcgggtggtgatccactcgtcgctggtatccacggtgcggctcagctcttcgttggtgaccgtgcggccgggcaaagccccgccggtggcgatcagacgcaaacccttcatgctttcctcatttctccgatctgacggaatttctggtagcgctgctcggccagctgacggccgttcatgcgggcaaggctgcgcagctgacgctgcagtgcctcgtccagattgccgaacagtaccccgtgggcgcgctgtgcgccgcccaccggctccgggatgatctcctccacgatgccgtccttgtacagatcctgtgcggtcagcttcatgatctcgcaggcttcgccgctgcgggaggaatccttccacaggatgctggcaaagccctcggggctgagcaccgagtagacggcgttttccagcatgaggatgcggtttgccacacccagcgccagcgcgccgccggaggagccctcgccagtgaccactgcgatcaccggcacggtcaggccgctcatctccatcaggttgcgggcaatggcctcgccctgtccgcgctcctcggcgtccttgccggggtatgcgcccggggtgtcgatgaaggtaatgatgggacggtcaaatttttcggcctgcttcatcaggcgcagggccttgcggtagccctccggcccgggcataccgaagttgcagcgcaggttttcctccagcgtgctgcccttgcggtggccgatgaccgtgaccggctggccgtggaacagcgccacaccgcccagaatggcggcatcttccttgcactggcggtcgccgcactgctcaaagaagtcggtgaacagtgcatccacgatctcgtcgatgtgggggcgctccgggtggcgtgccagaaagaccctgtcctctgcggtcagtgccccgcagccggacagcaaagcgtcctcctgtgcggaaagctctgccagctcggcagcgtggttggtgatatcggtcatgttctcgtccgccgggtcgccgcgcagggcggcgatcttttcatccagcggtgcgagctgttgtaagatgtccttgatcataaggcgctccctcctcaggcgtgcagacgcagcagctgcgccagtgtttcgcgcatctcggtacggggcactaccttgtccacaaagccgtgctcgtactggaactcgctgcgctggaagcctgcgggcagcttttcgccgatggtctgttcaatgacccgggggcccgcaaaaccgatcagcgccccgggctcggccagcatgatatcgccaaggctggcaaagcttgcggtcacgccgccggtggtggggtgggtcagcacgctgatgtacagcccgccccgggcggagaaccgctcgatggcggcagaggtctttgccatctgcatcaggctgaagatgccctcctgcatccgggcgccgccactggccgagaagatgatcagcggcaggtgctttgcggtggcgtgctccacggcgcgggtgatcttttcgcccacggtggtgctcatgctgcccataaagaaccggctgtccagcactgcaactaccaccggggtgccctcgatgcgccccgtggcggtgatgacagcctccttcaggccggtcttgccggtctgtgcttccagcttttccgggtagccgggaaactgcagcacatcctgcggggcaaggtcggcatccagttcccggaagctgcccttatcaaggatgaggttcaggcggtagtacccgccgatgggcaggtgcaccccgcagttggggcagacgtactgtgccttgttccagatctggcgggtggcgcggcgtccgcactttttgcattccacgaactgcgggtcgttccacacggcacccgcatcccgccgggccttcagctggaaggtgcgctcccgcatgctgcccggcagcaggtctttgatactgttcatctcgtttcgcctcggtcagcctcagacatgggcattgatgtagttgaagatatcgcccacggtcttgaggtttgccagctcctcatcggggatggacacgccgcaggcctcttccagtgccatgttcagctccacagcgtccaggctgtcggcctccagatcctcggtcaggctggcctccatggtcaccttgtcctcatcgcagctcagggtatcgacaacgatcttcttcatttcctcgaaagtcatagtagtattctcctttatgttcactgtttgtttttaattatttacctaaaatttatgaggtatcgaacacgaccattataaccaaaccgtcggataagtcaatggttttagttaaaaatttttatcttttacattttcgacacagtttgcttcctttttatataggggcacccgaaaggcgcaaaaaggccgctgcacagtactttgtgcagcggcctttcccgcaataataatattattttcttattccagcccgatctgctgggcgtattcttccagcagttcccgctcaaggaagggggtcttgacgccctcgcggtcgcggtaggtctcgtgaccctttccgatgacggcgatcaggtctccctcctgtgcgtgatccactgcgtagtgcagggcgtccagacggtcggggatctccacgaacttcgcgtccgggttgcccttgttcatgccctcacggatatccgcaataatatcctccaccttttcaaagcggttgttgtcctcggtgaggatggaaaaatcagccatcttggcgcagatctcgcccatgccgtagcggcgcagcttggagcggttgccgccgcagccgaacaccaccaccagacggtggggcttgtaggcgcgcagagtggtaagcaagctctcggtggatacttcgttgtgggcgtagtccagcaggatggtgaactttttgctgatgggcacaagctccacacgtcccttcaccacgcacttgcccagaccgtcgtggatggcggcatccggcagacccagcaccttgcccacagccagtgcggccagcgcgttgtacacgctgaactcgccgggcatattcaccttgacgtccatctcgtccttgccggtaacgtggaaggcaacgcccagaaaatcgtgggtgcgcagcagttcgtagccggtctcgcggtagtcggccttttcatcgcggccataggtgaccagcttgcaggtgtggccttccagcagggcggcggtgttctcgtcgtcgatattcaccacgcccacatcgcagcgcttgaacagctgtcccttccagctgcggtactcctcaaaggtcttgtgctcgccggggccgatgtgatccggcgaaaggttggtgaacacgcccacatcgtagtgcacgcccgccacgcggtccatcatcaggccctgactggatacctccatcagcgcggtatcgcagccggcatccagaaactcccggaaggtcttttgcagctcgtagctttccggggtagtgttggcggtgtccttgtggcgtcccatatagtagatgccgttggtgccgatcatgcccaccttgcggcctgcggcctccagcacgcttttgatcatgtgggtggtggtggtcttgcccttggtgccggtgacgccgatcatggtcatctgccgggcagggttgccgaagaggttggcgctcatcaacgccatggcatagcggctgctctccaccttgaccacggtcaccccgggcagggtagaaaggtcgatatcgtgctggatgaccagcgcgctgattcccttggcggcgcagtcagcggcaaacgcgtggctgtcccgctgggtgcccacgatgcacacgaacaaaagccccggggcagccttgcggctgtcgtagatgatatccgcgatctcagtatccagactgccctgcacaagggtaaagggcacgccttccatcagttgttccagcttcatacagtctcctccaaagagcttctttacatggggttttcttcttcgttggccgtcatgcggtcagggtgggtcaggggcagctgctcggtgtccgtttcagccgccggttcggtggtgtcggcagtatccgtgctttctgcactgtcggtgctgtcggcggcgtcctctgccggggcgggttcctcggccttgggcggcaccacatagccggagggcagggtgggctcgccctgtgcaaaatagatcttgcgggtgctgctggcgctggtatggctgaaatccagccgcccggtatcggtggggccgcagcccttgccgtcggcgttggtcagcacatagcgggcgcggtccagcttataatccagatcgttcagcgtgcccagcagcacgctgatgcggtcctgatacaaaaatgcgagctgctcggtgtctgccacttccagccgtgtcacgtcctgcgacagaccgtattcctccagcttgctgcgcagtgtgcgcagcgcttccatacgggcggtctcggtgctcaccgtgctttcactttcggcggtttccgacccggaggcgcttgccgcgtccgcatcgtccacgaaccagaagccctgtcccggggtgctatcctgcagcttgccgccgtacagggtgcaaagcccctcgggctgggtgctttcctcggacaaaatcttccatttgtccgagattacaagccacttactgccgttttgcaccgcgtaggcgggcacggcctcggtcacctgcaccaccacggtgttggggtagtcccggatcaccttgatggagcccagcagcgggaagttctgctccagcaccgcggccttttcgccgggttcaaagctgaagatgttttcctccagctgcacgcccatccgctgcaaaatgctgtctgcggagtagccagcgatttcggtcacctgcttgccgtccggggtctgtacctgaatggagttgatgcggaacagcatggtcatggtcaggtagatgcccgcgccaataacgcacagcagcatggcaaaggcggtcaggcggcgcagcatccggcggcgccgcaatgtggcgcgggtcaccttgcgctttttgcgcatttcccgccgggcagggctttgctgcggggcgctctggctgcctgccgggtgctgccggttcgggcggttttgcgcgttctggtttttccggctgctctgcccgctgcgggcattgtttgccgggcggcgctgcttgccgccggacttcgcgttttttggtctgctgcccgccgggcggttaccggcgggatactgggtggtattgctcccctgcccctgcgccgggcggcggggctgggattgggtctgggtggggaactggatgctgttatctgcccgggaggagcgcacactgccgttggcgctgcgggagggcgggcggctgagcggctcgccgttgcggctgctgccggtgctccggggcgtatgatcctgcgaaggcgcagaggtgcgcgccacatcccggttcagatcatagggtctggtgttccggggtctgccgttgcggtcacggttctgctgcatcattcgcaccttctttcctgtttattccggggctgcatcacggagtctttaccagcttgagcagcgccgcagtgatgcggtccagactgtcgtccacagacaggctgcgggcgtttttgcccatctcggccagcttgccgggctgtgccagcatggcagaaacagtctgcaccagcttttcaccggtcaggtctttttcttcaatgaccacagccgccccggccttctgcagctccatggcgttgtagtactggtggttctccgccacattggggctggggatcagcacagcggcgcgtcccacggcctccagctcggccagcgtcagcgcaccggcgcggctgataacgaggtctgccgcagccagtagctccggcatattgttgatgtattcctttaccacaaggctgtcgccgggggcaaaatccttctgcttttgcagctgctcaaacagctgcaccccgtactgcccggtggcgtgcaggtgcagcaccggcttgtgctcatgctgttcccaggcgcacaggtctgccaccacctcgttgacccggcgtgcgcccaagctgccgccgaaggacaggatgacggtgcggtcgcccgcacccagctgtgcacggatggcctcgcggttggcggcctgtgcaaacacctccggccgcacggggttgcccaccacaagggtcttgtccggtgcacccagcttttccacggcggcgggcacggcggcaaacacgatatccacatccggggccagcagcttgttggtcacaccggggaaagcgttctgctcatgcagggcggtgtgaatgcccattttggcggcgcagcgcaccaccgggccggacacataaccgccgcagccgatgacgagatccggctttacttccttcatcatggccttggccttgggaccggagagggccagattccacagggtgatgatgttgcgcttgatgttgtgcagactgagcttgcgctgaaaaccggtgatctcgatgtggtggaaggggtagcccgcctgtgtgaccaaacggtactccatgccctccttacggcctgcaaagtggatctcggcggtagggtcggcctttttcagagcaccggcaatggccagtgcagggttgatatgtccggcggtgccgccggctgcgatgagaacacgcatggtgattcctccttataaacgcccggctacagaccgggcgggcttgcggtttgttttactgttctgtacgggctgcgcgggcagaggccaagtcaatggtcttgcgggcaagttctgcctcgcgctcggcgcgggcggcctcccgctgggcacgcatctgctcccgctgctgcgctgcccgctcgccgttgcggccgatgttcaccattacgcccatctctgccagcagcaggatcaggctggtaccgccggaggagaagaagggcaggctgatgccggtgttgggcagggtattggtgaccacggcgatgttgcagaacacctgccacgcgatctgtgccatgatgccgatgcccaccatggtgcagtacaggttctccgccttataggcgatgagcagcccctgcacgatgaacagcacgaacagcacgataatgagcactgcgccaatgaagcccagttcctcgcacaccacgctgaaaatgaagtcgttggtgctttccggcagccagagctgcttttccacgctgttgcccagccccagccccttcagtccgccggagccgatagcataaaggctctgcacggtctggtcggtcatctggctcagatcctgcgtccagccgtccagacgcttttgcaggtaggggatagagtccacatgggagagcagggtctccagcagggtgcccgccgtgatggcacccgcccatgtcagcacaccgccgctgccggacagcagcaggatggtgcccaccaccgccaccgtcagcacgatgccggacatgtgcggctccatcgccagcaggaggaccaccggtataaggggcagcaccggcaccaccagctgcttccatacccgcacccgcagccactcccggggggtaagcaggatgcggcgctccgggtccagccgctccacctgtggcgccttggctgcaagatgggaactgaacaggatcatttcaaactttgccacctccgaggattgcagcgtaaggcctgcaaagcggatccagcggcggcagccgttcaggggtgccatggtcagggtgacggccagcatggccagcacgatgaagtaccccggcaccaccatcttgcgcagaaaacggtgatccacatagcttatcaggaacatacagcccagccccagtatcatgcacagcgcctgctgcttgatgtagtggaagctgtcgcccatgcgcaggtaaccggtggtgtagctggcgctgaacagcatcaccaacccaaagatcataataacggccagcgtggccagccagtcgatcagcagccgggaccacgggcccgggtctcgctggaacaccggcaccggcgctctgtgttttttgcggttagtcgccatctgcgctcccttccctctctgtgcccggtcagcaccagcgcagcagcgccagcgccagtacatagccgacagcgctcagcgcaaagctgcacaggaacaccgtctccgggctcattttatgcttttttacccagcagcgcaagggcttgccggtgcgttttgcacccagcagctgcgctgccaaaagaccgcctgccgcccagaagggcagcgccagcggcacagtcaggctggtcatatccagactgagcgggatgcagccgatggcacccgcagcagcccacccccagccttgccggggggaacgcccacagccccagtgccaccagtgccccggcaagcgcggcgggcagcaccgccagcccgggcacgcccaagccggcctctgccatcatcagcgccagcatagccacaaaggccgcgccgcacaccgtaccctcgtcccgctcggcgatgcgggcacactcagccagcgccaccatgagcaccgcccacaaaaagggcacggcgctgcccagcagcacataccccgccccgggcacgcccagtccccggggcagacagcccgctgcccgcagcagcaaaagaacgaatgccgcggccagtgcctccagcaaaaggcggacgtcccgccgcagccccagcgccgccgggctgcgcatccgggcaaggtcctctgcaagacccaccgccccaaaggcaaggcttccggccagcgccgtgagcagccgcgtcatcagccgaccctcgctgcccagcagctccggctggcccacgcaggcggcaagccagcccacgcccaccgcagccaccgtgcccgccgccgcacac

SEQ ID NO: 103 - DNA, 10095 bp, unidentified
  source 1..10095: mol_type = unassigned DNA
atggatgacgaggcgttgattcaatataagaacgtagaaatccatcaacaggaactttgtgtattaagcgatgtaaatctggagctgcacaaaggagagttcgtctatttgatcggaaaagtaggctcgggaaaaacgagtttgctcaagactctgtatggcgaactggacgtaattgacggtgaagcggaagtgttgggttataacatgcgttctatcaaacgtaagcatatcccgcaactgcgtcggaaattaggcattgtctttcaggattttcagttgctcacagaccgtactgtatacaataatctggaatttgtacttcgtgccacaggctggaaaaacaaacaggaaatccaagatcgtattgaagaagtgcttcagctggtgggaatgtccaacaaaggttataagctcccgaacgagctttccggtggcgagcaacagcgcattgtgattgcacgtgccgtactcaattctcctgctattattctagcggatgaaccgaccggaaatctggacgtagagaccggtaaggccattgtagaattgttgcacaatatctgtgaatccggttcatccgtagtgatgacgacgcacaatttgcaattgctgaaagagtatccgggcagggtatatcgttgcgccgaccatcagattgtagatgtgacagccgaatacatgcccagacagagaacaatagaaatagatttaaatatagataactaaaacagtaacgaaaatgaaagttttaaagtttggaggaacttccgtaggttctgctcagcgcatgaaggaagtagccaaattgattaccgatggtgaacagaagattgttgttctttctgctatgtcaggaacaacaaacacattggtggaaatttcggactatctgtataagaagaatccggagggtgccaacgagattatcaataagctggaagctaaatataaacagcacattgatgagctttttgcaacccaggaatataaacagaaaggtcttgaagttgtcaaatcccacttcgactacatccgctcctatactaaagaccttttcactttgttcgaagagaaagtggttttggcacagggagagcttatttctacggcgatggtaaacttctacctgcaggaatgtggcgtgaagtccgtgttgcttccggctttggaattcatgcgtactgacaagaacgcagaaccggatcctgtatatattaaggataaattgcgcgcacagctcgatctctatccggatacagaaatctacattacgcaaggtttcatctgccgcaatgcctacggtgagatagacaatctgcaacgtggtggtagtgactacactgcttctctgatcggagccgcagtaaacgcttccgaaatccagatttggacagatatcgacggtatgcacaataacgacccgcgtattgttgacaagaccgctccggttcgtcaacttcacttcgaagaagcagccgagttggcttacttcggtgcaaaaatcctgcaccctacctgtatccagcctgctaaatatgccaatatccctgttcgtctgttgaacacaatggatccggaagctccgggcacactgatttccaacgacacggaaaaaggtaaaatcaaggcagtagccgcaaaagaaaacattactgcgatcaagatcaaatccagccgtatgttattggctcacggtttcctgcgtaaggtattcgaaatcttcgaaagctatcagacgtctatcgacatgatctgtacttcagaggtaggtgtatctgtaacaatcgataacacgaagcatctgaacgagattctggatgacttgaagaaatacggaactgtaaccgttgataaagagatgtgtatcatctgcgttgtaggtgaccttgaatgggaaaatgtcggttttgaagcgaaagctcttgatgcgatgcggaatataccggtgcgaatgatctcgttcggaggaagtaactacaatatttccttcctcattcgggagtgcgataagaaagtagctttacagtcgttgagtgatatgcttttcaacgacaaataaatccacaaataacacgagcgcttttaccgaactgataaaagcgctcttttttaaccaactaaacaagtttttcgaattatgaagggaatatttccaatcgataaattccgcactttgcagacacctttctattattacgataccaaagtgctgcgtgatacattgtcggctattaaccaggaggttgccaaatatcctaattattcagtgcattacgctgttaaagccaatgccaacccgaaagtacttaccattatccgtgagagcggaatgggagccgattgtgtgagcggcggagaaatccgtgccgctatccgtgccggattccctgccgataaagttgttttcgcaggagtcggcaaagcagattgggaaatcaatctcggactggagtatggcatcttctgtttcaatgtcgagtctatccccgaattggaagtaatcaatgaattggctgccgctcaaaataagattgctaatgttgctttccgtatcaatcccgatgtcggcgcacatacacatgccaatataactaccggtttggcagaaaacaaattcggtatcagtatgcaggacatggacaaggtgatagacgtagcacaagagatgaaaaacgtaaagtttatcggtcttcacttccacattggctcgcagattctggatatgggtgattttgtagccctctgcaatcgtgtcaatgagttgcaggacaaactggaagcacgaagaattttggtagaacatatcaatgtaggtggtggtttgggtattgattacggacacccaaaccgtcaggctgttccgaatttcaaggattactttgctacctatgccggacaattgaaattgcgtccttatcagacactgcattttgaactgggacgtgcagtggtaggtcagtgtggttctttgatatccaaagtcctctatgtaaaacaaggaacacggaagaaatttgccatccttgatgcaggtatgaccgacctgatccgtccggctttgtatcaggcattccataaaatggaaaatataacttctgaagaaccattggaagcctacgatgtagtaggaccgatctgtgaatcgtcagacgttttcggaaaagcgattgacttgaacaaagtgaagcgtggtgacttgatcgcccttcgttctgccggtgcgtacggtgaaataatggcttccggatataactgtcgtgaactgccgaaaggatatacttccgacgaattggtgtaagtaaaaaatgaactgctataatcaaaatgtgaatgtagtttaaaaatatagggtgcatggaacaattttaactgaaagcgtgttatttttgtaatgagttcaaaaagaaactacattaacaacttaataaaaaaatacgattatgatttcagaaaaattacagaatgcaattaacgaacagattactgctgaaatgtggtctgctaacctgtatttagcaatgtctttctattttgagaaagaaggtttcagtggttttgctcattggatgaaaaaacaatcccaggaagaaatgggacatgcttatgcaatggcagattatatcatcaaacgtggaggaactgctaaagtggataaaatagatgttgttcctaacggatggggtacacctctcgaagtattcgaacacgtttacaaacatgaatgtcatgtttctcaattggtagacaagctggtagacgtagcagctgctgaaaaggataaagcaacacaggatttcttgtggggatttgttcgtgaacaggtagaagaagaagctacagcgcaaggcattgttgataaaatcaagaaagccggtgatactggaattttctttgtagattcacaattgggacagcgttaatgatgctactctgaaaaaatagttctttatatagaaagaagctactcgaaatttcttcaagtagcttcttttttttcacttatttggctcgtatctggaaataaactacctttgtattaagagtcagagagaaattaatcccgattattataaatgaatggtgtgaatagaggaatttttagattgctccctatatttttattgctctttttgggggtgagcagttgttctcaaaaagaggaacggcgtattttagttatccactcttatgaggagacttacgcggcttatccggaatttaaccggatgatagcggagcaatttgagaaagagaaaatagatgctgatatccgtaccgtttatttagattgtgagtcctattgggaagaaccggagttggaacgaatgcgttttctggttgattccgtttcgaaagactggcggccggaagtgattctggtgaatgaagaccaggctacctattcattgatgaaatgtggggtgcagttgggcaaagaagtacctgtggtttttggtggtgtcaattacccgaattggggattgctgaaacgccatcctaatgtgacgggtttccatgataagatcgcctttaatgaaaatgtcagtgtggcaaaagaacttttcggtgaacacgtccggttgtttaccatgctcgataccacttatatcgataaacaaatcagaagagatgcaaaggaacagtttaaaggtcataaagtgaccggattcattgataaccccgaactttctcctgaagaacagatacgtttgacgcaggaagaaggttatactcgtttcatggctattcctttgcgtaatgccagaaatcattcggatgccacctttatgtgggtgttgaacagaagctatcgcgatcaatgttatattcagctgaaacgtgattatactaccattaatattggaagcatttgtggtagtcccagcttgacagctatcaatgaagccttcgggtttggtgagaagttgctgggtggatacatcacttcgttgcctattcaggtggaagaagaggtgaaagcagccgttcgtatattacacggtgcgagtccggcggacatgcctattgttgaaagccggaaagagtatgttgttgattggaatacaatgacgcaaataggtttgagtaaggaaagtattcctgctaaatatcgtattatcaatattccgtttagtgataaataccctttgttgtggggaatttcagtcgcatcgttcattcttgtattaattattcttttcgcttctctttggtggctataccttcgggaacagatgaggaaaaagcaggctcttatagcattggctgatgaaaaagaaacattgtcattagccattgagggtggaatgacgtatgcctggagattggataacggttgttttgtttttgaagatgcattctgggcgtcgcaagggttaaatcccagacaactttcgtttaaggaattcatgagctttatccatcccgaccattgggaaggagtgaagttcaactggcgaaatctgaaaagtgctcataaaaagattgtgcaggagctttgtaacttcgacggcaaaggctatcagtggtgggagttccgttataccaccaaacagctacccggaggcgaatataaaactgcaggtttgttgcttaatatacaggatataaaagatcgtgaagaagaattggaagcagcacgcttattggctgaaaaggcggaattgaaacaatcattcctcgcaaatatgagccatgagatacgtactccgcttaattcaatcgttggctttgccaatatactggcattggaagatggattgagttccgcagaacgcgaagagtacatcagtactattaacaagaacagtgagttgttactcaaactgattaatgatatcttggaactttcccgtatcgaatcaggatatatgtctttctcattcaagagatgcaaggtgagagagttgattgacgatatctatatgacacatcaggttctgattgctccacatttggaattcctgaaagaagtggataatacacctttggaaatcaatgtggacagagagcgcttgatacaagtcctgacaaactttctgaataatgctggtaagtttacggaaaccggatatatcaaattaggatatagttatctgccggatgaaggcaaagtgcagatttatgtagaagataccggaagagggattccacgagaagaacaacggatgattttcagccgtttctacaaacaaaacgaattttcgcagggagcaggattggggctttctatttgtcaggtgattatagagaagctgggtggaaagatcgaactcaagtccgaagtaggcaagggaagccgttttacggttattcttccttgtcgggtggtatcttgataatgatagactttaacgggaatacgaacaatcttatttcttgtgtttccctttctccatcgttcccaggtaaatctccagtgaacgggtggaaatctgtatttcgcggaaagatacgcctaaagaagctatcagcagaatcaatgccaatccgaatacataagcagagaataattgaagcccgatataaataaggaacatgctgactacacagaaaaaaaggcttgcaatacctagtccttgcatcctacgggtcaggttcaaccgtttccgtagattctcgatttgcgcttcagtgatatccgaagggttttccatgtagcggtcacgcagttgacgcacaagttgggcatacgataagaaacggttggtataagccagcaatatcaatgaaactgccgagaaaagtagggcaggagtagtgagagtcaattcttccataatcttttttttatagtcaagtagcggttcaaaattcattttataaaagagaattttttggcacgggttacacggatttcacggttttcacggttttagaaatatgcttgcataaagcagcagcgtaatctgtgtaatccgtgcctaaaaatggatgctgcaagtaaaccttgccccggagttattccgctttcagcacattaagctctttgcctaccttgataaaggcagcgatgcacttgtcaagatgtgctttctcgtgtcctgcagagatttgcacacggatgcgtgcctgatctttcggcactaccggataatagaaacctgtcacatagatgccttcctcctgcatacgtgcagcgtaaatctgggacaacttcgcgtcatacaacataacggcacagatagcgctttgtgtcggtttgatatcaaatccggcagccgtcatcttatcacggaagtagtttacattctcaacgagtttatcatgtaatgcattgctctctttcagcattttgaaaacttcaaggctggcaccaatgatgcccggagccaaagaattcgagaacagatacgggcggctgcgttgacgaagcaaatcgataatctctttacgaccggtggtgaaacctcccagtgcaccgccaaaagccttacctaatgttccggtataaatatctacccgtccatgagtcttatacaactcgcttactccatgccctgtggcacctaccacaccggcagagtgtgactcgtccaccattaccagtgcatcgtatttctcggcaagatcgcaaatctgatccatcggagctacattgccgtccatagagaacacaccgtccgtcacaacaatacggaaacgttgtgcctgcgcttcttgcagacatctttccaagtccttcatgtcagcgttggcataacggtagcgctttgccttgcaaagacgtactccgtcaatgatagaagcatggttcagagaatccgagatgatggcatcctcttcagagaaaagcggttcgaatacaccgccgttagcatcgaagcaagcggcgtacaagatcgtgtcttccgtctggaaatattccgagatggcagcttccagttctttgtgtatatcttgcgttccacaaatgaagcggacggacgacattccgtagccacggttattcatcatttcctgcgaagccttaatcaatcgcgggtgattggataatcctaagtaattatttgcgcagaagttcagcacttccttaccttttacagtgatggcagcttgctgcgcactttcaatcagtcgttcttctttataaagtccggcttccttgatttcagccaatgtttggcagagatattcttgcattttaccgtacatagtgtttgggtgattaagttatattgcaaaggacacaatttttcttggaataacaatgtctttttgattaaaatctgaaaaaaaagtgcttactttgcgcactatttaagcttgatattctaagtcagaagaaaaaatggaacacattttgattattggagctaccggacagatagggtcggagctaacgatggagctacgtaaacgttacggaaatgcaaatgtagtagcaggttatattccgggtgcagaacctaaaggggaattaaaggagtccggaccgtcggcaattgctgatgtaacggatggagaagcgatcgcatctgtggtaaaagagtatcacatcgatacaatctataatttggctgctctgctgtccgtagttgccgagtcgaaacccaagctggcctggaaaataggtatcgatggattatggaatgtattggaagtggcacgcgaacaaggatgtgcagtgtttactccgagttctatcggttcgtttggcgctagtacgcctcatacgaaaacaccgcaggacactattcagcgtccgcgcaccatgtatggagtcaccaaggtaacgaccgagttgctaagtgactactattttaataaatatggtgttgatacccgtgctgtccgttttccgggcattatttcgaatgtgacccctccgggaggaggtacgaccgattatgctgtcgatatttattactcggcggtgaaaggagaaaaatttgtgtgccccattaagcaaggcactttgatggatatgatgtacatgccggatgcgctgaacgcagcaattatgctgatggaagctgatccgacaaaattgatacaccgaaatgctttcaatatcgcctcgatgagtttcgacccggagacgatttatcaggctatcaggaagcatgtgccgcagtttgagatgatctatgatatagatcctttgaaacagcgcattgccgatagctggcccgatagtctggatgacacctgcgctcgtgaagagtggggctggaagccggcctacgatttggaaagcatgacggtagatatgcttgaaaagttaagagagaaactaaaataatgaaaaaactaattgtaggggtcatgttgctcggtatactgggtgcttgtggaaacaagaaaacaaacattgaccccttcgcatctatcacaaaagaagtggattctatccggcgggtagccgattctattcactgtgatgaatcgccggaagatccgcaacctatacaggcagatgaatctttcgatgattttatctacaattttgcttccgatgacgtgttgcagcgtcagcgtgtgaaatttccgttgccttactacaatggagataaaaaaacgaatatcgaggagcataactggaagcatgatgacttgtttaccaaacagcattattatacgcttctgtttgatagagaagaagatatggatttagtaggagatacctccctcacttccgtacaggtagaatgggtgtttgtgaaaacacgaatggtaaagaaatactattttgagcgtatcaaaggtgcatggatgctggaggcaattaatctgcgtcccattaagcaaaatgataatgaaaatttcgtggagtttttcggacactttgccgcagatagtctttttcagagtaagcgtgtgtgtgagcctctggcttttgtaaccaccgatccggacgatgatttctctattctggagaccaccctcgatcttaatcagtggttcgcttttaaaccgggacttcctgccgatcgtctttctaatatcaattacgggcagcggaatgacgatgattcgccaacgaaaattctggcgttgaaaggtatcggtaatggtttttctaatatcctctatttccgtcgcaaagccggagaatgggaattgtataagtttgaagatacaagcatttga

SEQ ID NO: 104 - DNA, 12128 bp, unidentified
  source 1..12128: mol_type = unassigned DNA
ccgatggtactgcgtaacagtgggagagtaggtagccgccgttttttatgaagcctcgcttgtctatttgacgggcgaggctttctgtttttaactgtttggaaaaacgacagcggattttaacgcttataaacctcataatacctattaaaaaagtgaatatttactgataatttgtatgttatgaggatatttatttgtatctttgtcgcccgaattgtaagctaacgatttaaaaaagagagaagctttgggaaaatttgataaatacaaaattgacttgaaaggtatgcaggcagactctgctaagtatgagtttgtgttggataacctttacttcgctcacattgatggtcctgaagttcagaaaggaaaggtgaatgttacattgaccgtaaaaagaacctctcgtgctttcgagctgagttttcagacggatggaatggtatgggtaccatgcgaccgttgtctggatgatatggagttgcctatcagctcttctgataagctgatggtgaaatttggacatgaatatgcggaggagggagataaccttatcgtgattcccgaagaggaaggagaaatcaacgtagcatggttcatgtatgagtttattgcgctcgctattccgatgaagcatatacatgctcccggtaagtgcaataaagcaatgactagtaaattgaataagcatttgaagacaaatgcgaatgaggatagcgatgtagatgacagcttcgatgcaggtggtggcgaagacatcgtaatagaggaagaagtggaggaacaaatcgatcctcgctggaatgaattaaaaaaaatattagataataattaaagttttaagaaaatggcacatcctaagagaagacaatcaagtacgagacaagcgaagagaagaactcacgataaggcggtagctcctacattggctatctgtccgaattgcggtgaatggcatgtttaccacactgtatgtggcgcttgcggttattacagaggtaagcttgctatcgagaaagaagcagctgtataattagtacagtcatactgaaaacagcctgagggtaaatctctccggctgctttaagtattatagtattgctaatttaaaataggtttgatggaaaaaataaatgcagtaatcacaggagtcggtggatacgttccggattatatcttgactaacgacgagatatcaaagatggtggataccaacgacgaatggattatgactcgtattggagtaaaagaaagacacattctgaatgaggaaggattaggcagttcgtatatggcgcgtaaggctgccaaacagttgatgaaaaaaactggcgccaatcctgatgatattgatttggttgttgttgctactagtactcctgactatcacttcccttctacagcttctattctttgcgataaactcggactgaaaaatgcatttgctttcgacttgcaggctgcttgtagcggttttctctatttgatggagacggctgcgaattttattcgttcgggaagatataagaaaattatcatcgtcggtgccgataagatgtcgtcgatggtcaactatacagatcgtgctacctgtcctatctttggtgacggtgctgccgcttttatggtggagccgactacggaagatgtgggtattatggattcgatactgagaacggatggtaaaggattgcctttcctacacatgaaagccggcgggtcggtttgtcctccgtcttatttcacagtagacaataaaatgcattatctgcatcaggaaggaagaacagtgttcaaatatgctgtttccagtatgtcggatgtttctgctgcaatcgcggaaaagaatggactgacaaaagataatatcgactggattgtgccgcatcaggcaaatgtccgtatcatcgaggcagtagcccatcgcatggaagtgccgatggataaagtgctggtaaatatcgaacattacggtaacactagtgccggtacgcttcctttgtgtatttgggattttgaggataaactcaagaaaggcgataacatcatcttcactgcattcggcgccggatttacatggggtgcggtatacgtgaagtggggttatgacggaaagaaggaataagtacaaaagttactgaactataacactcaaaaacgcatcctatttcgattcgatgcgtttttttgtctcaaccaataaaatgaagagaaatgcataaagctggttttgtgaatatcgtaggaaatccgaatgtcggaaaatcgacattaatgaatgctttggtgggtgaacgtatttcgatcgctaccttcaaagcgcagactactcgtcaccggattatgggaatctataatacggatgagatgcagatagttttttctgatactccgggagtattgaaacctaattacaaacttcaggagtctatgttgaacttttctacttcggcattgacggatgcggatatcttgctttatgtgacggatgtggtagagacgccggataagaataatgagtttatggcaaaggtgcgtcagatgacggtgcctgtattgttgctcattaacaagattgaccttaccgaccaggagaagctggtcaagttggtggaggattggaaggaactgcttccgcaggccgagattattccgatttccgcagcttctaagttcaacgtggattacgtgatgaagaggatcaaggaattgttgccggattcccctccttatttcgggaaggaccagtggacggacaaacctgcccgtttctttgtgaacgagattatccgggaaaagattttgttgtattacgacaaggagattccctattcggtagaggtggctgtggaagaattcaaggaagaagccaagaagattcatatacgggcagtcatctatgtggaacgtgaatcgcagaagggaattatcatcggcaaacagggaaaggcgttgaaaaaggttgctactgaggctcgccgtgaattggagcgtttcttcggaaagacaatcttcttggagacgtatgtgaaagttgataaggattggcgcagttcggataaagagttgcgtaattttggttatcagttagattaagagtattcatgcgactgtgatagtcgtgaaaaacaaggtattgaactatgggaaatttagttgcaattgtaggacgccccaatgtgggcaagtctaccttatttaaccgtctgacgaagactcgtcaggctattgtgaatgaagctgcggggacgacccgcgacagacaatatggtaagtctgagtggctgggccgtgagttttcggtggtggacaccggaggatgggtggtaaactcggatgatatctttgaagaagagattcgtaaacaagtattgctggctgtagaagaagcggatgttattctgtttgtagtggatgtgatgaacggagtgactgatttggatatgcaggtagcagctatcttgcgccgtgcgaaaagtccggtgataatggttgccaacaagacggataatcatgaattacaatataatgctccggaattctataaattgggattgggggatccgtattgtgtttctgccataaccggaagtggaactggtgatttgatggatttgattgtcagtaaattcaagaaagaaacgtcggagattctggatgatgatattccccgttttgcagtggtaggccgtccgaacgccggtaagtcttctattgtgaatgcttttatcggtgaagaccgtaatatcgtgacagagattgcgggaacgacccgcgattctatttatacccgttacaataagttcggctttgatttttatctggtagatacggccggtatccgtaaaaagagcaaggtcaatgaggatttggaatattactcggttattcgttctattcgtgccatcgaaggttcggatgtgtgtattctgatgctggatgctacaagaggtatagaaagccaggacttgaatatattctctttgattcagaagaaccagaaaggactggtagtggtaatcaataaatgggatttggtggaggataaatcagtgaaagtacagaaaacatttgaggaagctgtccgttcgcgttttgctccgtttgtcgatttcccgattatttttgcttcggcgctgactaaacagcgtatcctgaaagtgcttgaagaagcccgtaacgtatacgagaaccgtacaacaaagataccgaccgcccgtctgaatgaagaaatgcttccgttgatcgaggcatatccacctccttcaaataaaggtaagtatatcaagattaaatatatcacacagttgccgaatacgcaagtaccttcatttgtctattttgccaacttgcctcagtacgtgaaggagccttacaaacgtttcttggaaaacaaaatgcgcgaaaagtggaatctgacaggcacaccgattaatatctatatccgtcagaaataagactcaccacagaggacacagagaacgcagaggtttaatataaaaagcaaccgactcttatgaatcggttgcttttttatgattggagatattatgagatactcaccgaatcatttttgattatttcggataaatccattatttccctctgtgtcctctgcgtcctctgtggtgaacctatttttccaattggaaatctttgcggcgtagtacgaaactattactcaagtacttttcacgcacaatctggttctccgacaattcttccggcgtgccttgaaaaagaatctttccttcaaacagtagataggcgcggtcggtaatgctaagtgtttcctgtacgttatggtcggtaatcaggataccgatatttttatctttcagtttccatacaatctgttggatgtcttctacagcaatcgggtcgacaccggcaaatggttcgtcaagcatgatgaatttagggtcaatggcaaggcaacgtgcgatttccgtacgacggcgttcgccaccggacagctggttacccttgttcttgcgcaccttttgcagacggaattctgctatcagactttcgagcttttccttctgatactctttaggcttgttggtcatctcgagcacagcagcaatattgtcttccacactcatctggcggaatacggaggcttcctgtgcaaggtatccgattcccgtttgtgcccgtttgtaaactggatatttggtaatctccaagtcgtcgaggaagatacggccttcattaggggtaatcaacccgacggtcatatagaatgaagtcgtcttaccggcaccattcggtcccagcaaacctacaatctcaccttgcttcacattgatggaaacgtggctcacaacggttcgtttaccgtacttcttaaccaggtcttccgtgcggagcaccatcttgctttcttccatattctagttattttgcggcaaatgtagtaaaaataagctgaaataatgtacatttgcagacaaatagtgtgagttatgataaaagcattgagaaccgtcggaagatattttatgctgatggggcggactttttcccgtcccgagcggatgcgtatgtttttccggcaatacctaaacgagttggagcagctaggtgtaaactccatcggtatcgtcctgctgatttcgtttttcatcggcgcggtgattaccattcagattaagttgaatatcgaaagtccgtggatgccccgttggacagtgggatatgtgacacgtgagattatgttgttggagttttcttcttctatcatgtgtctgattcttgcgggaaaggtcggatcgaatattgcttcggaactgggaaccatgcgggtgacacagcagatcgacgcgcttgaaatcatgggagtcaattcggccaattatctgatattgcctaaaattacagcaatggtgactgttattcctatattggtgacgttcagtatttttgccgggattatcggtgctttttgtacctgttggtttgccggtgtgatgaatgccgtcgatctggaatatggtttgcaatatatgtttaacgaatggtttatctgggcgggtatcatcaaatctctcttcttcgcctttatcattgcaagtgtatccgctttcttcggatatacggtggatggtggttcgattgctgtgggaaaagcctcgacggattccgtagtatccagcagtgtgttgattttgtttgcggacttggtattaactaaacttttgatgggatgattgatattaaaggactttataaatcatttgatgacaaaacagtattgagtgatatcaatgcaacttttgagaacggaaagacgaacttgattatcggtcagagtggttccggaaagacggtgttgatgaaatgtattgtggggttgctcacaccggagaaaggggaggtcttgtatgacggacgtaaccttgtgctgatggggaagaaagagaaaaagatgcttcgcaaggagatgggaatgatcttccagagtgcggctcttttcgattccatgtcggtgttggataatgtgatgtttcctttgaatatgtttagcaacgatacgttgcgcgaccgtaccaaacgggctatgttctgcctggatcgtgtcaacctgtccgaagcgaaagacaagtatcccggagaaatcagtggaggtatgcagaaacgtgtagctattgcacgtgctatttctttgaatccgcaatatttgttctgcgacgagccgaactcgggactagacccgaaaacctcattggtgattgatgacttgattcatgacatcactcaggaatataatatgaccaccattattaatacgcatgacatgaattccgttttgggaatcggtgagaaggtgatttatatttatgaaggtcacaaggagtgggaagggacgaaagacgatatcttcacttctaccaacgaacgtctgaataactttattttcgcctcagacttgcttcgtaaggtgaaggagctggaagtacagaatatggaaggctgattatatataggcaataaaaaaacttctgtcatcgggtggcagaagtttcttttttcttagctatgtagcgtcggcatttaagctttaggtctagcttctttaactaccatggtgcggcccatgtactcagctccgttcaattcagcgatagctttagcagctgcagcatcgtcttccatttcgatgaaagcgaatcctttggatttaccggtttcacggtccataacaactttaactgatgatactgctccgtaatcttccatcacttgttgcagatctccttccttaacgcggtagttaaggtttccaacataaatgttcataatgaaaatgataaaaaataaataaatgaataaaactctctggatagatggttactaataaaaggattaaaacgacagagagtttacaaatgcgtttttagaacggaagtaaaaaacttgtaatcaaatcgagaaactaatggtccatcaatccgcagcaaagaaaagcataatttttggattgaccatctttttgtaggttttatttgtgaaaaatgagaaaaaaagataccgaaggtttcaaagaagccctctgtgtcagtgaattgttgcacgggtattccaaatagatacgaaataaatctgcaatgtcttttgaaatttaaaagattagcactaattttgcaccctcatttaagcatagaacaaagtataaatcaaataaataattgtcagaatgaacgtttcattacaaaacattgacaaagtaagcgctgagcttactgtgaagcttgagaaagccgactatcaggagaaagtagacaaagagttgaaaacgctccgccaaaaggtagatatgccgggattccgtaaaggtatggttcctgcaagtcttgttaaaaagatgtatggcaagtctgtaattgccgaggtagtgaataaggcactgcaagaggctatttacaattatatcagagaaaataaggtgaatatgttgggtgaaccgttgcctaacgaagaaaagcaacagaatattgattttgatacaatggatgaattcgatttcgtgttcgacattgctttggcacctgaattcaaggcagaagtaagtgataaggataaggtagattattatacgattgaagtatctgacgagatgatcgacaaccaggtgaagatgtatactcaacgcaccggtaaatacgatacagtagatacttatcaggataatgatatgctgaaaggtctgttggctcagttggacgaagaaggcaatacgaaagaaggcggcattcaggtagaaggtgcggttatgatgccttcttatatgaagaatgacgaacagaaagctatcttcgctaatgcaaaagtaaacgatgtattggtattcaatccgaacgttgcttttgacggaaacgagacggaattgggttctttgctgaaaatcgacaagaatattgctaaggatgtgaaatccaacttcagcttccaggtagaagaaatcactcgctttgttgccggtgaattgaatcaggaattgttcgatcaggctttcggtgaaggtgttgtgaagacagaagaagaattccgtgctaagattaaggaagaaatcgcagcaagatttgtagctgacagcgattataagttcttgatcgatgttcgcaagatgatgatggagaaagtgggtaagctggaattcccggatgcactgctgaaacgcatcatgttgttgaacaacgaagaaaagggagaagaatatgttgctgagaactatgataagagcattgaggagttgacttggcatttgattaaggaacagttggtagaggctaacgatatcaaggtagagcaggaagatgttctgaaagtggcaaaagacacaacgaaggcacagttcgcccaatatggcatgttgtctgttcctgatgatgtactcgacaactacgtacaggagatgttgaagaagaaagaaaccgtaaacaacctggtgagccgcgttgtggaagtgaagttggctgctgccttgaaagcacaagtaactttagaaaacaagagcgtttctatcgaagaattcaataagatgtttgaataatcattcggttgaaccgaacataaagtcacagaaacacagagtttttatagaattataactctgtgtttttttgtgtctctgtattctttttcgtttctttgcgcttacatttattttaaatttatagaaaggaacaattaatatggatgattttagaaaatacgcaaccaagcatttaggaatgaatggcatggtattggatgatgtgattaaatcgcaggccgggtatttgaatccttatattctggaggagagacagttgaatgtaactcaactcgacgttttctcccgtttgatgatggaccgaatcattttcttaggtacacaagtggatgattatacagccaatacgcttcaggcacagttgctgtatttggattccgttgatccgggcaaggatatttcaatttatatcaattcaccgggtggaagtgtatatgccggattaggtatttatgataccatgcagtttatttcaagcgatgtcgctacgatttgtacgggtatggcggcttcaatggcagctgtattgctggtagctggtgccgaaggcaagcgttctgcgttgccccattcacgcgtgatgattcatcaaccgatgggaggcgcacagggacaggcttcggacattgaaatcacagctcgtgaaattcagaaattgaagaaggaactttatacgatcatcgccgatcattcgcatactgatttcgataaagtatgggcggactcagaccgtgactactggatgacagctcaggaagcgaaagaatacggtatgattgatgaggtattgattaagaaatagaaatggctgattcaaagacaaagaaaagatgtagcttttgcggcaggtcggagaatgaagtcggattcctgattaccgggatgaatggctacatctgcgacagttgcgctactcaggcttacgagataactcaggaggctttgggagagagtaaaaaaagtgccggagctaccaaacttaatttaaaagaactccccaaaccggtagaaatcaagaaattcctcgaccagtatgtgattggacaggatgacgcgaagcgtttcctttccgtgtcggtctacaatcattataagcgcctgctacagaaagatagtggtgatgatgtggagattgaaaaatctaatatcattatggtgggtagtacaggaacaggaaagacgttgctggcacgtaccattgccaagttgttgcacgtgccgtttacgattgtggatgctacggtattgacggaagccggttatgtgggcgaagatattgaaagtattttaacccgtctgcttcaggtggcagattataatgtacccgaagcggaacaggggatcgtgtttatcgatgagattgacaagatagcccgtaaaggggataacccttctattactcgcgatgtgagtggtgaaggtgtacagcagggattgctgaaattgcttgagggttcggtggtgaatgtccctcctcagggaggtcgtaagcatcccgaccagaagatgattccggtaaataccaagaatatcctctttatctgcggcggtgcttttgacggtattgagaagaaaatcgctcaacggttgaatacgcacgtcgtaggttatacggcttcacaaaaaacagcgacggtagataggaacaacatgatgcaatatatcgctcctcaggatttgaagtcattcgggctgattcccgaaattatcggacgtcttccagtgctgacttatctgaatccgttggatcgcgatgcgcttcgtgctatacttaccgaacccaagaactcaatcatcaaacagtatatcaagttgtttgagatggatggtattaaacttacattcgagaagtctgttttcgagtatatcgtcgacaaggctgtggaatataagttgggtgcccgcggattgcgctctattgtggaaacaatcatgatggatgtcatgtttgaaatcccttcagagaacaagaaaacgtatgaggtgacgctggaatatgcaaaaagccaactggaaaaagcgaatatggcacgattgcaaacggcttaaaatcagaacgtaaggtaactggaattgattgtttctgttttttcttgaaaatattagtcactttttgcttggtaattacgaagttgtttataactttgtttggctctcttgaaaaagagaggtttacttgaagttaaaccatgaactgaataaaacaacctaagttaagatggcagggaagattaatttaacagatgaactgaaaaagtatttcggatttaataagttcaagggaaaccaggaagcaatcattcagaatttgcttagtggcaaagatacctttgtactgatgcctaccggtggcgggaaatctttatgctatcagttaccttcgctcttgatggaaggtacggcaattgtaatttctccgcttattgcgttgatgaaaaaccaggtggatgcaatgcgtaatttcagtgaagaggatggcatcgcccatttcatcaattcttcattgaataaaggcgcgatagaacaagtgaggtctgacatccttgccggaaaaacaaaattactatatgtggcacctgagtcactgacaaaggaggaaaacgtggaatttttgcgttcggtgaagatctcgttctatgcggtggacgaagcccactgcatttcggaatggggacatgacttccgacctgaataccgacgaattcgtccgattatcaatgaaataggaaaggcgccgctgattgcgcttacagcaacggcaacaccgaaggtacaacatgatatccagaagaatctggggatggtagatgcacaagtctttaaatcctcgttcaaccgtccgaacttgtattatgaggtacgtgcgaagaccgctaatatcgacagggatataatcaagtttatcaagaacaatccggagaaatcgggtatcatctattgcctgagccggaaaagagtggaagaacttgctgaaatcctgcaagcaaacggtatcaatgcgcgcccctatcatgcagggatggactcggtgacgagaaccaagaatcaggatgactttctgatg

SEQ ID NO: 105 - DNA, 9991 bp, unidentified
  source 1..9991: mol_type = unassigned DNA
  misc_difference 5944: note = a, c, g, or t
  misc_difference 5945: note = a, c, g, or t
  misc_difference 5946: note = a, c, g, or t
  misc_difference 5947: note = a, c, g, or t
  misc_difference 5948: note = a, c, g, or t
  misc_difference 5949: note = a, c, g, or t
  misc_difference 5950: note = a, c, g, or t
  misc_difference 5951: note = a, c, g, or t
  misc_difference 5952: note = a, c, g, or t
  misc_difference 5953: note = a, c, g, or t
  misc_difference 5954: note = a, c, g, or t
  misc_difference 5955: note = a, c, g, or t
  misc_difference 5956: note = a, c, g, or t
  misc_difference 5957: note = a, c, g, or t
  misc_difference 5958: note = a, c, g, or t
  misc_difference 5959: note = a, c, g, or t
  misc_difference 5960: note = a, c, g, or t
  misc_difference 5961: note = a, c, g, or t
  misc_difference 5962: note = a, c, g, or t
  misc_difference 5963: note = a, c, g, or t
  misc_difference 5964: note = a, c, g, or t
  misc_difference 5965: note = a, c, g, or t
  misc_difference 5966: note = a, c, g, or t
  misc_difference 5967: note = a, c, g, or t
  misc_difference 5968: note = a, c, g, or t
  misc_difference 5969: note = a, c, g, or t
  misc_difference 5970: note = a, c, g, or t
  misc_difference 5971: note = a, c, g, or t
  misc_difference 5972: note = a, c, g, or t
  misc_difference 5973: note = a, c, g, or t
  misc_difference 5974: note = a, c, g, or t
  misc_difference 5975: note = a, c, g, or t
  misc_difference 5976: note = a, c, g, or t
  misc_difference 5977: note = a, c, g, or t
  misc_difference 5978: note = a, c, g, or t
  misc_difference 5979: note = a, c, g, or t
  misc_difference 5980: note = a, c, g, or t
  misc_difference 5981: note = a, c, g, or t
  misc_difference 5982: note = a, c, g, or t
  misc_difference 5983: note = a, c, g, or t
  misc_difference 5984: note = a, c, g, or t
  misc_difference 5985: note = a, c, g, or t
  misc_difference 5986: note = a, c, g, or t
  misc_difference 5987: note = a, c, g, or t
  misc_difference 5988: note = a, c, g, or t
  misc_difference 5989: note = a, c, g, or t
  misc_difference 5990: note = a, c, g, or t
  misc_difference 5991: note = a, c, g, or t
  misc_difference 5992: note = a, c, g, or t
  misc_difference 5993: note = a, c, g, or t
  misc_difference 5994: note = a, c, g, or t
  misc_difference 5995: note = a, c, g, or t
  misc_difference 5996: note = a, c, g, or t
  misc_difference 5997: note = a, c, g, or t
  misc_difference 5998: note = a, c, g, or t
  misc_difference 5999: note = a, c, g, or t
  misc_difference 6000: note = a, c, g, or t
  misc_difference 6001: note = a, c, g, or t
  misc_difference 6002: note = a, c, g, or t
  misc_difference 6003: note = a, c, g, or t
  misc_difference 6004: note = a, c, g, or t
  misc_difference 6005: note = a, c, g, or t
  misc_difference 6006: note = a, c, g, or t
  misc_difference 6007: note = a, c, g, or t
  misc_difference 6008: note = a, c, g, or t
  misc_difference 6009: note = a, c, g, or t
  misc_difference 6010: note = a, c, g, or t
  misc_difference 6011: note = a, c, g, or t
  misc_difference 6012: note = a, c, g, or t
  misc_difference 6013: note = a, c, g, or t
  misc_difference 6014: note = a, c, g, or t
  misc_difference 6015: note = a, c, g, or t
  misc_difference 6016: note = a, c, g, or t
  misc_difference 6017: note = a, c, g, or t
  misc_difference 6018: note = a, c, g, or t
  misc_difference 6019: note = a, c, g, or t
  misc_difference 6020: note = a, c, g, or t
  misc_difference 6021: note = a, c, g, or t
  misc_difference 6022: note = a, c, g, or t
  misc_difference 6023: note = a, c, g, or t
  misc_difference 6024: note = a, c, g, or t
  misc_difference 6025: note = a, c, g, or t
  misc_difference 6026: note = a, c, g, or t
  misc_difference 6027: note = a, c, g, or t
  misc_difference 6028: note = a, c, g, or t
  misc_difference 6029: note = a, c, g, or t
  misc_difference 6030: note = a, c, g, or t
  misc_difference 6031: note = a, c, g, or t
  misc_difference 6032: note = a, c, g, or t
  misc_difference 6033: note = a, c, g, or t
  misc_difference 6034: note = a, c, g, or t
  misc_difference 6035: note = a, c, g, or t
  misc_difference 6036: note = a, c, g, or t
  misc_difference 6037: note = a, c, g, or t
  misc_difference 6038: note = a, c, g, or t
  misc_difference 6039: note = a, c, g, or t
  misc_difference 6040: note = a, c, g, or t
  misc_difference 6041: note = a, c, g, or t
  misc_difference 6042: note = a, c, g, or t
  misc_difference 6043: note = a, c, g, or t
ttagctgttagttttgtttagccagtcgtagaaggtgtattgggctcggacggcaggggtgccgggtgttctttttttgaatatgttttgcagcttatcatctacccagcaggctttttggttgtcggcaagctggatattaagcatttcgatgaggctgtcacgcaggtcgggggcgagaatgggggtgatggcttcgatgcggcggtagaggttacggcgcatccagtcgggagagcccatgaatactttgggggtgccgtcgttgccgaagtaccagatgcgggcgtgttcgaggaaactgtctacaatacgggtgacacggatgttacgactgtatgactgtccggggatgaggcagcagataccacggacgataagatcgatttgtacaccgtgttcggaggcttcgtagagacggtctatcatggtagggtcttggagggcgttcatttttaggatgatgcgtccttgcttgccttcgtctgcgagggatatttcgcggtcgatcaggcggttcaattcggggatgaggttgaaacgggctaccaaaagggtggtgaacttcgggtcttcttttccttgcagggtacggaagaggttatagaggtcggccactatttctttgcgacaggtgaaaaggccgcaatcggcgtaaagggtggcggttttttcgttaaagttgccggtgctgatgtaggcgtagctggggattttctcaccgtttaatccgcgacgacggatcagggctactttggcgtgcactttcaaaccagggatgctgtagattatcttaataccggcggcttgcatcatttcggcggtggcaaggttgttttcttcatcaaagcgggctttcagttccacaaatacggtgactttcttgccgttttgggcggcggctatcagggtgttgatgacggcggagttttccgctacgcggtattgagttaccatgatttcacgggtttccgggttgtgcacggcttcatataggaagtggataaagtgctcgaaagagtgataaggataatataataacaggtcctttttggcgacgtaattgaaaatggattctttctcatcgaggacggtcagcttcatcggcttcggtttttcgaggctatgaagggatttgttcgggttgggaagatgacgcaggtcttcgaggttcaaatgcttatcaccggggacaagttcgtcacgctgaatacggaaggcatccacaaggaagtccaagaattcagaaggcatagcacggtcgtagacaaaacggcagacgtcaccgatcttgcgtttcttcactttcttcttgagttgggcgacgaggtcggcactgctggcggtgtcgtcaatcagtatatcagcatcacgggaaattttgatgcagtagctggaatcaacgtcgtagccggggaaaatcaggttgaggtttgccttgatgatgtcttcggtaaacatcaaataatgatttttctcgcgagacggaagttcgatgaagcggggcactttggcgtagggttgtttcatcacaaagtaaagggggtgtcggaggtctgttacatttggccttgctgcttccatacctacttttataccttctccgtcatttctttcatttatgcactctccggtatatttttctatattttctttaggttcttctcctttgtttttttcttctttcttcggatagactcgtattgccaggtaaaggcggttatcccgcaggaaggagacaattttatctttggatacaggcacaggttgcaggtagggaaagatttcctcccggaaaaagtctttgataaactgttggtggaacggttctacatgattgtcctgataaaagatgatatgatttttgcgcagggcaggcagtattttttgctcatagatgcgtacacggtcatccagctggcgggtgacttctttatttatttcctctaccagttcgcgggctgactgtacggtttcttcatcgctttccgtagcgccggaagcaacagctttatggtcggctacacggattttgtaaaactcttcgaggttggaagagtagatagagatgaagttgatacgttcgtaaagcggcagacgctcgtccagagcctccaacaatacgcgataattgaatgagagccaacttatatctcgcttgaaataattatatttgctttccatgtgctttaagatttttccaaatatagtatctttgtgggattaaacaaagaattttatgacaagaattggattattatctgatactcacgcttactgggatgagaaatacctggaatatttcgaaccgtgcgacgaaatctggcacgccggagacatcggttcactggaagtagcggaaaagttagccgcattccgtccattccgggcggtgtacggaaacattgacggacaggaaatcagaaaactgtatcctcaaataaatcgtttcacggtggatggtgcagaagtactgataaaacatatcggcggttatccgggaaagtacgatccttccatcatcggtagtctgatgacgcgaccgcccaagctttttatcagcggacattcgcatatattaaaggtgaagtatgataaaacgctggatatgttacatatcaatccgggagctgcaggtatgtctggtttccataaggtgcggactttggtgcgttttgttatcaatcaaggggcgtttcaggacttggaagttatcgaactggcggacaaataaaataaatgtccccgcctgactgaaaaattattttaaaattttgccacgtcggaattctttccgacctttgcacactgttaatgaataactcagacgaacatgaaaggaattattctggccggtggtagtgccacccgactttatccgctttccaaagcgatttccaaacaaatcatgcctgtgtatgacaagccgatgatttactatccattgtcgacactgatgttggcaggaatacgcgaagtgttgattatttcgactccacgtgacttgcctatgttccgggatttgctgggaacgggtgaggagctgggtatgtctttctcctataaaatacaggaacaacctaacggactggcacaggctttcgtattgggagccgatttcctgaacggtgaaccgggctgtctgattcttggggataatatgttttacggacaaggcttttctgccatgctccgccgggctgccaatatagaaaaaggcgcctgcatcttcggctactatgtaaaagacccgcgcgcatacggtgtagtggaatttaacgaacaagggaaagttatttcactggaagaaaaaccggaagtgccgaaaagtaattatgccgttcccggactctatttctatgatgccagtgtgacggaaaaagcggcagctcttcgtccttcagcacgtggagaatatgagattacagacctgaatcgcctgtatctggaagaaggcacattgaaagtggaactcttcggacgcggattcgcatggctggatacgggtaactgcgacagtctgctggaagcatccaacttcgtggctactattcagaaccggcaaggtttctacgtcagctgtattgaagaaatcgcctggcgtcagggatggattccgacggagcagttgcttctgttaggtcaacaactcgaaaagaccgagtatggaaagtatcttatcgaattggcaaaacaatcctaaaatcaacataatagaataaaatatgaaaacttatctagtgaccggtgccgcaggatttatcggggcaaattacatcaaatacatcttggccaaacataacgacatcaaagtcgtgatattggatgctttgacgtatgcaggtaacttaggaacgattgccaaagacatcgacaacgaacgctgtgtctttatcaaaggagacatttgcagccgtgatgtggtagacggtctttttgctgagtatcgttttgattatgtggtgaatttcgctgccgaaagtcacgttgaccgcagcattgaaaatccgcaactgtttctgattaccaacattctcggaacacagaacttattggattgtgcacgccgcgcatgggtaatgggaaaagatgaacaaggataccctacctggagaaaaggtgtacgctatcatcaggtatccaccgacgaagtgtatggttcactgggagccgaagggtatttcacagaaacaaccccgctttgtcctcacagcccgtacagtgcctctaagactagcgcagacatggtagtgatggcttaccatgatacttataaaatgccggtaacaattacccgctgctcaaacaactatggtccgtaccatttcccggagaaattgattccgttgattatcaagaatatcctcgaaggaaaacatctccccgtctacggtgacggcagtaatgtacgcgactggctttatgtagaagatcactgcaaagcgattgatctcgttgtacgtgaaggtaaagacggagaagtgtacaacgttggcggacataacgagaagacaaacctcgaaatcgtaaaactgactatttcaactatccaccgtctgatggcagagaatcccgaatatcgccaggttctcaaaaagaaggtgaaagacgaaaacggaaatatttcgatcgactggatcaatgaagatctgattacgttcgttaaagaccgtctgggacatgaccaacgttacgccatcgatcctacaaagattacaaatgctttaggatggtatcccgaaacaaaattcgaagtcggtatcgtaaagacaatcgaatggtacttggccaaccaagcttgggtggaagaagttaccagcggagattatcagggttactacgaaaagatgtatgggaaatgattctcaacttaccaacattcctattgcaataagaacacccataaacagcatattacgagaagtctcgcctaatatgctgtttaattttttaccactatatattttcaccatccgtttccaggtgaggaaatgaggaatcaaatagagttgcggaagaagagcggctaaaaaatgaccttcacgaaggaaacacagacagagaagagaagctgtaacacccagcatcaaataaaaatagcgaccgaacttctcaccgaaacgaacaattaccgttctttttccactgcgcgcatccgcttcccggtcacgatagttattgactaccagtagcgtatcaatcaatagtccacaaatcagagaggcgatagtgacatccggcgtccatgttaacgcttgcacgtaatatgttccgccaacaggcacaaatccaaagaaaacaatcaccagtacatctccccagccgttgtaagagagaggataaggaccagtggtataaagaaaggcgaataatacacaaagcactcctacgacaatcaattcccatccggcaaagaaaagtaatgtgcaaccgataagacaggcaagagcaaccgtaataataatcccggttttcatcgcttgcggagaaatccatccctgtgcacaagcacgttcgggtcccaggcgatcttcccgatctgtccctttgaggaagtcgaaaaggtcattgatgaaattagcggcaatttgcatcagacttgcgaacagacagcagatcagtgccggcaaccagtgaaaatgcccgtccatcgcagcgagagctgtacctatcagaacaggggtaacggctcctgtaagagttttgggacgtgcagctaatatccatgcttgtagcgagttacgctttacttcttccatactttaatatattataaagagttttgacggacaaagatacatgatttttcgtatctttgcaccccagaaaacttcaaactaagagaagatgaagaaaataaatgctcctgtgatggagaaaataaataccccattgatgaagaaaacgatttatccactgacgaagaaaacaatctaccctgttnnnnnnnnnnnnnnnnnnnnnnnnnnnnnnnnnnnnnnnnnnnnnnnnnnnnnnnnnnnnnnnnnnnnnnnnnnnnnnnnnnnnnnnnnnnnnnnnnnnncccattgatgaagaaaacgatttatccactgacgaagaaaacaatctaccctgttatcctgttggcattgcttttgcttgtttcctgcaaatcgaaaaagaatatggtggctagcttgccgcaccctgtcttacatactgattccatttatccggatacgactaacgccattgccggactcttcgctcccgaccactcgaaactcaaagcactggctgtttctaaaaacaaaaagcaacatacaaagaaaaaggagactgataccgacgcggacaaatccgaccggatgctccgtggaaccccaataacctcttccagcgtagatgtgtcatctgtttatacaggagtggatcgtgtagtaaaatacgacttcacccaccgcgatgtccctgaagcttttgaaggtttccgcatcgcttttatttccgatttacattacaaaagcctgctgaaagagaaaggattgaacgatcttgtccgtctattgattgcccaaaaagcagatgttcttttgatgggtggtgattatcaggaaggttgcgaatatgtagaacctttgttttccgcactggcacgtgtaaagacaccaatgggaacctatggagtgatgggtaataatgattacgaacgttgccacgacgatattgtgaacacaatgaaacattacggtatgcgtccgttagaacacgaagtggacacgctgcgtaaagatggccagcagattattatcgccggagtgcgcaatcctttcgatctggggcgcaacggagtatcacccactttagcactctctcccaaagattttgtcatcttactagttcatacgccggattacatagaagatgtttcagtagccaatacagacctcgctctcgcaggacatacacacggcggacaagtccgtgtattcggagtcgccccggcactgaactcacactacggcaatcgttttatcaccggactggcatataatacagcaaaaattcctttaattataacaaacggaataggaacttcaaagttaccgatccgtgtcggtgctccggcagaaatcatcgtcattactcttcatcgattgacggagtaaggtatcgtaacttggtacaataacaaacagaaatagcagcatcatacacttttctgatacgactttctgtaacatactacacttttaggatacgactttctgttaaatactacacttttagggtacgactttttgttattatcctttttagtgcttacatttgtacctataagtagctgacaataaaagaaagaagtatgagaagaaatgcaatgcaacaattgtacgattggaaagaaaagtctacacgaaagcctttgattattcgcggagcccgtcaggtaggaaagacatggcttatgaaagagtttgcggctactgcttacaaacagtttgcctacatcaacttcgaagacaatgaagtgatgaaagaggtttttcaaaaagattttgatatcgaacgtattttgatggctatccagttagtaaccggaaaagtagtagatacagataccttaattctttttgacgaacttcaggaagccccacgcggcttgacagccatgaaatatttcctggagaaagcgccacagtatcatgttattgcagctggttctttactgggcatcgctatgcatcaaaatgactctttcccggtgggaaaagtcgattttatagacctatatccactttctttttccgagtttttagaagctatcggacaagagtcttttgtcagcttgcttgcaaagcaagattggaacctcatttctaccttccgttctaaattcaccgacttccttaaacagtattatttcgtaggaggaatgcccgaagtagtcaatgcatttattgagcataaagactataccgaagtccgccagttgcaacaaaacatactggattcttatgaccgtgatttttccaaacacgctcctattgccgaagtccctaggattcgtatggtgtggcgttcggttcctgcacaactggctaaagaaaatcgcaaattcatttatggagttataaaagaaggagcaagagccaaggattttgaactggccatagaatggctgatagatgccggtcttatttataaagtaaaccgggtaaagaaaggtggaatacctttatcggcctacgaagatttttccgcattcaaactgtttatgctagacaccggattaatgggagcaatgagcggactccccccacaagcattattggaaggcaatgttttatttaccgattataaaggagcaattaccgaacaatatgtgttacaacaactgaaatcagtgaaaggcttgaatatctattactggtcttcagatacttccaaaggagaattggatttccttttgcaaaaagaaatctgtattattccggtcgaagtgaaagctgaagaaaatttacagtcgaaaagtctgcgctcttttgttgaaaagaatccagaactacatggcatccgtttttccatgtcagattatcgggaacaagagtggctgacaaattatccgttatattctgccggacacatattataatatattcaaaggcgtatattatctttcttaatagcctcccaagctctcggatgcaggaagtaacgaatatctttccctgcactcaaggcttcccgaataaaagtggaactgatttcaaaaacaggggaatgaacgagacgcacggtttccggcaattcctcttcttttaccggaaagccgggacgaggataaatgaggagttgattctctttaatgatgcgttcggactgataccagcgtccaaaacgttcccaattatcggaaccgataatgaaataaaattcccggttaggatacgtttcacgaagtttttccagtgtatatacgctatacgaaggacggggcaaatgaaattcaaagtctgaagctcgaaaacgaggataatcactgatggataactccactaattgaagacgaagctcgtcgctccataactctaccttcgttttcaaaggattctgcggacttaccataaaccatatttcatccaacccttcatactcacaaaggtaattggctaaagcgagatgcccgatatgaatcggattgaatgacccgctgaagattccggtttttcttgttttaacttgattcattttccgctattctttcttgctttattttctttctccacttcggtaaaacaatagcttgtctgattgtgagaagtagcgcaatgccgcttatgaaccattgttgaaaataaaggcatacaataaaagcaagaagattcatcacaccggtgacggcacacagatacatccattttcgggtgttacaattcttcttgtacattctcaagtcttattcttcggctaaaaactctttgattactttcaacgcttctgccttcgctgcttccaaatcgtcattgacaatcacacaatcgaattgcggagcaaagcccaattcatattccgccttagcaatacggctttcaatgatttccggggcatccgttccgcgcccttctaaccggcaacgtaattcttccaccgaaggcggttgaatgaacactgacaacgcacggtcaccataaaacttcttgatattacatccacctaccacatcaacgtcaaacacaacattctgacctgcttccagttgcttttccacttgtgccttcaatgttccgtaataacggtccttatatacttcctcatactccaaaaattcgttgttctcaatgcgacaacggaattcctccggcgtaagaaagaaatattccactccgtgctgctccgtaccacgcggaggacggctggtagcagaaatagaaaatgcaagattcaaattctgcgtcagcagataattgataatagtagatttgcccgaacctgacggggcagagaaaataattagtttaccggtcat

SEQ ID NO: 106 - DNA, 10099 bp, unidentified
  source 1..10099: mol_type = unassigned DNA
  misc_difference 3235: note = a, c, g, or t
  misc_difference 3236: note = a, c, g, or t
  misc_difference 3237: note = a, c, g, or t
  misc_difference 3238: note = a, c, g, or t
  misc_difference 3239: note = a, c, g, or t
  misc_difference 3240: note = a, c, g, or t
  misc_difference 3241: note = a, c, g, or t
  misc_difference 3242: note = a, c, g, or t
  misc_difference 3243: note = a, c, g, or t
  misc_difference 3244: note = a, c, g, or t
  misc_difference 9326: note = a, c, g, or t
  misc_difference 9327: note = a, c, g, or t
  misc_difference 9328: note = a, c, g, or t
  misc_difference 9329: note = a, c, g, or t
  misc_difference 9330: note = a, c, g, or t
  misc_difference 9331: note = a, c, g, or t
  misc_difference 9332: note = a, c, g, or t
  misc_difference 9333: note = a, c, g, or t
  misc_difference 9334: note = a, c, g, or t
  misc_difference 9335: note = a, c, g, or t
tgacatccagttgccgtgtcatttgttgaatactgttttacgaacagtctgcggatggacgttccctctttttcaatataccgaacaagaacttacttattcttgtacatttcctcgtagtatttctggtagttgccgctggtgatgtgctccatccactcctcgtggtcgagataccagtcgatggtcaggacgatgcccttctcgaacggggtctcggggtaccagcccagatcgttcttgatcttggtggggtcgatgccgtagcggcggtcgtggcccagacggtcggcaacgtgcttgatcagatcctcgctgatgccgtcgtccttcaggcggtcgtgcagctgctcgatgatggtcttgacgatgaagatgttggggcgctcgttgtggccgcccacattgtagacctcgccgatcttgccgccgttgcagaccatatcgatggccttgcagtgatcctcaacgtacagccagtcacggatctgcataccgtcaccgtagacaggcagctgcttgtggtgcttgacgttgttgatcatcagggggatcagcttctcggggaactgataggggccgtagttgttggagcagcgggtaatgttgatgggcataccgtaggtatcgtggaatgccataacgaacatatcagcgctggccttggaggaggagtaggggctgtgggggcacagcggggtggtctccatgaagtagccctcggcacccagagcgccgtagacctcatcggtggagacctgcaggtacttcttgccttccttccaggtcttggcatcagcatcgtaccaggcttccttggcacgctgcagcaggttcacagtgcccatgacgttgctctggacaaagatctcggggttcttgatggaacggtccacatggctctcagcggcaaagttgatgacataatcgaaatcgtactttgcgaacaggctctccaccagctccttgtcgcagatgtcgccctgcacgaacacatggcgggggtcgccctccacatccttcaggttctccagattgcccgcgtaggtcagcttatccaggttgaccagcaggatctcggggtacttcttgagcatatagtggacaaagttggagccgataaaaccggcgcagccggtgatcagatattttttcataggtttattctacctcaattttcaggttttgtcttcttggggaagcttttcccttatttcatcccgttctcgccgtcccagtgggcgaagaagcaggccagggcctctttccagtcccgcacatcgttgcccacagtgcagcggagcatccggttgtccagtgcgctccacttggggcggtcggcgctttcggggtgcttggccttgtactcctcgctggtgcagggggccacagaggcatccacaccagacaggcggatgatctcggaagcaaaatcgtaccaggagcagatgccctcaccggtgcagtgatacaggccgtactcatgggtcacgcagagctgcagcagctcatgggccaggtcaaccgcgttggtggggttgccgcactggtcgttgaccacttccagcttgccgaatttccggccagcgttgacgatggtcttgacgaagttcttgccgtagtagctgtacagccatgccgtgcggacgatgaagtggcggtggcagaactgctccacatacttttcgcccatgagcttggtggagccgtaggcgctgatggggccggggatggtggcctcgtcctgtgcaatgccgccgttctcacggccggagaacacatagtccgtagagacatgcaccaggcgggcaccggtcttttcggcggcctgtgccagattgcgggggcccagagcatttgccttgaaggctgcgtcgtggttcacctcgcagccgtccacgttggtgtaggcggcgcagttgatgatgacatccgggcgctggcggcggatgaagtcatccaccatcttatagttggagatgtccagctccggcaggtccaccgggatcacggtggcattcatcagcttttcgggaatggggccgatctcgctgcggccctcccgcagctgcttgatgatctcggtgccaagctggcccttgcagccggtgacgatgattttcatgggtgattcccctcctgcatcaatatctcagttttccatcggccacgttcttgaggtgctggccgtaggggctcttaccataacgggaagcgctctccagcagggtctcgcggtcgatccagccatacttgaaggcgatctcttcgggggcgctgatcttgatgccctgacgcttctcgaccatgcggacaaagtcggcggcatccaccaggctctccatcgtgccggtatccagccatgcaaagccgcggcccagcagctggacatccagctcgtccttcttcaggtacatatcgttcagggtcgtgatctccagctcaccgcgggcagagggcttaacctgctttgccatctggaccacttccttgttgtagaagtacaggccggtgatggcgtaattgctcttcgggtgctcgggcttttcttccacgctcagcaccttgccgttctggtcaaattccacgatgccgaaacgctcggggtcctgcacataatagccgaacacggtgcagcggcccttggtctctgcattggcggcggcagtcttgaggatcttggagaagccgttgccgtagaagatgttgtcgcccaggatcatggcgcagcagtcatcgccgatgaactcttcgcccagaataaaggcctgtgccagaccatcgggagagggctggaccttatattgcagatggatgccgtactggctgccatcgcccagcagcgcctcaaagcgcggcgtatcagtgggggtggagatgatcaggatatcctgaatgcccgccagcatgagggtggacagaggatagtagatcatgggcttatcgtagacaggcagcagctgcttgctggtgaccatcgtcagcggataaagccgggtgccggcaccgccggccagaataatgcctttcataatttgtgcactcctttatttgtattgaaaaagttgtgcagctatacggggtgaaacgctcacctcgtaatattcaaagcggagctgcgtccgctgtcaacaaagttacagggtaaaagttctggccgcgcggggcggcatcagatagttttacacctcattctactctcaaatcgaaaaaaaagcaagaaaaaacggcctgnnnnnnnnnntgttccagaattttttccggaacaggccgtcaaacagaaccgttcagccgcccacggcggcagcacatcgcgatggtggagcgtttcttaccacctgaagccccacttatggaaatacttcagcaggtttcccgtctgccagagggcgggcttgagatcccggtgggcagcgcggtgccaggcgtggatggcggtatactggggcaccagatacaccttgccccgggtgcgcatcttctgggtgaggtccgcatcctccacatacatgaagtagctctcgtcaaagccgcccaccgccttgaaggtgctggtgcgcacaccggaaaagctgccggtgcagaactcgatctcgatgggcctggtcaggtcctcatccagcatcaggtagtggtcgttctggcctttccagaagctgagccggggcagctggcggtagagcatgggccgcagggcgcaccggcgcaggggcagctgctggggcttgccgtccgggaacaccagcgagggccgggccatcacggcatccgggtgggcggccatccagtcggccagatcactcagggtatcagcggtcagctggatatccgggttgaggataaaatggaaatcgctgtccagctcgggcaggatcatattatggccggtgccaaagccgccgttctcggtgcggcagtgcaccaccacctgctggcccggacctgctgccagcaggccgtccgccacggcctgctccagctttttgccgctgccgtccgggctggcattgtccaccagatacagggtcatcgggtagcggcgcgtgcagtgcagcaccgtctgcgccgccttcagcgcctcgtcatagccgttatatacaacaatacaggctgatagtttcatcaattcactccaaaggcaggatcttcagcgtgaagtcctcacgctggatatcaaagttggggttggtgcagggatcacccgcggccagcagatctccccagcgggcctggaagcggagcacctcgccctggaagcgcttctgcttttcggggttgtcctcggtgccgcggctcttgctctcgtagtggtagagctgggcaaagggggtaaacacgttggtgtagcccgcctcccgcacacggacacagaaatccacatcgttgaaggccacggcatagctctcgtccaggccgttcatctcatcatagatctccctgcggatgagcaggcaggcggcggtatcgccgtaaacatcctgcacatagttcagccgccccatgtagccatcggatgccgccgggaaatacttgtgcaggtggcccgccacgccgccgatgccaaagccgatgccggcgtgctgaatggtgtcatcggggtagagcagctttgcacccacacatcccacccgcttctgctgggcgtacatgaccatttcctccagccagttgggggtgatgacctcggtatcgttgttgagcagcagcagatattcgccggtggcatactgctcgccaaagttgttcagggcgctgtaattgaagcccttgccctcccaggtcacgaccttgaggttgtccgggtgttccttctgcatccgctcgtaggcgcggaaggtctcgggctgcttgctgttgttctcgatgaggatgagttcaaaatccgggtaggtggtgcgggcatagatggaatccacgcagagctccagatcccggatgtggtcgcaggtggggatgaggatgctcacccggcccgggtgctcgatggtgtaatcggtcttgtaatagcccggggtgccggggatgagggcaacatcgtccacagcgatcccgcagcgggcatagtgggccttgagggccgcaatgcctgcgtcgatgcagtaggtcttggcggagatatctgccgccgtgctgccggggctggagcgccagtaatacagggcatggggaatgtgaacgatcttctcagcctgttccgtcaggcggaggaacagctcgtaatcctggctgccgttgtactccatccgctcgccgccgccggcccgctccatcagggcgcggctgaacacggtcaggtggcagatgtagttgttggagcggaggttgtccagcatgaagtcgggcttgaagtggtagagcaccacatgctccggcttcccctcaaaggtcgcctcatcggtgtagacaaagtcggccttctgctcggcaatggccctggccgcgtaccacagggcgcagggatgcagcaggtcatcgtggtccagcagggcgatatactcaccggtggccatctcaaagcccttgttggtgttgccagggatcagctcattcttttccagcttctgataccggatgcgtgcatcggccttcgcacgggcctgcacatgctggcctacggcctcgtccttaccggcatccacgcagcagagttcccagttcttgtaggtctggttcaccacggaatccagcatctcgtccaggaaatccagcggggtgttgtacagaggcaccacgatgctgattttgggaccggcaggctgatcgttcgcctgcctgaccagcagctccaccggggcaaagcggtcggcccgcaggaggttccccgggaagagggcggcatactcccgcctggcgcgggcgtgctcccgcactcccgaaatgccgtcccggcgcagctcacccagcaggacgaaaagcgggaaggtgtgccagatctggcggctcttgctgacaacataccgcatgggccaggtcagcttccagaaggtagagctggtcacctcgttcagggtcttttccaggttcttggcatggctgcggctcagggaaagatcgctgcggagccgctcaatgagggcggcttcctcgttgcaggtgcgctcggcacgcaccatccggtcacgcaggagatccaactccttctcatagcccgcgatcatctcggcggtggcaggctggaccgtgcagtacagagccgactgctgggcacggccccggctgcgccagcggaaatcccggtagtagccccggcgggccagttcctcggcccagccctcagccacgttgctgccggtaaacaccagcagcacctgtccgggcagctgcgcgggcatctccacccaggcggggtcctccaccaccagcaggtctgcctgccgggcagccactgtaaaggggttggcatccacgcccgcccggtgcagggccttttccagtgccggggtctcggcgttcagcaccgcagctgttgccggggccagctcctccgcaatgcgctgtgccagcaggcggcagcgctccatgtcctgctttgtttcctttgctttctccaactgcattccgacttctccacttcactgggccattccgccgcccagacgcatttttacaaactataatagtataccagatttcgtcccgtttgagaagcgcttttccgcatttcctgcgctttccggtgcaaaatttattgcagtccaagcaggctccacagccagccgaacaggcctccgttcgagctgccgacgcccaccgtgccaaaggacacgccggtatagtagtggcgcaggatgtcccggtagcccatgctctgctcctgcgcatagcccaccatgccgcactggctcatgcccacaccgtggccgaagccatagtagttcatgcagggggttccgttctcgtccgcgctgaaatcaaagcaataacgggaggaaacgaactggccgatgtagcggtagctctttccgttggagacaaaggtattgtaccggacaaagccgcccagatccttatgggtggtgtcggcgctctcgtagggctggccggtcctgctgtcgttgtactcggtgtagcggtagtccttgccgatgacccggcgcatcaggttgtgatactgctcctcgtaggggctttccacgctctgcagatagggcacatcggtgccccaggcatccagaccggagcaggtgccgtacacgccggtctgggtgttataccccgcactggccgaccacactgcatcgatgacgctgccgttgcaggtcagcacctcgtccttgacctcagagactgccctgcggatggcgctgcgggcagaggaaggaatctgatccacgggggtgtacaccagcgcgttggccgaagagccgtatttcttgtggtattccagataggagtggatggccaccgcctgcgctttccacgcctgctgtgccgccgcgtcactgacatagctgccgatggagcccagctcggtgtaggtgatgcccaccagacagtcctcaagatccagggtcacgttccggcgcaggccctgccccttgacgttcaggtagggcatggtgatggtatcgccggagccgaagagccagctcaggcagttttcctcctcgtccgggatcagagtagtgttggcaccgcccatggtggtggcaccagcgggcagggtgtccccttccgctgcaaaggcggcaggcactgccatgcagagcagcaccaccgccagcatcagcgccgcacaccggcgcgcaaacttcgacatccgtttcaagttccttgtcctcctgcgttctgtattttattcagtttagcacagtgcagggccgcgggcaaggacttgaatcaagaaaacgccgccgggcagagccaaaagctccacccggcggcgtttcactgtttctatcttacgcttcctgtcagcggctctccccgcgctgtgcaaggcgggagaagcgcttctccttttcgtcgtccttctcggcatcctcagccggggcggcgggggtcaggcgcacctccgtcacgcggcgcttggcggtgcgggtaacaacaccatcgtactcgcccagggtaaagcggtcgcctaccttgggcagatggcaggtcttttcctgcaccagaccgttgacggtattggaatcgatatcctcttcctccggcaggtcgagctcctcatacagatcatcgacgctggcagagccggacaccagccagctgccgtccgactgcttgcggaagtcctcagtgacctcgtcgtgctcatcccagatctcacccaccagctcctccaggatatcctccagcgtgatgataccttcggtgccgccgtattcgtccacaacaacggccaggtggtggtgctgctcccggagggtgcgcagcagctgggagatctgcgtggagcccgtggtatacagggtgggcaccaccagatcatcgatcttggtcgcctttttcaggcgggcgatatagaaatccttttcatgtaccacaccaatgatgttatcaatggtaccgtggtagacaggcagacgggagtaaccggactccgcaaaggtctgggccagctcctccagcgggatatcatcctccacagccaccacatccacacggggggtcaggatctcctccacctccacgtcatcgaactcgatggcgctgcggatgagctcactttcccggtcggtcagttcgccgtcgttttcagcctcgctgaccatggtcatcagctcaccctctgtgatggtatcggcctcgccgctgtggacaaagtggcccagcagcttcttccactgggtgaacagccaggtcagcggggtcatcagggccatcaggagcacaaggaagggcgagactgccgtggccaccttttccggcatctccttggccaggctcttgggagtcacttcgccaaagatcagcacgatgatcgtcagcacaatggtggacaccgtagcgccccgctcggcacccaacatctgggtaaacaggatggtgccgatggaagcggcggcgatgttcacgatattgttgccgatgaggatggtggaaagcagcttatcgtattgctccgccatggccagcacccgggcggcagaggaatcgccgtcctcggcgcggcttttcaggcggatctgattcagggaggaaaatgcggtctcggatgcggagaaaaaggcggagaaacccaccaggatcaccagcgctgcccagagcgtcatactgccatcgtccataataaaggaaaatcacactcaactttctgttttttatgaaagaacggactccctcagtctgcttcgcagccagctccctcaaagagggagccnnnnnnnnnngagccttgccgcacggtcagcctccctcaccgagggaggtggcatcgcgcagcgatgacggaaggagttctttcctagggatacaaaaatgtgctttccaccgtggctgttccgcgatgaaaagcacatcaatgttacttgttataatatcatattccgcacccccatgcaagcattacagccggcacagaggtacaaaactggtaaaactgtggaaaatcatttcagcacaagggcatttccgtcgtaatccacggtcagggtgctgccctcggcatagcggccctgaatgatcgccttggcgatcagggtctccacccggctctggatgaaccgtttgatggggcgggcaccatagacgctgtcgtaggcagaatcgatgatgtagtccttggcggcggtggtcacgtccagattcagatgcttgccctcgtccatgcggctgcgcaggtctgccagctgcagatccacgatcttgcgcatctcgtccttggtcaggctcttgtagtagacgatctcgtccagacggttcaggaactcggggcggaacttgctcctcagcagcaggtcgatctgatgctttgcctcgtcgctgagttcgttggaaccctgtgcccggcgctgctccagatcgttcaggatgatgtcactgcccagattcgaggtcaggatgatgaccgtgttcttgaagtccacggtacggccctggctgtcggtgatgcggccatcgtccagcacctgcagcaggatgttgaacacatcgg

SEQ ID NO: 107 - DNA, 7292 bp, unidentified
  source 1..7292: mol_type = unassigned DNA
  misc_difference 3703: note = a, c, g, or t
  misc_difference 3704: note = a, c, g, or t
  misc_difference 3705: note = a, c, g, or t
  misc_difference 3706: note = a, c, g, or t
  misc_difference 3707: note = a, c, g, or t
  misc_difference 3708: note = a, c, g, or t
  misc_difference 3709: note = a, c, g, or t
  misc_difference 3710: note = a, c, g, or t
  misc_difference 3711: note = a, c, g, or t
  misc_difference 3712: note = a, c, g, or t
  misc_difference 4746: note = a, c, g, or t
  misc_difference 4747: note = a, c, g, or t
  misc_difference 4748: note = a, c, g, or t
  misc_difference 4749: note = a, c, g, or t
  misc_difference 4750: note = a, c, g, or t
  misc_difference 4751: note = a, c, g, or t
  misc_difference 4752: note = a, c, g, or t
  misc_difference 4753: note = a, c, g, or t
  misc_difference 4754: note = a, c, g, or t
  misc_difference 4755: note = a, c, g, or t
tgcccacgccggagaaatcggtcttgaacacctgaccaaaggtcttgcccagagcagagaaatcgaagctgatgaagctggtggggatgacgctgtacatgccggcatcggggttggggatgtagatgccggtcagctcgcagaggatgcccagcacccaggtgatgaggatgccgtacaggatgccgcccttgaccttcttgaccagcaggatggcggtgatgagcacgcccaccagcgtgaggatcgcacccacgccgatgctgtggaaggtctcgcccttgaagtgctgataggtgacaagggtggaatcgctgttcacgatcagctttgcgttctgcaggccgacgaatgcaacgaacaggccgatgccaacgctgacagcgctcttcagggtcatggggatggcgttgaagatggcctcacgcacattggacaggctcagcacgatgaagatgatgccctccacaaaaacggccatcagggccagctgccagctgtaacccatggtcaggacgaccgtgtaggagaagtaggcgttcaggcccatgccaggagccagagcgaacggatagttggccagcagagccatcagggcagtgccaacgaacgatgccagcgaggtggcgatcaggaccgcattggcatccatgcccgaagcggacaggatgctggggttgaccgcaaggatgtaggccatcgtcataaaggtggtgacacccgccatgagttcggtcttgacatcggtgtggttttctttcaggtgaaagatcttttctaacatgaaagttcctcctgtgttatagtaaaaataaaaaccgccgcgtgggaaccggcggaaagaacagctcccattgtagcagaactgtttccacctgtccatggtcgaaacacagaaaattcacgaaaagttcaaactttcttgtatgggtatgacttatccgatggctttttggcgttttatggaattttttctttccggtcatggagtttgtgccgctccgtatatcctcatagtctgtatttgcgataaaatccacctcctattcacaagaaagcgcccccgctcactgcgatcttgcagtgaacgggggcgctgtgctttttcatagaaaagagcggattttgcaagaaaaaatctccgtaggtccgggagccttacacctgatgctctgcgatccactggcccatctgctgggcgatggccttgatcgagccatcctcaaagggaaccttcagcccggcggtctgcatcagctccgtatagctggccagaccggcacggcgaaccagcttgaggtagcgttcccaggcatccttgtgatccttgaggctcagcaggaagaactgcagcgcggccatggtggacaggcagtaatcaatatagtagaaggggcactcatagatgtggagctggcgctgccagccggcaccgcggccatagaagggcaggttgtcgaaatcgatccaggggcggtacttgtgctccagctccagccagacagcgttgcgctcgtccggggtgaggtcggggttctggtacatcctgtgctggaactcgtccacgatgcagccataggccaggaagaggaagctgtcctcggcgtggagcagggcgtatttctcagtgtccttaccaaagagcagatggtgccagggagccgtcaggaactccatggccatggagtggatctcggcgctctccatgccggggcactcgaggtctgcggggaccttggggtcacgctcggccacatagccctcaaaggcgtggccgcactcgtgggtcagcacgtccacgtcagcagaggtgttgttccagttggcaaagataaagggggccttgtaggtgggcagactggtcatatagccgccggacatcttgccggggcggctctccacgtcgaacagctcattgtcctgcatgaagtcaatgaattctgcggtctcggggctcagctcgtggtacatggtgcgggcggcggccatccgggcatcgtagccggggatgggagaggggttgccgtcctgaaacgccacaggcaggtcggagaaggtcaggtgggagatgccggtgcgcttgcagcgcagctcgatcacctttttcagctcgggcaccacatcgttggccacctggtcgcggaacttccggatctcggcaggaccgtagccgatgcggttcatccgtacataggaaagctcgctgtaatcgtggtagcccaggatctgcgcctgtgcgttcaggttcttgacgatcttggtgtacaggccatccagctcgtcacggtgggcatcgaaatacgcggcctcggcctcgtaggcggcgcgacggacggcagggtccaggttctccttataggggcccagctggggaatggtcagctgcttgccgtcaaactcgaccagtgcgccgccgtatacctgctggtactggctgacaagggcgttgtactccttctgcagctccacggtgcggtcatccatgcccagcacggcattcttcatgccagccacacaggtggtgccaaaggcttcggtcagcgcatccacatgggcgttggccagaaatgcccggctgatctccacccgtgcgttctccacggcgggaccgttggcatcaaagaagtcctgctcggccttccaataagcgtcacgggtgtcgcaggtgtagtggatgcttgccagctgtgcggcggtgctgtaatcggcaaaggcgcggctctgctcgtagtaaatattcaccagctcctcgccgctggctgccccggcggccttggcggccagcgccttgcactggcccagcagggcatcaatgtccgggcgggtataactcatttcgctgaatttcatgggattcatcctttcgttccttcttgtctgagtactgaacccatattaacacgtttggggaaaaagggcaatggaaaagaggaactgcccctgtggagaaaagtgtgtcagaattgtaaaagataaaatattttagctattattcttgacttatccgacgattcagatataatggtcgtgttcgcaagaaacctcaaactttttagataataaaaatacaagtcaatcaaaggagaatattaccatgacgtttgaagaaatgaagaagatcgttgttgacaccctgaactgcgaggaggacaaggtgaccatggaggccagcctgaccgaggatctggaggccgacagcctggatgccgtggagctgaacatggcgctggaggatgcctgcggtgtgtccatcccggacgaggagctggcaaagctcaagaccgtgggtgatatctacaactacatcaccgcacatatctgaggaaacatgcgatgaatgatatccgagatctgctccccaaccggatgcgggagcgcactttccagctgaaggccaagcgggatgctggagctgtctggcacgagccgcagtttgtggagtgcaagcagtgcggccgccgcgctgcccgcaccctatggggcaaaagcctgtatgtctgccccaactgcggctatcacatgcccattggcgggtattaccggctcagtctggtgctggatcacggcagcttccgggaactggacgctgaccttgatccgcaggatgtgttgaccttccccggatacggggaaaagcttgccgccgcccagaacaagaccggcctgcacgaggctgctgtcaccgccgtcggccgcattggcnnnnnnnnnncagccgtgttggacagccggttctttatgggcagcatgagcacggctgtgggcgagaagatcacccgcgccgtggagtacgccactgccaagcgcctgcctctggtcatcttttcggccagcggcggcgcgcggatgcaggagggcattttcagcctgatgcagatggccaagaccagcgccgccatccagcgcttttcggcaaagggcgggctgtacgtcagcgtgctgacccaccccaccaccggcggcgtgaccgccagctttgcaagcctgggcgatatcatgctggccgaaccgggggcactcatcggctttgccggcccccgtgtcattgagcagaccatcggtgaaaaactgcccgccgggttccagcgcagcgaattccagatggaacacggctttgtggatcaggtggtgccccgcagtcagctgcgggatacgctgatccaggtcctgcagcttcatgccggagggaaacacgaatgataaaagatattttggagcagctggccccgctggacgcacagatcgccgcgctgaagggcagcggcagtgacatggaggccatcaccgcccatgcgtccgaactggcagagctggcggtggaagaggacgagatcctgcgctcctgcggcccgctgactgccgaggaccgggtctttctggcccgtcacccggagcgtccgcacatcgacgagacgatctctgccctgttcacggatttctttgagcagcgcggcgaccggcagtgcaaggaggacgcggccattctgggcggcgtggcccgtttccacgggatgccggtgacggtcatcggccaccgcaagggctccacgctggaggaaaatctggcctgcaactttggaatgccggggccggagggttaccgcaaggctctgcgcctgatgaaacaggctgaaaaattcggccgtcccatcatcacctttatcgacacgccgggcgcttaccccggcaaggatgccgaggagcgggggcagggcgaggccattgcccggaatctgatggagatgnnnnnnnnnncgcgctggcactgggtgtggcaaaccacatcctcatgctggaaaacgcggtctactcagtgctgagccccgagggctttgccagcatcctgtggaaggactcctcccgcagcggcgaggcctgtgagatgatgaagctgacggcgcaggatctgtaccgcggcggcatcgtggaagaagtgatcccggagccggtgggcggtgcccagcgctgccacgcggccctgtttgagcgcatggatgccgctctgcgcgcccacctgaaagaattgtgccgcatgagcgaccggcagctggccgatcagcgctataaaaagtaccgccagatcggagaaacgaggaacgcatgaatggtttacagctgatcgccactggcggggcacttcccggacggacgatcaccaatgacgcgctgagccgcatggtggacaccagtgacgcatggatcaccagccgcaccggcatccgcacccggcactggtgcaccgaggacgaatctgccgccacgctggccattgcggctgcacggcaggcccttgatcgcagcggccttgacccggcggacattgcctgctgtgtctgcgcgaccctttctgccccggatgccacccccagcgtggcctgtcaggtacaggcggcgctgggcctgcccgaaaaccggcccgcgctggacatcaacgcggcctgttccggttttctttatggcatggccgtggcgcggggaatgctgacgactctgggcgggcagtatgccctcgtcatcgggtgcgaagcgctttcccgcctgatggaccccaccgaccgctccacctgcgtgctgttcggcgacggggccggagccgccattttccggctggcagataccccctttgcgttgacgctgggggcacgcggcagtgatgttctccatgcgggcgggccgagccgggaaggctctgcccccatcaccatggacggcaaggcggtgttccgctttgcggtggatgccctgcccaagtgcctgcacacggtactggacgagacccggctgaccctcgaggatctgtcgtgggtggtctgccatcaggccaacagccgcatcatcgaccactgcatcaaggccctgcaagctgaccctgcaaaattttataagaacatggatcgccacggcaacaccagcgccgccagcattccggtcgccctcaacgagctggccgagagcgggcagctgaccccgggcagaccgctggcctgcatcggctttggcggcggcctgacatggggcggcgcgatttttcaatacaaagagtaaaaatcatgttcggcaaacgggctcgccctctcagtcaccttcggtgacagctcccccaaagtgggagcctttggcaaaaccgaaaagtttaccgtactgccaagggctctccccttgggagagctgtcgagcagagcgagactgagagggcgaggacgcttaccgataggataaaactatgaaacttttaaatgaaattttaggcacaaaataccccatcatccagggcggcatggcaaacattgccaccggtgagtttgccgccgcctgctccaatgcaggtgcactgggcatcatcggtgcgggcggcatgaatgccgacaccctgcgcgaaaatatccgccggtgcaaacagctcactgacaagccctttggcgtgaacatcatgctgatgcacccgcaggcagacgagtttgcccagatcgttgtggaagaaggcgtgcaggtggtcaccaccggcgcaggcaacccgggcaaatatgttcccatgtggaaagcggcgggcatcaaggtgattcccgtggtggctgccgctgtgctggcaaagcatctggagaagctgggcatcgatgccgtgatcgccgaagggaccgagagcggcggccatgtgggcgagatggccaccatggcgctggtgccgcaggtggtggacgcagtggatctgcccgtcattgcggcgggcggcattgccgatggccgtcagctggcagcagcccttgctctgggtgcctgcggcgtgcaggtgggcacctgcctgctggtgagcgaggagtgccccatccacgaaaactacaaggctgccctgctcaatgccaaggacagcgacaccatcgtgaccggacgcatcggcggttccccggtccgggtgctgaaaaaccggatgagccgtgaatatgtccggcaggaaaaggccggtgccgataagatggagctggaaaagtacaccctgggcagtctgcgccgggccgtgtttgaaggcgacacctccaccggcagtctgatggccggtcaggtggccggaatgctccacgaggtgcgccctgtggcggacattctggatgacctgtggaacggcgggaggcagcgtatccacgcgctgagcgaggaatgctgacgctcggaaagaaaaccctgtctgtgcccatcctgcagggcggcatgggcgtgggcgtttctctgggcgggctggccggtgccgtggcggcctgcggcggcatggggtgcatctccaccgctgacactggcta

SEQ ID NO: 108 - DNA, 44588 bp, unidentified
  source 1..44588: mol_type = unassigned DNA
cacaagcttttactaaatcatttaactctaatacgcttaactctttgatagcatcgataaattctgctgttgttaattttgccattataattttcctccattataatttattgtcgcaccggtcagtctctcctgccgtgcccatatactgtttcatccagccgccggatagattactctgccggtgtctctgctggttcttctgcagctgctgtttcttctgccggagcagcctctactgctgcatctgccgcaccgcctttttctgcgatctgattgagaacgcgagcaaggttggtaatcggagactgtaagcttccaagtaatttggaaagaagttcttctcttgatggtactgctgcgacagccttcatgcctgcctcatcataataagtaccctcaacaacacctgctttgatttcaagagcaggagctgttttagcgaacttagctaaaactcttgccggagctgttgcatcctcagtagagatagcgaaagcattcggtccttcaagaacgtctcttaagctttcgaactgagtaccttctactgcacggcttactaaagtatttttgtatactttgtaagtaacaccagcttctcttaatgctttacgtaactgagtatcttctgctacggtaagtccacggtagtcaactactacgactgactgtgcatctttgatgttttcagaaatttcctgtacgataggctgtttgagttctacttttgccacgaatcgtgcacctccttttattattttgccgacggataatccgccggatcacagtgattttctcactgctgctgcataaaagacttgaggtatataaaaccgctttattcagattaaaatctgcaataaaaaactccctgcaaagacagagagatacggtcaaaaaaatcttgataaagatcccctcggcaggtcgtcttacgtttacgccatatggcacctgctgtcttcggcatatatgcaaatcgctgagtaccggaaaaccggctcaacgatatgcattataacattgtatattatggttgtcaacaattttctgcttttactgtgtaattttaactacgtttaatcttacaccaggtcccattgtagatgcaagagttgcactcttaacatactgaccttttaagcttgcaggttttgctttgttgatcgcacccataagggtctggaagttgtcgcttaactgttcttctgtaaaagaagcttttccaactggcacgtggataatatttgttttgtccaatctgtattcaatcttaccagctttgatgtcgttaacagcttttgtaacatccatagttactgttccagccttcgggtttggcattaaacctttcggtccaagtacacgaccaagacgtccaacaacgcccatcatgtccggtgtagcaacaacaacatcgaagtctaaccatccctcgttctgaatcttcgggatcagctcctcgccgcctacgtaatcagcgcctgctgcctgtgcttcatcaaccttggttccttttgcgaatactaaaactttaactgatttaccagttccgtgtggtaatacaactgcaccacggatctgctgctctgcatgacgtccatcacaacctgttctgatgtgaagttcgattgtctcatcaaatttagctgttgcgtttttctttaccaggctgattgcttcagcaacatcgtactgagcagccttatcaaaacttttcacagcttcctgatatttctttcctcttttcattctaaaaaaacctcctggtggtattatcgggagagggccctcccacataatcgttaataaatatcgttaatttttgcagaatttctcagaagaatgccactcttgcattcttccaatgaatttgctgtttttgtaaattctattcttccactgtaacgcccatacttcttgcagtaccagcgatcatgctcatagctgcctctaaagatgctgcatttaagtcaggcatttttaattctgcgatttcctgtaattttgctttggaaagtgtagcaacctttgtcttgttcggtgttgcagaaccagatttaatgttgcaggctttcttgattaatacaggagcaggcggtgtctttgtaacgaagctgaagcttctgtctgcgtatactgtaataactacagggatgataagatctccctgatcagcggttcttgcgttgaactgttttgtaaattcaacgatgttaacgccatgctgtccaagagcaggtccaactggaggagcaggtgtagccttgccagcaggaatctgcaatttgatatatccttctactttctttgccatttggaattgcctccttaatccaatgtttcaggcataatctcatgcctgcgcacagatcctggtctgtgctttaattgttaagttttacatctgcgaaacttatttctaccggcgtctcgcggccgaacaattcaacattgatcgtcacactctgctttccgtgattcatcgcctggatcactccgatagtgtctttccagacacctccggtaaccacaacggtgtctccctctgtaaagtcaacttcaatgttctctttcttgattcccaaaggtttcatttccatatcggtaagcggaaccggcttgcttcccggaccaacaaatccggtaacaccacgggtatttctgacaacataccatgtgtcgtcattcataaccatattgataagaacgtatcccggaaacattttctttgatacggatttttttgcgccatttttcatttcgacaacatcctgcatcggaacgcggacctctaagatctgatcttccagatgtctgttttcaattgtcttgtcaatgttcgcttttaccttattctcatatcctgagtaggtatgaacaacataccagtgtgcctctgccataaatcactctgcctccattaaaaattaaaaccaacaaggaaatcaacgccatactgaattgcgaaatccaaaagcgcgatgataagacctaatacaacggatacagcaataaccgctgtggtctgtcttacaagtgattgtttctccggccaaataatctttttgaattcagccgaaagaccggtaaaccagctctcttttggagccttgtctaacttctcggtttctcccattttttcactcctttgccacgcgcgtcttatttggtttctttgtgtaacgtatgggtcttgcagaatctgcaatactttttggtttccatcctgtcaggatgagcttttttgtcttttgtcatgttgtagttacggtttttgcattccgtacatgccaatgttatttttgtgcgcacaacttccacctccattaaaattctttgtgcttttttctgccccggtctccgtagtgagacgttttttaaggatcagcgacagtccttaaaaaaaggcataaaaaaaagacctacttccatcgcctgtctactatatcatatccacttgtttccgtcaatctttttttgtatattatacccttttaaacctttttgattattttttcctatttcacatttttttctcaaatggtataatatttttatatagttagaccgaaatacttttaaagaatctttaaaaatataattaaaatccccacatttatcatgccaggcggcaaggatgctgtcctataacctgataaatgtatatatttcatggaagaaaggaggggttttcttggctgctattgacagtgcctatcattattatttaagcacttatggcacttcgaaggtatcgcgttatgatacccataagaagagtcagcttcgtgctgtctataatcagattgtaaaaacaaataaagatactcctctgtataaaattccagattccacggatgtgaaaaaatttgcgattgacctgaaagaacatacccgttcgatccagaatgtaatcgctgccctttctgacaacgacgaggggattgaaaatgtattcaacaaaaaagttgcaaagtcttccgacgaatcttctgtcaatgttacctacattggtgaggatcagagtctcgataattctttgcattttgatgtggaggtaaaacagcttgcagccccacagatcaatgtcggaaagtttctttaccctgatgaatgcgatttcaaaacaggtacttacacattcgatatatcaactgatttaagttcatatgagtttcagtataccgtaagcagaaatgatgacaaccagcatattcttgaaaagcttgcacgcctggtcaattcttcaggtgtcgggattcatgccgatcttgccaaaaatgccagtaacaagattgccctgcgtttaacttcaagtcagaccggtcttgcagacggtcagtcctatctgtttgaagttaccccaagttccgatcatgcatccgaaaaagcaatgcagacactcggtattgattgtgttacccagacagcaagtaattcttctttcttattaaacggtacggagcatgcatctctgtcaaatacttttactgtcaacaatgcttttgaactgacactgaataaaccaagctcccaggcaaaccctgtacagatcggctttaaaacaacagctgactccattgtagacaatgtccagtctctggtaaatgtatacaacaatctgatccagttaagctatcgctatgacagcacacaggaagcagataaactgcggcgcgattttacacaggtggtaaaaccttattacaatgaatttgagtcgtatggattaaaactttcagatgacggtgccatcaaggtcgatacacatcttctgacggatgcagttacttccgcggatgcaaaagaatgctttgcaacattaaataagtttaaaaacgatctcggaacgaccgccggaaccgtctctgttgacccgttaaattatgcaagcaaaacgatgatcacttacaaaaaaccaggtcataagaatttttcctgcccttacctgacctccgtttattccggaatgatgttagacagatattgctaaacggacacttacagattttctgtagtgtccgtttaatattccaatatcccagatgcaacttcagattatgcatctttcgcactgatcatgtactatatatcattttcctgattttcattttcttctataatatccagcatcgtatttattctctctatataattgtgatgctcccttacttttcgataaccattttctgcgattgccagacgttcttcctcatgtgccagataatattctgctttttcacaaagatcattgattccgtcaaagcataccaggtcttccccctctttaaaataatatggtatttccgcctgataatttgtcatcagaaagcctcctgccccaagcacatcccataccctgagtggtatgccgctcttgatattcggaatcgtaaaattcagattaatctttgacatacgaaaaacctgcggcagctcactccagtaatcaaccgaaccacagtactgaatccgcagcatatcacttacatcactgttactgtatacattgacatgataatgcttcgacaactcgatcagcgcgcgcctgcgctccacctccgcaattttaaacccaagcaccgtcgtctgaaagatcagtccaaggtctgaaaaagatccttctgatttttccagttcaaaatattcctgcagtttttccaaaatatccgtagtcagcataggttccactatattggcaccgctaatgtttaactgtgcctcgatcacagcatcaaaatatccgcgcaggtattccggcagcctgctttttatcttatcataagagttccgttcataaagacttccgacaaacgcaatgtctcctttatatttctgtatttccggtgaatttgcaattaccgtatccatccggtccgtatccacagcaagtggcagataccagatatgttccactcccatctcccggaattccagatagtttgtcttatcaaaggtaaatatataattacacggatgaaaaatagactcatgatacatgctgatcagcggattatcacagctccaggatacatattttatccccattttctggcagacattcgaaatcagtgcaaaataattgaccgtaaataccatatcatagtgcgtttcccgcagtttgttttcaatgattttttcaaattccggatcgatatcataattgccaagatgctgttcgatattatccaccgtatgccccagtaataaaaaagtctgctctatgtctctgtaattataagctttccagcgatacattaatatgtgcataataatctccattcctgtgccgtgtcagccaaaataacgttttcatctgtatgtaaaacctgttgcagggagggaatgagaacctccgctctacatccaggcttccctgatccacgctgctctgcttttccacgtatgatgttcttttgctgcctgatatccacagtctgccatcttttgtgtggactgcatgtggccaaacaggtcaaatacacggtctggcaaagtccggatctcatttcttgaaaacatgacaagttcttttccatccgtaaattctctgcgcagataggtggaatcgtccgtcaccactgctgctccggcaagcattccgttaaaaatacggtcatgtgctccggctttgaaccaggtcattgtatttaagacgatcttactgtcgttcatcaaaggcagaatctccggtgcaagtacttttccaccgtaaaccaggtacggattgtcactccattcacactgatcccagcctgtcccgtatgctgtcacacgaattccgttttccaccagaatacggacagcctgttcacggaaaaatgacgtggcatacgagtcaataaaacgcatctgcacgatgatctcatgaatacgctgttctgaaatatcattccgcttatattttaaatattcttctatcacatcctctgttgtccggtcaggatgatgcaccagttctgacagcacagcctgtgccatctcctctccatcgacttccgggatggatgacagatccggtatcatcttcgcaactgtgtagatcggcaatgccccggcatataaaacatcaattccacgctccgcaagcggcttatgcctgctgccaagttccaccccggcatgtggcagaaaatccgtataccggatatttttaaaatatctgcggatataccggacatggttgcggtccgtgcacaacacaatagatgttgccggtgcattctgcagtggtttttcatagtgaaacggatgatccatcaggatattgatatatggaatattgtaagtttcccagagatttggctcttcttccgcagaacctgctctttttgatcctgctgtactttggaaaatgtcctgcttcaaaagcatccctgttccggtcatgcctgccggaagtgacagattatatcccaggttattaaacgtcacacagaaaaacctctgatctttttttgtaccttcttcgatgcattcgatcagcgcctgcttgctcacctcttcgagacgggcatcataggtaaaggaagcatatcccatggattcaaaggcatttttcagttcctgggtgaataagtcgagggtgtcgtagacaccggtgatgtaaatgatggttgtctgcatggtggtctcctgtactttttatagatttattttttctatactgcagctatgccttttataatcatcctttgtggaatctgtgctgtcgtaattgattccagcaagaatcacttgtccatgataatctttcaggctctgcatgtactgcttcttttttatctgtgcaatcgctgcatctgaggatttatcccattttaattccaccacgatcgccggcacatctctaaactttctcggaacaaacacgatatctgcaaatccctttcccacggcgagttcccgatacatcacataatcttttcttgcagcataatatgccagcgaaagcacacatgacatagagttttcatcattatactttaaaatggatatattttcctgatgcacctgctcgatcatttccgcaacatattcttcttttccatctatagttgcctgaagcagtgtttcagaattacgaatcgcatccatgaccggttcccatccgccatcctctatgcagttaataaactctttctgcacctcctggtttggaatagaaacagtcttgttctcaaaatcgtaggtcaggtatcccaaatgcactaaaagcgtaaatacatcatctacgctcgcaaatgtggacatatcattctgaaacttatccggattaatccttatatggctgcctgatataagctgtgtgattaacgccttcaagtgatacatgtccatctggatatatttttttagtgcctcataggtctccgtcttcgtccaataactgtcaaaatcatgtcccagcaatgacatgactactgatcttggattatagatctgaatgccctttaaatcatatccatcgtaccactgtttcatcctgtcataaggcataccatatgacacacacagactttgaacttcctcttccgtaaacccggtaaattcagcgagttccctttgattggtcatggaatattcatcaaacatattgagagctgaatgctcgccatactttttaatcggcagtattcccgtcatataagccaacgcaatatatggcttatctttcatccacaggcgcaagaaatccagatattttttctgcgcttcatcatcccccggatactttcgaaatatgcaatcccactcgtcgataatgatgataaatttctgttttttctggctatagatgttctctaatacatcaataagatcttcccggtcaaaacagtctacatctccgtattcccgcctgatatcccacaaaagcctcttttgcaggtaatcgatcattccgtccactgtctgtgcacggttaagaaagtcaagcatattgacatgaaggacattatatttattcagatttgcctcaaaactttcatcctgtgcaatcttataatccgcaaacatgttttttgaatcacatcccttgctataataagctacaagcatatttgcagtcatagattttccaaaacggcgaggtctgcttacgcatatattctgatgttcggtattcagattctgattcatttcagaaatcaacatggttttatccacatatatcttggaattaagtgctttctgaaattcttcatttcccggatttaaatatattcccattctaatctccattctgcatttgaaaaattatatttttcactctgtttctctaataagctgactataataaatttaactgtttatcaatcttaaacgtttttttgccggctcataactaccgcacttctgataataatactttgcctcactgattttcccaaggcactcatagataacgccgacgttataataagccgcataagaatttactctcgccatccggcagtcccggtgccttaccgccttaaggaactctcccactgctgcatcaaacatagcgttgttcatataaatgagtcccatcaggaactgaaaatccgcactatttccaaattcttcgtaaatgttttcaaaaaaagtgcttccccggcgcgtccgctgttgatcagggcatagccgtaggtttccaccatatcgatgacatattctaactttggttcaaggtcataactgagcccatgggcgaaccagaagcatgcctcgttataatcttctgccatgtaatagctttttccaagctgatacaatagatacgggatctgctgctctttttttgcatccgtaatttcagatttctgctctgcatccgtatcctgctttgagagattctgttctaactgcgtggcatgcacttttgcatcccatcctaaattttttaattcctgctccaacagtcttatgttgcgcagcgcttttgcctttttttctttcttcggaagatcataacccgtatggccgatgaaaactggtgcttcgtatgtacgatattccttttcatcataggcggttacctgctcatggattcttcccgtgtaatgaaaactttcttttgcaaaaatacggttgatccactctttattttcctgcttgccgtcttttccggaaatgatattgattctttgaatccttccaacctcgcccgaatgttcgacaatcatcttttctaaccgtgacagatcaatcttctgtagatattcatcactgtcaatgaccatcacatacggatgtgttgcttttgaaaccgcaaaattctttgctgctgaaaaatcatcgcaccatgtgaaatcatagatatttttcgtatattctgtggcgattttttttgtctgatccgtggaaccggtatctactacgaccagttcaaatccggtgttctggaatgatttcaggcagcgcgccagattgtgttcttcatttttggtaatgatgcagactgataacatgtaatgattctcctgtgtgccgatcgctatattggtgggcatattcactcctccctgtctgtcccaatcaaaacttttttgccttcaaatgcaaatccataatgatatatctgttcctttctgattcctttctcaagcaagtctgcatcgtattttttctcacagatctgctttaaggcagacagaactgtctcttgaatacttttttcctttcgtggatttcgaactttgaattctaaaataactgctttgcattcctttgaatttttcggttctaacattacatcatatctgccaaacccactttcacggttggatttaaggtaatatctatcccgcaggtcaacaagcagacctaatacaaaaccatggtaaaaacgctcaggctctgccccagatgccctctctccggtgtcgaaataactaaatgtctgtatagcaattcgattcatgtattcattcatcgcatccacatcaccaagtaacattgcccttacaaaatcattgtaatctggctgtacaggagcaaaccagtcatgtaccataccctgaaacattaactttacttccagattcgtcaacgcaagctggtatttcggcatcttcccctcctcaatatcctgatacgtttcataagataatactttcaaatatccactcgccagcaaaagactccaaactgctttttcatttccatttaattgattgtatacaatctgctcttcaatttctgaccagatgtattctccgtacaataatttttcaaatttttccttaattgtacggtttccttcctgaatcaattttcctaccagactatttgcacttgtatttgcccaaaatgttttgtataactgtgtatcgagataatttaaaattgaccatggattataaatatctttgtgttccccaaaaatgaaaccatcgtaccatctttttacctcttttttttctttctcaagaccatactgttccaatgcatcaaagacttccttctctgtaaaaccaaatacagaagcatattcatttgatgtagtcgtaactatctttaagttattcaaatctgaaaaaacggattccttacttactcttgtgattcccgtcataattccacgttccagtgccggattcgtcttaaatgtcgaattaaacaggcttcgggtgaatgcgacaagttcatcccagtaaccatccacaaatgcttcctgcatgggtgtatcatattcgtctaacaaaatgataactttttttccataatatctatacaggaaatctgataactgatataaagaagatgtcgcatccgtctcttttatattttcctccaacatacgctcataatatgctctgtcggcatctgtaagcttttcactatctttaatataacaaaactttatatatatgtttcttaacacctcacacatcttttgttttgttttctcataatctctctctttaatccgcgcaaatgacagactgatgacaggataagttccctgcagctcacggtatttttcttctttccagattgccagatgttcaaacaaatctgacctgccggcatagtctatggaaaagaactgctccaccatactcattgtaagtgtctttccaaaacgacgcggacgggtgatcaaagtcgcactgtccccgcaatcccaccattctttaataaaaggcgttttatctatataaaaatagtttccctggatgattgtggaaaaatcctgtataccgatcgctatatttccagacattgtaacctccctgcttttcagattgatattgtgcattcctttttgttgtgataaattaataatataccatttttgtttattataccatacgcaacctttttaccaggagaatttcgatctatgaaaaaagtaagtgtcatcatcccatgttttaatgcaacaaaatatcttccgaaatgctttatgtcacttgtacagcagacaatcggaattgaccagatcgaactgatctttgtagacgatgcatccacagatgaggatgctacctggaacatgctgcaggaatttgaacgcgcctatccggaaagcattatgatcttaaaacttgaggaaaatatgcgccagggcggtgcaagaaatgttgccctgcagtatgcaacaggcgaatatattgcatttgttgacgctgatgactttgtctctgaaaattttctgttggaaacttatgaaaaagccaaagaatcggatgctgatatcatccagtttgaatatttttattatacagaccgtctgggtgccgtggactccggtcggaacattacaccggaagtaattgaaatttcttctgtcagtgaccgaaaaaaatttctgatctcagaaaaagttacctatggctgctggaataaactttaccgccacactctgctgaaagaggctcatacagcctacgcagaacatgtcatttatgaggagccactttttgtatacccgcttttatattttgcaaataaaatcgtaatcttaaacgatgcctactattattacagacaaaatgattctggaaccatgcgaaatgatatgagacaggaagaaaccctaaaaatgcatgccgatgtccagcttgctgtctggaatttcatgaaaaaaactccatttttcaaagaatactatgatgaaatcaaactatattttctccatacctatctgtacgagacactgtattttgcaaaactccgggattttaaaccctcctattctttctacaaagaattagaaaaaacgattcttgcggaggtgccagattatgcacagtccatttacagcgctctgattccaaagcagatggagctgtatcggatgatcggggaaggtatgacggaggtgaagtttaaggagtattgggagcggctgtgaggcactccctattataaaaaaagcataccagatcatctaacatctgatatgcccatcttttttatctataacttctaattgcgtctttaaaatattattttgttcgtaaacgctccatagtgggtacacccacataagcaaccgctccgaagagcggcatatcattcaagttgctttctgcattccactggcagcgtatctgaccagggaagcagatctttacagaaatccacaccatgttcatccatgtgcctagggatttcttccagaagatatttgaaataattataaggcttgaggttattcgccttagcagtttcagcaatgctgtaaatcatcgcatttgcttcggctcctgcaacggtatcaatcatgacccagtttttctttccaacacagaaaggacgaatggactgttctgcggcgttgttatccattggcactgctccatcttccagaaaggttctaagatacttttcctgattcaaggagtaggtaagaccattggcagttttacttttggctgggacgcaatgcagattctgttttacccacgcaaagtcagtaagcatcaaccagcggttttactgtcagctgacgatgactcagacgttcctctgcagattcatctgcaagcttattttcctcgcggtatattgcctggatctgcttcagtgccagataagccagcgaagattttttcttatcctttggcaatgctttcacggattcgtcaaagcggtgtcttgcgtgtgcccagcagccggcaatcttcaggtcttcacgttccttttcgatggtatgatagacttgatagccatctgttacacagactcccttgaacttcttaaggaaatctcttggatggcttgcattacgcgaaggctggtaatcgtacagtacgatctgtctgtcctcatacatcttaccggtacggtacacccacatgtaatgcttgttcccatcagtccggttttcttttgataccaggatcggagtttcatctgcctgaagcacatgatagtcataaagcttctgatgcagataatcataaaagattgagagatatctctcagcacacaagatcgtccagtgtgccatgtctgcccgatcaatgttaagccccattctctggaactcctgttcctgacgatagagaggtgttgcatttacatacttggcattccatacgccggcaagaagcgaaggtgataccaggctgtttcttaacaggtatgccggatgatccgcttttttgaagtgattatccttcttggatttgtagacacctacatgatgttcttctatttcaaccttcataggtgtaaaactataacgtctgtagatttcgtcttcaagttcataccagccatcttcaccaaactcggcaatgagttcttcttcggacatcttgtgttccaccagatttacagggagcccctggatatctttttcccgtctgcctttggttttcctgcctcttggcctgatttcatcttcatcaacgtattcatcgagcgaagcaactgcttctgcttcgttgaagaaaacgatgttgccatctacttccatgaaacagatctgattctcagtatccagtttctcggaagatttaccaaaacggttgttgttcaatacagctacctgttccaatagcagctgaagcttccggtcaatatcctgaagctgtgattgctggacaagaaacagttaaacaatcgtagccttatcaaagttattcagttgttcttctgtatattccatcgccataaaaaacctcttttctactaaggttaattatagcggaaatagacggaaatagcgagtatcactcatttcaaagttcggcatattgcctatacatacaagctttcaattctacgttttcaggcgctgcaaatatgccccttttgaaatggtgggtataaattataattgcacaaaacctgcataatgcgcttacaatgcagaataatggccttgcagatgataaatgatgcactgtttacaatgacaaaatcaccgttaaaaattctacgtattgcacaatcatcatgccatatgagtgggtggatcgacctcttgaacggtcttcttaggggtgatcgtcaatccttccatgagccaacgaaactgctggctggtgattgcctgtacctcagattcattcctgggccatacgaacttaccctgttccagacgtttgtataaaagaagaaatccatctttctcccagaccaggcctttgatcctgtcggattttcgtccacaaaacagatacaaagtatccagtacataaggacagttatccgtcttagcatccacgatggaagccagggtatctattccggatctcaaatcagtgtatccgcaaacgatatacactcgtttaaaacaagttgcatcattcaacatgggcaagcaccccaagaactttctttagaagaaaacctgatgtctgctccgtaacacgaatggtcatgccgttggcagatatatccaaaaaggactcatccattaatgcgctattagaatcaactgctgtcgaaactgattccgtatgcataagttccatagggactggaataatttcatgttctacggagtcacttggaatagaatcaaggcaggcttttctgacctgcgcaaggcgataatagtaattcgccttggtgatgttatttgcccgacaccattcgtctacggacatgccatttggacgattccggcattcttgaaccattgcagcccattcacgaatgcgacagctgcgtgctacttgtgatgtttgagatttcataaatttaaccctcctgactgtctaaaaagtttaggctaaactttttggactggtataaaatgttaagtctattttctcaaaaaatcataaagcattctatatactgactatgaagcgtttacctctgatcttcttagtgctgcgcttttttgcttttgcaagtgcacgataattttttcttgctatcctgcggtacgtgcggggtctggaaaatccatatgttttgcagaagcatatgataatcgtttccagtttttcccttgcttcattcagcagggaaaaatcctatggatatcggatattagatggagcacaggtggcatcaagcatcagggttcctttattttcagggaactgttcctgctttgtatcctgcccattaccttctcctcctgaaggtggattgttatgatcatcatcctttttgtcactggattccttttctttaactgcatccagcatatattcatttgcttccatgataacgtccattttcagacgtttgcggaacaggactaaggtacttgcatcaattggcggttcttcctgataacctggaaacccaatgaaatactggtaatacggattttctgtcagttgttcaacgagttctctgtcagaatactgatatttcgtttggatgatcaatgagccaagagcaagacgtaatggcttggctacccggccattctttcctttgaacaggcgggaatatttcttttcaaagacttcccatggaatagcatctgccatttttacccatctgttttcagggttcatgtgaagtcctattggctgattgaaatccaagaagttgctttgtgtattatcagtatatttgtacattattttccgctccgtaaatggtatttttctattgaaaactgcacgaaaaaagatttaagatctgttaaaaccgtgcactttattataccatctttgagcagaaaacacagtaaaatcaatggttttaagctaattttcttttaatcagcagacactatttatacatttcacaaccatacagttcttgaatgactaccgtttgtgttcctgctatctgtgcccctcttcctgtatttaatataggaatattttcctcaactattctatgctctatccattttcgataaatatccagatttcgacttgtctttatttgtcttccatcggtactggtaaccatgcgatattcttttccctctttaatctcatagcccattccacttgcatgggagcggttatctgtatatgccaaatctactcctatcaaaattattttgtcggctccaaaacgcagtgcaacatccaatgcaagggttgtaactgacccacctgtctgatatgtttgcacccccagttcctgcgcccttttttctgccaaatcatagcctttctgatatgcaacgtacgattgtcctttatagtaatccagtatttgggcagatgcagtagaaagcagtaaaagcggtatatgctctgttggcaaattgcatacctgcttatacatattttcctgtgcatcttcaataacaattaaatctggtataattccttcatttataagctttcttgcagccgtacctacagaccagattttcatttgttctctatattttttcatatcgtctatctgctcatccagcgaaggtccaccacctacaattgcaattgtgcgctttttaaaacaggacttcaatatactacattccggtaattccattctgtttattttatagaaattttcctctagtaaatgcgcttgttctcgcatactatttactgatacaaaaaaatcttccagtcgttcccttacagattcttcctccgtgatacataaagatggataataaatacaaaattctctgccacttatccatgcactaaacttttccataagctttattgcgtttgagttataaaaaatgcgtacccttttctgttttatatagtttacccagtctaaatctcgaaatgcttctgtaagcaattctatagaattttctaacacaattactttacaaacatcatccgcctttagtaatgcctgaatatggtatccaagtcccatgccgtatatcacatattctctcccaatttcttttaaaacatcctctgcccacacctgtgactgatattctggatttacagaactgtgaatcaaaatctctttgttttggcactttactttcaccgttggctgcccattaattgcaaacatctgtttataacgatcagatgatgatattgatgccgaagaaagtgtcttatacaactcttggtattcattttctgcatgttcttgcagctctgtcatatttttctcccaatagtctggtgccttttgtgtttcttcaccctgcatttttatttgaatattttgcaaacatgggagcaaatcacattctaatatatctgacaataagatataatctctgttttcttgtgcctgtaaaattgcctgtaaaatacttataaaatctgtttcatgcaaaatttccagtttttctgttaaaacatcaagtgcacttatcaagtttctcattatacatgagcctgtaaaaaagctttgttttctaaaattatttactatctgtggaatccataacagacattgctgattcaaatcatatatattgctctctggcataacatatcccttaacctttttgttttattatatagaataggaccagttttttaactggtcctaagtatctgtcctatttcaataacatcaacactgcctgtggctgcgtattaaactgtgctaataaactctgcgatgcatttaacaatatcctgttagttgtaaatgaaagcatctcttcgttcatattggtatcacgaatattactctctgctctctgcgtattttctgttgtattgtcaagatttttggttgcgtgctctaactgctcctgcgttgccccgaactgatctctccacgtcgctgcaatctcaattgcgttctgtatctttgctatggattcgctcgcaccctcatagcttgtcatgtctacatctgccacaccaaggctttctttgcttgcatttacaaaattaatggtaacgctctgatcagcaagtgaacctgcctgaattttaaagaagcccggttttgcctttggcgtaccctctgccagcatatactgctgattgaaattcgtatcatatgcgatatgatcgatttcgcttttcagttgttctacctcgtcctgaatagcagtacgatctgctgttgtgttaatatcatttgctgcctgtgttgcaagctctaccatacggtctaaaatctgctgtgtctcttctaatgctgcatctgctgtctgtatcatactgataccatcctgcacattggatgatgcacggtcaagtcctctgacctgatgacgcatcgtctctgagatgcagagccctgcggcatcgtctgcatcctcattgatccgatagcctgatgataattttctggacgaatcctctgtgtttttcacattcgtcttcataatacgatgctgattcagcgatggcatattgtgattaattaccatgtgttcacctcttccttgagtcataaattcctagtatatatatcgtaccattctgtccctttgcttagcatattttggcattaatcttgctttactacacattttctactatttttcttactttttcaatcacttcatcctgctgctcatccgtcagtctcgggaataatggcaagctgataatatgagagtatacctcttccgctaccgggcagtttacatctgcataaccatgctctctgtaatacggatgatgatataccggtatgtaatgcacattgactccgattccttccgcgcgcagtgcttcaaataccgctttacgatctttgttctttacctgaatgatatacaggtgccagccactttttgtatctggaagctgatatggtgtaacgatatttttacagtctgtaaatgccttattataacgttctaccagttctcttctacgcgcaataaaagcatctagttttttcatctgtgcgcatcctagggcgcactggatatccgtcatacggtaattatatcctaagtcgatctgctggtaaaaccatggtccctcattacaagtcatctggctttcatctcttgtaatgccatgactacggaacaaaactaattttttgtagaatgtctcatcatttgtaacgatcatgccaccctcgcctgttgtaatcggtttaactggatgaaagctgaatgttgtcatatctgacatagatccaatcattttccctttgtattctgaccccagcgcatgtgccgcatcctctattacgatcagatgatgctcttttgcgattgcatgaatcgcatccatatcacacggctgtcctgcaagatgtactgcaatgatcgcttttgttctgtccgttatttttctcctgatatcctccggatcaatattgtaggtatccgggtcgatatcagcaaataccggggttcccccacagtataatacacaattcgaagatgccgcaaaagtaatcggtgtcgtgatgacctcatctcccgctccaatccctgctacatagcatgccgcatgaagtgctgccgtatcatttgcgatcgcaaccgcatattttgctccgacataatctgccatcatcttttcaaattctgcaatctttggtcctgtcgtcaaataatcggaacgtagtacatcgacaaccgcctgtatatcgtcctcttctatggtctgtcttccgtatggtatcatgtccatcatcctccctactcttctcgtctgctttgtcttaatagtgcatatccttcaaataattcaagatcctcttttgttgtaatttttatatttgtctgatctccataagactgatatatcgtatctcctagcgcatacatcaggcttgtaatatgcggttctatcacatccaacagtcctttttcctctgctctatggtaaatatccagcaaatatccatatcggaatgactgtggacagcaaatctgtacctgtttatctctgtcaatccatgttttactttccctgttttcatcattagaccctaaaagctgaaaacaaggggtacaggaaacagatattccatgctccttgcacactctgataccatcggatataatatgttgacttgtaaatggggcagcaccatagtgtatcataaccatatcattgtcatctaacttatctttcagataattcactccattgatcactgattcttgaaatgtctcccctccatgcgtaatccactttaccttcgataactcgtagttttctattatggtttccagatagcgaatccaatccgcatgacatactatctcaatggcatctacctgtggatttttctgatacagttcaatcgtatatgccaacaccggttttcccagtatctctacaaactgcttcggacgtcctgcacctacacgtgagcctgttcctcctgccaatatcatcgccgtaatcatgtctgtatcctctatacctctattattccatagctttccattgctttatctataaatcgtatcaagttccgataagacggcaggaagaaaaagctatcatcgtctccaacacttcctttataaagcccccagcagaaccagtaaaatgccgagattggaataaacgcataataaaatcttctctcatcctgattcatcggtcttcctatatatgctttcaggtatctctctatctgctgatctgaccaatcatatctgcataaaatacatccaatatcatttgctgcataattaagcccggcatattcccaatcaatcagatacacctcttgcgtatcgctacacaaataattcggtgcataggtatcattatgacataaaacccgctcatatcccagccgttttgcatcctcctgtatagcggcatacaatttatctacctttacaataatctcctgaaattcccggaacagatttccttttgtcaatgaagcaatctgcattaatttttttccttctgcaacattgtcaaaaatttttacggctgggtctggttttaccagatgcagcttatgcaaatactccattgcagtacttaattgagactctgatgcttcaaaatcacaatatacagccttaggaacataatgcgacaatttccatccagatatatccatatatattacagatttatcgattcctatttcatatgctgcattctgtgcaaaaagctctgtttgtctgtcaatcagattacccgctgttcctcccggatgtctatacacatagccctgtccatttaccttaaagccaaatgagacatttgtgagacctgcattaataacatcaatctcattaatctcatttgggttacactttaaaacagagcatatattagatataatgtcagaatcgacattgagtaaaaattccgaatcgaactgtcttaaatcttcaatcccctcaaattccagaatacttctattatcaaattctttcacatacaaagaaagttcttttaaatgttttgcataaaattcttcccaaaacatatctgccacacggaatctgtcaatttcctgctccatatagtttctaaacttagcagaaaatgattcattaaaataagcatgaccgaccatcgccatctgatccattccgccaaccgatacatctgttattaccattgcatccgaatatgccactccaaactcccggaattttccctgataaaatgtacatgcccggtaagaataattcagtggattctcctctataaaaggattatccacaaaataatgatccgcacaacagatgtatgtattagcaagatattcccgtgctacataaagtgaatagagatttcctttctctgcaaatgtattatttacaatcaaatgtaccccatatttttcttctaaatagaaaaatttctccttcatgtatccaactacaacatggatttcttcaacacctgcctcaagcagttgcttaatctggcgttcaatcaagatctcaccctttacacaaaagatgcccttgggtttttcatatgtaaatggggcaaaatttgaagatttgcccgccgctaaaatcactgcattttttttcatgccagcccccctaaatccaataacctgtccatatatgcgaacttactcttttatcctctggaggatattccaaataatttccataaatagctcttaaataactatcatattccttcggaccatagaaattatcatcctcaaactgcaaaggtacaatatttttgaaaatatgactttccagtatctcccgttcaccatagggaccaaatatatttccacaatactttgttgccagataatctgcatcaagcttttccgtccaaaactgttctaatcttttctggatttcttccgttgaagttctcagtgaaatcatatgtttaatatatttctgttcctcaacagcacagtccattttctctcgtgcctgatccaagttgtctccaagcgcaaccagcgggaaaatatctatgcttatcccactttttattaataatggaaaatcaacaatattcagaaccgtcctcttgtctataatccttggataaaaataaaaatacccctcacttttcgccggcattgccatctcatattttttttcattccgtaatatatcatacaaacaataaatatcctttaccggcatataaatatctatatcatcatcccagggtatgaaacctttatgtctcaccgctcccaaaagcgttccatatgccaaataatattttaaaccatttttttcgcaaatttcccgtatataattcaaaatatctatctggatcctttttgattcttctatagttacctcttttaagtcacataaactatagcgtttcatcatttcttgtggattaaaaaatcgaaaaatatgattttctttatcatatcccaatgtctgaacctgttttgacatttcatcaaaatatggtgttccaataaaaattaaaatattttcatcatagggacatagtaattcttctggtttatatgcagttacaccctctattaacattttctttcgggatgtattattatcaataaccgcataaacagaaattccctttttcatcaatatactaattcctacgttggtagcctctgtaattccaaaaaaaactatttttgctttctttatcttatcctgatttttttctacaatatcggttaaattcttttctacgatatcaagaaaaacccattccgaaaaatttttgctttccaccagttttccccttaatccataataatttttttattccactcactgaatgtgtaattattatcatccattacaatttctcttgtcttttctgctccacaattcagtaacatatctaaaactgacaatccactttcaaatcccggataaacctgtgaatactctgcgccatcataatttatatatagatgattgataccattattattaaatttaccgatatctacataattttcgcttcccttgttagacatgtattctttctcacctagttcatggcatatatttattagcagctcatttttctccccctgaaaatcaaaatctctgtcatacaaaatctctgctttatttcccaattcctgtaaaacaaagttcgtaatatatatatccaattcctgcagactctcccattttctggaatacaattcttttaaaaacggaaaatatgtatcataatatggcgctttttgatatgcaaattttattgcattcagatgctgatttctccaattggttacattactaatttgaacatccgctatcaactgcccttcttttcctttattttcaaccggaactgaaatatacttccacccctcttttacccgaatcctattacgattttgccaggagctcttgtcaaactgaacctttgttaaaaataaaaatttatcactccgcattattttacctattaatccagggtatgcccaataattaggctgatgtatcgttaacatttttttcatcctccagtatacttcttacaatccttgctgcgccaagaccatctacaaggtctctcattttttttgacatttttattcttgcctctctactatctgcaagaatatttatatacactatcattgtttctatcattgtttccataccatcatcaatatttcccgcatgtaacatgatatcattttgggtaaatccaatatcatcatacttttgattgtccgaataggaaaaaaagatagttggcgttcctactgcacacaattcatacagcgtatttccagctgccgatattgccacatcacactttgccataatttcgctaatattatttatattttcataaatatagatattatcctgtccgtcatatcgtttttttatttcttcccgatatgcattataggctccaacaattacatgaaagcgcaatgatttcatatggcataatttatttaaaaaaacttttaaaaatcccttttcatcacttcctccgcacattacaagtacatcattcactttttcccgaacttcataatctttaatatgataacttgaaaattcttctcgtaatggcacatactgtgcacctaaaagtaattttgtttctgtttttttatatactcctaaatagtcaaaaataaaatgatataaattatagtttatcaatatatcaacattatatggacatttcatatgatcttctatatatactgtttttactttcgtatacaaggctttcatataagcttctgttaccatataactgtctacaattacaatatcttctgtagtgtttaaaaatccgttgagaatattaatttcactttccatattttcccagtcggtatttaaaattctatacgaaagtttataacgctccaataggatttgcggattagcatccgcaatcagaaacgttacttctttctcttgttttacaaattccaatgcaattgttatacatctcattatatgtccggatgctattacctcatttgcatcagctctgaaatatatcattttaaatttccttttgtttaatattagaattaattttccatatagcaggatttgcatctaagaactggataatatcttccaaatgaaacactttatcaggattatacaatgcagtaattatctgtgtaataacattcaaatcctcctcagtatccaatgtcagtctatatcccgaataatctttctctgccctgtcataatataccttttgtacatttgtgtataaatatggcgtaacatgctctctttcatatgtttccttggcatgataaaacgcctcttccagccatttaaaagaaaatatttcgacatccatacctcttgggtaagttaatttttgtccatcatttggaacatttgttaatatatcacatgattgcttctcataatcatcaattgccagatcaataatatccggatcaattaatggacaatctgatgtaatgcgaatgactgtttctgctgaattttcctttgctgcataataataccttgccaaaacatccgcttcactaccacgaaaatatttaataccattagcttgtgcaatctgcgcaatcacgtcatccttttcatttacagtagtagcaattattatctccttaattttttgagctttctgtatacgctcaacaccatattccaataatgttttattgcccacttttttcaaaatttttcccggcaatcgtgttgaaccgcttcttgcctgtataattactgtatatgacatattccacctctatacttcttttttaaaaacacccataatttctcttccaagtcccatttcccctaaaagcctgaatatttccaatgttttttcttccgatagacgctccattaataattccaactcgattcgtgcctgataacaagatttcccaacagacttgtctctgcaatagtttgttttttcatttagcaaattaaaatctataaaggattccccatatacattttcacacctgtatccagcctctgtcaaaaatctgataagcccatccttattaaaataatatggatgtccttcttcgtccagccagaattcgctatctactttttgcgttttaagaagatactcctgaagcacggaataattattcgcaaccttaatcatcaataccccatcatcttccagtatatttttgcacaaactcaacactattttaggttcaagcatcatatccaatgactgatccagatttactacgtcaaatttctttcctgcatctgccattttttttaattctacaacacaatctccctggcagaaaaaaggaagcatatccggattgttatttgctattccatgccttgaaaaatcaattccaaacacttcatagccatgctcataaaaatacttcagcaaatatccttcaccacagcctatatctaaaatggattttttttgtttttctaaaaaatgggagtgcaattctattatacgctttttttgtctgtatttactttcaaaaaatcgtttttcttcttcactatactgctgctcataatttcccttagactcttgataataagtatcctcaaaatcttttttcatagaactaagacttggttttttctttaattcataaaaaccatattcatttaaaaaaactttgtcatacatttagtgctcccccgaatctattaaattccagctcataggtgttcccttttttatatccgctactgctgtttttcctataatctgatcataatactttgtgtgcaacccaaaccccggtcgaatggagcgtacatttgcaggagagaatctttctcctttctttatgtcagacactacaaataacgatcttgaatgctctctttcttttttttgtgcatcagttaagtcaaagctgactctccccagtgcagcctctgcaattcgtatctgttcacacatttctttaaattcatgcatttccatcgaaaactctgaatctgctccaccatcacttctgtgtaaagtaacatgcttctcaattaccttcgcaccctttgcaattgcagttatgggaaccgtatatcccattgaatgatctgaaagtccaacaatacagtcaaatgtactctgcaatgctgtaatcgtttctatattcatatcctgatatggacttggataagttgacgtacattttaataaaattaccttatcattcccctcttccctgcatacctgcattgccaattcaatgtcttttagatatgctattcctgtagaaattaagataggtttacctaaacgtgctatttttcttattaatggaacatcagtaatctcaaaagatgctatcttataagctggaacatttatattctctaaaaactccacggccgtagaatcaaacggagacgaaaaacagataagtcccatactttctgcatatttttttaattcaccctgccactcccatggtgtatatgccttctgatacagcttatatagtgtggttccatcccacaacgttccctgtgttatttggaaataatcattatcacaatctattgtaattgtatctgccgtataggtctgcaactttacagcatccgcgccggcttccttaacaccttttataatttcttttgctctttcaaaatccatattatggttagctgacatttccgctattataaatgctggttcattttttccaacccaacgatttccaatacatatccttttttccatagattttccacctttaatgtatctctactgattttagcaactcctgaatctgctccacggacagccattccttgtttttccctgaactatactcaaatccgggttctacctttttcccgcctgcctgaatctttgaagtactccaccagtcaaaatgtggatacacaataaagtgtttgtcatattcataggtaagtaaagagtcctcttttgttaccataacctcatgcagcttttctccctcgcgaataccaacctccggcatctcacagcccggcaggattgcctgtgccagatctgtaatcttaaaggatggaattttagaaataaaggtttcaccgcctttagcctctgacaatgctttaatcacaagctgcacgccttcatccagactgatccagaatcttgtcatacgatagtcagtaatcggaagttcttttcctccatttgccacaatgtctctaaaaaatggaataacggaccccctgcttcccgcaacatttccataacgaacaatcgaaaagcagacatcttttgctccggagtaagcattcgctgcaataaacaatttatcagaaaccagctttgttcctccgtataagttaattggattcaccgccttgtccgtagaaagtgcaaccactctttttactccgcagtccagtgctgcatccacaatattcattgcgccattaatattagttttcactgcttccattgggttatactcacatgccgggacctgttttaatgctgccgcatgaaccacataatccacgccctcaaaggcacgatacagacgttctttatccctaacatccccaataaagaaacgaagttttttcccatattttttaaatttatttgccatattgaattgtttaaattcatccctggaataaataataatcttttttggatcgtaatgtgtcaacacatactctgtgaacgcattaccaaaagaaccggttcctccggttataagaatagtctttccatttaacatcttttctgcctcctgcatctactattgcatcctgcaataactctttatatatttatatcgacattttttactttttcttaaatatactttatatctcatctatcagagtaataatatccttaatcggcatcaacctttcatccacttcctttgcccggtggtatttcaatatatccattgccgtattctgcattgctggaaatgcactacgtgtaagctgattcgcataaattacaatgttgacgccgtgttgctgcaattcactttcatatacggtattataagacgtaggcacgacaacaatcggcgttgttttatctgtctctctaaatttatcgcaaaactcaaaaacctcatccggctctttctttctgctgtgaatcataatgccatctgcccctgcatccacatatgcaaatgctctcacaagcgcatcctctaatcccttttctaagataagactttcaatccttgctataatcataaaatcctgagtacgttgtgcccgtttacctgtcctgatcttactcgtaaaattctctatactgtcctgtgtctgttctacttctgtaccaaataaggaatttttctttaatcctgttttatcctctataataacagctgatactcccattcgttccaaagtccttacattataaacaaaatgttccaccaatcccccagtatctccatccagaataattggttttgtggtaacttcaagaatatcatctacggttcttaaccttgacgacatatctaccagctcaatatctggttttcctttagcagttgaatcacataagctggacaaccacatggcatcaaactgatctatttcaccgttattagctacaatcgtcttttcagctattaatcccgtaagcccactatgtacttccaacgtttttacaatcggacataacttcaataattgtcgcaaacgttttcttcgaaactctggcatagctgctctctctcttacaattgcttctatattctttacattctcattgtatgtatatggaacttctattaattttccaccccatttattaaggttctctattacgttgtcgcgaatcacttccattggatcgttcaaccagttatctccatgaatcacataatccggttttagctgttccagtattgttccatacattacctcattctgaactaccacttcatccacttccgaaattttctccagcatttgttttcgttcttcaaaagatatcgtaggaaaacggttataacgtatcattgcttcatcgctcagcacacccgcaacaagtctgccatatttttttgcctcatgtataatattcaaatgcccctcatgtataacatctgtgcaaaagcacgcatacacttttttcattacatcaccccatgatatttcataaaattgtttttattttcttctgcagtctcttttggtctcccaagatctttccgcgaatccatcgaaacttttatctcaataaaaatgagttttcttttctcttttacattttctaaagtatctttcaatccctgcagagaatccaccatatatgtctcttcatacccaactgtttttgcaacctccgcatagcttaatcccacgcatcccgttggcatacctccaactgactcatgtgcttcattatttaaacaaatatgtactagattttgtggtttctgttttcctataaatgccatgcctcccatgtgcatgagagccgctccatctccatctaaacaatacactctcttatccttcttctgtaatgctataccaaatgcaatcatagatgcatgtcccatccctccgactgttaaaaagtcctgtgcatgtcctccctttatttgattgctctgctcatatacttcccgcgaaatctttcctgtcgttgatacaacaatatcttccgcatctaatgtattaataatttctgctatcgcatcttcacgtttcaactgatactgattaaaatacgtctccatatcctcattctgtaaaaaatccttttttaatacaaaagcgtactgtcttccatccctcaatacctgtgctgcctgagcaaatttttcccgtatctcctgactggaaagctcatttccaattactgaatattcaatatccagtacattcaataagttttccgtgatttcacccataaatttatgctgtggttcatcttttttccccggctctccccgatatccaaccaataacagcattggaatgccatataccttttcatttgctaacgacgtaattggatttacaatattacccaatccactattttgcatatacacgcatgccggtataccagttgccaaatatgtaccaatcgctatgcctgttgcagccccctcattagctggaacaaaatgtgtaaattcctttttccctgcaccattcacataatcacaaaaaggttttaatgctgaatccggtacccctactaatgtgtttattcccaattcttttatctgttttacaaaatctgttaccagcaacctcttatcctcaactttccactacataatttattttgccatctcgtatgtattatccatctgttgcagttcctcaaatgtatctatttccacaatacaatcagaaggtatcttttctactgtaacaaaaatatcattcaattcctgattgacaatttcatcccaaaaaagcgactcatgtccgggagtctggtatgctttctgaatagcagttctgattaaataggcatcctcctttttccaataagatactcctgccatgttatacgcatctataccaccttttccaattttaacaattcttctattatcaaccgtaaacgcccaatctgctgaatatcctaaaaccattttcccaaaatagcaagattgagaaaactctttcaaaaatactgttttatctgttacatataaatctgcttcacaaataaaacaatccgcgcttcccaagatatctcctactgcgtacagagacgaaatattatttttctcaagatattccttattctcaattaattttaaattcgcatatttttcttctaaatatgtaaatttttctttcagataccccacaacaacataaattttttttacacctcgcaactgtaatccctgaataacagtttctattaatggggttccacataccgaaaccagtggtttcggtatgtgttctgtcaacggccgcatccttgttcccagacccgcagccattagaatcgcaatctcattctctttcatctgtttcttcctctaatccataatgtactggaagcgatacttccatttcccttagtccagcctcaaacacctcaaaaaatgtctcaatatcagactgatcaatcgctcctaacgcacataatcgaaatgtctctgtattattaattttccctggataaattgtaaaccctcttttgtagcaataatcatgtattgcagaaaagctccaatttggatcatccggatatttaactgtaactaccagtcctgcctgccaatcccgttttatcatatcttgaaatcccagccgttcaatacccttgtgcaaagcctcaaacactctggtatgacgctcccattttttttgttcgccctccgcaaagtattctttaattgcctgtcgcatcgcatatactgtctgcaccggcggtgtaaagtgcatttctccatgtgcttcaaaataatggtactgcatatataaattgcaataataggaacgttttggataagttttcgattgctctattattgttcttttcccaaccacaaatgatattcccgtcattgccattaaacccttttgtgccgatgccatacaaaaatcaatattgtcgtttttaatattaattggtctcattgcataggtcgatgttgtatctacaacaaatatagctccataagcatgtgccagtgctccaatttccctaatcgggtttaaaatacctgttcccgtttcattgtgtgttatatatacaagtgcaatgtcttgattttctttcagaatctgctcaatctgctctaaagatggtctttcgtctatcggaaacttaagatttataaatggaagcccataatattcacatatctctgctgcccttgaactatatgcaccattgttaatgactaaaatttttttacccgctggaagtaaagaatttaaacaaacatccattgaaatcgttcctgaaccgcaaaataataccgctgtgtattcccgttcatctccatgtacgattttaaccaaatcttttcgtatctgcttcataatttcaacaaattcctgctctcttggacaaatatcaggtaccacctgcgcatttttgacagtatccgttgtagttgccgggcccggatttaataaaatatttctcttcatttacatatctccattccataatctaacacatagccacattctctgcattttaatagataagtaaatgtgctatctgtttcataataatatttaaacattcctgctctacttcttcaacatgaacttcttttcctcttttatcggtaaggcatattgtaaagtctcccagttcaaatcttccatcataccgaaccggcatttgattgcaaaaataaaaacgatactgttcgcttaccagtgcggctctataaaaatcatttggatgcaaactttctgtcaatgcccagcgtcttccatctcctccaaaagtccgaggtgttcgcccctctgctccctgtttctcctgatatgttatgccagccagtttacacataaccgctgtataatctaaggatgacataacctctcccgtctcgcctttatattgtccatctcgaaacataaatgcaacgttggttctttccggtcctaaaaactgtccattctctggtatcagatatccctgtccatggtctgaaaacaatgctactactatctcattttctttatatgtgtgctcaagatatgaaaataacattcccaaataacgatccatatactgcaacatctgctcatactgatgctgctttgcagcatcatgcttttgttttaccgaagtcttacttcctgccctataggcacgatcttctattttaagatgtgtctgtacactcgtaggcaattccatttcatccgcaatatcatgtaaatctcctaatgacatccacacaaactggtttacttcctttaatgcttctatttcattgattacactgccaaccattttttcaacagaaaaaccggcatgctgtaattgataaataaatctgtcacatcctcttgcataaccgtaagatggaataattctccaatccccagaaaaaacagaggtatagtatccttcctcatgaaaatattccagcaatgtcttagacgtttccggaagtttccagtcaatttcattatgaaacatcatatggtgtgatgttgtaagtcctgacataaatcctgcaatacttggatatgtccattctcctgaactataagtttgtttgcaaaccattcctttgtcaaaatattttgctgtatttggcataagctgtgaaaatctatcttttgtcagcaacacctgtgccaatccatcaacaaaaacatttaataccagttttttcttatttccttcattttgaactggtatcggtcttcccacataacataatccggaggatactatttccctgccacctccaacacaataatagtaaaaacttttatcattatgctgaataaccggaacatttccattttctgtttcaatccattgtgttgtattttctttttctgcagctatcggaacaatccatttttccactgtatcaggcagtttcaggtatgttgtttccactacctgctggaattctactctccaatgcactgcatctttctctgttgtaatatgaatcggttcatgatacatcccaacatacttttttgcctcctcattttcataataatattcaccgcccatactatcaaatgaacgaaaccgtttttccttatatccaaactggtttttttcgtatccgagaaatgccggtatcatgtcttgaatcaaaaacgttttctgttcctccggtaaatatgcaattaattgttccattcgttccattgcacgctttgatgcctgttcgcaatcattatgaacttttttgtctccagcataggatgctaataattttgatatacaataatgtttgtatgcgttcatatattttgactggcattcatatgcttctgccaattttatatgtatctctaacagatacggatctttccttaatgcttcttcccctatttcaattgcttgctgtactttattttcttccgaaaaaaaccacattttcattaaatataagtctacatcttctggaaattcgttttcataattcaaaatcaagtcctgtatttgatttattgatttttcttttttcaaaaataatttccatatttgtttctttttttcattcatattgctatatattccttccaaaaatctaaacctcattaaacatccgatgtaatctgttctcaaacgtaaaatcccgtttaacccgttccagtcctgccatagcaattcttttacgttcttcctcatgctccagataatactttgcttttataaacatatcctgtaagttctcgtataccacacattcctctccaatcacaaaatactcttctaactcctgctgataattggaaagcacaaatccgccacatcccatcacatccgtaacacgaagtggtattcctgtcttaatcgtttttaaagatatattcagattgattttgctctgtgaaaatactaacggcatctgagtatagtagtctgcataacctttcatatgaactttcggaagtctggtttctttatctgtcgaatacagatctacgttgtagtgccctgacaacaatgccaatgccatatagcgttcccgtccggttgtttcacaggcaagcataaattccagttcctgcctgcccatctgaaatccatccgttgctactttcgcatattcaccattcatgtgatccagcagttcctgtgtcacaagctctggtatcaggtaaccaccatacactttcatctgtgcattgacaattccctctaaataccctttgatataatccgtcaatggcgcagtaaaatacgcatattccgtctgatacactttcccgaccaatgagacgtccgtcttgtaaatttcccgctcttttctggacacattcatatgaaatacatccgtatccaccgcaaggggcatatggtacgcacagactcctgctttctgatattcttctgcctgccctctgtcaaagaaaaaaagacggttgcaggaacgaaacagacattttgtatccctgatatggattggggaatcatatacccacgctgtgtatggaatagcgacttcctcacatatctgagataccaatggtgaaaaattaaccgacagcacatcggtatatgcgcattcctttatcttttttcgaaacagctccaaaaatctgtcatcatgctcccagtcttcaaattgataaaagaatgtatcgtagggaatttctaatttttgcaacgcacgctccattcctttgttcataaaagaatgccactggaaaaaaagtatttttttcataatttccggatttctccttctgatgatttcataaaatagacaaaaaccagtctcctccatgtatcagaaactggttttttatttatccgatcacttcttttgcagcctctcccaactgttcaaaaaccggaattacctttttaaactcttctgccattttagcatcctcatttgcagaaattgcatcatttaaagatacaattgcccgattaaattcttctttattgattctctctttcccatcattcaacaactcaatggtgccatttacaacctgaatctcccagttaatcgcatctacaatggattttaaaaacttatccgtgtcatctaaacgctctcctgacaactcctttacaataattgtcatgttctttaccagacgaccgttaaagtctgttaaaacctctaatgcttccatctgctcttttctgttgtcttccatttttttacccttatcttttcgattcctttcttgcattatatatatttatcgacaaatctcctgtatttcattagtaccttctctaactgcagtgtaatctgcttcttactcaaacatggtaaagaattatgcaaaaaaaccgatattattatcataaatcacactaacataaatcgtaacatttttaaggatatactatgacaaaaatattaaaacaaacaacctccggcggtatttcttttctggagcttttactggatgaaactttatgttccggaagtattctggttgaaaaggagcttgctatcgcagctggcggcatcaatccctacctgaatgcaaaacaaaaatatgaacttctgctgcgtattgcagcgaatggtaatcttatctttcttccggaagagaaagatcctgctctcccttatcttactttagaggacgatgtttccaatgaaaacggctggcagaccgactgttatctagtcggaaaatacagcgcagagcttcagcaaaacaatttatttgacattgtactacagtctcttttagacgaggcagaccacgaaggacgtaaggaacaaactctttcttttctggaacagatgatctcacataatgattcctactggaaaattgccgagggagactgtcccattttaatctataagggagacgacatctgccacaatgtgttaaacgtctttgcagaacagtttggtacagcattagctgatgccgggcgtaatgtcatctattttgactgtggcaaagaagatttaggcagactgacctcttatatgtaccagcactttcaggctatcatcggtatacagtcttacctcttttccgttaagatgaaagatgaggttcattatctgcatgaatacctttatggtcctaaatacaattttatctttgaccatcccatctggatgaaacaacatctgatgcaccattatccggattttcatgttttaacacatgatgaaaactatgttgcttttctgcaaaaatatttaaaaaaagaagccatattgtttccaccggcagggcttatccctcctcaccaccagacaaattctgattgttttcaaaccatgtatgatgttactttcatcggcacttatggcgattatatgcaggaagtccttctgatacaccagcttgaccgttccaaacggtttctggcaaaccgttttttacttaaaatgcgccgccatccagagcttacttcggaagctgcacttcttgctgttcttcaggataagggcatggtgctttctgacgaagcatttgtctctcttttttatgaattacgccgcgtgatttattgtgtaatgcactattatagatatcatattttagaaacactgttgaaaagcggcattacacttgatgttttcggagagacctggcagcactgcccattatgccgttaccagaatctgatctgccatccggatgttaccgtaaaagaaagcctctctatctggcagtattctaaaatctctttaaatatcatgtcctggcataagggcggattcacagaacgtatggcaaatattatgttatgtgggtcagttcttgcaacggatgctactacctatctgcagcgtgattacaccaaagaagatatgattgtcttttccctagatgctccggaaacactttcggaacaaattcaggcattattacagaatgaaccgctgaggcagtctattgccgcaaacggaaaagccaaaacacttaagctgcatacctggaaaaaacgtgcagaagaatttttaaaattacaacaacagattactgcaactgaagcaacttctccagcaactgcacaacctgcgcagtaataccaagacgttctgcatctcttaggatgatttctacacggtgattgaacgtatctgtttgtagataatcttttttgtatcgctgtaaaagaatacagcttgcaatcagatactgctccgaatcacctgatacccctaatgcggaaaattccgcatccagtagcacctcatccagaaatactgcctgatatttttgcgcaatacgcagggcaaaatcataatcttccagacattttagtttttcatccagacctcctatctgttctacacactctttttttacaagcagtgtaggcattccaatcatattatcccacaataactgtgcataaatatccccactctttttttcactggcaatccgctcatccggtaatgtaatgctttgccctgcccccatatcatatcttaatttatgataacaaaatccggcattcttatcagacaatatctgtttcatctgcttttccaacttccgcgctctccataaatcatcactgtcttcaaatgcaatataatcgtattgtgccatctgcatgccgcagtttctggctttcgactgccctccattctgctgcatcttataatatacaattctgtcatcgtgatagcttcgaatgatttgttccgtatcgtctgtagaaccgtcatccactacgatcagttcaaaatatggatatgtctgtgccagcacactttcaactgctttcccgacctttcctgcacgattatacgtcggaagaacaatacttaccggtatctcactctgcatcttactcattttccttctgctttgcagctgcaatgatatgccctttctctttttttaattccttctctatctcacaaatagattttccaaaaagagttttactgtctatcagttcttctgcccgtttacgtgcaagtactgccatcctgtcgtaaaactctttttctgtcgcataccggagtatcagttgtttcatggtagaataatctggcacccaaaagtcagctcctgcggcaactgacacatctcccactggcaatgtaaccgcaggaattccctgatacagggcttctgaaacggaactgccgcctccgcttctctttggatttacatataaatcacagcactctgtcaccgcaagcgcatccatctgttttcccagattgatactgttctggcgcaatctctcatatccgtttaccctgttttcataggtatcaaatagacccataaatgcaacagcaatccctgcattttcttcgagcacttcctcaagcatttgcaacagggaatcatctatttcctgatccagacgccaaccaaccagtagcagaataaacttatcctgccacagccccagctgtttccgtgtataactatgtgtctgctccttaaaagaaaacgtaaacggtgtctgctttactttttcttcctttactcctaaaatagcaagctgctttctatcgtcttctgtcaaagctttatctaccatctggtattcgccgcaggaaatcgcaattttggaaaataccgtgctgatcgtaatctgcggaacaaacagaccacataaatctgcacagatgtcacttcctccgatgctcagaataaattccggtttccgtttccttaccagttgaataatatctgccatgatccccagatccggcattttattttcgcactgatgaaattcaaatgtttcccccttaaatgccaattcctttaaaccacttaactcttctgcataggcagcatttaccaatccgtaaaacggagcctgtccttttgccggtatctgcatcgctgtattgattatcacgatctctttttttaaatatttttttaaaacatagcaccggtcgagcaatgtctttgtcggtgcatgttccattcctaatacctgtgatgaaaaaacaaacaccagattgtgatttcgctcctgccatggcacatatttcctctcttttatcccaaagctgttacaaaacagtccaaacagttcccggtaaagtctcgccattttctgattgactgccggtgtctgcagcttctgattcagaaactgcaccgttccgatctgccagaaatgacttaatttattatattccccgatatcttcatacgaagcatctaagatcagatccagcagctccagtgcataggtttcttcgccgctcaccttcatgcaaaacgacaatatatgcacccgcatccaggctgctgcattatctgctgctcccgcaatttcctgtaacaagcttttttgtgtttctgccgggttcttttgtattgcctcttctgcctgttttaaaacctgctctatttcaccgtatctggcaaaatagtcctccatcggatatgtttttattacatccagatattctaaaattgtcatcctgaacttacccctatctagttatacttcatattttcggaagtgtaacaatattgcaaaaccatcttccctatctcctgaaattgctccggcgttaactgtttatcaatcaatttcaaaagtgtccgattgaaatcgtcctccttgaaataaggattctctaaataatccggaaacagctctcttacacgctttaccatcctttgatacacatcaaatggaggattgtcaaattttacaaataatttaattaaggtgctgcaatagaatgtatacaaaaagctaaactctatctgccaataatatttgtcaaaaattcccagtttttgatacgtttctactttttgctcctctattatcatctgatccagatgataagtcatattttttttgtatactgtagaatcttctctttgtctgtaatgatagcaattatcagcaatatgataaaacgacctgatatatagccgtataactgccgaccaataattatcctcgtatttcaaatgttctggaaatttgatttcgttttctataattaactgttttcgaaaaatacaggttaccagtccaccgccatatcctggatgtgtaaaatctctgatccaatgatccccaccttctacaatgctattttcaaactgatcaaaacagttttcctttttctgataaataacttctcttccatctggataattcaacattctgccacaatctacagcatcgcactgataatcccttgcacacgcatataatttttcatacatttctggttcgatccagtcatctgaatcaacgaacccaatataagctgcctctgcataacttataccgacatttttagcaccaccttgagacatatttttctcaagctggattgcaacaacctctttgggatgtctctgctcaaattcacaaatacacctccatgtcttcccctcatctgttgacgcatcatccacaaatataaattggagtttttcaaatcctatcgtctgtttttctaaggaagccatacactgtggcagatattctgctgtgttaaaacatggaataatgattgaaataagtggtttcatcggtcttagttctccttgtaaactctctattttttagtatataataaccatataggaaatgcaaatgatactaagatcaggagtcgttatgaatattttaatctaccgttatggcagcatctgcgaaccggatgtgataaccggttttgaagagcttggcaaccatgtacatgaaattaccgcagagatttacaataaagatttattaccctctgagggagttaccctgctgaaaaacgaactgctcgcacacagctatgattttgttttcagcattaacttttttccctttatttctgaagtatgcaatatctttcagatccgctatctttgctggaccgtggacagtccggttatggaattatactcctattccatcaaaaatccatggaaccgcatttttttatttgaccttgcacagtacaatgagttttctccaaagaatccggactgcatctttcatctgccgcttgccagcaatccagcgcgttggaagcgagtaatttctcatgcaacacctgctgacatcagacggttttcttctgacatctcatttgtcggttctctctatactgaaaaatcgccttatgacagactccaaaatccacctgcctatttaagcggttatctggatggtattatggcagcacagtcaaaaatatatggctatcctttcttagaagaattattaacggatgaaatggttgcagagtttcggaaacatcttcccggattttatacgccaccggaaaattttacacaggatgaccgtatcgctatggctcgcatctatttagagcccaaaatatctgctatggaacgtgttgccacgatgaagcttctgggggcacactattccatacagttatataccggaagtgacacagccgggcttccggtatataactgtggtctggtaaaaacgcttaccgaaatgccactggtctttcattacagtaagatcaatttgaacattacctctaagtctattcatgacggacttccgctgcgcatttttgatgtgctcggctgcggtggtttcttactgacgaattatcagacagaactggcacaatggtttacacctggtcgcgatctggaatgctataccggagaagatgacctgctagaaaaagtggattactatctgacccacgaaaaagaccgtactgaaatcgcccacaacggctatgaaacagtaaaaaaatatcacaattacccggaacgcctgttgcagatgatctcacttgcctatggcattagctccggtaatgatacagaaggagtattatga

SEQ ID NO: 109 - DNA, 25267 bp, unidentified
  source 1..25267: mol_type = unassigned DNA
cacaatgattgcgtcctattacgataaaaattcggatgaaaatgtttatcttaaatgcgatttggatggaaatgtaaaggaaagctttttcacaatagctcataaagataatttgcaatattcaaccgatggaaaatacatatatggtgataattgtgtgcaggttactagaaaagatgcagaaaaacagattattacggtttacgatttaaatatgaatgagatagattcgtatgttccgcctgaatttgaaaataaagtatgcaataatattaatccacaggataatgaatattttatttttgaatctgtagatgataacggagaacgaattttagctatggcggataaaagtcaactcggctcaatcggcggagaaactataaaattcaccaagctttgcaagctgaaatgggctgaaaagaaggacagcaattattatgtagagggacaggcgagagttgaatgagaattgcaggtagcgaatatttaaagctgttttcaaacaaaatatttcttatttgcatcatcgcctttttctgtgctgattctctgtttttcgtaatgcttcaatcctctgattatgaaaattcggcaatttcaagtgatgtcggggcatatgaacagcttattcgggaatgtaacggcgcagaggataaaaatgcgttctttgaaagcaagaacacggagatacagattgcacaaattcttttgcacaacggaaatgcagatgtatacaggaaaaaatatccaaagctgtatgacaatgcggcaggcttggacttgaacgatgatgagctgtttaaccgctcggttatgctaagcaacatacaggctcagctctctcacatagacagctatgaagagtttatttccaatatgaagtcgagagccgagcaacagagcagcttttccatttttgcagagccggacagcttttcgttcagaaatattgaaaaaactcccatggattttgccgaggttaaaggtgttaagcccatcctcggcaacaacaaggcggttgaagccgcaacctcatatgaggtttcaagctatattttgctgattatcgtattacttgtcaatattttgatgttctccgttgaaagagaaaagggactttatgttcttgtgcggtcaacggcaaagggcagactgtcaacaatagcctgcaagctcttggttgttttgagcgttacggcggttgttagtctgctgttctatgcgagcaacattatgatggcaggcacagtctacggctttggagatttgagccgccccgtgcagtcgagcgagctgtttttaaactgcgcattaaatgttacaatgcttgaatacctgattttgtgggtactcggcaaaacgcttttgctctgctctctgtcaatgctcacggcatttttattcgtggttatcaagtcctccgcaaagacctatttaatcttggcggcggcactgatttttgaattttcctgcttcattttcattgacggtagctctgtgttggcttcgctaaaatttataaatattttctaccttatcagcggcaacaatattttcggctgttatcagaatgtcaatattttttcacagccgattaacataatcaccattttcatcggcttagctatagctctcttcgttgtcggagtttttggaacgacattggcgttttcaaggctgtcacagcataacggaaagctcgttttgctcgacaggcttatgtcacggctcggacggtttaagaaaatcaacggaagtgtgagaatatacagcggcgaggcttacaagcactacaaaacctccttcgccctcgtcgcagtaattatcctcgtggctctcggctttgtcagctacaatgatgatttgagtattatattcataagtcctcaggaaagcgcctatgacacctatatgcaaacgcttgagggtgagcttgacgaggaaaagtatgattttatcgagagtgaaagagcttattttgaggagcttgcaagagaagccgaggagatttcagccgacaacacgatttcggctgaggaaaaaacgaacaggctcaataccattgatggtattttaagcataagaggaatggcatttgaggacatttgcgctcagcttgaatatgttaacggaaaggctgagctgacgggcgaaaagcctgcacttgtcaatgaagtggtgaacaagcggctgactatggacacctttagggagtgggagtattttgctctgctcttagccgtggttatcttctgtacctccaacattttggcgattgaatacaagacctctatggttaacttgatttcggcaaataagcacggcaaagcgaggctgttgattataaagctcttaaccgtcctgattaccacggtgatttcctatatcttaatctatctgccgtatatgctcaactttatcaagaccttcggcacggcatcatttgatttaccgcttgcatattcaagagatttttcggctctgacaagcggcataaccgtgggcggatatattcttgctctcggctttgttcatctgcttgcggcagtcggcgcaacggctttggtctatctgctctcctacatatttaaaaatcagtttgtgacaatgataatttcaagcggcttgctccttataccctgcgtggtgttcattgataacagcaaaatccgtatggtatcggcattttcaaataatgctcagacagccgttatcggcataatcaccgccgtttgtctgctgataatcgcagtatcggctctgattatctttgtccccaagcgcaaaagtacgaaatttataatttaagtttcaaggcaaaagaggttgtaaatatggaattagctttaaattgtatcagcaaaacctataaaaagggctcggtaaaggcgcttgataatttcagcgttaccttaactccgggagtatacggcttgctcggaccgaacggagcaggcaagtccacgctgatgaacattatcaccgacaacctcaatgccgacggcggagaggtggtttacggcggtgaaaatatcaaaaagctcggcaaggattaccgagccgtactcggctatatgccccaacagcagggcttgtatgatgatttcaccctcaaccgctttttgtggtatatggcggctttaaagggcttaaaaaagaaagaagccaaggaaaagatcactcagcttcttgaaacggttaatctgacagatgccgcacataaaaagttaggctcgttttcgggcggtatgaagcagagagccttgattgctcaagcgcttctgaacaatcccgaaatcctgattttggacgaacccacggcaggacttgacccgaaggagagaatacgcatacgcaacttcatcagcgagattgccgaggataaaattgtcctaatctccacccatgttgtgtcggatattgagtttatcgcaaaggagattattttgcttaaaaaaggtcagctcatctcccacgattccccgaataagttgacaaaggagcttgaaaataaagtctttgaggtcgaaattcaaagggaagatttaaaatattttcaagacaattaccgtgtttcaaatctctgtcacaacgacaacagcataatagtccgcatcgtgaccgataacccgccgacagactgccaatacacaaccgcaaaaccaactcttgaagatttgtacctctatatttttgaacaaggaatgtgatattaaaattattgccgacaagtaatggcgttctatgctaatacttgtcggtatttttatgcactttttacataaaatcggaatggtataacggaatgtaaatacaaaaatgctcatatgccgatagtgtggataggctttgcaatatttatgttgctatgaaaaggctttacaacacagcttgtatcaatatggtttgttctcggctcggtttatgtttacggatttaagcgatattgatgaaacagctcaggcaaaggtcggtgccgaaatatggacagtaaagtccgacaaagcaccgcattcaaaaggaacaaaaagcaagacaactgtacttacattactttctctcagaaaagcctttatgtgtttatagtgataattactaatttcttgatatcttagtgtacaataataaattagtcacacaaactttgtcaatagtggaaaaaagtaaaatattgttgttgaaataaattggatattggtttataatagtaatcaataatgcagaaaacgaattaatatgtaaaacggaggtagttctatggaagaaaaggacgaaattgttatttcattgtcagatgtatggaatattattaagaaaaatgcagcttttattatcgtagttacgcttatttgtgctatcggaagcttttttataacaagatattttattccaaagtcatacacatcttcaattcagttatatgttgatacgtcaaatgatgatgaaaataaaaacagcctcaatatactttatgagcaaacctatgcacagaatcttgttgctacatatattaaaatgctgaacacaaatactttttacgcagagctttccgagcatataaacaacaaatatacccctaaacagcttagtaaaatggtttctttcagcagtgacgaaaagacggagatatttgacgctaaggttactacttcttctccaaatgattcaaagcttatagctgatgcggttggaaaggttgcacctgaggctatttcaagacttaaatccaaagcaacgctaaagatagttgattatgctcagttgcctactgctccttcatctccgaatgaaataaagaacgtaataattgcaatgatagcaggacttgttatatctgtcggaatttcattgctcagagcgttccttgataaaaagatgagatacaacgaggaaatgactatgattggagatattccgattcttgcagctattccaaaatttgacgcagtaaataaatctaacaaaaaaaaagataagagggagtcagtatgaaaaagtatccaaaaagaggctcttttcaagatgtaaaactcaatgcagaggcagtcggctttcagattaaagagtcttataaaaaagcaagaacaaatattgcttattcaattgtaaaaaaaggctgtaaaatggtgtctattacaagctcttcaaaatccgaaggaaagactattactgcagttaatatagctattgctcttgcacagcaggttgataccagggtactgattattgattgtgatttgagaagacctcgaattcaatcggtgcttgaaatacctgttgacaagggaattacaaattacctcaattttgaatgtgaggtatctgatatagtttacacttctaaattggacaatcttgacgctatctgttgcggtactattcctccgaacccgtcggagcttttatcaagtgacaatatgaaagaattaatcaaagagctttcaaaacaatatgattatattatatttgatactccgccaattggcgtagtaattgacgctttacccataataaagcaaactgacggtgttgttgttatagtcagagataatgttactgacatcagggactacaaaaaaacaattgatattctcaaacgctccgaagctaatattatcggtgttatatttaatgatgttgagcctgtcggtaaacgcaaatacggcggaggatacaaatacggttactacggcgaatacggctattaatttttttgttagaggggtgtagttttggcgaaaagaatgtatgcaaatgaaagaaaaaacaatattttcgaaaaaaaggttatgcctgaaaataatatttattatgcaaccttaaaaacaagacgcggttaccggtggctaagaagatttcaggatattttattctctctgatagctattattattctttctcccgttatgctgattacagttatttctatcattattgatgatcccaaaggaggtcctgttttttcgcagataagagtgggaaaaaacggtaaagagtttaaaatgtataaatttcgctcaatggttgttgatgcggaagacagacttaaggaactgctggaagaaaatgaaatggatggacctgtttttaaaattgccgatgatccgagaattacaagagtcggaaaatttataagaaaaacaagtattgatgagcttccacagctttttaatattctaaaaggagatatgagcattgtgggacctcgtccagctttgcccagagaggttgagcaatattctgcttatcaagcccagcgattgtttattacacctggtcttacgtgttactggcaaattcagccaaacagaaatgacatttcttttgatgaatgggtcgagatggatatacagtatatccgtgaacgcagttttcttgtggattggaaaatcatatttaaaacaattatcgtagttcttactaaacaaggaagatgatttgggaggtacatatgaaaggcataattttagccggcggttccggtacacgtctttaccctttgacgaaagtaacttcaaaacagttacttccgatttatgataaaccgatgatttactacccgatgtctgttcttatgaatgcaggcattcgggatatacttataatttcaactccacaggatacgcctcgctttgaggatttattgggcgatggacatcagtttggtgttagccttacatacgctgttcagccgtcacctgatggacttgcgcaggcgtttattattggcgctgattttatcggtgatgatacggttgcgatggtgctgggagataatattttcgcaggacacggtctgaaaaagcgtcttaaagctgctgttaagaatgcggagaccggaaagggtgctactgtattcggctattatgttgatgatccggaacgttttggtattgttgagtttaacaagaacggcaaggctgtttctattgaagaaaagcctgaaaagccgaagtcaaattactgcgtaacgggcttgtacttctatgataacagggttgttgagtatgcgaaaaacctaactccttccgcaagaggcgagcttgaaataaccgacctcaacagaatttatcttgaaaataatgcgttgaatgttgaacttctcggacagggctttacttggcttgacacaggtacgcacgaaagtcttgttgacgctacaaattttgtaaaaacagtggaaacacatcagcacagaaaaattgcctgccttgaggaaatcgcatatctcaacggctggatatccaaagaggatgtacttgaggtttatgaagtgctgaaaaagaatcagtacggtcagtatctgaaagacgtacttgacggaaagtacatagactatctttattaagaggggaaacaatatgaaaaaatatctgattaccggttgtgccggatttattggttcaaattttgtttactatatgctgaagaagtatgaggatattctcctcgttaaccttgacaagttgacttacgcaggcaatcttgaaaacctcaagggtgtggagggagattcacgtcatatctttgtgcaaggagatatttgtgacaaggagcttgttgctggcttgtttgaaaaatacgactttgactatgtgattaattttgctgcagaatctcacgttgaccgctctattacaaatccggaaatctttgttcagacaaacgttatgggcaccgtaaatctgcttcagagagcaaaggaagcgtggtataacgcagaaacaaagatatggaaagatggcaaaaagtatattcaggtttcaaccgatgaggtttacggcgcactcggtgcagagggatattttatggaaaccactccgctttcaccccacagtccgtattcttcctctaaagcaagtgccgaccattttgttatggcattccacgatacatacggtatgccgataaatattacacgctgttcaaacaactacggtccgtatcagttccccgagaagctgattccgctgatgattaataatgtgaagcatcataagcagctccctgtttacggcgacggtatgcagattcgtgactggctgtatgttgaggatcattgtaaggctattgatatggttgcaaacgacggaaaaatcggtgaggtttacaacgtcggaggtcataacgagcgtccgaatatctttattgtaaagactatcattgagcagcttcacgacagattgcaggacgagggaatttctgaggagcttatcaagcacgttgaggacagattaggtcacgacagaagatacggtattgatccgacaaaaattaagaatgacctcggctggtatcccgaaactccgtttgaaaagggaatcgttctgactattgattggtatcttgcaaatgaagagtggatgaacaatgtcaccagcggcaattatcagaaatactacgaagaaatgtataagaataagtaagagggaagacagatgaagttttttgtaacaggtgtcagcggacagcttggacatgacgttatgaatgagcttgcaaagcgtggttatgatggagtaggctctgatattcagcctgaatattgcggagtggctgacggttctgctataaccgatatgccttatgttcagttggatattaccgataaagaggcagttaaaaaagtaattactgaaataaagcctgatgcagttattcattgcgcagcttggactgccgtggatatggcagaagatgacgataaggtggagaaagtccgtgctgtcaatgccggcggaacgcagaatattgcagatgtctgcaaagaaattgactgtaaaatgctctatctgtccacagattatgtgtttgacggacagggaacacagccgtggcagcctgactgcaaggattataagccgctgaatgtttacggtcagactaagcttgaaggcgagctggctgtaagcagaacacttgaaaaatactttattgtccgtatagcatgggtgtttggtcttaatggtaagaatttcatcaagactatgattaatgtgggaaaagcacacgatgaagtgcgtgtagttaatgaccagatcggcacacctacttatacttatgatctggcaagacttctggttgatatgtgcgaaaccgagaagtacggctattatcacgcaacaaacgagggtggatatatttcttggtacgacttctgtgttgaattttacaggcagtatggattaaaaacaaaggttactcctgtgactacggaagaatacggactcagcaaggctgcccgtcctttcaacagccgactggataagaaaaagcttgttgaaaacggctttactcctcttccgacatggcaggacgcagtcagcagatatttaaaagaagcacagctttaaggagattttgaagatgggacaaataaatgtcgaaaaaaatgttggcggtatcgagggactttgcgtaattacccctgccgttcacggtgacagccgcggttattttatggaaacctacagtcagcgtgatatggaagaagcaggaattgatattactttcgttcaggacaaccagagtatgagtacaaagggcgttcttcgcggactgcattttcagaagaactttcctcagacgaaattggttcgtgtaatcaaaggttctgtttttgacgtggcagttgacctccgttcagaaagtgaaacatatggcaaatggtacggcattgagctgacggaagaaaacaaaaagcagtttttaattccgagaggatttgcacacggctttcttgtattgagcgataccgcagagttttgttataaatgtgatgacttctatcatcctaatgacgaaggcggaatggcttggaacgatcctgaaatcggcattgagtggccgagagttgtaggaacatataaaggaacagcaagtgctgaaggttatagcgtagatggagtagaactcaatctaagtgataaagatcagaagtggctcggtttgaaagatacctttaagttttagggttagtataaatagaggggcaaatatggaaggcaaactaaatatagcaatgtttggtcataaaaggataccttcccgtgagggaggaatcgaaattgtggttgaggaaattgctacacgtttagcaagaatggggcatcaagtaacttgctataacagagcgggacatcatgttaggggagaaaaatttgatactgagaaaatttccgcttataaaggtgttaggctgaaaacggttcctacaattgaaaaaaagggttttgctgcggttacttcttcgttttttgcggctgtagtgacagcgtttggaaaatatgatgcagtacacattcatgcggagggaccggcagctttttgttggcttccaaagctttttggaaaaagagttatcgttacaatacatggcttagattggcaacgtgagaaatggaaatccggttttggctctaagtatattcattttggggaaaagatggctgtaaagtattctgatgaaatcattgttctcagcgaagatgtacagagttattttaaaaaaacatataatagagaaacaaattttatacctaacggagttaatcgccctcaaatcgaaaatgcagagataattacagagaaatacggacttgaaaaggatggatacattttatatcttggacgtttagtgcctgaaaaaggagaacattatttggtagaggcatttaaaggcattaagacaaataagaaactggttattgccggcggagcatctgatacagatgaatatacagaaaaattgaaatccttagcagaaggtgacgatagaattatcttcaccgggtttgtacagggcaaaatattggatgaactttatagtaacgcttatgtgtattgcttaccaagtgaccttgagggaatgccgcttagcttacttgaggcaatgagttatggaaattgttgtttggtctctgatattccggaatgtacggaagtcgttgatgataaagccgtattgttcagaaagtcggatatttcagatttgaggcaaaagttaagcagtcttatagataatcctgataatgcgatgcagataaaaaaacaagcagcagattatatctgcaagaaatatgattgggaagaagttgtcgaaaagactgtaagtctatacagatgatggggcttaaggaggatatttgctttaacgaaggaagaaaaatgatgtcaagaaaaaaaatgagaatgctttttaaaattattttaggctttccaaaatcactttttttgaatttatactatttcccactttctaaggcattgaagtttccgattattgttacttctaatttaaagataggttctttaggaaaaagggggaatgttgtagttgataacccttacaaacgtatttttatcgggtatggggaggcatttgctcttggaaaaaagaattcctattgggaaattggaaataatgcgtctgttatttttaaagggaaagcaacatttggcgcaggaattcagtttatttgtacaggcaaaatgacgataggggacaatttttactgtaatggcgattgtattttaaatgccggtaagagaatagaaataggaaatgatttcttatgcggatggaattgtgaaattcttgacggagacgggcatttcattctttacaacggagaaagaaaagaaaactattcagaagttgaaattggtgagcatgtatgggttgcatccggtgtgactgttttaaaaggaagccgcatatctgacggctctattgtagcggcaaaatcctgcatatcaaaaaagattgaacagaaaaatgtacttatcggacgtaataacgaaattctaagaactaatgtaagttgggaaaaataatggaagtttatgcagcgtattcaaaaaatgaaaatctattaatgaaaagctcgtcaggtgctttgtttggagttatagcaaaactgtttctgaaaaatggagatcttgttttcggtgctgcatttgatgataattttaatttaaagcacatcggtatttctgacgaacaagagttatacaaacttttaggatctaaatatgttcagagtaaattaggagagacatataggacgattcgtaagttgttgcataatgataataaaaggattctgtttgttgggacaccttgtcaagttgcaggtcttaaatcttttttgggtagggatcatgataatctgtttacgatagatattatatgtcacggcgttccaagtcagaaaatgtttaaacagtatttggcatggcaaaagaaaaaacttaaagaagatattactgaatttgattttcgttgcaaaacgaaatctggttggggaatgtttggtaaaatgcaattgtcctcgaaaaaagaaataaatataaattctatctacgatccttatattggtaattttctccagtgtaacacttacagagaatcatgctatagttgtaaatatgcaagcaaagatagggtcggagaccttacattaggggattattgggggatacttaaagaacatccggaattctattcttccaagggagtgtcttgcgttctggttaatacagataagggtaatcttatctgggagaaatgtaagccttatttaaactatgtagaaagtagtattgaaaaggtctcgaagcataatgtgaatttgattcatccttctatacgtccggaacgcagagataatatttataaggagttaaattctaaaagttttcaagatgcaatgtttgtaaaggtcggaatgaagactaaatttaaaagtgcaattccgtatcagatgaaacaagcggcacagaaattattttgcctgataaaattagggagcagaaaatgaaaatcgggatattgacacatcactatataaacaactttggagcgtttttacaggcttatgcgctgcaaacaacattgcaggaattatttaaaaatgatgaggttgttttaattaacgatctgaatttaaaacatttcattattaataccggtggctggttcagacttagaaattatgaaggaataaaatcttggtttcataaaatccgtgtgcctattacatttgcaaaagaaagaaaaaagtattttaatctcactcctgtcgtgttttccgctaaaggtattaataaattaggcttagattgtattgttgttggcagtgatgaggtttggaacataaaggaaaataaaggtattgctctggaaaaatttggggtaggcttaaattctgaaaggttgatatcttacgctccatcatgcggaaagacaacggtagataatgatataaaaagcctgataaaatccggaatggaaaagtttgacgcaatttcagtaagagattcatttacggagaattttgtaaatagcatcattaataaatccggtgaattggttttagatccaacattccttattgatattactgctgatatagacagtctgaatttgaaaagtccgtatattcttttttactattgtgacggaatgccggatgaaatgaaaaagcaaattatatatcaggctcataaaaacggttattctgtatatggagcaggagaatgcaataagctatatgacgacattacggtaaatttaacaccgtttcaatgggcaggtatgtttaaaaatgcttcttatgtttttacaggtacctttcatggaacagtcttttctattaaaaacagaaaacagttcagtatttatgccacaaatgagagtcgaattcgcaaaattcaggatttgctggatcagctggaaatacgaggaagagaagcaaatggctttgaagatattaaagttaaagagccgattgaatataacagtgtttactgcttgattgaacaaaagaggaaaagcagtttggaatatcttaatacaaatatacgttgatattttagttaaatctaaaacctaaaatgataattttatgaaatctaattgtaaatttatcagcatatagagtagtctgagtttataagaaaggaatacagtaatgcagccaaaaatatgtgtattaatgtgtacgtataatggagaagattttttgcaagaacaaatcgatagtattctgaatcaaagcaatgttgaagtgatgcttaatatcagagatgacggttcaacagataggactttatctatattagaatcttatgaagaaaagataaactggtatcaggatcagcatctaagtgtaaacaagggttttataaagttggcgaaagaagctccggatacagaatattacgcattttcggatcaggatgatgtttggcttcctgataaactggatagggctatatcgtttctgaaaaatacagacaataaaaaacctgctatgtacgcttgcggtcagattgttgtggatgaaaatttagagtttatgtttcagcacaatatgaatcctaaccgaagtaaagacgatttctttgccaagaatagtttttccggaaatacgattgtatttaataggaaattgttcgaattgcttaaaatggcaaatttatctgtcgatccggagcaggtaaaacatgatcgttttttgactcgaatttgtattgcctgcggcggagatgttattgttgatacagagaattatattaaatatagacagcatggctctaatgtcgtcggagttcgccatggctttaaagaggtgatttttcagatcaaacagtatctgtttgatgtaaaatttgttgcagaattcaaaaacttattagcagattacagtgaaaacttattaccgcattattacgatgtgtgtaattatgcagttaaatataggcacaacttttttaaacgaattttgttttttaataaaattaagatgatatttaatgataaaaaaataggctttttatttcatctgaaaatattattaggtttgtattgaaaatcagtgcgttttccggacaaaaggttggagaattattatgaaacgaattgttattatttgtcatgacagagctgtttcgggggcaaatttctcgcttcttgactatctggaaatttatgacagaaataaatatcaaattttggttgtattgccgcatctaggtacagagttatgcagtaagcttgaggcactgaatgttaattttgctgtcttaaatttattttctgttactaagccgattggaaaagtaaatataaaaatcagattaaaaaagatattacagaggattattaacagtctgaaatattctttcaaaattaagaatatggagaaaatactgagagattttaatccggatcttattatctcaaattcttttgcaacattatatggagcattatttgctcaaaaactaaatgtaaagcatgtgtttcatataagagaatatatggagctggatcatcagacaacacattataatcctaaaacggtagagcaatattgcagaaattcatatgcagtgtacatatcaaattctatcaaagattattatgaatcaaaataccattttatagatagttgcgtcttgtacgatcgagtttctcaggataagacgtttataagagaaaggcatttttatgatgacaagattgttaaaatgttgattgctggcagtttgattcctaataagggacaaattgatgcaattaaagctactaaaatattggcagatgaaggatataaagttgatttatatatttgtggcaaaggaacagatgagaataagcttaaaaattatgtgcgggtcaacggtattaagggaatacattttttaggatttgttaacaacctaaatgatttgaggaaaaatatagatatttctttactatgctctaaaaacgaagcattaggaagagtgacagttgagtctatgtactctcattctcttacaatcggcacttgttctggcgaaacaaagtaccttttagatggcggaagaggcttattctatcatttcggagattcaaatgaattggcagcaaagattatctgggcaattgagaatattgatcaagttgaaatgattacggatagggcatattcttacgctgtagaaaactttaataaagatattttagattcaattgtaaggtgggtggaatagtatattgaaacaaaaatttgatgttggatttgtaatcctaaattataaaacatatcaagatacgataaaatgtgttcaatcaattgtaaatacaatagatacagataattattttatcgtaattgttgacaatggttctgacaatgagtctttggaagtactgaataaagaatatgaaaaagagtataaaattgcggttttagatgctgaaaagaatcttggattttctaaaggaaataatgtcggaattaaatatctgcgagatttgtatgactttcaatatattgttgtactaaacagcgatattatattatttcaaagcaacttctttaaaactttggatgctctctatgaaaagaatcattttgccgttttaggtccaatgattattaacggtaaattgaatattaaatcaaatccgatgagaaaaaatagattaactattgagcaagtaaaggatgaaataaggtattgcagaaagatgctcacatttaatcgttttcatttgataccattgtatgaacggctgagagcaataatgaaaaaaaatactgttcttaatccggaattatacatatatcaaactgaaaacattacgttacatggttgtttttatgtgttttcaagtcttttctttaataagtataaaggctttgatgagctgacttttttgtatcttgaagaagatattttacagtaccatttagagcaagccggcttgaagtccttatattcaccggaaatagtggtttatcataatgaaggctcgtccactatgtttcaaagaaaatctgcggataaaaataaatttatttacagcaatcgtattaaagcattagaggcatatctgcaattaattttatgatggagcgtagttatttaagattatcatttcggaaaggataaaaaataatggatggtgtgacattatataatagaagtggctccggaaagttatcacttagcaacatggccatttatttacttgtctttatttgtatgtttataccaagaagattaagtattggtatagatgtttataaaatatttcttttaattgctttaggctttgttttgaaaagcagttccggaaaattggctatgaagatgaaagagtttaatgtgttcatgctgttatttttcggaatggcttttttcagatattttatagatttcaatatgataacaggtatgggcctattccttgatacgctggtaatgatgtttttatctgcaacactattttgcaataagaataactttgcaaaatttgtaagagtttttgcaatagggttaattttttattctatattatgtattattgaatctttcaccaattttaatgttttcgatattatttcagggaaatctctgggaggattcgcagcgaattcaatgaggtatggaataaatcgatcatatggaagttttacaacatcaataaataacggtttatttttgtcccttgcaagtggcttggttttctactttgccataaatagtcaaaaagggaagaaaatatatgggtggtcttgtacacttagtgcgattgcctgtatattaacattatcaagaggaccgcttttgggacttatgattttctacgtagcttgcttaatgaaagcaggtttttatcgagtgatacaaaggcatacgcttcatacgatagttatcatatttcttatttgctgcctatttgttatacctcagacaagaaacgcaattttagcgttttataatatgtttgcagctatttttgattctgatgctgcttcaaatattgcatcttcttttggaacaaacgcaaagggtgtaggaaacagactggaattagtgtcttgggtttgggaaagtatcgaaggtaatgaagcatttggtgttggaacaatgactaagtttgcttataattttttggcaaacactaatcagtaccttgttaagacatctattgaaaatcactttttatatgttctttatcaattcggagttgtgggattaattcttttttgtctgttttggtttaatgagattatactttttgtccgtaggataaagaaaaaaaagctacaagggttaaaagattttgatttttttatgttgattacagttatagagtatcttattgttattacaactgttgcttcttctgatgacataagatttgtttatcttcttttaggaatgtcagctgcgtatatgcaattatacaataatggaacgtgggatacagtattgaaaaggatttgatatagttatgaaaataggattattaggtgtatcttttttatccggaaatttagggtgtcaggcattatcatattcgtgtttagagatattgaatataatagcaaaagaaaagcaaaccacatttgacgtttttgtaatgctgtcgttcccaacaaaaaaatggctaaaatcaagaatgaataaagaagtttacaaaaaaccttctttgcctaaaggtcaatatagtaacttaaatgttgacattctattttacagacaaaaagaaaacaaaattttgttttttggaaatgtcaaaaagttaaattacgttattgatcttacggcgggtgatagctttactgatatatacggtaaggaacgcttttttgaaggcacgagtatgaaaaattacgtaatatcaaagaacattccgcttattcttggaagccagacaattggtccttttagagataagaatatacaaagtatagcctcagaaacaatttctaaatgttatgcagtttatgcaagagataaaaaatcatatgattacacaatggaaatttctgaagttgaacccagattaacaacagatgtggcttttttccttccgtatagtaataaaacaataaataaaacaaagattagagttggagttaatgtttccggattattatggaatggcggctatacaaaggataatcaatttggcttaaaatttgattatcagaaatattgcagaacgatattgtcagaattatctaaaaatgatgattatgaagtgcatttaataatccatgtatattcagagaatatgtcagtattggataatgatttaatccctatggagatactcaaaaaagaatttcctaatgtaattgtatctcctgtttttcagacaccaatggaagctaaatcctatatctcaacgatggatatatttacaggagccagaatgcattctacaattgccgcattttctgctgctgttcctgtaattccattttcatattcaagaaaatttgaaggcttatttggaagcctggattatacatatttagtaaaaggctgcagtttttcattagattacgcagttgaatgtacattagcgtggattgagaaacgttatgaactaaagaataatatgaccaacgggatgagaattattaaagagcagggagagtttttaattcaggatcttggtaaaatattattgtaatatcttgaactattattttctaaaatatgagaggaatggtgtttgcttgaagacaaatattataggaaatggcaagatattgttgaataaattctctgatatgtcgcctgctgccaaggcatcaattgctatggttcttgcgaaatttgtccaaaagggcattgctatgattagcgctccggtttttacaagaattatgcctattgatcagtatggacttgtttccacattcacatcatggcaaaatatactttttataatatttacccttaatttgtcaagtggcgtttttaataatggaatgcttgattttaaaaaagatagagatagcttttctttttcagttctctgtttggcaaacgcattgacagtaatatgggcaattgtttatttgatattttataattggttgtcaccgatacttgaaatgccggactatctaatgataataatgtttgcatattgcttattctttccggcgtacggtttttggatggctcgcgagcggtttgaatttagatataaggctgttaccattgtaacaatactattggcattgatatctaatgttgcggcagtaattgttgtaatgattttgcctgatgatgtcaagggtgttggtaagcttgtaactacagaactggcaactgccgcagtcggtttgttttttgtagtttatttgtttattaaggctaaaggaaaatgtaatttcaaatactggaaatatgcttttgtgtttaactttcctttgttgccgcattatttatcgatttatgcattgtcaagttctgacaggattatgattacaaagcttgtcggaagcagtcctacagctatatataacgtcgcttatacggtagcatcaattctgttgattttttgggattctattgatgcatcatatgccccttggatatatcaaaaacttgaagaaaaatcctatgaatcaataaacctgagaggcaaacaaattttacttttgtttgcgggaacaacgatcttttcgactttgtttgcgcccgagattataagagtgttagccccatcgagttattatagcggaatatatgttattccatctgtagcagcaggagtgttttttaccgcactgtattcattgtatatgagagttgaactatatgcaaagcaaacaaaaaaagttactgttgctacgttctgtgctgcactcatcaatatcgtgttaaactatatttttattcctatatttggtttttatgctgcgggatatactacgctggttagttatattttcttggcagtattccattattttaatgtaaaaaagattggctacggatttgtttataatgtgaagcctctcttgctgatatcagccggggtattagtatcaattgtatttatcagcgcaatctatgaatatgctatcatcagatatgctttgattgttgcaatcttacttgtgggaatattaaaaagaaaagatataattaaattaataaagaaacctatgtaagaaatttgtctacattaaggagaatttatatgatgaaaagtttccttcgtaaaattcgtagtttcaaacagatttttccaattctaaaaagcgaggttgacggcttttataaaagtgataaagaaaaattatcatatcgtacattgatgccttgtcatactgttgaaaaaggaatggcactaaagaattatgagccgggacacggtaaaaaagcagttaatgaagtgctgaatcgaatgtccgagttttctcagcaagatataattaacaactatccgtttcttgagtgtgtaagcgtaatatcttgttggcttgatattcaggaaacagctgatgttgatgtgaagctggaacgtgctcgctttgaagaacagttaaatagatttgaaggaattgagtattccgattttatcaaggctgctgaagatatggtgtcaggtgcgtcgtttataaataaagagtacttgttagagaaatcccatgctcaatttgctgatttagctaaaaatcgacacagtatcagagctttttccaatgaagaaataaccagggaagaattgatgcgtgttataaaaacagcaagttatgcaccttctgcctgcaatcgtcagcctgttaaagtatacacatcattagatgccgataagaataacacaatttcaaagtatgtgccgggaaacaagggattcgaaaatgatgtgccttattatatgattgtaacttctaacagagaatactttggcaatagtgaattctgtcaatggtttgttaatggaggaattgctttagcctacattactttaagtatgttttcggaaggaataggtagttgtatttttcaatggccatccaattatccgggagagcgtgaattgaagaaattatccggcatttctgaggctgaatcaatttgcggtataataggttatggaaaattacctgagaaagtaaaagtaatcggtgcatgtcgaaaacccgtagatgactatctgaaaattttttaattgttattattggtgatttatatggatataggagcgtcttataaaataacatgggcgatgtttttttgtaaccttgcaatattattgcatcatgcaaacctaaaaaactattttaatggtgacggtaattcaattattatatatgttatggactttttctctgtcattgccatccctgcaatgacatggttcttcttcatttctggttaccttttttttagacaatttgaaatgaatcaactcctaagaaaatggaaaagtagatttaaatccctcgttattccatatttgttgtggaatacggttgctgttttcttattgctgatttcaaggacagagagatatgagggcctactttcactaattcaaaagtattatttgtgtataaacggtaccggttgtgccgatggtcctctttggtatgtttttagactgtgtgaatttatattagctgcacctgttattttctacacagtaaaaaatagaaattggaaattaacagcaatagtttcgattttgatttatgcctttaattgctattttggcgttgaatattctcaaatatcttattttcttcccatctttatagttggagcatatattggggagaatgagagtcagcgttttgaatcttattttggaaataattgcttcaaatggaaatacgcagttatttcgattttgcttttgattatagtgagccattgtacaactgtgtttgcatcagttggtgcattacaaatgttatttcgatatatagctttgattccttttatcggaattgttcactcggtgaaagctattaaacctatggagataactggctgctcaatgtttttctattgtgcacatgatattgtatataggattgtcaggacaattgtattgaaatttcacgtcagtatatttataagttattttgcattgataactatttcgtttttcatactgcttgccttgtattatattctgaaacgttattgcggaaaagttttatgcgtttttacaggcggtagatagtggttttatttgttttggaaaaggaaaatattctcaaaaatcgaaacttacggtataagataagtagaaaatgattaagtgtttcaggagttaaagtatgaaagaaattaataaaaaaagaattgaatggatagatattgccaaagcttttggtatcatttttgtagtattggctcatgctctttcaaaagatacttttctgtggcgctttatcaatcaatttcatatgccgtttttttttgcaataagcggttttctatatagcacaaagggtacaatatatgagaatgtaaaaaagaaaattttaactttgtatcttccgtatatcagttgttcttttgtaactatgattgttggatggattgttggagaagctttttcaattagcaaaattataaaaattttatttttgatggattggggtccgttgcttggagcaacatggtttcttgccgtgttgttttatgcgatactaatttatgatgcaattgttagaatttgtataaaatttaaattatctcagaatttaataacttgttttgctgttgtatgtcttattataggattgtattttaactttcctataagacttaacaatattcttttagctgtcttttacattcactttggaaaattattaaagaagcattattctaaactttttgttaaaacttcggtattccgaagaagcggagaggttctttttgttggaatagtatctttgatttcggtgttcaatacatcatcatttgcatcaaataccttttcatccaaaagttgttttgtgattgcttcaattttgggaacatttggaatgatgtcttttgcatatggcttttcagaaatatgcagatttaattttctccgtagacatctgtgttttattggctcccatacgattggaattgtaatttggcaatttgtatcttttaaaatagtgagtattttgcaaatttgtttttaccatttaccattagagagaatttatgattatcctattatctatgattactctttcggaccatgggttttcattttattacttagcggaatatacatttcgatattgatacatactttattgagttttcctgtcaaaagagtaattgggctaatcaaattaagatgattatagtaaaaattattaaattcgaaaaatagttgctataaatttaaattggtatgtttatccgaattttagtaactaaaatgaagtttgcattgatttctgaaaatattatgatttatcaaaaatgttatgcgttgttaaaaggggagagaagttaatgaataaaatagatttgccggttctctatgagcgaaaagaagaatgttgcgggtgtacagcctgttatgccatttgccctaatgatgctattagtatggttgaagatgaagagggctttgaatatccgcagattgatgaaagcaagtgtgtgcggtgctgtcaatgcattaaggtatgtccgataaaagcagcacgagcataggagaaaaaatgaaaacaacattacttatcatggcggccggaataggcagccgatttggaacaggaataaaacagttggagccggtcgatgatgcaaaccatatcatcatggactactcaattcacgatgcaatcgaagcaggcttcaaccatgtagtatttatcatccgtaaggatatcgagaaggagttcaaagatgtcatcggagatcgcattgcctcaatctgcaagtcccacaatgtaactgtggactatgctttccaggatatcaacgatattccgggagttctgccggcaggtcgtactaaaccttggggaaccggacaggctgtgcttgctgcgaaaaatgtgattgagacaccgttcattgtgatcaatgcagatgattactatggcaaggaaggcttcaaggctgtccacgagtatctggtgaatggcggaaagtcttgtatggctggtttcgttctgaagaacactctgtccgataacggcggtgtgactcgcggtatctgcaagatggatgagaatggaaacttgactgaggttgtggaaaccaagaacatcgtaaagactgcagatggagcaaaggcagacggtgtggttgttgatgtgaattctcttgtttccatgaatatgtggggcttgactcctgattttctggatgtgctggaaaatggtttcaaggagtttttcgagaaagaagtaccgggcaatcctcagaaagccgagtatctgatcccaatcttcatcggtgagctgctggagcaggg

SEQ ID NO: 110 - DNA, 13949 bp, unidentified
  source 1..13949: mol_type = unassigned DNA
atgaaagtagtaatcctggctggcggccttggcacgcgcatcagcgaagaaagcgtctacaagcccaagccgatgatcgaaatcggcaacatgcccatcctgtggcatatcatgaaggaatattcctactacggctttcacgactttgtcatctgcgcgggctacaagcagcacatgatcaaggagtggttcgcggattacttcctgcataccagcgatattacgtttgatttcacccgcggccagaacgagatgatcgtccacaaccaccacaccgagccgtggaaggtcaccgttgtggacaccggcctcaacacgatgaccggcgggcgcatcaaacgcattcgtccctacatcggcaatgagaccttcatgatgacctacggcgacggcgtctgcgatgtggacattgccaagctggtggcattccaccgcgagaacggcaagatcgccacgctgaccgccgttcagcaggagcagcagaagggcgttctggatattgccgaggataattctgtccgttctttccgtgaaaagaaggccagtgacggcgcgcttatcaacgcgggctatatggtgctggagccgcagattttcgactatctggacggcgacgcctgcgtctttgagcagaagccgctgcagaagctggccgaggagggtcagctgatgagctatatccacaagggcttctggcagtgcatggacaccgcccgcgaaaagcaggtcctggagaaaatgcttgccaccggcaacgcgccctggaagaagtgggaggattgatgatggtacattacgatcctgaattttaccgcggcaagcgggtgttcgtcaccggtcacaccggtttcaagggcagctggctctgcaagatgctgctgatggccggggccgaggtcacgggctacagcctgcagccgccgacgcagccgaaccttttctccatcgccggcgtggaggacaagatgcacagcgtcatcggcgacatccgcgactttgacgcgctgaaggccgcttttgacgcggcacagctcgacattgtgctgcacctggccgcgcagcccatcgtgcgtgacagctacaaggacccgcgctacacctatgagacgaacgttatgggtacggtcaacctgctggaatgtgtgcggctggccctgcagcagggcagagcgccccgctcggtgctgaacgtcaccaccgacaaggtctaccacaacaacgagtgggcctggggctaccgcgagaacgagccgctggacggtttcgacccctactccaacagcaagagctgctcggagctggcgacgcactcctacatcaacagcttttttgccgataaggctgtggctgtctcgacggcccgcgcgggcaatgtcatcggcggcggcgactttgccaatgaccgcatcatccccgactgcgtccgcgccatggccgcgggccgtaagatcggcgtgcgcaacccctactcgacccgcccgtaccagcatgtgctggagccgctggcggcctacctgctgatcgcccagcgccagtacgaggacagccgctttgcgggctactataatgtaggccccgacgactgcgactgcgtcaccaccggcacgctggtggatctgttctgccgggcctggggcggcgacgccgcctgggagaatcaggccgaggccaatgccccgcacgaggccaacttcctgaagctggactgcagcaagctgaaaacgaccttcggctggacgccgcgctggcacatggccgagtgcatggaaaagactgtcgccttcagcaagatctggcttgccaacggcgacgtcccggcggagatggaaaaggaaatcaatatttttttggaggagcaataattatgtggaagaacgaggcagaagcccgcgagcagatcaaggcgatggtcgccgagtattatcacgacttcaaggagaaaaaggccccttatcaggagggtgaccgcatcacctacgcagcccgcgtctttgacgagaaggaaatgtgcgccctgactgacgccacgctggacttctggctgacgacgggccgctttgccgaccagttcgaaaaggagttcgctaagtggatcggcgttaagttcgcccatctggtcaacagcggttcctccgccaatctgatcgccttcatggcgctgaccgcccccgagctgggtgaccgccagatcaggaagggcgacgagatcatcaccgtggcctgcggcttccccaccaccgtgaccccggccatccagtacggcgcggtgcccgtgtttgtggatgtgaccgtgccccagtacaacatcgacgtcaccaagctcgaggccgccctctcccccaagacgaaggctgtcatgatcgcccatacactgggcaatccgtttgacttgtccgcagtcaaggcgttctgcgatgcacataatctgtggttggtcgaggacaactgcgacgcgctgggcacccagtacaccatcaacggcgagacccgctttaccggcacctggggcgacatcggcacgtccagcttctacccgccgcaccacatgacgatgggcgagggcggctgcgtttacaccaacaacccgctgctgaaccgcctgatcctctccttccgcgactggggccgcgactgcatctgcccctccggccaggataacttctgcggccaccgctttgacggtcagttcggcgagctgcccaagggttacgaccacaagtacgtctacagccactttggctataacctcaaggtcaccgacatgcaggccgccatcggctgcgagcagctgaagaagttccccaccttcatcgagcgccgccgccacaactgggaccgcctgcgcgccgcgctggagcccgccgccgacaagctgatcctgccggagccggctgccaacagccgcccgtcctggttcggcttcctgatctccgtcaagccggagagcggcctggaccgcaacgccgtgacccgctatgtggagagccacaacgtgcagacccgtctgctgttcagcggcaacctcatcaagcacccctgctttgaccagatccgcggcaccgatgcctaccgcgttgttggcgaattgaccaacaccgactttatcatgaacaacaccttctgggtcggcgtttaccccggcatgaccgatgagatgatcgactacatggccaagacgattatcgaggctgtgaatcagtaaaattttgacaacgaggtacggacccctatgatgcagcaaaaagtgaaaacgacccgcgcacccggactgcggttggacaaaaacaggcggctgacgcctatgcagatttactgctgggcgacggtggcctgtctggcggtgctgctgcttgccctgctggccagccgtggtgcgctgctgcatcaattcttcttttatgatgtcaccgataccggtatggactttttccatagtattgagtatatgcgtggacgtatgccctacggacagttcgatacgctgtacccgccgcttgcaaatctgtttttctatgtgttgtatttgcttgtgccaaagacacaatcagatacctggacggaatcgtttatctcgtctctcaacatgaagggaacagaacgggatttgcgtttacagcaagcgacgatgatgctgtttatcgtctttgttatcgtggtggtcttaggaattgtatcgatgacagaacgcctgacgcgcagctgcggggggcggaaaaagctgctggcattctgtgcagtgttcagctatggggtactgtacggcttggaacgtggcaatattctgctgctgtgctggccgttaatggcattttttatcctgtaccgcaattcagaaaaaccacttttgcgggagttggcctgtctggcactggcgattgccgccggtttcaagctgtacccggcgtttctgggcgtgctgctgctgcgcgataaaaactatctggccgcggtgcgcacggtgctgtacggtgttgtctgcctgtgcttcccgctgttcttcttcaatgaaggattgtttggcctcacactgtggttccgtgtactgtttgattttagcggcagcagaggtgaaccgtggatcggcaacggtttctccaacattttggcagaggctggacatgcggtggacaagctgctgggcacgcagctgggctatggcagctacgcactgctgggcattgtgctggctgcggtgctgctggtgtgcagcttttttatggataaggagtggaagcgcattacagcaatcattctggcgatgctgatgttccagtcccagtatgattatgtatggtgcctgtttttgattccgctgttcctgtttatggagcaggagcatgagctgcgcatggacaacgtgctgccctatctggccttgatggtgccggtgctgccgctgccgctgttccggcgggatcagatggagccgtcctttgtaccgcgcaacacgatttgtcatgccatgctgctgctgctcattgcttggtgctttgtccaggcggtgcagggggtgcgtgtacgctgtgcggaaaagccggtcaaaccggcacacggacacccggcagccacggtgctgctggccgtttgtgtggcggtggccggtgtgggcggccagcagctgtggcagcgcacccacaactggggctttgactacagctacaacggccgactggatgccgagggcatccggcagaaggacgtgcaggacagcgacggcaacccggtagaggcaacatggagcggccacggcgcgtatattatgatttacaaccacgcgccatttacgcaaaagatgacggtcacgttccagacaggctacggcatggatttaaagcgcgcctatacgatgacgtttgaagcaccgaatctggaagatgctgatggtacaaccgggaagcagaagcagacggatattaagatcgaccatgagggccagacggtgtgctacacggtagatgtggcacctggccagacccaaatcgatgtgagctatgacggcccgatggcggtctatgatgcttcttcacgcaagaatggcaccttctcggtggcaaacctggcggtcaccagtgagggcgctgtggaggaaaccgaataacggaaggaaacatacactatgcagaaattgctggccctgctgggcgcaaaaaataaagaggaatttgtggagctgttcaagcagttcatcaagttcggcctggtgggcgtaagcaacacggctgtgtccatggcggtctactatatcttcctgtggatcagcccggacctgtatatggtcggcagcatcctgggcacgattctgagcattgccaacgcctttttctggaatgacaagtttgtctttactggcaacgccaatgactggcgcagcaagctcaagcggctgggcaagacctatgtcagctacggcggcacatcgattttgtccaacgtgctgctctggatcgaagttgcgttcttcagcgtaagcaagtccattgcgcccatcgttaatctgttagtgacgatcccgctaaactttgttatcaacaagttgtggacgtttagaaatgagaaataatcaatgaatagaaaaataaagacatgggcgtatgcaattcttttgttaaatataattgttgcgggaatcggtattgcaaagcttttatttgatgtttttaccggcaacggaaatacacaagttggaaacaatcaatatggatgccgtttatccgttaggatggacgacaattgttgaaaacgttgcgttactcttgatggaagtatcgattgtttttgaggaattgttttttaggagtagagaaaacggatgaaaaataaagagcgaaatggtaatattgagctgctgcggtttgtgttctgcgtaatgatggttttataccacgcatggtatgtgcgcagaggatatattggcgttgagttcttttttatggtgacggggtatttcctcgctgaaaagatatgtaggctaaatgcaagggaagcgagccgcccatcggtagaaaatgccatgaaggaagcaacgcgagatgttacgaagcgttatcgctcaatatttccgtacttttttgtcgccaccattttgggatttatagtgcgtgcctatgcacagaaatgggacaatgcagcaatcctgttgggcgtgcagttgattccagcggatttcttatacttgcaaaaccttggattttcgacaacatctgccacgggggtattatggtatctttccgctatgacttttgcggtttggacgctatatccgttactgcgcagacattataacgtgattgtgcaagcagctccgatgggaagccttttgatactgggagtgattctgcaaaactgtgggtcgctggacgcgccatgcacatttctgtttggctgggtcaatacaggaatattacgagctttcgcgggcatcctaggggggggtgacgataaataacattgcgtcaaaactgaggaaaatcaatgttggtgaaaaaacttccgcagcaatgacgatagtggagttggctggatatgtgtgggtactttaccacatttgggcgatgaatgaaacgcgtgttgcgttggacggcattgtagtcttagctcttggggtcgcgtttactattactgtaagcggaaaatcacttttttatgggaaatttaataatggttttgtgcgattcctggggaagacaacgatgcccatttttttaagtcacttctactgtgttcaatatttgccgaatatattggcaaggtatagtattgaagtgacagaattgcagcgcttagggatttcctttgctttctgtgcaatagcggcgggaatagtctattgtgtgggacaagttatagataggcaaatgaaaaaggttggtatcttttttgaacagcaagtgattaaaaagagcgaataagttgctgaaaaagtttaaaagataatgcttggtagggtagcatagcaatgttggcgtaagcaacacggctgtgtccatggcggtctactatatcttcctgtggatcagcccggacctgtatatggtcggcagcatcctgggcacgattctgagcattgccaacgcctttttctggaatgacaagtttgtctttactggcaacgccaatgactggcgcagcaagctcaagcggctgggcaagacctatgtcagctacggcggcacatcgattttgtccaacgtgctgctctggatcgaagttgcgttcttcagcgtaagcaagtccattgcgcccatcgttaatctgttagtgacgatcccgctaaactttgttatcaacaagttgtggacgtttagaaatgagaaataatcaatgaatagaaaaataaagacatgggcgtatgcaattcttttgttaaatataattgttgcgggaatcggtattgcaaagcttttatttgatgtttttaccggcaacggaaatacacaagacggattgcttttccagaacctgcatctaacagcgtacagcacggattcattcatggacttctttaatagcattcagtatggaaggaagccctatacagcaggagtgatttatccgccactgataaatttgatttatgctatattcgggatggggattccggacagcgttaaagcacagggtacacttgcatacaggacatcgctacaaggcattgtggcattagtgctgttttatgtaatggctgtattgctgtatatcattgcgtggaaagatgattctcgcttcaccaataaagaaaagctttttttgacaacagccacattttttacgctcccgttcatttacgctgtggagagaggaaatagcttactttggtgtgtcccgcttacaatgctatttgtaaataactataataagaaagaaaaaagcaaacgtatactggcaattgtagcgttagcacttgcagcctcaatgaaaatgtacccggtgttttttgggattttgcttgtgcgtgaaaagaaatggaaagaagcactaacggcagtggttgttggtgcgattacaatgtttgcaccttttcttttaatggaaaagggaaatcgtagtccgctactatggcttagtaacattgcaaaaacaagcgaaatgtttcaaagcaatggctatgggtataaagtaaacttgtctaacacaatagggtttattgagagtgaatttggcatacatattacgggaacaaattttttgataatagcggttttacttatcaacagccttttggtgttaatcaagaagaatatgcctcagtggaagtgcatggcgttgctggctcttatcacaatcttagtgcctggatttagctatacatacacaataatgtttatgctgattcccttcttttgctttttaggaagtgagcacgatcaaaaatgggactgttattatctgattctttttatgctgatgtttgtattgctaccgataaaaaatcagtttggcggtttggaagcaatcaatatggatgccgtttatccgttgggatggacgacaattgttgaaagcgttgcgttactcttgatggaagtatcgatagttatcgaagaattgcctttaaaaaacagggagaaataaagatgaaacagcgtttagcggattatgtggcggactttctggcggcgcgcggtgtgacggatgttttctccgtggttggcggcggcgctatgcacctgaacgatgcgctgggccataacccccggctgcatgtgacctacaaccaccatgagcaggcatgcgccattgcggcggaagcctacgcccggctggaaaataagatcgcggcggtctgcgtgaccaccggccccggcggcaccaacgcgctgaccggcgtcgtgggcggctggctggactccatccctatgttcattgtctccggccaggtgcgctatgacaccacggcccggtacgccttgcagtacaccggtacgccgctgcgcgccatgggcgaccaggagtacgacatcaccaagtccgtccagtacatgacgaagttcgccgccatgctggaggaccccaaggacattcgctacctgctggaaaaggcgtggcatctggctacaacgggccgccccggcccggtctggctggacatcccggtcaacttccagggcggctacatcgagactgacgagctgcgcagctacgaccccgccgaggatgacgcccagctgcccccgccggtggacgacgccacgatccggacgattctggaaaaaatcaagaacgccaaacgacccgtgttccacgcgggctatggcatccgcctgtccggcgggtatgcggcgttccgctccgtggcggaaaagctcaacatccccatcgtcacctactggaacgccgtggacctcatcgaggatgacaatccgctgtactgcgggcgcgccggcaacatgggtgaccgcccgggcaactgggctatccaaaacgcagacttaattctggccgtaggcacgcgtatttctatccgccaggtcggctacaactggaagacttgggcccgtgcggcagaggtcatcatggtggacattgaccaggccgagctgaaaaagccgaccctgcacgtcgaaatgccggtctgggccgacgcgaaggactttttgaccaagctggataaggtcgccgcggcccccgtgaacgcgggcggcgagtggctggccacctgccagcgctggaaacgcgactaccccgccgtcttgccccgccagtgggaggaaaacggcgagactgccaacgtctacgcctttgtgcgctatttaagcagttgcctgccggagaacagcctgaccgcggtctccaacggtgcgtgctgtgtcgtcggtaaccaggcgtatgtcatccagaagggcagccgaatggcaaacaacagcgccattgccagcatgggctacggtctgcccgcagccattggcacctgcatcggcggcggacgccgccagacgatctgcctcgagggcgacggctccatcatgatgaacctgcaggaactgcagaccatcctgacgaacaagctgccgatcaaaatcttcctcatcaacaacaacggttaccactctatccgcctgacgcagaacaaccttttcaaggagcactgcaaggtcggcatcggccccgagagcggcgacctgtccttcccggagtttgaaaagctcgcaaaggcgtttggctacccctactacagcgcccacagcaacgccgagatgaagcaggccgtggacacggtgctggcactggacggcccggctttctgcgagattttcaccgacacgaaacaggtctgggagcccaagagcagcaccaagcgcctgcccgacggcacgctggtcagccccccgttggaggacctggcccccttcctgccgcgtgaggagctggaaaagcagatgttcatcccgctgatgccggaagtgtaaggaaagtgggtagaatggaaaaatgaaaaaaatgcggaatggcaatattgaattgctgcggtttcttttctgtgcggacattgtgctgtaccatgcgggctttctgccgcgcggctatgtcggcgttgagttcttctttatggtgacgggcttctttctggcagacaaaatcttgacccggaatagcaaagaccagagaaagcccacgtgggagactctggtcggggaggccaccgccgacatctggaagcgatactgcgcaatcttcccgtatttcttcgcatccacggtgttgggctttgcggtgcgcgcttttgcgctgcactgggacttgcccacgtttctgacacatctgcagctgattccggcggatatgctgtacttgcagaacatcggctttacggttacgtcggccatcggcgttctgtggtatctgtcggccatgacgtttgcggtctgggtcctgtacccgctgctgcgccgccgctatgagctggtcgcgagcgtttcgcctgctgttatacttttgattctggggctgattcagcagaattgcggctccttggatgcaccctgcaccttcctgtatggctggctcaacacaggcctgctgcgtgcctttgcgggtattctgggcggcgtactggcctactatgtgacacagaaggtgcgtggcatcaacataacaaaaggaatggcggctgccctgacggtttttgaggtcgccgtgtacatatgggtgttctaccacacttggagccggaacgacttccgcccgttgctggatgcgtttgtcattgtggcattagggggggcgttcacggtcacggtaagcggcaagtcgctgctgtatcagaaattcgacaatgggtttgtgcgcttcttgggcaaggcgtctatgccgatcttcctgagccatttttatatggtgttctatctgtccaacgtgtttgaaatgctccacatggaggacacgttcggacagaagctcgcgttcaccatcggactcagtctactggcggcggcgattgtgtatgctgcaggccagctgatgtgcagactgataaaggcgtgggcggtatcctttcagaacaagctgaaggcaattaactaagcaggggttcaatatggaacaaggcaagagacaaatccacaccgccatcatcaccggtcctacgggggcaatcgggatggcgttgtgtgcaaagctgctggcggagggcgtgacggtctacgcggtcacccacccgggcagtgcgcgggcggcgctgctgccgcaggacgcgcggctgcatgtggtgccctgcgatgcggcggagctggcctcgctgccggagctgatcccggaaaaggccgatgcgttcttccactttgcgtgggcgcacacgatcggcccgggccgcaacgacatgccggcgcagatcgagaacatccgctacaccattgcggcctgccgcgccgcggcgcagctgggctgccaggtctttatcggggctggcagccaggccgagtatggccgcgtggagggtgtgctgaccgcgcagaccccctgcttcccggagaacggctacggcatggccaagctgtgcgccggccagatgagccgcgtcgagtgccagacgctgggcatggcccacatttggacgcgcattttgagcgtctacggcccgcacgacggtccggccacgatgatcagcggcaccattcgtaagctgctgcacggcgagaagcccgctctgaccgcgggcatccagcagtgggactacctgtacgctgccgacgcggcagctgcgttctacgcgctggccgtcagcggacaggacggcagagtctacccgctgggcagcggcacggcccgcccgctgaaggactacatcgagacgctgcgcgacgccatcgacccggcgctgccgctgggcttgggggaggtcccctacggcccgctgcaggtcatgcacctgcaggcggacacgtcggccttacaggaggacaccggctggcggcccgcgaccccgtttgaagaaggaatccacgaaaccattgagtgggtaaggaaagagacaaaatgagtgagaaaaagacgatttcggtaatgatcccctgctacaacgaggagcagaacgcccgccccatctatgaggctgtgcgcgatgagctggtcaagaactgcccgaactacgactatgagattttgttcatcgacaacaagagcgaggacggcacccgtgccatcatccggcagatctgcgccgaggacaagcacgtcaaggccatcttcaacgtcaagaacttcggccagttcaacagcccgtactacggcatgatccacacctccggtgattgcacgatcacgatgtgcgccgacttccaggaccctgtggagatgatccccaggtttgtggccgagtgggaaaagggctacaaaatcgtcattggccgcaagacccagagcaaggaaaacccggtcatgtactggctgcgcggctgctactacaagctcatcaagaagatgagcagctgcgagcagatcgagcagttcaccggctttggcctgtacgataagagctttatccagacgctgcgcaacttgaaggacccgacgcccttcatccgcggcattgtggccgagctgggccccgagcgcaaggaaatcgagtacacccagccccagcgccgcgcgggcaagacccacaacaactggtacagcctgtacgacgccgctatgctgagctttaccagctacaccaaggccggtatgcgcattgcaacgttcgcgggcttcctggtggcggggctgagctttctggtcggcctgttctatctgattgccaagctgctgttctggcagagcttccgcgccgggtacgcgccgacgatgatcgccatcttctttatgggcggcattcagctggcgttcctgggctttttgggtgagtacgtcatggctatgaacacccgcatcatgaaccgcccgctcgttgtggaggaagaacgcctcaactttgggccggacgaccagtgaccggcatgaagcaggagtttggttatttcctgaaaaacgcgaaattccgcgcggcgctggggctgaccctgctgctcagctacggctatgccatcgccacgacacgggtcagcattgactcgctggaaggggaccgctacatcggcacgggcggcgttatgctgtccaccggacggttcggcatgaacctctgggccgcggtgctgggctacggcagggccgagccgagttatgcctttggcattgacctgctggcggcgctgctgctggcgctggcggcggtgagcttctgtgcgctgctgcgcaaggccgcgcaggaccgcatcagcatgttcggctatgggctgtttgcctgcctgtttgtctcctacccgctgatgaacgaaatttgggagtacagcggcgcgaatgtctgcgtctgcggcggttatttgctggacgccgctgcgctgaatctgctgtgggacgcgcgccagcccggcgtgccgtggcgcggcagggctctgcgcatgggcgcggcg

SEQ ID NO: 111 - DNA, 23185 bp, unidentified
  source 1..23185: mol_type = unassigned DNA
ttaattattctcttttggttttcttcttttatgctttttctctgtgagcggagtcatactcttggcacaaataagcatggtggaagaattatgcaataatgcagacatagacggagaaataagacctaaaaatcccgaagccatcagtgctgaattaaaacctacaataaatctgtaattgcggttaattctatccattaaggtctgacttattgttcttattctcgcaagttcggtaaggtcggagcttttgattgtaatatctgcggtttctcttgcaatatcagaagcatctcgcatagcaacagatacatttgcagccgcaagcgccggtgtatcgttaataccgtcaccaaccataattacgcccttgctgctcttcttgagttcttcaacatatttatgtttatcctcgggaagtacctgacatttatattcggtaatgccaagcatttctgcggtcatttgagccgccttctgactgtcgccggtaagcattataactctttcaataccctgatttctaagcatttgaatagctctcgcagcctcttctcgtggtgggtcacttatacataacgcaccgacaagcgctccgccgatagcaagataaagcacagagcaagcgcctgatttttcatcaatagttttctgctgttcttcggttacagaaatctgctcgtcctccactacaaaatgcttactgcctattacagcctttttgccgtgcagtgtggttgcaattccgtgtgcaacaatatactgaacatcagagtgctcctctatgtgagataatcctctttcattcgctgcatttacaacggcattcgcaacgctgtgagggaaatgctcctcaagacaagctgcaattttgagtatttcttcctctgaataatcactgaaagaaattactttttcaagcttcggctcggcatttgtcagtgtacctgttttatcaaatacaatggtatctgcgtgagcatatgcctcaagatacttgccgcctttaacggtaatatcgtggtcggccgcctccttgattgcggaaataaccgcaatcggagtagaaagtttgatagcacaggaatagtcaaccataagcaaagaaacagctttggtaatattccttgtaagaaccaaagtagccaaaaaacctaaaaagctgaacggtacaattctgtccgccaaagtttcggcacggctttgtactcctgccttaagattttccgaattatcaataaggtcaataattttacttatttttgtgtttgaagaaagagcctttacattaactacaatgtttccctcttccacaacagtaccggcaaatacggttatgccctcacgctttgcaacagggagcggctcacctgtcatagacgactcgtttactgttgcctcacccgatacaacaacaccgtcaacaggaataacattgcctgtctgtactctgatgttatcaccctctgtcaaatcagacataggaataagtacttctgaattatcatcggttacaagccataccttgtccgccttaacagcaaggctgtccgtaagcacagcttttgtacgggcatgagtataatcctcgagcataccggatacggtaagcaagaacattattgttcctgcggttttaaagtttctctgtaacaagcaggttgcaattgacgcaccgtcaagcacatcaacattaagtttgcagtcccaaagtgcctttaaagccttttttatgtattttatacttgtgtaaattgtaactaccattctgataggtgcgggcaaaagccatttttgcaaaagtctttttgccacgcaagaaatcagattatgtttaaaattattgtcaatatcttgaacgctaacagttttctttgcctcaacttttacaagagaactgcgctctattgacgctataacatcaattacattctgacgataacctttgtcatacataacaaggataccgccgttttcggaatttacttcaaccttttttacataatttttctctataagaaaattataaatacaaccctcatacgccttatcaaaagcatatgcgccgcagcggaatctgattcgctgcggcttatcatatacaatagaatatttcattattcttcaacttctgtttcagtttctgtttcaatgccggcttctgcctttgcatcgtagcaaagatctgccgcatcgtctttcatgctctggaatttagccttagcatctttctgaagcttcataccttttgcaagaccggttactgcaacgctgcgagtctttggtgaagtaaatacttttttacctacaataactgctgctgcacctgcaacaacgcaccataatttttcattttttaaaaaattcttcataactgttcctcctaagatttatgataattatattatactcatttgtcacaatttgtcaatactgtaagaaaagcctaaccgaaatttgtaggttatcccaaaccaacatctaaaatcatcataattacgaacccaattgcaactccgattgtaccgatatttgagtgttttccgctctgcgattcgggtattaattcttccgttacaacataaatcatagcacctgccgcaaaagacaacagatacggcagaatttgtgttactattcccgcaaaaatcaaagtaatcattgcacctatcggttcaaccacacccgaaatcacgccgtaataaaatgattttaactttgaacagccgccgtctttgagcggcagagatattattgctccctccgggaaattctgaattgcaattccgactgcaagtgaaatcgcacctgccacggttatacccgtattttctgtaattgcacctgccaaagttacgcctacagccataccttccggaatattatgcaatgtaaccgcaagcacaagcatagtattttttgaaagtcttgactttacaccctcaggtttgtcactgttaagatgcaaatgagggattacactgtcaagcaagagcaaaaatcctattccgagcaaaaatcccaccgcagcaggcagccattcgattacattttgtttagcggacatttcaacagacggaattatcagcgaccacaccgatgcggctatcattactcccgaggcaaaaccgagtaaaaatttctggaatttttcgttgattttattttttgtaaagaaaaccattgcagaacccaaagaagttcctaaaaacggtattaaaagtattgctgtttgttgataaagcatcttccaccaccttatattattgttttataatatgcaaagaaagtctgtaaaaagcagtctttctttacatgtttatgcattaattttccaacctgccgcttgctgtcgggcattaacaaagttcttgtaaattccgccctcctgcataagctgcgtatgtgttccgagctgtgctattttgccgttttccacaacaacaatctgatctgcattgcgcaccgtctttaatctgtgcgcaatcataattattgttttttcctttgtaagagcgtcaatcgcttcaacaagctctttttcgttttcggggtcaacatttgcggtagcttcgtccaaaataattataggtgcatttttcataattgctcttgctattgaaattctctgtttttcaccgcctgaaatacttgcaccaccctcacctatcactgtatcgtaaccatcgggcaaactcataataaaatcgtggcagcaagccttttttgcggcagttacaatttcttctcttgtagcgttttctctgccaaaagcaatgttatttgctatggtatccgcaaaaagataaacattctggaacacaaagctaaagtttttcataaggctgtccatactgtattcccgtacatcaataccgcccagtcggatattacctccgtcaacatcccaaaaccttgaaataagattgcaaagggttgatttgcctccgcctgacgggccgacaactgcggttgtggtcttttgcgggatatgcaatgaaatgccgtcaataatttttcgtttgtcatatgaaaattcaatattattaacatctatatcgtagttttgcggaataatatcttttccgtcaatatccattgtatcaaggtcaagaattttctgcgctttgtcaatacaaatatcaatcgtacgcaaaagtgccgagtaacttcctgcctgttcaagacttgagtaaagcataaatgcgcaaattgtcataccaatgcagatcataaggctcatagaaccgttaagataaagcaaaaccgaaacaaacatcataaccgcacccgtaagttttgttataatattctgaattgtcatatacggaataaatgcaaattccatttcggtgtttacttttacattgttatcaatagctttattcagttttttagtttgcttgccgaaaaggttgtatgatttaacttccgctatgccttgcacatactccattatttcacttacaagtttttggtccgattcaactttttcggcagaaagtttatcgcctgctttttgtagaagagaattaacaacaaaaaacaaaattacacctgcggcggcaataagacctattctgaaatcaaaacataacagcattacaattataagcgctgtatttaaaatcccctgtgtgctcatcattacaactcgggttgcaacatctccgagattttccattgtattggttgctacggaggtaattgaaccaaggctgttcttattaaaatagcccattgggagataacgcaaatgctgtgcaatttcaattctcttgtttgccgccgcattataacctgcttctgtctgcagcatagctgattttttccttacaaagaaatcaaccgtaattgaaacaaacattatagcaagcgacaaaaatacagtttttgaactaagtgtattatcggttatatccataagaacaatcataatcgcagggattttcatagcctcgcaaacagcctgaataactccgagcacgattgaaatttgaaacttctttttatttacacttccgcaaaaatcaaaaaacttatttaaaattttaagcattaatatcacctccgttatctttaacagaaatatgagcctgccacatttgcttgtataatccgttatcctcaagcaattccttgtgagttccctgttcgcaaactctgccgtcgtcaataacaaaaattttgtctgcgtctgtaattgtagaaagtctgtgtgcaattacaattaaagttttgcctgccacaagttttgcaacagacgactgtattaccgcttcattttcagggtcggtatatgcagtagcctcgtcaagaataactataggagcatttttaagcattgctcttgcaattgatatacgctgtctttcgcctcccgaaaggtgtccgcccgcaccgcctgctacggtgtcaaagccgttttcaagcgacattataaagtcataacagccgctgagccttgccgcctgctcaacctctttgtcagtcgcattcagattgccctgtctgatgttttcccttactgtttcgttaaaaaggtaattgtcttgtgcaacataagctacgctcttattgtattcttcaagcgacaaatctctgatatttacaccgccgatttcaatacttccgctgtctgtatcccacagagaagctatgagttttgcaattgttgatttaccgctgcccgaaggacctacaatagcgtttacactgcccgaatccatacacatatttatgttgtgcaggacttcttcatcgtgataaccaaagcatatatctttaagtcttatagaataatcataaggctttttctttgatttttcgggtctgtcaagttccttttgggtgagaatacctgccacttcgcccacaacagtgcctattttgccgaggtcatcggtgtagctcataacggtaatgagcggtcctacaatgctcagtgcaagaataatgcacattacaaaatttgcaacagaaagactgccgtttaaaataaacattgcgccaaacggcaaaacggtgagaagtgtgtacggggtaagaacaagcgaaatgctatggtaaatacagcatttgcgcatccagccgatatacgcctctgctccctctttagcggcttttgtgaatttttcgtaagaggagtccgccttgccgaatacctttataacctcaatgccgtttatgtattccactgccgcattgttaagcgccttggttttttcgaccgcatttttaaagttttcttcatagccgataaacattccaaaggttgagcaaaagccgagcacaacggttacaagcgaaagcagtgccattcgccagtcaattacaaacaaatatacaagcactgcaacgggcggaatcagattggaagtaaattcgggcagaatatgcgcaagcgtggtttctatgctgtcaatccgctccaccataatgtttttaagagtacccgatgaggtgtctttaacatatcctagcggcactcttgaaagtttgtcgcaggtttccttgcggatttgtccgagcacgctgaaagtagccttgtgcgaaaatgccgttgaaactgaatgaaaaatctcagctataacaaacgagcctgcaatcattgcaatttcaatcagatacaccgaaaagcttttctctccgtttaacagtttgttgataacatcacctataatgaaaaacggtatcagcttgaacaatacattcaaaaccgcaagcactacgcttactgagtaaagagatttttgcctgcctgcccactgcataatccatgccgcagaggatttttcttttttcattattccactctcctttgataaaatagttagtttatgctaactattatttaaaaattttcgtatctgcctatacagatacgaaaaaattatactgattttaaaatgatataccaaaaagtttttcccagcctccggtataaaacattttcagctttttgacacgctcaatcgcaacgctcttttccatatcatgaaccacaatttcaaacattgccgaaaacataccgctcgacaccatatgaataaagtccttgtcaagctgcggaatttccgttccgctttttcgcatatcttcaataaatgtaagggttgactgcgtttctctttcaacaagattatgtataaaagaagtaaactccgtgccgtcagccttacaaagcagcaatttaaaattatcgtaatgttcgtaaatatagttgagcatttgcgtgatggaatccgttgaaactccggtcatggcattttgctgttcactgctcgacaaagtctgaaaattatgcaaagtaacatcataaatagaatatattttatttgcatacggttcaaccagcgaagcaaataaatcttctttagtaggaaaatatttgtaaaacgcacctgtggtaagtcctgcattttttactatttgtcttaatgaggcattggcaaaacctttttccataaattcatcaagagccgctttttcgatttttgcctttgtttcttcattacctgtcattcaaattacctcacaaaagataacagtgttatataacactgttatcttatcattaatttatctctttgtcaagagagtttttaattgtataacatattaataaacctgcattataaaaatccctcaacagcaaattatgaaatttaccgttgagggattgtctttatctttctctaagtaagacggttaagtctgttttttcagaccgttttaccgctgttttacaaactataaagaggagcaatataatcatcagtattaccgttgaaatttcaccaatcgttatttttacggtcatttccataattgtattgccaagcaatgaatatatgtaaggatttataagcagatttcctaacaagaaagcgaaaattatacctataaatatcgaaatcaaagcgagtattatatgctctgtaaaaattatataaaatatatgctttgttttgtagccgagagcacggtataaagcaagctcgtttgtacgattgcttatattgttttttaaaaaaataaaaaatccgactataataaaagcaataaataaaaccgctgtcgcaatagaaatatacattgctgtattataagtctgtacatttataacatccgttcttttataaacattacatataccagacaactcctgcagcgccgtttcggtattttcgggtttatctacaacaatcatataacttttatcgtccgaatattcacccgataccgccgcatcgtatttaaacaaatcattcttcggcacaagtatttctttattttcaaatataggatccgatgtactgtaagcgccgattatttttattttaaataccgtatcctctcctacatttaattcaagagtttttccgattaaatcttcaccgtttatctcactgaatttgcgttcgttttcattgtaatcttttattttttcgggaacaagcgctactccggtttcgctttcgtcaaaagttctgcccgaagtaattaaaggagaactttcgttatgaacaaacgccaatgtgtattgtgacgacaaagttttagaactatcggaaaaagtcagttttgacggaattttataaacatcggttacatattgattttctttcagctttgtgattttactttctatatagtcgtccggtatattatccgtaaaatcagtttcaagttctcgtcttgaaatatgattattaattttatttaccacattgtcagtcataggtaaaatcaaaccaatcgacaaaagcataagaactgttgataatatcacaaatatacagaaaaatgcggaagacagctttctggtttttaccgatgattttatcagaatattaagttttgcaagtttcattttacttttctcccaatactccgtctttcatagtatatattttatccgcaaaatcaataacggcgtcattatgacttacaacaagcacacctttgccaagataacacaacttttttaattcttcaaaaaccataagttcgtttttactgtcaagatttcctgtcggttcgtcggcgagaataaaatcggggtcattggcaagcgctcttgcaatggcaactctctgctgttcaccgccagaaagttcgaaaggataatgttctttgcggttagtaagacctaccgaatctatcagctgcattgcctgttctttcatatcattcattgaggtgaatttatcgtttatcagcataggtaccataacattttcgtagagttttaaatgtgcattaagatgaaaggcttgaaacacaaagcctaaattttccatacgaacatctgcaatcgcatttttgtcaagggtagatacatcattgccgttaataattacctgccccgatgtgcaagtatcaagtaaacccgcaatttgaagcaaagtgctttttccgctgcccgactgtcccataacggcaataaattcaccttgatttaccgtaagcgaaacattgtccacggcaacaacactgttgttatatatttttgaaatttcttttaattctattgcgttcataacagtacctcgtttaatttaattcatagcatcctttggctgtattttattaattttgcagagtgaaataagctgacatataagcggaacaacaactgccaaagccaatgaaacggcaaggaaaatcaggtaatcagtccaatttacaacatacaaacgatttatatatgtatcatgattaaacataaaattcataaccgcaattaccaatgctgaaataaccgcacctatagcgcagccccttattgtaagaatcaactgttcaaaatacatacatttaaatatctgactgtttttataacctatagctttcagcaaaccgatttcaccctttctgttaaacagagaaagcaccgtcgattgtataagaataacaacacacagtataagcgatgccgaaatcataaaaacacttaatattttgaaaacttttgatgatttaaccgtttcctcctgtattccgagttcggggtcggaaaatacaaaataccctgcctcattaagttcattacacaacggtactatgttatcgtaatcatcaacgactataaagtgatcgtgcaaagacggggtcttgtaccaatgcacggcatttgacctttcatcattcaaatctattattgaagcgtcaaaagcgtcttgaattatctgcacccccgtatcctccgaaacaaatatatggttataatagcccttagttgtaggctctgaataatacacacccacaactttcaacttatattcaattgcaggcaaatacatagttttattttcatacattgccaattcagggtcgatattataaaaaacttcaagtccgtcaccattcgaaggcgttactgtaattgtttttccgataagactttcgccgtctatataattaaggtcagaatcagtgttttcatattcaaaaggataaaaaagacttggtattatacaactgtacacgggactttcatcaagactttttcctgccattacatccattttttcatcgcctatcaacggatataaatttaaactgcagtttaaatcttcgttgcctttataaaaatctttatattcgccgttttcgtcacttacatcaactacatccatatactgatttattattcccttaagttcgtatatatcttccacatggtcaaaagacattaacttgctctttaattcgtcggtaacggcaccgttgtctatcggactgaaagtaatcattctcgcacgaatatcatttttataatcagttacggctctgttaattgttacggcataacttgaaatcaatgtaagggaaataacaagtataaccataaaagctgtaataaatatactctttcgattacctttgatatttgcttttgccaagaaattaatattttttatcttcattacttttcacccgtaaataaatctgtgtaatatttgcatataaaatataaagttaatacaattttataatatcattaacgattatttttgtcaattaaatttcgacatatataatcaattttacaaaaaacgacagtgtatgaaataaaaatcacacactgtcgtatatttttctttttaatttattctgcaattgttttcacaaagaatataaaataaatcaggtgacaaagccatactatcgctaaaattatacaagggacgagtatgccctttatcagcattagcacaaagccgaatgtcataagtacagtgaccgaagttatgatttttacctttgtttttgtggtcattccctttttgtttacaaatgactcaaggttccttttatacatttttgtattaacaaaccaattatgcaatctttgcgatgaatttgcaaagcagaacacagttgccaaaaagaacggcactgtcggcaaaatcggcaatactattcccacacaaccgagtgcaagcgatatacagcctaaaactaaaaataatattctttttattttcatcttctttcctccaaattaaataatttttgcataaagcattaaagccgatatgttattataaagttagcttcggctaactttcaggtatattattgcttgtttttatgcggcggtacggtgcataagcaaagcagccgcaccgccttagttaaatatggttctataataaatataatgggaatgatgctgtcttaaaaattttagcatactttaaagttttcctctatgtgaggggaaaacttgataaattcgttattaaccccaacttttgacaaaaagccattattataaaattagtctttatttgcgagatttgcaagctgttttttctctttgccgctctctataaggtggctgaccgccataacagggtgataaaaaatcattttcgggcctgaaaaacgcataatctctcttatcttttcacgcatttgcggcttgtagcaatgcaccttgcagtttgagcaaaaggttttggtttccataaaagggcatttactgctcctaagctgagcataatcctttaaagccttgcagtcggcgcaaatctcgcccttggtcttatgctttttatggcagtacaggtcaatcattttggaaacaacctgcttttctctctcccttttttcgtcaacaccgagtcttctgctcatcagcttgtcctcccgttctccacgcaataaacggtgtcggcaatcttcattgttgactctctgtgcgatacaagcactacggttttattttctctttcctcattaagcgatttaagaataaccgcctcgttaaggctgtcgaggttgcttgtaggttcgtcaaggagcataagcggcgcattgtgcaaaaacgcccttgcaagtcctattctttgcttttcgccgcccgacagagtgtcgccgagttctcctaccatggtatcgtaaccgtttggcaggctcataataaaatcgtgaacagaggcttttttgcaggcattaactatttcctcatctgttgcgtcaagttttgcaattctgagattattcttaatgctgtcgtggaaaaggtgggtatcctgcgtaacatagctttctatatcccgtaaattcgaggtgtttatatcctctatgcttgcgtctgaaattttaatatcacccttttgcacctgccaaaatctcatcaacagctttagcaaggttgacttgccactgccgctcttgcctgtgattccgacaatggtattttctttaatatcaaccgatacattgtcaagtattacctcatcgccatacgcaaaggtaacattctccgcctttgcgccattaaaaacaatatctttcttgcctgtaatctcctcaacaacaggcgactcgtcaagaatattaagcactctgttgcctgccgcaaatgtattctgcaatgtactgccaaggtttgcgagagacacaacagggccaaatgagctcataagtgcaagtacggggataattacaccgtcaagacccaccatatctttttgatacagaagtgccgccgcaactaacagcataatatcaaaagcaaagattgcagtattggttacagccgtacttgtgcctgttttttgtttcattctcttttcggttgcaagcagttcttcggttttttcattcatcttttgcgcacgattttttccgccgccaaactgaattaactccgaaatgccgtacaggccgtcaagcacaaaggcgcttagctcgcccgattttttgcggaatttttcgccgtcactgccactgctttttgaaaccgcaatcggcactattaccccgacagtgatatatgccgcaagtgcgagcataccgagaattacactgtacgagccgataaacacaaccataataatgcaaaagataacagctattgcaatcggagaaattgtgtgggcatagaacacttcaagcaattcaatgtctgaggttatgattgaaataaggttgcccttgtcctttccctcaagctttgccgggcaaagtctgcgcaaggctatgaacactttatctcggataagcgcaagcaatttaaaggctatgtagtgattgctcgcctgctctgcgtaccttaaaacaccacgcaaaagtgcaaatacacctgcaagaataaaggcagtgagcattgaaatacccgtagaaatattgagcgcatcaaggatagcgtatccgccgagtattgttataaaggcggcgcacaaattaccgattatgcccattgctattgcaagcgccataaagcctgcgagcagctttacaagtgccgaaagtctgaacataatgtttaaattacttctctttttcattgctcacaccccctttgtgtagttttcaagctgaatttgcgaattataaagatttgcgtacacactgttgtttttcaaaagctctgtgtgtgctccgctttctattatgtttccgtcctgcattacatagatattgtcggcattcacaacatttgcaagcctgtgcgaaataagaataactgttttggctttggcaagtttaataatctgctccattatatcgttttcgctctcaatatctatgtttgaggttgcctcgtcaaagatatatatgtcgctgttgtgcagtaatgctcttgcaagcgcaagtcgctggcgctgaccgcccgaaatattgcttgccttttcattaataaaggtatcgagtccgttttcactctttaaaaagtttgcgagattaacctgctcaagcacccgccaaagctcttcgtctttaacattcgccgccattaaaaggttctccctcaccgtacccttaaaaatatagctgttgtgaccgatatatgtaatagatttcatcagactgttttcgtttatttcttttatagaaataccgccaatcgtcacacttccgccaaagcctttgttttttcctgtaagaattgaggcaacagtagatttaccgcagccgcttttgccgacaacagctgtaaaactgccctttttaaagctcatatttacaccatgcaaaatctctctgctttcatcatacgaaaagctgaggttattacattcaatgtcggtattatctgtgattttttcttttgcgggattttcttctttaatatcaagaagattaaagattttatcgcttgccgccataccgttcattgctatgtggaaaaagctgccgagccggcgcattggaataaagaaatctgccgagagaagtattataaaaaggcagcccgaaatatcaatgtgtccgcctgcaaactgcgttacggcaagaatcattccgacagccgcaccgccgtatgcaatcagatccataattgtaattgaatttaactgcatagtgaggactttcattgttatttttctgaacttttcagcctctatattcatctcgtcatttttaaatttatcggacttgtaaattttgagagttgtaagtccctgcaaattttcgaggaaagtatcgcccaaggcagtgtactgaccccaatactttgagagtaattttttcgcccatgtttgtacggcggcaatcgcaacgggaataagcggcacacacacaagcagtacaactgccgacagaacatttacaaaacaggttacgataaacaatgtaagcggcgctatcattgcataaaagaactgcggaagatatgcgccaaagtaggtttcaagctgttctacaccctctaccgacacctgcacgatttccgaggtttttactttttcgttgtacgatgctccgagcctcagcaccttttcaaaaataagacttctcagcttttgcttaactttctttgaagagagaaagctcatttttgaggaaattttagtgcatacaaattgcacagccacgcacaataaaattacagcgacaagaaaaacaatatcgcctgcctgcggtttttcataggcaagtttgcccacaaaggctgcgatactgcccataattacaacattggagcagagtgaaacccattggctcgccacattgcctgcaatatatttttggctttctgcgactgttgcaataagccgtttatttatcatcataagcataccaccttttttgattagtttcaactaacttattaaaccacaaatctgcaattttttcaagtaggaaattatgtttagcgataaaaagtgtaaatgatatgcaagtgtttgcagtaaagatgaaaatttattggctctttgtcaaaagttgggattaagaacaaagttatcaaggtttcccctcaagtggaaggctttttagtttgataaaatttttaagatagcatcattccacaacatttataatagaaccaaatttatttaactaaaccctaaaaccaaaaaaacagatgcaaagcattaaactctgcatctgtttatgtattggggattattataatttttgaataacgatttttctgtatgtgttaaacttaacccactttgcgaaaaattcggaatcgttaatatcttcaagatttttgtattcgtcaagcattgttttgattttctcgtcactgtcggcaagaatctcaaaacccctgccgttgataataggcacagcgctgtatttgtaatcatctgcaggagtaattgcagtaaccaccttattgcgaacgcttaccgcaacaagatcacgaagtacaataatatcaaagctgtcaggatatgagtagctgtcgccgcttgtcggaatttcgtcaccgacagtgtaagtttctcttacaggctgatatttaagtacattaaggcttgtggtatcatagtagaattcttcaaaaatatcacctcttgcctcaagctcgccgtttttgaacgaagctttttcagaacccgatacgcctttctgacttaccttttcaaccacaccgcatgccgaagtcatattcgttacacggtttataagtataagttcacccaaagttttgtgagcagagaacaagtcggcaacaatcggctcggtaagtaaaagattacataccgcaataccgtttttacttaaaacatctgccttgatatgctcgcctgtatttacatcaacagcatattcaatacctgtaataataccgctgattgtctttgtaccgagttttacaagataatctgtaccgaccgcaagaggttcgtcgtccatccaaagaattgatacattaagtttctgataagacgcaagttttgtgtcctttgcaattacacagcctcttgacacatcaacttctttatcaagtgtaattgtaacaggctgacccttaaatgcggtttttacatctttgcctgccgcaagcaactgcttaaccttagctttttcgttgcttggcaatgcaatgatttcatcgcctacatttatactgcccgactcaatctgtccctgaaaacctctgaatgtgtgatcgggacggcaaactctttgaacaggcatataaaagccctcttcctcttccgaggcagatacatcaactttttcgaggtattcaaggagcggaactccgttataccagggaatgttctgtgactttaccgtaacattgtcgccctctgtggcagaaagcggaataatgtagatattttcaagagaaagctcttttttaagctcgtcaatctgtgctacgatttcattaaaacgctgttcactgtaatttacaaggtccattttatttaccgcaaaaacaaaatgtcttatacccataagtttgcagattcttgcgtgtcttcttgtctgcacaagtacaccctgagatgcgtctataagaattacggcgaggtctgcaaaagacgcacctaccgccatatttcttgtatattcctcatggccgggggtatcggctacaataaaacttctgttatcggttgtaaaataacggtaagcaacatctattgtgatgccctgttcacgctctgccataagaccgtcaagcaaaagcgaatagtcaatgtcaccgttacggctgcctaccttactgtcaagctcaagagctttttcctggtcggcgtaaattaactttgcatcatacagaatatgacctataagtgtagatttaccgtcatccacacttccgcaggtaataaacttcaataaacctttcattagaaatagccctccctttttctgcgttccatactgcctgccgcctcgttgtcaataactcttgaggtacgctcggaagacacagagcttaaagtttcgtcaatgatttcgttaagggtagttgcggttgattcaataccacctgtaagaggataacagccgagtgttctgaaacgaaccgacttgtactccggtacttcaccctctttgagcgggaatctgtcatcgtcaaccattataatattgccgtcacgatatacaacaggtctttccgccgcaaaatacagcggaacaatatctatattttctctctttatgtactgccagatgtctttttccgtccagtttgaaatcgggaaaactcttatgctttcgcccttgttgattttagtgttgtaaagtttccacatctcggggcgctgatttttagggtcccaagcctgcgcctgatttctgaaagagaaaattctctcttttgctcttgacttttcttcatctcgtctgccgccgccgaatgccgctgtaaaaccatactttgtaagtgcctgctttaaagcctgtgttttcataatatccgtataagcagcaccgtggtcaaacggattgataccctgctttattccctcttcattggaataaacaatcatctcaatgccaagtttttttgctgtatcgtcacggaatttaatcatatctttaaacttccatgtagtgtctatgtgcataaacgggaacggcggcttttcagggtaaaaagccttcattgcgaggtggagcataacagagctgtccttgcctattgaatagagcataacaggcttttcgcactctgcggctacctctcggattatatatatagcctctgcttcaagctcatctaaatgtgaaagctgactcattcttattcctcctcagtacttattcgattccttttggttaatatctatcttaatggtttcaccctcgggcttgtcaattatccaactaagtatatcgccctttttctcggtatgaacaagactgcccataccgccgatatctgcaccaagataaaagctgattgcatatgcaggacattccttaatacatgaagtacagccccagcaatctttcggatactttatgtaagcacggttgtcactgtcaagctttataagactgccgggacatacatttctgcatcttccacagcctatgcacttctgcttgtcaatcgcaatgctcatagcttttacctccctctaccaaatctcggataattattttaatttcgccgttttcgaggcgtgaatttacatatttattaaagtttttgtcatccttattcggataatcaaggttttccgcaaagctgtgccaacgggtttcctttcttgcctttaagtgagcaattacacttctgcaaaccgtaagtctttccctaagctcgtaaatatacataagctcctgaaaatcttccgcatataaactgtctgaaagtttaataagctgtttgattttgtagtctgcaatatcaagctgtttttcgttaaaacggtagtttgtctttataccgcctgcatagctgtccattacagtctgcattgcctcttcaagctgttccgttgtataacgggtatctttttttgttaaaaatccttcaacttcggcaatgtgcttatcggttatttcatcttcaagctgcggtgcttgtgtatgattgttcacatactcaacagccgacatacctgcgatttcaccctctgcaagtgcacctgttacatacttctgcgggcaaccgcctgcaacatcaccgcctgcaaacaatccgtcaattgttgtggctcttttggtatcaacccaatagccgctcgctgtgtgaccgccgacaatatacggttccgttccctcaatctcaacattttgctgcgacgggttcttgccgctttctatccacttaattgtctgtgacggcgccatattaagataagcctttaacagcgattcgtcctgctcggctgttataccctctgtacgaagatagcacggacctctgccctcttggttttcatttactgtgccgtaaactcgctgtgaagttgtaagtccgtagttggtttcatatacctcgccgagcgaatttacctgttttgcgccgatgccctgtgcaagtgtacctgtcggagcgatggtgtctttacagcgaagtgcgataaaacgcatttcaaaggttgtcatctccgcacccgcattaatgcccattgcatagcctgcgccagtattaaacggaggataccacattttgtgtcttgaaaagcccggattatttggcttgtaaagacctgccgcaccgcctgtggcaacgattacggcttttgcttctattatgtaaaatgtatcgttttcaatgcctataccataagcaccgttgatcttattgttttttacggcaaaatctataatgtttactctgttgaggatttcaacattctttgttttttcaacagccgaggcaagaataggtttaatgttttcaccgtttattttaaggtttctattaccccttgtaacatacttaccgttttcatcctttaaaataacaagacctaacttttcaagcctatccgttacctcattcaacttttcggacattgtaaggagtaaatcttctcttacaattccgtctgcatctttttttgcgtaatcaacataatcctgcggctttcttccctcaacgatgtatgcgttaagagcgtttactcctgccgcaagacatccgctgcgcttgatgtgtgccttttcgcaaattaaaacttttttatctgaattttctgaaatagtgagtgcggcataacagcctgctgtacctccgcctattatcagaatatctgtacttaatttttcaattttcataggctgcctctcccttttacactcaccttattttcatatcattttattttttcaagataatcttccgcagataatacgcaattagcaccgtccgatacagctgttacaacctgtcttaactttttggtacgaacatcgcctgcaacaaatattccgtttgccgaagttactccgtcctcatttgcaacaatatagccgttattgtcaacttcaaccaaatccttaagaattgccgaattaggcacactgccgactgcaacaaaaacgccgtcaactttgatttcggcttctgcgccgtttttatcaactgtgatcgactcaaccttattactgccgttaatcttttttatctgcgaattaagcaatatttctacattagaaatattttcaactttttgctgtaaggttttattggctctgaatttatctctgcgatgaataagataaacttttttcgcaaactttgaaagcaaagccgcatcaccaagtgcggtatctccgccacctgcaacagctgtgattttatctttataaaatgcagcgtcacaaactgcgcaatacgatactcctctgcccgaaaactctttttcaccctcaacctgaagttttctgcgttccgttccgaccgcataaattacagtgtgagtttctaatgaatttccgttgtcaagttcaatgctgtaatcagttgcgtttttgctgattttaacagcctctccctctataaattcagtaccgaggctttctgcgtgtgatctgaacttttcgcccaaatcaaagccgttttcgccgtataatcccgggtaattatctacacgctcgctttctgaaatctgacctgtgccaaggtagtttttctcaaccacaactgtcttaagtcctgctcgttgagcataaattgccgaagaaagtcctgccggaccgcttccgataataactatgtcgtacataattcccctccttgtttagtaaataaccaattcttccttttctgaagctgtgccgttgattttaaatgaatttagcacgggattttctctgtccataagtgacaaaatcatatagcttgccttgctgtcatatgcaagtcgcttgtcctcatccgacggtcttgacggagattcgggatgtgaatgccagttaccgagcggtacaaaaccgttctgtcgcatatcctttaccgccgcaagctgttcctttgggtcaagcgaaaaatgctcgtttgagtggtcgatgtttgaaagaagataaacttttttaatttccttgttttcgccgtcaaccgtacccgcaatcaatccgcaagcctcgttaggcagctcactttctgcgtaagctacaattttattataatcagcttttgataatttaatcataaatgaacaccgtcacattctgcctgttcgtaatctataagctcggtaattgtaggatgatcaccgcaaaccgcacaattatgtgtgtttgacggaagttttatcttacgaaattccattttgagtgcatcgtatgtaagtaaatatcctgtgagcaaatcacccttgccgagaatatacttaatagcctccattgcctgcaaactgccgataacaccgcccattgctccgattacacccgcttgcttacaagtaggaactgcgtcctttggcggtgggtttttaaatacacaacggtagcaaggaccttcaccgggcacatatgtcataagctgtccctgaaatctgataatacctgcgtgtgaaaaaggttttttagccattacgcaagcgtcattgataagaaactttgccgggaaattatcggtaccgtcaatgatgaaatcgtaatctttgataaggtccataatattttcacttgtaacaaaggtatggtaagtttttaccgtaacatcgggattcatagcctccatagtttcctttgccgattctacctttggcttgcctacatcttttgtagcgtgaataatctggcgctgaagatttgaaaggtcaacctcgtcagcatcggcaataccgattgtaccgataccggcagcggcaagatacattgctacgggtgcaccgagtccgcctgcaccgattataagcacttttgcgttaagcaactttttctgtccctttgcaccaacctctttgagaatgatgtgacgggaataacgctcaagctgttcgttagtaaatgccattactgaccgcctcccatgaaataaagaaattcaactacatcgccgtccttgagtacggtttcttcaaaagtaccgcttgcaagaaattcgtcgtttacacttactgttacatactccggtgtttctacatcttcgtcaataataagctgtgctactgtaagtccttctgctacttcttttttattacctgcaactgtgattgtcataataataacccctttaaactgatttttcaataacttctttaatttctgcttgttttactgcgcctcgcagtcttgaaacctcttcgccgtttttaaaaaataccaaagtcggcgctgcctgtacctcgtatttttcggcaagctcggaatcaaaatttatattgattttaacaattttgagcttttcggcatattcttcttcaagtgcgaaaagtaccggtgaaagtcttttacaaggcacacagctgtctgaataaaaatcagcgagtacagttttatctgcctgtaaaacttctttttcaaaattgtctttactgattcttgtcggcat

SEQ ID NO: 112 - DNA, 40724 bp, unidentified
  source 1..40724: mol_type = unassigned DNA
caaactgctataactacagtaattaaacaatattttgaagatactgaacagttacgagaaatcacaatattcagtagaaaggagcgtaaatatgcatacagcacttacaattgcgggaagcgattcaagcggtggcgcaggcgtgcaggccgatttaaagaccatgcttgcaaacggtgtgtttggcgagagtgtcatcacagcactcacggcacaaaacaccatgggagttgatgcggtgatgaatgtaccggctgattttatcgaggcacagatgaaggctgtttttacggatatttatccggatgcggtgaaaatcggtatgacatcatcggtagatacgattgaggcgattgccgcaggtcttgtaaaatataaggcaaaaaacatagttctggacccggtgatggtcgctacaagcggaagcaggctgcttgaagaaaatgcagcaaacactcttatggagatgctttttccactggctgacatcatcacgccaaatatccctgagcttgaggtgatatcaggcagacagattgaaagcacagatgacatcatagaggcatcaaaggctatttatgataaatacggctgtccggttttaagcaagggaggtcatttcacagacacagcatgtgtgtgtgactatttgtgggatggaaagcagattatcacatttgagaccaaaagagtggataatccaaactcacacggcacaggctgtacgctttcatcagcgatagccagcggcctggcaaagggacagccgcttgagcaggctgtggataacggcaagcgatatgtcacggcatgtttaaaagccatgcttgatctgggacacggcagtggacctatgaatcatggagcattaatcttgaaataattactaattaataatacaaataacaataagaacaggagagtacaatgagtaattacacaacacagatggatgccgcaagaaagggcatcgtaacacctgaaattgaaaaggtagcaaagaaagagaagatggatgtagacaagctgatggagcttgttgcaagcggaaaggtagctattcctgctaacaagcatcacaagtcacttgatgcagagggtgttggaagcatgcttcgcacaaaaatcaatgtaaacctcggtgtgtcaagagactgcaaagactatgatgtggagatgcagaaggtcatgagtgctgtaaagcttggagcagaggctatcatggatctttcaagccatggcaatacacagccattcagacagaagcttacaagcgaatgtcctgcaatgataggaacagtgcctgtttatgacagtgttatccactatcagcgtgatcttgcaacacttacagcacaggattttgtcgatgtagtcagactccatgcagaggatggagtggactttgtcacacttcactgtggaatcacaagaaaaacgatagaccagattaaaaagcacaagcgtaagatgaatatcgtaagccgtggaggcagccttgtatttgcatggatgtgcatgacaggagaggaaaatcctttctacgagcactatgatgagatacttgaaatctgtgaggagcacgatgtgacaatctcgcttggagatgcctgcagaccgggatgcctggcagatgcaacagatgtatgccagatagaggagcttgtaagacttggagagctcacaaagcgtgcatgggatcacaacgtacaggtcatggtagagggaccgggacatgtgccgcttgatcaggtagcagcaaacatgaaggtacagcagtcaatctgtatgggagcaccattttatgtacttggacctctcgtaacagatatcgcacctggctatgaccacatcacagcagcaatcggtggagcagtggcagcaatgaacggcgcagctttcctttgttacgtgacacctgcggagcatcttgctcttccaaatgtggaggatacaaagcagggaattattgcgtcaaagattgcggctcatgcagctgatattgcaaagggaataccgggagccagagatatagatgataagatggcagatgccagacgtgtgctcgactgggatgcacagtttgcatgtgcgcttgatccggagacagctaaggctatcagggatgaccgtctgcctgaggatgaccacagcgaggcatgcagtatgtgcggtaagttctgtgctgtgcgaagcatgaacaaggcacttgcaggagagtatattgatatactataactttttagtacagaaacgactcgcaactgtgaaggtactgaacagttacggtatactttaaggtgaggtaataatggaaagtaaaaagaacactaaaaaaagaactctttcaatcagaaagattgccatggcaggagtgcttgtggcagttgctgtagcaggaagcttaataagcttccctgttgccggcagcaaatgtgcacctgtacagcacatggtaaatatatgcgcagcagtatttttaggacctgcatggggtgtcggtgtggcattttgtgcgagtattatcagaaacctgacaggacttggaagtctcatggcattcccgggaagcatggtaggcgctctgtgctgtggactgatgtacagattcagcaaaaaaatcataccgacatgtattgcagaggcgcttggcacaggcatactcggaggcctggcagcgtatcctcttgcaaaatacgtgatgcttattcagccggaaggcatgtttatatacatagtgccattccttatctctacagtggccggaagcatagtggcagcaattgtcatgctgattttaaagaaaaatggcgcactgacagtatttaaggaaaatcttgagtaatatccagagctatggctttataagaagcttcataagctcatcctgacagatagacctagagtagtgatagccctgaaagcaggtgacgtcgaactgcctgagatagctctcaaggctatcattttctatgccttcaatacatatccttaagtctgcggcattggcaaaattaatcattccgattacaagtgcctgcttctttttctcctcgagaatgtctttaacaaagaacatatctatcttgataccctctacaggaagctcaagcatcatctgagatgaagagcttcctgtgccatagtcatccatagtgatgtggattccggcttccctgaatgcagtgacggttttctttatcatagataaaggcagatctctgcatcgctctgtaatctctatccatagctgtgaaggtggaaaatcatactctttaagaattgccagagtatcttttacaaagttttccttttcaagctgttctgaggatgcatttacattgatgaagaagcccggttttatctttgcaaattcactggctgcgtttattgcagtcctcatgatataatttcctagctcatacatagccggggtatcctcaagccagtcgataaacagtccgggtggcaccgtgccaaaaggctcctttttccagcgcaccagagcctcagcacccattatttcaccattgcaagcctttacaatgggctgaaactctacaaaaaagccatcacagctattgataaccgactgatgaatgattttcatgatatctatatgcgagctgccattgaacctgaccatatcattgaaaaataacaaatcagggctgtgaagctccttcgcgcggtctagagtgtactccaccttgctgatgacagttgaggtatcaccatcataatccttgagaatcagacacgcagcatatatatcaaactcaaatttaaagcatttaaagaaatacatggactttattgtatcggcaattttctgatagaaggcctcggccaaggcacggtctgcttcctttaccacaaatacaaacttgcaattattcatatagtaggtagcggtgctgccatccatcatgtagatgaacttgagcgcaagctcacgctggattgcagtgttgaaattggaaccataaagtatattgaactcatctatatgacctatctccacctcgattatggctacagacctgttttccatgatatagccgttgatgtctctttcaaactttgactgaccataaagatatgtatatgggtcgatatccggaagggtattttcgtttctgagcacgaggacatggtagcggtgcccgtcatcaccggtaaaaatgtcagaataaaatcccatcatatattctttggtatgctttcccatgcggacataaaatatatcatccgttttttcgccatttaagcgatagtggatttcctgcttatattcctgcaggtcaacgtcgttgacacaagagctcagctgttcaaagaagcaggtatgctcgccggcttcaaagccgaaaaaatcagctgtcttgtccggtacgtaagataagtcattatccaggtcggtgatgataggatatatcccgtctgataattctgaaattttatcaataaattccttgtatatcgtgttttctatcataaattaaaactccatatgtgtataatgcacaaaattcttttattattatagcatatgtatgcattatatacaataagttagttggactctgaaaatgatatttaggtatgaagcattaatataaattaatgattttaatgtgtcatttatatatttgaaggtatactgatgactgaaatataccatcagctgcttcaaatgcaacgtcaccatcatatttgccggcaacagagcggatggatgacagacctataccatagtcgtccctcttagaagaacggtattttccgttttggatggtaacatgtccgtcaaagctgttgtccatagtaataataagtgtcttatagtgtacgtgggcatgcagtcggataaaacgtgatggtgtttcgtctgaagaatccagagtatccatgcgtctgcaagcttctatagcgttttctatcagatttccaaatactaggcacaggtcattgtccaaggccgcatcatcggtttccggaacaataagctttgtctcaagagcgatattttcatttctgcatatggcactatagtatgacagaatggaattgactaccctgttttcgcaatagcttgcaggcgcagatggtatgctgtggatcagggaatccaggtattcattcagctgtttattttcagtgtttgcgaggccttttattgcaacaagctggtgacgcagatcgtggcgctgctttttaaaaagctgttcgtttgttgtgatgagcgaattatatttcttctgctccaacagggaatgctcaaggagattcatatcaaatatgagcctttcattctcacgttttatactgagcatatcgcttatattaagccccattacaattcccatgattataatgaaaagcagagttccaatctggtacagcaatgacaatgaggccacaaattttaaatgataattgattatctcggcacatgaagcaagtgccagtatgaataccggaaccatcagccgttttgccctgctgttttggctgcgaacagcctcaaggatgatgtatgcagtcaggaagcaaagtatgagaggcagaatgacatggaacacgtacatgctctgggacagtgcaaccgtaccgctaagctgtaagacacaagcgacaaggtcaagcacggtgaggagcttcgcgataactataattggcttgtcattcttaaaaccaactgcaagcctgcagaaatacagcagcggaatcatctgcgagaaaagccctataaaagcacacagataaagcagtgtagggtttttgactatgacacctgtatagttgcactcaccgatagaccacatgccggccatgagtgagaagaatccaaaatgaaatatcatcttgcaaacctctttatcgtagtataaaagcatcagtgagataaatataaacaaaacacctgcggcaagctcaagcagtgctataaagaatgaccatttattcagctttaacagagtgaaaaataaggatttgtatgctccgtagataggagaatataccgtaagcgagcttctggtaacaggagacagatactctatgcgaagctctgtatcacctgaatgaccgtcagtgcctatcaggtacccctcggttgcgggatccttcatataggatggatagttttcggtcctgccaaactcatatatgagttcatcgtccagatagaccttcgcaggggaatagacagtttttatgtagattggatcatccttgttcagattgatatgtgttgtgacggtgacatgtgtgcgcggcgaaaggtgcttaaaggtatgtggaaatgtgatttcttctttatctgaatccgagccctccaccacagcatatgcagagcttacgatagtggcttcaggatagctcgcctggctcataatcatgtttttggaggaaagaagcattatgcaaatcagtgtaagcagtataattgtcagatagggaatatttcgtatagcgctaatttttttcataatccgggctccttgcagtgtattacttttgacagtctagctcatatcaaatcaataggaaagtgccttatttaagccctctggtgtgctcaaagtagtatctctccagagcttttttggctttgccggagagctctctcttgatagggatatttgtgtcatcggccatcacgaagcatttgagtgaagtatcaatgcgtgtgacatacgacaggtttaccgcgtagcttttgtgcggcagaaaaaacagctcagcgggcagctgatctgaaagctctgaaagcttctcatagcagctgatttcctcattttcttttaaatgtatgaaaatctgcctggctctctgctctatgtacatgatatcagaaagggcaagcctctccatactcttgtttctcttcacataaagagatggggcatcggatttcttcagcatggcaaggtgaagaatgttacttagctcagctgccgaaaccggcttttcgatatagccgatggcagacagcctgtagctttccaaggcatgctccgtgcttgttgtgatgaaagcaaccgggatatcggcatctgtctcacggattatggagactgccttgatgccggtcatggaatctttcatgtatatatccatgagcagcaggtcatactttccgtactcatatgaggcaagaaaagaatctgcatcagtaaagacagtgtatgtattttggatatcgctgtggttgagaatatcacaaagcagcaaggtctctgcagcttcgtcctcgcatacagctatattaagtgtttgtggcatgtttattcctctgtagaatgtgaatgattataaataatcataatataatatgaaataaatatcaaataaatattgctattaaatatccgaaatgctaatataattatcagcagttaattaattattttaaggaggtttcagttatgaaatactgtacaaattgtggcaggcagttagctgatgatgaggtatgcacatgtcgtcagcaggcacagccacaggcaccaaatcagacacaggacaacaatgcacaggcagataatgcagcacagcagggacagtttaacggacagccgcagggcagcgcacagggacagttcaacggacagccacagggcagtgcacagggacagttcaacggacagccacagggacagttcaatggacagccacagggcagcgcacagtcgcaggcgtttgataacttcacacagcaggtgagtgcagcaggacagcagctgcagaatgacaagaatgtggcatctatcatcacattctacaagggtcttgttaagaagccggcacaggctgcagcagactttgtaaagaatgcaaatatggcatcaggctttatatttattggcttatttgccatagtagaagtagtgctgtctgtagtatatctgttatcaagtgtaattggcagcataggcggctttggattctcattttacccggcgagcttctttgagggaatcttctcaggaatcgtaggagaggcagtaaaagtactcatcctggcagcagtcattctggttgtattaaacgcagtgcagaaggataaaaaggtgacatttgcacagacactttcagcagcatgtctgtatgatgcagtataccttccgattatccttgtggcagcaatcatcgacataatcccattccagttctttggcaatgtgagcagctggctgcatacatttgcgggtgtagtaggatatgtaagcatattctttggagtaagggcaatagaagaggatgacaacaagcttccactcgtgtgtggactggcattccttgcaacagccattggttcaacaattgtaaatgctattttctaatttaatatttgatttaacatatctgatttaatatatcagaaatagccggatcctgtgagattttcttgcaggatctttttttatttctggcttcgaatagctatcatatatcttacgatttgtcaagtacgagttttgacactttttgtgtaaattgtcgttgttattgccatgcgcggaattgatgtataatgataattagattaatttgtttagttaaaaactagctgaatatatgagtcaatgataatatgaattctataataagcaggtttataaaactcgggaagagaggcacctatgacgcataaaatcaaggtacagatgtttggcaatttcagaatggactataacggagcaccatttgtggcggaaaaaatgcataaggaaagccagttcaaccgcatgatgcaggctttgatacactattctgactgcggaatagcaaaggataagctcgaggaaatagtaatcggtgagcgtgacatagatgcacctcacacggcactaagagttattgtatacaagacaaagcaaaagctcgcacagctcggactgccgggaaagaacctcatatatttggagggaggcatatattactggactccggatatagagatagaagaggatgcagcagagtttgagaagctctataacgaggcctgtgcactggaaaagcagatgccacaggaaccggagagtgcagagacagtgtgtgatgagcggataaaggaaatagaagacaatatgcttgagctgtacgtaaaagcactatatctgtataagggagagtttttggcggcatatacaggcgagacgtggatagcacaggaggccagacgctatcacaccatgtttgagaaaatcataaatgaagctgcgtacatactgagaaagagaaaacaattcaagggactggagaagctcggagtatatgcggcaaaggtggacccgttcaatgagtgggaggagctcatcatggaggcgatggtagagaccaggcgctatgaggaggcggaagagctatacacggatgtcgtggactattatctcagggagtgcggtatttacccatcttcaagactcttggaaatacttgagaaatacagtaatcagatgaatcatgcacatgagatactggaaaacatccaggagggcatgaacgagcaggaggaaacggaaagaggcggatatttctgcagctatccggtattcagaggaatataccaggcgtccatccgtattatgaagcgcacaagggtacctgtatatctcatgctctgtactctcgaggacgaggaaggcagacaggtacagagcgagacaaagatgaacaagtattcaaggcagctcaagaagtgcgtcggtgaatcaatccgctacagtgacatatatacctcgtatggaaaggtgcagtttcttatcatgctcatcggaatcaagcgtgaggactgcgagatagtcaaaaagagaatcaaccgccagttcgcaaagaaaaatccgagagtcgcagagaaatatcatgtgaacagtatagtttgtgagttgtaaaggaaatagtacaaataggttggaaaagctacaaggtgattttacacgattagaggaagtactaatttgattattttatatattatggagaaaatgttatgaatggtaaagacaagatatcagtaattattccatgctacaatgtacaaaaatacattatgagatgctttgattcaatttacagccagacatatggctttgaaaatctcgaagtgatactcatagatgatttatcaacagacaatacatggtctatattagaatccttacaaagacaatacccggagaatgttatatctcttaaaatacagaaaaaaggaaagtgtggcggtgcacgtaatctgggaatggatatctgcaccggcaaatatatcacatttgtggatgcggacgattatgtgcatccggatatgctcagggtgctgtatgacagaatgacagaggacgattatgatgtggcacagtgtggtgtatcgtgctttaaagcagataagccaaatgtattagaagtaaatgattttgaaattcaaaggcttgatttggataatgttgataataggaaaaatctcattataggtctgaccggatttactaatgtaacagcatgggcaaagctatactcaaccaaatttataatagaacataatctaagatttatagaagatgtatattatgaggatacacatttttctatgctttgtgtgttacttgcaaagaaatattgtaaggtgcaatcgacattatactattactttgagaatacagagggcattatacgttctgaaattagcaatgcaaagatccgggatgctaagattattatggatcatataaggcaggctattcaaagtagaaaagcagaactgggaaatgtaattgagcagtgttattgtgaaatccagacatttttgttatggcaccaatatattgagccatatagtagaatagaaacctttatgaatagggaactggatatttgcaaagaagagtttttaaagagtgaaccggatatatttaataatccatatgtgaagtttttttcagatgatgtggtattgaaaagaatgtcaaggctgagagtaactgcgaaaaaaatggataatgcatactttttggataatgcaatgcatatctgtcttggtatacatgataaggatggaaattacagtgtctgggctggaacaacgatgcaatccattgttgaaaacacaaaagcgccaatagtttttcatatattacatgatgacacattgaacgaaataaataaaaataagctgagtcttattgctgataatagtggaaatgatatagaatttcatcattttaattcggacgtttttggcacgtttgctgattcaatgaatagatttgcaattggaacaatgttcagaattatgttgcccgatattatgccggatttaaaaaaaataatatatttggactctgatttatttgtaaatacagatattgaagaattatggaacctaaatatagataattactgtctggcggctgctcaggattgttcgacaataagaaattggggaactccatacgctgtagcagcagggcagacaagtcgtgacagatattttaatgcgggtgttctttgcatgaatcttgacaatatcaggaaaaatggaagcctgtttcaacaggttatagattatctgaacgataatccacggacatggcttcctgaccaggatgctttaaatgccatattcagcggaaaaaccttattgatagatgaaaaatggaattattttattgatgaggcaagaaaaaataatgagaaagcagagaaaaaaatatatcattatgctgcaaccctgttgatgctgcatacaaataatgaaattgacagagcctactatttcacaatactgagaaccccatggggagagcagatggaggatggcttattgtgtaattctatgggcagaattgtggatagaacagctatgctggagaagctgctaaaaaaagctactcaaaacaatatacgactcgtattctatggtggagagaatagctctataaggaatgcaatgaggctattaaatagaaaattcgatagctgtgaatggcatgagcatttaaaggagaatgagattatctgtgatgataatacggtctatatagtttcagcggatgcggacgatagtaatggattagaaatacttgcaaatgccggattagaaaatggcgagaattattttataacacagaggtttttacattatacagagggtgggtttgccctatgatttttattactgatgaattaggtaagtttgagaaaaatataatagagctggcagaaaatatgggatttaaagaatgcaaaacaatagaagccatagatttgttttgtggcatatctgaaaaaaacgatgtgcttaaggaaaaagacaggtattatgcattcatagatatccctcaatattggagtgttcgtgcagatggtctaaatggtgctatatatgataataaaaccaaaaaggcaaacatctattttaagaatccgatagagaaaagaatggtcagcagagtcgagtggattgacaggaataatacagtatatagaatagattattacaacaaatacggatatatgtattgttcggagaatgtgagtggcggcaatgttacagtcagggaattctatgatagaaatggtgacattaaagtattagaacagacaggtccaaagacatataccacgtttggcacccgcattagtccgaagagctatagaggctttgctgattatttggaagcttatcttaaatataataaaatttatgatgaaaatatatggctgacaagtgatgagatattaaataaatttgcctgggattatggtaattttaaaatatcatacctgccacaaaatagattaaactcagatttgacagtaataactcagactaacacagcgtttcgaatactgtgcagtgaagagcagcaggtcaattggtataaagaaaattcaaattataaatgcgacagagtatattcatattttgaaaataatgaattaaaatttggaaaaaaggaagcacttactattacagaatcggatcagcttgagtatattgaacagcttataaatgactttccggaaataacttttcatatagctgccagtaccattatgtcagataaattaacgagactggatataaataataatgttgagttatatccatgtattacggaacaaaagagaaaagaactgtttgaaagatgcgatatttatttggatattaatcattacagagagctatacaatgcagtaaacgaggcaatggttaataatatgataatactagcgtttgacaatacagcgcattcaaaagaattatatccaatgggaaatatttttgaaagcagcaactatgtgaagatgaaagaaactctaaaaaatataataactagtcagacgatattcaatgaatatatagacaggcaaaagaagcaattaaaacaattagctgcaaaagtagttatgggtgatacagatgagagtatttgattttacattacttagtggatatgaattttccggagtcgatgttgctcagggatttagagcaagattgtttgcaaaaaacaatgtaaacgctaaatttatttttacagagctgccgacaattagggatatggaactgtatggttcgcaaaaaataaaacgtggtcagattatgtctgcacatctttttatgaccggaagattagatatgagtttgtctgtgaaaaaagaagctcttttagaaaatgaaaaagaaaactatgagtatgacaatatagatgaggatggaaaggtgattcgtctatataattccggtgaaaaatcagttgaaatattatgcgatgaagatggatttgttataaatgaaagtctctttaaaaacggaaaaaagtatttagaaaattattatacagacagtttgtcatatacagagctgtataattgggataatgattcgaacgatggcttaaatctaggaaggagaattttttggaacaaacaaggacagatggtttatgaacaatgtatctataaagataatgttgaatatctgtttaaaaatggtgaagttatagacaatgtagagtttctagaaagatttgtaaagacacttaatctttgtgagaatgatatatgtataatggatagagcgggatatcttgattatatacagcctctttttgaaaataaaggcaaatcaaagctgatagctgtattacattcagatcatttttacaaaatatatgaggatgaaagctcattatacatgaactatgagtattattattggttcaaatattcagaggcaatagattattttgttgttggtacggatgaacataaaagaagtctggaagcatttttaaaagagtatgattgttttgttccgcatattgcagctattccaccgggcgccataccagaaggcaagcttaaaagtaaaaataatcgtaggcgaggcagcataatatctgcttcaagacttagtccgagaaaaggtattgatattcttattaagagtgtgataaaagctcatgagataaatcagacaattaatctggatatatatggaagtggcgatgatgggtatactatatatttaaaaaatatagttaaagatgcatgtgctgatgattatattcactttaaagggcggtgtaatcttgaaaagatttatccacactatgaattgtttgcatccttttctttgtgggaaacatttggactttcactcatggaggctgttggagacggactagccatggttggactggatgtaagatatgggaacaggctttttatacatccggatgaaaatggctatctggtggattttgatattgagacagattttcaaaataaagataagctctgtgaaagaactgcagcagcaatagttaaaatatttgaggatgatgacagattgaagaaattccatgaaaattcttatatgattgctgaagaatataaggagcatgtaatagaatcaaaatggatgcagcttataaaaaatataccatagctcaatccgtcaaacttaattttatagagaaatgcagtaacatgaaggtaaaacatcctaaggattattggcttgagtatgagagaaaaatgttggaaaacatcaatgaaacaacaggcttgtagacaggagtatcaatgaaaacacacattactacattaaacaacatggcaggaactgccagtctggcacatagaagagtattaaaggtggcgcagagtattggctgtcatgaaatgggcttatctttttatcctctaaaaccagactatgcaaaggagatagacaaacgtcttgatgggataatagcgccccttaattatggggatattgtgatttttcagtatccaagctggattggggtgaattatgatgagagctttgtaaacaagataaagtcgtaccgggatacaaagctgataatttttgttcaggatatacaaaagctcatgtttgattctgagcaggcaattcttgatatggaaattaaaactctcaataaggcggatttacttattttgccatcaaagaagatgcatcgatatctgaaagaaaatgggcttgatgagaagcctgttatctatcagactatctgggatatgccatcagacatttgttttgttgatcatgctgtaacgagatgctttcactttgctggaaactataatcgttttccgtttctggcagagtatcatggcaagactccgatttatcaatatgatgcaaataagccggacagagaaaatgatgacagcttttgctggagagggtattttgagcaggaaaagctaatgcatgagctttccaaaggtggctttgggcttgtttggagtgatgacgaatattttgacagatattattcgatgaatcagccgtacaagctcggtacaaatctggcagcagggataccagttatagtaaaaagaggctgtgttcatgagaaatttgtcgaaagaaacggtctgggatatgcagtcgatacgttggatgaagctgataaactggttcagagtattacggatgcagagtatataaagctttaccataatgtgaagaatattcaaaagctgatattagatggcgcatatacaagaaaaacacttcaggatgcaataattgaggttttggaaaatgcctgtacaccggttgaaaacagatatcaagatcatatatagatttagcagacaaatcaacagtgacaggatatagtatttgaccatgatcaggtgtatgaatcacagatagttgctacagtggaataatggggaagagattatgagcgtacatattacaaaaacttataacataggcggattgattggtctccgtcaaaatgcagtgaaaaacgctggtgaaacacttggctttaaagaaatgagtttatttaaatttcctgatgcatatgatagtgatgatgagcttcatgttaggatggatggcataatcgcatcactttgtccggaggatatagtgatttttcagcatccaagcggtgagagtcccagatacgatggatttttatttgagcatttaagaagatatcatggaacaaaaattgttgcgtttatacaggaaatagcatccgatagagatgacagtgagtattctttgagtgatgaaatcacgctgcttaacagggctgatatgtttatttttgcctcagctgcgctgcgggattactatatcgcaaatggattaaaagaaaaaccttatctgattcagaatataccggattatatgacagacatttgcacaaatgagcataaaaataaaaaactatatatcatggcggaaacgagtcaaaatgaatatccattgaacaatttgaatatagaggtggtgcaatatgatgagtaccgtgccatggaatctatactcaggttgtcagacggaggctttggattgatttgggatgcggatgaacaggcgcttggactttatatggctgccggaatcccagtgatagttaaaaaggggttgagctgtgaaaagtatgtgacagataatgaaataggagcagcagcgacagattttgaagatgtataccggatagctgtatcagaatcggaagataaattgagtcaatactacgcaaatgtcaaaaaactgcaaaatttgttcataaatggaatatataccagaaaattattgctggataccttgattatgtgtggagaaaggctataatttggcggtatataaatgtttttatacgattttagatacacctaggagtttatatttatagtgttaaagaggaaaactatagttatgtccggatgaaagaggattaggaaacagataatcaagtatccggattcatgtgaataaggagagactatatgaataagaagaaggttgacagtattttaaaaggtataaccgcagcaggaattgccatgggtggagtcagctctatccagggtgctgatatggttatggctgcaattaatgaatcggcagcagattccaattcattagttgacgcaggctctttgtctgagagcgaacgtacagagtatagcgagagtacaacacagagcatgagtgaaagcgcttcagagagcactagcgagagtgagagcgtgagtgtaagtgaaagtgaaagtaccagtgaaagctcaagcatcagcgaaagtgctaagcagagtgatgcagaacaacaaagtggtgataatgttgtagcggctgcatacacagatgatgcagaacaggatacggctgtttatgctcgaatgagtggaatgccgcagcttgcaagtaatgatacaaatagagatgattgtgtatcagatcaggtacatcatgtgactaagattacggcaagtaattttaaagatttagctagatctgatgttcaatctataaatgatgtaaaaccgaagaaatggaaagataaaaattttcagtatagagtaaagaattcatatacaggtgagtgggaatattttaataattttgatcaagttacatttaattggacagaaggaattctctggtgggaaaccagccataataaaactggcgaattgtatatatgtgacggaaatgcgtttgtattaaaagtgtctgataatgaatgggtagaatttagaagtagtagtacaggtggagtacatacgtataaatacgcatataagcatggggattccattgatttactggatgatgcagatccaaactatgagaagagtgaatcagtaagaatatcagagagtttgagtgttgaagcaagcactagcgcgtcaacaagtgcaagtacatcggcaagtacaagtgcatcaaccagcgcaagtacctcagcaagtacgagtgcatcaacaagtgcaagcacctcagcaagtacaagtgcatcaacaagtgcgagcacatcggcaagtactagcgcatcgacaagtgcaagtacatcggcaagtacaagtgcatcaacaagcgcaagtatctcagcaagtacgagtgcatcgacaagtgcaagcacctcagcaagtacaagtgcatcaacaagtgcgagcacatcggcaagtactagcgcatcaacaagtgcaagcacctcagcaagtactagtgcctcaacaagcgcaagcacctcagcaagcacaagtgcatcaacaagtgcaagtacatcggcaagcacgagtgcatcgaccagcgcctcaataagtgcaagtacatcggctagcacaagtgcatcaacaagtgcaagtacctcagcaagtgctagtgcctcaacaagtgcaagcacatcagcaagtaccagtgcatcaacaagcgcaagtacctcagccagcaccagcgcatcaacaagtgcaagtacctcagcaagtaccagtgcctcaaccagtgcaagtacatcggcaagcactagtacatcgacaagcgccagcacaagtgcatcaacaagtgcaagtacctcagcaagtacgagtgcctcaaccagcgcaagtacctcagccagcaccagtgcatcaacaagcgcaagtacatcggcaagtacgagcgcatcgacaagtgcaagcacctcagcaagcacaagcgcatcaaccagcgcaagtacctcagcaagtacgagtgcctcaaccagtgcaagtacctcagcaagtaccagtgcctcaaccagtgcaagtacatcggcaagcactagtacatcgacaagcgccagcacaagtgcatcaacaagtgcaagtacctcagcaagtacgagtgcctcaaccagcgcaagtacctcagccagcaccagtgcatcaacaagcgcaagtacatcggcaagtacgagcgcatcgacaagtgcaagcacctcagcaagcacaagcgcatcaaccagcgcaagtacctcagcaagtacgagtgcctcaaccagtgcaagtacttcagcaagtacaagtgcctcaaccagcgcaagtacatcggcaagcactagtacatcgacaagcgccagcaccagtgcatcaacaagtgcaagtacatcggcaagtacaagtgcctcaacaagtgcaagtacctcagctagtaccagcgcctcaaccagtgcaagcacctcagccagcaccagtgcatcaacaagtgcaagcacctcagcaagcacaagcgcatcaaccagcgcaagtacatcagcaagcacaagcgcctcaaccagcgcaagtacctcagcaagcacaagtgcctcaaccagtgcaagtacatcggcaagcactagtgcatcgacaagcgcaagtacctcagcaagcacaagtgcctcaacaagtgcaagtacatcagctagcacaagtgcctcaaccagcgcaagtacatcagcaagtacaagtgcttcaacaagtgcaagtacatcggcaagtacaagcgcctcaacaagtgcaagtacaagtgcctcaacaagcgcaagtacatcggcaagtacaagtgcatcgacaagtgcaagtacctcagccagcacaagcgcatcaactagtgcaagtacctctgcaagcaccagtgcatcaaccagcgcaagtacctcagctagtacgagtgcctcaataagtgcaagtacctctgcaagcaccagtgcatcaaccagcgcaagtacatcggcaagtacaagtgcatcaacaagtgcaagtacctcagcgagcacaagtgcctcaataagtgcaagtacatcggcaagcacaagtgcatcgacaagtgcaagtacctcagcaagcacaagcgcatcaactagtgcaagtacctcagcaagcacaagcgcatcaactagtgcaagtacctcagcaagcacaagtgcatcgacaagtgcaagtacctcagctagtacgagtgcctcaataagtgcaagtacatcagcaagcacaagcgcatcaactagtgcaagtacatcagccagcacaagtgcatcgacaagtgcaagtacctcagctagtacgagtgcctcaacaagcgcaagcacatcggcaagtacaagtgcctcaacaagtgcaagtacctcagccagcacaagcgcatcgacaagtgcaagtacctcagcaagtacaagtgcatcgacaagtgcaagcacctcagcaagcaccagtgcatcaacaagtgtaagtacctcagcaagtacaagtgcctcaacaagtgcaagtacatcggcaagtaccagtgcctcaacaagtgcaagcacctcagcaagtacaagtgcttcaactagcgcaagcacatcggcaagtacgagcgcctcaacaagtgcaagcaccagtgcctcaacaagtgcaagtacctcagcaagcacgagtgcatcaacgagtgcaagtacatcggcaagcacaagcgcatcgacaagtgcaagtacatcagcaagcaccagtgcctcaacaagtgcaagtacctcagcaagtacaagtgcctcaacaagtgcaagtacatcggcaagtaccagtgcctcaacaagtgcaagcacctcagcaagtacgagcgcctcaaccagcgcaagtacctcagcaagcaccagcgcatcaacaagtgcaagcacctcagcaagtacaagtgcatcgacaagtgcaagcacatcagcaagcaccagtgcctcaaccagtgcaagtacatcagcaagtatgagtgcttcaacaagcgcaagtacatcggcaagtacgagtgcatcgacaagtgcaagtacatcggcaagtacaagtgcctcaacaagtgcaagcacctcagcaagtacaagtgcttcaacaagcgcaagtacatcggcaagtacaagtgcctcaacaagtgcaagtgagtcatcaagtgtaagcgagtcactcagcacaagcgagagcatcagcacaagcacaagtacgagtcagagtcagtcagctgcaaatgtggtaccgacaccggctccaactcctgcaccggcagtagataatgctcctgcacctgcaacaactatcacaccggctgctacacctcttgcagcagctacacctccggcagcaccagcaccagcagctcctgcggcaccggcagtaccgaatacaccaattcaggatgcacaggttccacttggagtaaatgaggatgaagataatcttcagaacatcgaggatgaggatacacctcttgcagcaggcggaacagccaaggacggtatcaaaacatggtggtggtggattgcagcagcagttgcagctgtcacaggaaagggtgtttatgacaaccgcagaagaaaacctgcaaagagcgacgattcagaagataattctgatgagaaataaataattaatagcaatactaacaatattgttttataatattagtgaccatctgtagcggatggtcactaattcgttaagctgttttgtagtaagacgaaattactttgtgaggaaaggtgaattccttgaagcagaaggatagtataaagaagaaaaaacaaaaacaacagaaggaacacgtattattatataagcttttatattcgttcatgaccatgctcgtgtacatggtaggcagaaatataccactctacgggatagatatagatgcatatagcaatgtaaatgtagatgcgcagtccatacttttacaggctatttcaggtgatatgaagaactgctccattttcatcataggcttgtggccgtacatgctggcatccatgcttgccatactgatagttgcaatcatgtcgcttgaccacaccagaaagctgtcaccgaagaagataaacatatggacagttaccatcatgatgattatcgcagccgttcaggcatatcacaaaacacagacacttatgtatagagttagtggagatgaacttatatggaataagataatagttttcatacagctcattgcggggatgctgattgtggtgtatatgtgcgacagagctactaagtatggtatcggaggcaaggtgagtgtgttcatggtcaatatggtcagtggtatgatgaccatgtttacaggaaagccgcttgagaagctggcactgcctgtagctataggagtggcagagattgctgtcatgatagttctagagaccacagagaagcgaatagcagtacagagagtttctataaacaatatctacgcggataagaactatatcgcttacaagctcaatcctgtcggtgctacaccgcttatgtttgcgtcagccgcttttttgcttccacagtttatgtgcaatggacttcattatctgtttccggacaatgctgatattcagtggtggatggacaatatgaggctcacatcaccgcttggaattgtagtatacatggtgattatatgtctgcttacaattatcttttctatggttatgctgtctccgggcaggacagcagatgatctgcttaagtcgggtgattccatacaggatatatatgcaggaaagcctacgaagagatatctgattggcacagtgctcagcttttccgttataagttcaatcattatctgtatatgtcagggtggaccgctgtttttacagtttgggggatatgtggacgcatcacttgctatgctgccgtgctctatcatgatgacgacaggtctttggatttcgctgtaccgcgaggcagaggtgtaccggaatatggacagatatcatacattcatatagctcccggcgctttgaattaagaattaggaggaatcataatgctatattttataccggcatggtataaacagaatatgtggtgcgaaaacgagcagcagtggtatatgcgcaggctcaagtcagagtttgacgagactataaagcagattactctttttcatagaaatgtggacagaccttacaggattcttgtgctcggatactcgccaaatttcagacatttcctacacaggcagggcatgtaccgctcaaagtactggtcatgctttgatgcgatagcacaggtcaggagaaagaaggtcgctgtgctgtcatatcacgatatcaagtggccgaaggggctggagtttgtgtattcgcctttttctataatcgctttgcagggcgatgtgaagtatgcacaggtagagtttggtgaggatggcaatccgatatccatagatatgtttgaggatggcaaaatctgcaggcgcaactattatgatgacagaggctttgtttccagtactgttatatatgaaaacggcatagagcagtatcaggattttttgatggaaaacggcatctggaagatacgtgagtataaaaatgatggtcatgtggttgtcaatccaacgtgccctgactatgatgtggtgcctgatgctaagagcggcaaagcaggtgagccggttgagatacgctttacaaaggctgaatatgacagccttgaagcggttattgaagaggtatttgcaagctatgtaaatctcacaaggcagggtgacagctttttcgtggcgatgcatccgcttcatatcagggttgcagagcatgtgcttaaggggaaaagggttattgctacattttttgaaaacagatttgatttcacgcagacatcactggcagcggattttttagagcatgcggaaaatatcattacggattctgattatacgacgaagattattatggcaaatctgggtgcagtaaataacaagccgttcagattacatatcacagatattccaccatatgataccaggatggatttcggtatcagctcgcagcttcgggtgcagaacatcctcgtgccggttgatggactgactaaggatgcatttgctcagattataaaggggcttgcggattatctgaccattaatgaccttgcgagagttcatttctttacaagagatgcctcatggggtcatgaggatgctataaagaatgatacggtaaagcttcttgatagtatgggctatgattcccgtttggtaacaggcgatggtgaggcagctctcggctttggaggcagcggggctgatgtatttgccgagaatgagctgggggatatagaaaaaacggtggagcagagatttttcgtggatgtatgtgtggatgagcgtgatatcagcaagtgtatcaacgagcagagagtcatcctcgatatgagaggcacgatggatgtttttgtttatgttacagctatcagcaagggcgtgccgagaatcagcctgagtgcagaccagtttcttgtttcaggaaaaaacggaatggtcatagatgatttttctgatatcggaaggagtctgacctattatctggacagctttgaaaactggaatcaggcattggtggagtgctatgagcttggtcagaaatataccacatcggtgctgcttaagaagtggagaaaggtgctaaattttagtgagtaagattcatgttttatatgttggcgatgacgattggacaactaaatacagcattccggacaatatagagtttgaagtatacgagtctgatgagagtgaactaacggcaaacagacctgcgagaaagctcatggatttagttattcttgacagggatataacactctcagaggaaaaggcttttacgaagtttacaaggggctactgtctttttgcaacggaaaatgtgcagatgctaaacagcgcgacgagcagatatttcaaggcacgaatgggacagtatctgtataccggcgatgtgcagtattttctggctcatgaggtgagaaattactatccaaatccttatggtgagaagtttaatcctgccaagcttgctgtcagtgattcctttacaggaagggtagcatgtgatggaaactataacttggttctagatggagagtttggggaggatttttcgcagattgcatactggagatataatatcccggtttttgagggacagtgtattgatatgtatcttgaatatgagaaaactggggatgtagagattaagcttagattatttcagttctactatggctcgattggtgatattaagcaggtctgggagtttgacgaggaacagcttcaggatgttttcagaatagataatgaatcagatcagggtcctgtttttgtttctatacttgcaaggggcaccggcagcctgaatatcatatcattgcacgacagacattcccgccgtggacacggatttttcctgcccggaggtgagaggcttgtctcttctaaaggagaggaagtgtttgtatactttgagaagggcgatatgaagccaccgcttgctgtctatttctcaggctacaggactcaggagggctttgagggctactatatgatgcgaggcttcggatgtccgtttattcttgtgacagacccaagaagtgagggtggagccttttatctgggagacagtgaatttgagcagatgattacggattatgtgactgataagctcgatgagcttggtcttacaaaggatgagctcgtgctctcaggagcttcgatgggaaccttcggttcactatactatggctcaaagctttcaccgcatgcactgcttcttgcaaagccgcttgccaacatgggaaatgtagcacgaaacgagcgaatccttagagccggaggcttcgctacctcgcttgatattctgatgaaaaattatgacaatctctctgacgaggcgatagagcagctcaacaacaggatgtgggacagattcgacagtgccgactggtcgcaaacaaagttcatcatctcatatctgtatgaggatgattacgacccggatggttatccgagcattttgtcgcatcttaagtcgagcggtgttgaggtgtatggcaagggctcacacggcagacatactgacaattcatcaaatgtcatggcatggttcaagagccagtacaataatctgctgcatgatgatttttcaagataagcaaataaacgttgcaggtcacacagttaggtgtgaacagtaacaggaaaacaaatattaagtgaacaatagtaagacaggtaagtattatgtatggtgacacatggcaggtccgctggaaggaatttctatcggactcgtatgtatatggatcaaaaattgaatttaatgaggatggttcagtttcttataagaaccgcctcatgccgccgggcacggtgattcacacatggtattctatgacgaatttccaggggaataggatagagccgtcgcttccgctcatcgatggagagcgggcatattccattgcggtgaatattgactatcacaacagtgagagtgaggcgctgatgcttcgtatcatattttttgacaggtatgatgcacaggcgcagagtattattgtccgcgataaaaaggcgtttttcaagccgtcaatcaggacctacagctacaggatagagctgataaatggtggaaatgctgattttacattcaaatcactggtgattaaagaggtttcagaggaagagtttgatgcagagcaggaaagaattgagagacttaaagaggactctaacaaaagtaagaaaaagcgaagaaaaaataaaaaatctaagtgatgaagagctttctgcactgacagagcagtttaagagcaggtatagcgatggggaatcgcttgaatcgcttatgccagaggcctttgcggctatctgcgaggcggattacagggtgcttggaaagagaccgtatgatgtgcaaatcttagcggcagcagctcttcacggtggatatctcgccgagatgaatacaggtgagggaaagactctatctgctacgatgccgctttatctgaatgcgctgacaggcaagagctgcatgctcgtgaccacaaacgagtatctggcatcgcgagatggtgcagagatgggagaggtctataatttcatgggtcttagctgctcatacccggatgcggatgatacaaaaaagcaggatgatgacgagaaaagacagttttattcggctgatatcatatacactacaaatggcacacttggctttgatttcctttttgacaatctggtaaagaaaaaggaggacagatttctctgtgatttccactatgtcataattgacgaggctgattcggtgcttttagactctgcaattatgccgctcgtcatatcgggagtgccgagagtgcagtcgaacctgtacgatgtatgtgattttttcgtcacgacacttgtggaggatattgactacatagaggaggataaggcagtctggctcactccaaagggtgtgaagtttgccgagagcttctttggcatatcaaatttctacggtaaagagaattttgagataaacaggcatgtcacgctttctcttcgggcgcacaagcttttgaagaacaaaaaggattatgttgtcactgacaagaaggaggtagagctgtttgatggagcgacaggccgtctcatgcacggtgtcaagctgcgtggcggtcagcatcaggctatagaggcaaaggaaaaggtggagatatcgcaggaatacagaactgtggcatcagttaccttccagaatctgtttatgatgtttgacaagatggccggcatgagcggtacactcatggatgcaaaggatgagctttttgagacctacggcaagcaggtggttaaaatacctacaaacaggcctcttaaaagagtcgacaggaaggacagatactttaaaaacggtcatgaccagttctggacagcagtggatgatgtgataaggcttcacgagacaggccagccggtgcttgtggtgcttaattccgttacggatacagatcttttttcaaggcttttaatagaaaaaaatatcccgcacaatgtactaaacgcaagcaatgctttctgggaagcacagattatcgcaggcgcaggccagctgaatgcggtcacggttgctacaacgatggcaggaagaggaacagatataaagctcggagacggagtgaaggagcttggaggcttagctgtcataggtataggcaggatgaacaattcaagatccgagaggcaggcgaggggccgcgccggcagacagggtgatccgggcttcagccagtactatgtgagcctggaggatgatatagtgggagctgaggatgatgacaagctgcagcgctatattgatggcaaaaagcgtatcggaaagcgcaaaataaagcgtattgtcaaccagtgtcagaagcttagtgtggagtctgaggagatgaaccgcaagaaatcacttcagtatgaccaggtcctccagcgccagcgagacctaatctacgcaaccagaaaaaaactgctcgacggcgccagcgtcgagcaggagaagatagtagagattgcgaaggggaatatctcagacttcgttaatcattttgactgcatacagagtaataataagcatggcaggcgccgtggcagaaagaaagataacgataaaaataccaatacacagcaatacacatcaatgcttaacagatacattcttgacaacatctcctacaagctggacgccggtctgactttgtctgacatgcaaagcgccgccactgttagcgattacctgatgcttcgcgtgtatcaggggctttcaagacagcgtgagcgcataggcgatgaggaggcttacgagcagtttgtccgtgaggcaactctaaaggcggtggatgatggctgggttgagctgattgactaccttgagcagctcaagtatgcggtagcgggaagagcatccgcacagagaaatgttatgtttgaataccaaaatgaagctttcgagtcgtttttggatacagaaaaagcggtaaaatgtaatatcataaggaatattttgcttagtgatgtgaaaatcggcaaggatggcaggctgcaggtcatctacccatagagacagtgtaatatcaatagtttgacagatacgaggagaatcatatggtatataacttcaatctcggaataggctgggcttcaagcggcgtggagtacgcacagagctacagagcgaatctgcttcgcagggcacatattccggcaaggtttattttcacagatatgtttccaactgaaaatatagagcacatgacaaagaacatcggctttttggatgaggaagtgatatggctgtacacattctttacagatgtgaggacatcgcccgtcacattcactctaaaggagcttgaggcttcgatggcagaagaggattataccttttccagagagggcaagacgtgcaggtatcagtttaaggagagcggcaggttctacacctgctacatggttgatgatacaagtgatctagtgcacagagtcgagattgtctcaaacggatgcctgatcaggaaggatttctacacctattgcaggaccttcagcgagtactatgctccgctcgacggcaaggcgcatctgtacggcaggacttttttcaatgaggatggctcggtgtgctacgaggaggtcatagaggatgacagcaccttttacaggatcggagcgcaggtgctttataccaaggctgacctggtcggctatatggtaaagatgcttaacttagcggctgatgatgtggtgatcatcgacaggacgacaggcataggtcaggcaatcctcgaaaactgtggaccggcgcgcgtaggaatagtggtgcatgcggaccatttcagcgagggcggcacagatgatgattacatactgtggaacaactattatgagtattcgttttcacagacgaagcacatagatttctacatcacagcgacagatgcgcagaatgagcttatgaggcagcaatttaagaagtactgtggaaaggagcctcatgtggtgactattccggtgggcagtcttgatgagcttaagtatccggatgagccgagaaagaggcactctctcatcacggcgtcgcgtcttgcgacggagaagcactgtgactggctggtggaggctgttgtaaaggcaaaagaaagcgtgcctgacatctcacttgacatatatggcaagggtggcgatgaggcgaagcttaagggacttatcggcaggctgggctgtgctgattatgtgcatttgatgggacagcagaaattagatgatgtatacaagcactatgatgcatatgtggcagcttcacagagtgagggcttcgggctcacactcatggaggccataggctcagggcttcctatagtgggctttgatgtgaggtatggcaaccagacctttatcgatgatgggcaaaacggctacaaaattccaatcaccgatgagatggatcagaaggagaagataaagcttctttctgagcgtatagtgaggatgtttacagaggatgatatggatgcattttcggcacattcatatgagaaggccaaagaatatctgactaaggaggtggttcacagatggatagagctgttgaagtaacacacgaagcagttggtatcacactgctgtttgatacattttcgctcgagagcaaaaatctccttgagtcatttaagaatgccggtgcagcctttcatgcagcagtcattgaggatgacggttttctgccggatgatgtgatgagcgtgtatggatttttcttaggcgattacaggaaagctgacagcttaccggggaagccgctgtatttcaatcagatacagattcccgattactggcgcatagagggtgataattcatctgcgaaggtcatggaccgcaccagggagcgagcgagagtatttttcacggagcctacgcacaggcgacaggtcaagattgttgactggctcgatgatgccggtcaggtcaggctttcagagcactataacaggtatggcgcgatcttctgtcacacggtttttaataaaaagggacagaaggcactcaggaagttttttgatgtgacgggcagggagatgatagtggagaacttcgtcaccggtgatatactcgtcagatggcaggataaggactggattttcagaagtaagacagactttatagcgtttttcatcaggtgtgcagggctggaggatacagcggtttatttcaactcgctgtcatatccgttttttgcatcacaggcgctcgcgccaaacggctttaaagatgcactcttctggcatgagccggtgggtgatgaaatacccggcaatatgcagattatactgcatgatcagggaacgagggcaaagcgcgtatttgtatcgcgcagggagtcctacgacaggcttatagcacttggcgcaccttccgataaggtgaagcagcttggatatatctacagctttgtcagggaaaataagcacaggccgcacatactcgtatgtaccaattcagagaatgtgggtcatctgacagagcttgcgtcactcatgccgcagatgcattttcatgtggcggccatcacagagatgtcgtcgaagcttatgtcggcagggcagtatgacaatgtgtcactctaccctaatgtgaagatgtccgtgctggatagtctttttgagaagtgtgatttctacctcgatataaatcacgagggtgagatagtggacgcggttcacagagctttcttaaacaacatgcttatagtgggctatgaggagaccatgcacaacgcatattacaccgcagacacgaatacatttaaggagagcgagtacgctgatatggcggaggcactcaacctgacactggctatgccgcatctcattgatgaggcgcttgccatgcagaaaaaggctgctgtagcggctgatgcaacagactacatggaaatactccatttgtagtgatactgggtttatgaacagaaaggagcttaatatgagtaaaaacactaacaacaatcagacagtagacgagaaaaagggtaaaaggacagggcttacaatactgggctatgtgcttgtgatcgtggcacttcttatagtgcttccggttgcgcttccaccgatatttggctatcatacatatctttcgggcacagaccatacaggaaatatctcaaagtacggcagcgtggtatatttaaagactatcgatgaggcctcttataaggatggcaatatagtagccattgagtcagctgattcatcaggcagaagggttgattcatactatgtggattctaacgattcttctgcaaaagagattgcattacgtgatggaaatggtgtatcatataaggtagttaaagggcaggttatcgcaaagactccgtttatcggatacttaagccagctgtgcttttcggcagttggaattattgtcacagtagtgatttttgctgcaggtgtagcaatcatgatgtatgtaaataaaatcagcaaggaaatcaacaccatggttgaacagcagactgcatagtgtgtctgaattctaatctgcggcattagaaaacctgactattataaagcagaccttatgtttgcggaataggataagttatggatagatacagcgtgagtaggacaaagaggtcattgttttatttaatgatgacctttttgattgttggatttataattgccgagtgcatattaccgagtgagaggagccagtccgtcagtgataaaagtatcacctacgagggcagctttacatgggagaagtctgatggtgaaagggagactattgaagtgcccggcaggtatgatgtgaagccgggggatacgatggtcataaccaccgtactgcctgataatttcgatgcaaatgtcatggcaatcagagcatcgcttcagacagtcagattctatgtggacggcagtctgagagcagagtatgatacaaaggacaccagaccctttggtaaggactccgcgagcagatatgttttttgcaatatgtcggaggatgatgcaggcaaagagctgcgcattgagctgacgagccatgcatccaactattcgggcgttgtaaatacagtatactgcggagataagagcgatatatggacaaatatctttcataacagctccagagagacggttatagcgtttttcattctttttgcagctatagtggccattatgttcagcatagcactcagtattgtatacaagacacactttgacatggagtttgtgggctggtgtctgcttttaggagcggcgtggatgctcggtgagtcaaagctgcgtcagatgctggtgccgaatgcatctgttatggcagccatgtgctttgtggttattctgcttagtcctattgctgtttcgatttatattgacagcatacagggtgggcgttatacaagagtgtatacatgcatagaggcacttgcggctgtgaatttcattgtctgcacagctttgcagctttttggtgtgtgcgattatatagagactctgccggcaggacagggaatgcttgctgtctgctgcgcggtcgttatcacaacgtttatcattgatataattaagcataggacattgggctacagacctgagatggttgccatgattatagcacttgttctggtgcttatagaggctgcttctgtgtactttgttgtcactatgtcaggcttctttatcggaacaggccttattgtgattttgtttgtcaatataatagtcacaataaaaagaatcagcgagatagaatacaagcgccagaaggaagaaagtgacaggcttagaaatcagacagagagagtttcccttcagatgatgaagacactcgctgctacaatagaagcaaaggatgattatatgagagggcactcatacagggtggcagagtactctgctctcattgcaaagcagcttggctggagtgagcatgaggtggagaatcttagaaatgctgcatatctgcatgatatcggaaagattggcgtgcctgatacaatattaaataagccgaccaggctgaccgatgaagagtttgcagccataaagagccatactgtgatgggcgcagatatcttaaaggatatcacactgttagaccatctggtggatattgcaaggaatcatcatgagcgctacgatggaaagggctatcctgacggactggtgggagaggaaataccgctttctgcccgtatagtgtgtggcagacagctatgatgccatgaaatcgcgcaggatttacaggaatgcactgcccgatgaagaaatccgaagggagcttttggataactgcggcacgcagtttgacccgcagatatcgcgtatgtttgttgatatgcttgacaatggcatggttgtgattgatgaggataatcctgcggctcagggctaccgtgataatgcggctatcgagtcagtggcagacaaattcatatctgaggtcatgaagaccatgagcagtcaggaaaaagccgatagtgttgattatctgacaggactttacatgcgaagtcgtggacagcaggtaatagcagccctgatgcaggataatgatggctgtcttgccttcatagatatggataatctcaaaaaagtcaatgatgtgcatggtcacaaggcgggtgacagggcacttaagcttataggtaatctccttgctaaagagactgagaatgagacctttgcagcctgcaggcttggaggtgacgagttcctcatctttatgccatattctgacagggcaagcgtggagagtgttataaagcgcatatttgaaggcttcgagagtgccagggaagcagactgtgagataaaggaggctgctctttcagcaggactgtgcatgacgacaaagggagccatgtttgaaagtgactacacaaaggcagataaggcactttactatgtgaagcagaactgtaagggttcatatttcttctatgagcagctcttagctgacaataaggagaatacaaatctgagtgcggatttacgaaacgtggcaaagtttttaaaggagagtggcagctatacaggtgcgctggatttaaactacagagagtttgcaagaatctatgagttcgtgaacaatgtaggagataggcacaaccacaactgctatctggtcatggtgactatgaacactctgccggagcagcttgcagatatcgaggaaattgagaaggcacttgactgcatggaacagtctatccgcagtaagatcagaaaggtggatgtctgcacgcgctacagctcaatgcagtatcttatcatactatttgagccacaggaaaatcagattccaaatgtcatggagagaatctttatgcattactatgagctctgtgacagagagaatttcaagccgcagtatgagtatatcaaaatgactgaggtaaaatagggattgttaaataatagtcaatgtggtatagttttcttcgaacggtattcgaaggaaactgtatcatggaggatgtgttgtcaccttatgacagagcatatccggcagacacaaggaagccaaaagcacattgctgtagcagaatatgaagcagacagcaaagtgacaggcgcgcacagggtaaatcgaccgctgccatacggcatatggcggagattatatcagctgcgagataaggaatggtctgaccggcttggaaagaaggtggtagcatgaaaataggcataatcggcgcaggcagagtgggctgttctataggtaaatacctaaggacaaaggacatagagcttgcaggctattatgacgtggattctgcggcggctaaggaggctgcggagtttacaaggacagagagctttgattcgctaaagcaactggcggatcaatcacagattatatttatcaccacaccggattcatttattataccggtttgggaacaattaaaagagctgtctctaacgaatcagattatatgtcattgcagtggcgcattatcatccgattcattttccggaagggagagcatgagtgtatcatgctgttcaattcatccaatgttaccgttcagtaacaaattttcatcatatgagcaattaaataaagcatttttcacagtggaagggcaggatgctgcggttgaagcaatatccgggctgttttgttctattggaaatgaggtatgccgcattgatggcgctaaaaaggcaaaataccatgcagcggctagtattttgagcaatcaggtgattgctgtccttgacatgggctattctcttttggaggactgcggctttacaagggctgaggctgtaagagctacaggccagcttgtgatgcgcaatatcgaaaacgtactcgaagcaggctgtgacggcgcactgaccgggccaatcgagagaaacgatattgaaacagtgaaaaagcacatcgcatgtatgcaaaatgacgatagcgatgatgtcagattgtacaaaatgcttggtacaaaactagtaaatattgctgaaaaaaagaatcctgataaggattacactcagatgatggaattgctaagaggctgacaataccgtgaatggttccaagtagttacaagaaacggattgttgcagaaagacagagggattggacaatgaaaaatacagtagtaacttttaaacaggcaaaggaaaagggcgagaagctcacgatgctcacagcatatgattattcgacagcaaagctcatagatgaggccggaatcaatgcaattttagtaggagattctctcggcatggtggtgcttggctatgaggatacactttcagtgactatggaggatatgattcatcacagcgcagctgtttcaagaggcataaaggatacgctgctcatcacagatatgccttttatgtcatatcagacatcggtttatgatgctgtggtcaatgcaggacgactcgtgaaggaaggccatgcgcaggcagtcaagctcgagggtggcaaggaggtatgtccacagataaaggctatcgtggatgcgtcaattccggtatgtgcacatttagggcttacaccacagtcagtaaatgcatttggcggcttcaaggtgcagggaaagggtgaagaggcagcacagaagcttcttgacgatgcccgtgcagttgaggcggcaggagcatttgcagtagtgctcgagtgcgtgccaaaggcacttgccaaaaaaatcacagagagcataagcatacctacaatcggtatcggagcgggagcagactgcgacggccaggtgctcgtatatcaggatatgcttgccatgtatgcaaacatgaagccgaaatttgtaaagcagtttgcacaggtcggaaaagaaatgaatgaggcgttcacagcctacaaaaaggctgttgaggagggaagcttccctggtgaggagcatacctttaagatggatgagacaataattgacaagctgtattagtatcgaaaatagtattgaagaatatttacaaaaaatagctacgaaaaataaaagaataaggagacataaaatgttaatatacggacaaatcgaacaggtaagagaagcagtaaaggcatggaaaaaagagggcaaaagcgttggctttgtacctacaatgggatacctccacgagggacacaagagcttaatcgatgcggcaagacgcgagaatgacaaggttgtagtgagtatttttgtaaatccaatgcagtttggccctgcagaggatttagacagctatccacgtgatttaaacagggatgcaaagctttgtgaggatgcgggcgttgacattattttccatcctgagcctgaggagatgtatgcagacggcttctgctcatatgtggatatgaatggcctcacaactgagctttgtggaaaaacaagacctatccattttagaggtgtgcagacagttgtcctgaagctgtttcacattgtgacacctgaccgtgcatactttggacagaaggatgcacagcagcttgcggtcataaagcgtatggtaaaggatttaaatgttgacacagaaatcatcggctgcccaatcatccgtgaggaggatggactggcaaagagctcaagaaacacatatttaagtgaggatgaaagacaggcagcgcttgtactgagcagaagcttaaaaatcggaaagcagctcgtagaggatggcgaaaagagtgcaaaagcgataaaggatgcaatcacagcagagataaacaaggagccgcttgcaagaattgattatgtagatgtggttgattttgaaacaattacaccggttgatgagattaagggaacaacactcgtggcaattgctgtctatatcggaaagacaaggctgattgacaattttattgcgtagacggacaagaaacgattattgaaaagaggtacaaacaatgaattatacaatgcttaagggcaaaatacacagagcggtggtcaagcaggctgacttaaactacgtgggaagcatcactgtagatacaaagctgcttgaggcagcaggcatcttggagtatgagatggtacagattgtcgatgtggaaaacggaaacagattcgagacctacaccatcgccggagagccgggctcaggcatgatatgcttaaacggcgcagccgccagacaggttgcagtcggtgaccatgtgatactcatgtgctatgcgcagatgacaccggaggaagcaaaggagcatcatccgaaggttgtgtttgtggatgatgaaaacaagatagcgcgtgtgacaaattatgagaagcatggaaagctgacggaggattttatttaacaatagaaaaatcaagtctgctgtagtataataatttatcgggtaaaatatcatgtatttatgcgggaggtaaatatgtacacagcagacgaaaagagatacgacacaatgagatataacagatgcggcaggagcggacttaagcttcctgttgtatcgcttggtctatggcacaatttcggtgatttttcatcgtatgacaacatgaagcagatgtgcttcacagcctttgaccatggcatcactcactttgacctggcaaacaactatggtcctgaatacggcagcgcagagaagcacttcgggcttatcctgaaggagcatctgtcagcataccgcgatgagctcatcatcagctcaaaggcaggctatgatatgtggaagggaccatacggcaactggggcagccgcaagtatctgattgcaagccttgatcagagccttaagagaatgggactcgactatgtggatattttctatcatcacagaatggaccctgagacaccgcttgaggaaacaatgggagcactcgaccagatagtaaaaagcggaaaagcactctatgtcggactgtcaaattatgacggcgagaccatgaagagagcctgcgagattcttactgatttgaaatgtccgtttatcatcaaccagaattcatacaatatcttcaaccgtacaatagagcaaaacggcttgaagcaggcagcaagagagtgtcaaaagggcatcatctccttcagcccgctcgcacagggcatgctcacagaccgttacataaacggtattccggaggatagccgtataaagacagacggccgctttttaaatcaggaaaagctcactccacacatcgagcagattaagaagctaaacgatatagccgcaaaacgtggtgagacactagcacagatggctcttaagtgggtggtaaaggatgatgacgtgacaagcgtgcttgtcggcgcctcaaagccacagcagattcttgaaaacttaaaggttatggagggcactggcttctctgaggaagagcttaggatgattgatgaggttgtgggagtgtaaagatgaaatcagcagggaggatagcagtaattaatgctatactccctgctattatatttttggttgcaagaatttagtttatgctataaaatatttataactgtatgcagatatttaataatcacaatatctgtctgtataataaaatacgcataaagaggacgaaagaatgatcaacaaattagtagacaaaatcaagaaaacaaacgcacctatcgtagtaggtctcgacccgatgctttcatatgtgcctgagcatatcacaaagaaggcatttgatgagcttggagagacaccggccggtgcagcggaggctatctggcagtacaacaaggctattgtggatgccacatatgacctgattccggctgtaaagccacagattgccatgtatgagcagtttggagtggagggccttaaggcattccagaagacagtggattactgtcacgagaaggatctcgtggttatcggagatgtaaagcgtggagatatcggctcaacatcggctgcatacgccacaggacatctcggaaaggtacagatcggcagcaagagctattctacctttgatgaggattttgccactgtcaatccataccttggaacagacggtatcaagccattcgtagatgtatgcaaggaggagaagaagggtatcttcattcttgtaaagacatctaatccatcaagtggagagtttcaggaccgtatgattgacggacgcccattatatgagtgggtaggc

SEQ ID NO: 113 - DNA, 79460 bp, unidentified
  source 1..79460: mol_type = unassigned DNA
  misc_difference 15366: note = a, c, g, or t
  misc_difference 15367: note = a, c, g, or t
  misc_difference 15368: note = a, c, g, or t
  misc_difference 15369: note = a, c, g, or t
  misc_difference 15370: note = a, c, g, or t
  misc_difference 15371: note = a, c, g, or t
  misc_difference 15372: note = a, c, g, or t
  misc_difference 15373: note = a, c, g, or t
  misc_difference 15374: note = a, c, g, or t
  misc_difference 15375: note = a, c, g, or t
  misc_difference 15376: note = a, c, g, or t
  misc_difference 15377: note = a, c, g, or t
  misc_difference 15378: note = a, c, g, or t
  misc_difference 15379: note = a, c, g, or t
  misc_difference 15380: note = a, c, g, or t
  misc_difference 15381: note = a, c, g, or t
  misc_difference 15382: note = a, c, g, or t
  misc_difference 15383: note = a, c, g, or t
  misc_difference 15384: note = a, c, g, or t
  misc_difference 15385: note = a, c, g, or t
  misc_difference 15386: note = a, c, g, or t
  misc_difference 15387: note = a, c, g, or t
  misc_difference 15388: note = a, c, g, or t
  misc_difference 15389: note = a, c, g, or t
  misc_difference 15390: note = a, c, g, or t
  misc_difference 15391: note = a, c, g, or t
  misc_difference 15392: note = a, c, g, or t
  misc_difference 15393: note = a, c, g, or t
  misc_difference 15394: note = a, c, g, or t
  misc_difference 15395: note = a, c, g, or t
  misc_difference 15396: note = a, c, g, or t
  misc_difference 15397: note = a, c, g, or t
  misc_difference 15398: note = a, c, g, or t
  misc_difference 15399: note = a, c, g, or t
  misc_difference 15400: note = a, c, g, or t
  misc_difference 15401: note = a, c, g, or t
  misc_difference 15402: note = a, c, g, or t
  misc_difference 15403: note = a, c, g, or t
  misc_difference 15404: note = a, c, g, or t
  misc_difference 15405: note = a, c, g, or t
  misc_difference 15406: note = a, c, g, or t
  misc_difference 15407: note = a, c, g, or t
  misc_difference 15408: note = a, c, g, or t
  misc_difference 15409: note = a, c, g, or t
  misc_difference 15410: note = a, c, g, or t
  misc_difference 15411: note = a, c, g, or t
  misc_difference 15412: note = a, c, g, or t
  misc_difference 15413: note = a, c, g, or t
  misc_difference 15414: note = a, c, g, or t
  misc_difference 15415: note = a, c, g, or t
  misc_difference 15416: note = a, c, g, or t
  misc_difference 15417: note = a, c, g, or t
  misc_difference 15418: note = a, c, g, or t
  misc_difference 15419: note = a, c, g, or t
  misc_difference 15420: note = a, c, g, or t
  misc_difference 15421: note = a, c, g, or t
  misc_difference 15422: note = a, c, g, or t
  misc_difference 15423: note = a, c, g, or t
  misc_difference 15424: note = a, c, g, or t
  misc_difference 15425: note = a, c, g, or t
  misc_difference 15426: note = a, c, g, or t
  misc_difference 15427: note = a, c, g, or t
  misc_difference 15428: note = a, c, g, or t
  misc_difference 15429: note = a, c, g, or t
  misc_difference 15430: note = a, c, g, or t
  misc_difference 15431: note = a, c, g, or t
  misc_difference 15432: note = a, c, g, or t
  misc_difference 15433: note = a, c, g, or t
  misc_difference 15434: note = a, c, g, or t
  misc_difference 15435: note = a, c, g, or t
  misc_difference 15436: note = a, c, g, or t
  misc_difference 15437: note = a, c, g, or t
  misc_difference 15438: note = a, c, g, or t
  misc_difference 15439: note = a, c, g, or t
  misc_difference 15440: note = a, c, g, or t
  misc_difference 15441: note = a, c, g, or t
  misc_difference 15442: note = a, c, g, or t
  misc_difference 15443: note = a, c, g, or t
  misc_difference 15444: note = a, c, g, or t
  misc_difference 15445: note = a, c, g, or t
  misc_difference 15446: note = a, c, g, or t
  misc_difference 15447: note = a, c, g, or t
  misc_difference 15448: note = a, c, g, or t
  misc_difference 15449: note = a, c, g, or t
  misc_difference 15450: note = a, c, g, or t
  misc_difference 15451: note = a, c, g, or t
  misc_difference 15452: note = a, c, g, or t
  misc_difference 15453: note = a, c, g, or t
  misc_difference 15454: note = a, c, g, or t
  misc_difference 15455: note = a, c, g, or t
  misc_difference 15456: note = a, c, g, or t
  misc_difference 15457: note = a, c, g, or t
  misc_difference 15458: note = a, c, g, or t
  misc_difference 15459: note = a, c, g, or t
  misc_difference 15460: note = a, c, g, or t
  misc_difference 15461: note = a, c, g, or t
  misc_difference 15462: note = a, c, g, or t
  misc_difference 15463: note = a, c, g, or t
  misc_difference 15464: note = a, c, g, or t
  misc_difference 15465: note = a, c, g, or t
  misc_difference 17186: note = a, c, g, or t
  misc_difference 17187: note = a, c, g, or t
  misc_difference 17188: note = a, c, g, or t
  misc_difference 17189: note = a, c, g, or t
  misc_difference 17190: note = a, c, g, or t
  misc_difference 17191: note = a, c, g, or t
  misc_difference 17192: note = a, c, g, or t
  misc_difference 17193: note = a, c, g, or t
  misc_difference 17194: note = a, c, g, or t
  misc_difference 17195: note = a, c, g, or t
  misc_difference 17196: note = a, c, g, or t
  misc_difference 17197: note = a, c, g, or t
  misc_difference 17198: note = a, c, g, or t
  misc_difference 17199: note = a, c, g, or t
  misc_difference 17200: note = a, c, g, or t
  misc_difference 17201: note = a, c, g, or t
  misc_difference 17202: note = a, c, g, or t
  misc_difference 17203: note = a, c, g, or t
  misc_difference 17204: note = a, c, g, or t
  misc_difference 17205: note = a, c, g, or t
  misc_difference 17206: note = a, c, g, or t
  misc_difference 17207: note = a, c, g, or t
  misc_difference 17208: note = a, c, g, or t
  misc_difference 17209: note = a, c, g, or t
  misc_difference 17210: note = a, c, g, or t
  misc_difference 17211: note = a, c, g, or t
  misc_difference 17212: note = a, c, g, or t
  misc_difference 17213: note = a, c, g, or t
  misc_difference 17214: note = a, c, g, or t
  misc_difference 17215: note = a, c, g, or t
  misc_difference 17216: note = a, c, g, or t
  misc_difference 17217: note = a, c, g, or t
  misc_difference 17218: note = a, c, g, or t
  misc_difference 17219: note = a, c, g, or t
  misc_difference 17220: note = a, c, g, or t
  misc_difference 17221: note = a, c, g, or t
  misc_difference 17222: note = a, c, g, or t
  misc_difference 17223: note = a, c, g, or t
  misc_difference 17224: note = a, c, g, or t
  misc_difference 17225: note = a, c, g, or t
  misc_difference 17226: note = a, c, g, or t
  misc_difference 17227: note = a, c, g, or t
  misc_difference 17228: note = a, c, g, or t
  misc_difference 17229: note = a, c, g, or t
  misc_difference 17230: note = a, c, g, or t
  misc_difference 17231: note = a, c, g, or t
  misc_difference 17232: note = a, c, g, or t
  misc_difference 17233: note = a, c, g, or t
  misc_difference 17234: note = a, c, g, or t
  misc_difference 17235: note = a, c, g, or t
  misc_difference 17236: note = a, c, g, or t
  misc_difference 17237: note = a, c, g, or t
  misc_difference 17238: note = a, c, g, or t
  misc_difference 17239: note = a, c, g, or t
  misc_difference 17240: note = a, c, g, or t
  misc_difference 17241: note = a, c, g, or t
  misc_difference 17242: note = a, c, g, or t
  misc_difference 17243: note = a, c, g, or t
  misc_difference 17244: note = a, c, g, or t
  misc_difference 17245: note = a, c, g, or t
  misc_difference 17246: note = a, c, g, or t
  misc_difference 17247: note = a, c, g, or t
  misc_difference 17248: note = a, c, g, or t
  misc_difference 17249: note = a, c, g, or t
  misc_difference 17250: note = a, c, g, or t
  misc_difference 17251: note = a, c, g, or t
  misc_difference 17252: note = a, c, g, or t
  misc_difference 17253: note = a, c, g, or t
  misc_difference 17254: note = a, c, g, or t
  misc_difference 17255: note = a, c, g, or t
  misc_difference 17256: note = a, c, g, or t
  misc_difference 17257: note = a, c, g, or t
  misc_difference 17258: note = a, c, g, or t
  misc_difference 17259: note = a, c, g, or t
  misc_difference 17260: note = a, c, g, or t
  misc_difference 17261: note = a, c, g, or t
  misc_difference 17262: note = a, c, g, or t
  misc_difference 17263: note = a, c, g, or t
  misc_difference 17264: note = a, c, g, or t
  misc_difference 17265: note = a, c, g, or t
  misc_difference 17266: note = a, c, g, or t
  misc_difference 17267: note = a, c, g, or t
  misc_difference 17268: note = a, c, g, or t
  misc_difference 17269: note = a, c, g, or t
  misc_difference 17270: note = a, c, g, or t
  misc_difference 17271: note = a, c, g, or t
  misc_difference 17272: note = a, c, g, or t
  misc_difference 17273: note = a, c, g, or t
  misc_difference 17274: note = a, c, g, or t
  misc_difference 17275: note = a, c, g, or t
  misc_difference 17276: note = a, c, g, or t
  misc_difference 17277: note = a, c, g, or t
  misc_difference 17278: note = a, c, g, or t
  misc_difference 17279: note = a, c, g, or t
  misc_difference 17280: note = a, c, g, or t
  misc_difference 17281: note = a, c, g, or t
  misc_difference 17282: note = a, c, g, or t
  misc_difference 17283: note = a, c, g, or t
  misc_difference 17284: note = a, c, g, or t
  misc_difference 17285: note = a, c, g, or t
cgtttactgtggataagtaaactccatatttgtctggctctcaagcaccttaagatatgcacggcactccttctttgcctcgtcaagtgacagattctcgtaatgtccgcactctatggctgatgcaccaaacaccggtccatcatactccagtatctgttttaagacctcttttgtgatttcaaaaacctttcccggctcgacatccctcacaacgagatagaagcctgtctgacagcccatcggtccaaaatataccacatcatctgcaatctcagagtttctcacacatgttgcaaacatatgctccactgagtgcatagctgaattggacatataatcgcctgcattaggttttcttgtacgaaggtcgtatgtgacgatttctccgtcttttcttgaaatataaaatccaggtttaagaatattatgattgattgtaaagcttttaattctttccataaaaatgtttctccttacttagttgctgcctcaaactgcttcagataatcctcaaatacattgagtgcgtcatccacaggctttggtgtgctcatatcgacaccggcactctttagcagctcgattggattcttcgagcatccaccgcacaggaaatttcctatatacttatccacagcaggctttccctcctcaagtatcttttttgaaaaagcaactgctgccgaatagcctgtcgagtactgatatacatagtacggtgtgtaaaaatgcggtatgcgcatccactcatatgatatctcatcatccacgcgcatatccggtccgtagtactgcacattcagctcatgccatagctcatttagcacatcctttgtaaccggctcgcccttttgcattttccggtgagctatatgctcaaactcagcaaactgtgactgtctgaaaagtgtcgtcctgaagccgtccagaaaatgtgtcatgagatattttctctcattctcatcctcacaatgctcaagcatatagtgcattagaagcgactcattgcaggtggatgcaacctctgccacaaaaatcaggtatcccgcgtaggtgatgctctgatgctcatttgaatagtatgtatgcatcgcatgtcccatctcatgagccagcgtaaacacactgtccagattgtcggcatagttcaaaagcacatacggatgagtgccgtaagcgccccatgaatacgcaccgcttctcttgttctcattctcatatacatctatccagccactctccatgccagacttaagtacgcttacatactcatctcccataggctcaagtgcctttgccacaagcttttttgcctcatcataggtgtatgtggtctgtacattgtccacgatcggtgcaaacaaatcatacatatgcagatgctccacacctaaaagtttcttcctaagcgccatgtacctgtgcagagccggcagatgtgcgtgaacagtctcaatcagattgtcatatacgctctcaggaatatcgccatcggataaatacatggcccttgcactgtcatattttcttacccttgcataaaaagtgtcatttttcagcttactgatgtacatcatggaaacagtattgctccacttcttgtacgaatcatagactccacggaacacctgcttgcgcaggcttctgtccttgctgcttaaaaaatctatgaaattgccatgcgtgatacggattttatttccctcgacatcagtgatatacgggaatttgatatccgcgttgttgaacatgctgaatatattctccggtgctgcagccatctcaccgcactgcgccaggatattctcctctgcagccgataaagtatgcgctttctgacgcattatctcatcaatcgcacgcttatagtgcataagctcattgctctcactgtaaaagctctcaagccttttatcatctatctgcaaaatctccggactcgcaaatgccagcgcacctgatgcctgaacagtcagcgtctcagcctttgacacatatgcctgatatttcgacacggcagtgtcctgatgcgagcgctcatttgcataaaccactatacgctctaaataataagacaactcatcctgcttcttaaaaaaatcaagcagcgttgctgcactgtcggccagatgtcccttaaatcctgatagcttttctgcaagctgtgacgctttttcgcactcagcctcccacagctcatctgtctcatacatatcctcaagcttccatttgtactcgtctgagatttcatctctcttttgaagccttttctcactcattttgtgttaccttctatcttactctttttatttagaatcccacacatctgctctgcaaaatgcatatagacgtgtgggatatatgtgaattataacaattaagctctactttgtaattaaagtgcccataccacctgaaactgtcttaccctctttgttgagctttgtgataagcaccgaacggatggcagagtcaccgataaagtcgatagccgcctcaatctttggagccatggtaccctcatcaaactcgcctgctgcaaggtacttctttgcctcatcaacagtcatggtatcaagcggcttctcatcctccttgccatagttcaagcagaccttgtcaacgcttgtaagtataacaagtctgtcagcatcaagagtatctgcaagctttcctgctgcaagatccttctcgataacagcgcttgcgccctgaagcttattatcctgtgctaaaacaggaattccaccgccaccgcatgcgataacaacctgatccgcatcaacaagagcccttatagcatccttttccactatatcaacaggctttggagctgccacaactcttctgtaacctccctcaacctgtgtcacatggttgcccttcttctcttcttcctcagcctcagcctctgtcataacacggccaatgatctttgtcggatgataaaaagcctcatcatatgggtcaacaaccacctgtgtaagtattgtagaaacggtcttgtaaattcctctgccaagaagctctgtacggatagcgttctgtaaatcatatcctatatatccctgactcattgcagagcagacagctgtaggtgtagctgtatactcaggataaatcctgcaaaactcagacatagcagtgtgaatcatgcccacctgcggtccgttgctgtgtgtgataacaacctcataatcgtccctgataaaatctgcaactgcctttgctgtatgctttgtagcctcgtgctgctccggaagagttgttccaagagcatcatgtccgagtgcaataactatttttttcttcttcatgccgacctcctatgctgcatccgctcaatgtgtattatatctcataatcataaaccgatgtgtatactattataaatctacatataaaccatcaattttaaagaattcctatgcggtgcaaaaagtaaaattatttatatacattatctaatattttagggaatttgtctagtactttgaactgatttgaacaacatttccaccatagcgtgagccccgggcaccggtggcgcacacgtactcttgcaggagcgaatagcgaagtggcttagatactgtagaaattatgcccatgaaacgcaaaaacacccctgcatggacgcaggggtgaggagaaaacgcgccggaattactgctggatatccttcgcagagcttaaggttacttcaaccttgctctcttcgtactgtctgccactctgacgggcaacagtaagagtaaccttatctccggccttgtagctctttaacgctgactgcagctctgtcatagaagaaatctttgtgctgtcaacagcagtgatgatatctccctcctgtaagccggcatttgcggcacctgaaccagctgaaacagatgaaacatacacaccctgtgggaagccataggctaccatctcagatgaaacatcgccacccttgataccaaggtatgcctgattctcattagtatattttccatcctggataaggctctcaataataggctttgcaaccgacataggaattgcatatccgataccctcaacctcagttgaagaatattttacagagtttataccgataacctcgccattttcatttaagagtgctccaccactgtttccagggtttatggctgcatctgtctggataagcttgttgttggtaacagtctcacctgtctgtgaatcctgtgtagtaacagttctgttaagtgcacttactatacctgttgtgacagactgtccgtatccaagtgcattaccgatagcaattgcaggacttccaacagctacactatcagaatctccgattgtagcaatcttgatatttgagtaagtatcttttccaaggtctgctttctttacacgtacaactgcaagatcgtcatccggatctgttcctctgatttctgcctttaccacagaatcatcatcaaactgtactgtgagctcctctgaatctgccacaacatgattgtttgtagcaatataaagataatcatcatcctcactcacaataattcctgagccacagctctgagactgctgtgactgccttccgaaaaagctgttgtaggtgactgttcctgtatttgtgatagcaacgatgctaggcataacctcatcgacaacagatgatacatctgtcatatcctttgcatcccctgaggatgtctgcttagtcccaccggatgttgtagtggtaagctttgcacttgcagtagaagaatttgaaatagctctcgtgccaatatagcttactcctgtgaaaactccgcctccgacgagtccgaagataagagctgcagctactgtctttgctgcaaatggtccaaatgcaccaggctttctaggtgctctctgtttcttaggctttacagtctgctggtatacctgaccattcatattcatccggctatatgaattgtctgacgaacctgctgatgtgccgccatatgcattattatttgtgcctgaattatacgactgattagaataaggctggtttgcatatgattgatttacatttggctgtgctgctgcagaagcctgcgaatatggattgtagctctgtgaatagctttcagctgatgtattattagtctgtgcagccttctgtgactcatccggattgtaaggattgcccgacattgtgaaatttacattatttgtattgttatttgtactgttagtattatttgtatcattcatatttctataattgttatccataataatttctcctttcgtttacatttagaagtatactgtcaatctgtgtttattttgtgacgggattatttattttttcataaatcagttaactatttatagcctatgttccccattgcaggccactatgcgattataaaaataaaaataactgctcatcggcagatgcacctctaagtctgcgataaatagaaattgcagaatatcaatacatccctgccaatgaacagttaccataaatcatatattaaatttcaattccgttcttctcaagaagagctctcgctgtttcaaccgaatctgtacctgtcgcattctttacaggtgcaaactccttctctctgtctacctcaaatggcaggctattgtccatcatgtataccatatcgaggatgagtgtctcgaacttgtatgcattcggagtctcaggcttgtgctctgtaccgttctcatcaatgtaaggcaccttcttctctaccacatgaagcggaaggctcttctctgcgatagccatgagcttgtccacgcggaataaatagtttaagataacaccaaagccatactgtaatgaaccattctcattctttgcctctgccatctcaggagtgagctcgtaatactcgacaatcgaaggcttgccattctcaagacacatagcaccaactctctcatatggatcgcattttctgaccaccttagagccgctgacacagcctgactcgattgtagcgccgacaaatacaggatctgcaatctgctgaagcacattgtctacagcaaatacattgagccactcaacacccttgtccttcaaatccttgtcaagaccggcattgataagcgacttgaaccatccaccgtttccgtttggtgacatggcaagtgaatcctcagatttcatgagcagatttccatcaaaatcaactgccggaaccatctcctgcacgaaaaacttcacatagtccttgttgtatccaaaatagtcatgctcttcaaagaactctcttgtcatgccatcatttatctcgcttgtcataacatacagaggcacccatgtaccggtctgatttgtaaccttcatgagatttgcgataagctgctcaaagatgtagagctcctttgtctttccgatattgaacatgcccttagccttgtcaaagccaagacgtgtaccctgtccaccggcaagaagaattgcaccgaccttgccattcttgacagcatcaatacctgttgcaaggtatttgtccttatttacctctatctctgaaagctccatagcagcaagcggtgaaaatgtacctctctgctgctccttgttgtgaatcatatcaaggtatgaccagtccatgtgctcaagctggctctcaagcttagccggagcttcctctgttaagaatttctttaagtatttctggtttgttgccgtgattttttctttgatttccggtttcataataaataatctccctaatagctaactttaattatttaatcatccgaaccatctgatgatgatttttcttctgaaccgttttcagattctgactggctctttttcagggcatcctgcttgtccttattttttttctttgccccttctgttccatcagagccaacagtatcattgtactgcgtgagatcaaatgctgaagtcttagatgtaacacctgtctttttagcaatcttatcacttactgtctgaactgtctctgttggctggtaatcagtctcattaaacaggaactgatgaagcttagaaacattctgtgccaggtctataggaattacggtatcgccagtagttgacagattcattgtagtcagctcaaatgggaagcctgttgtctccttcatctgatattttgtaacagctgttgcatactggataatctctttagctgtaaaattagtacttatctgactcataatatccttacacatctctgttagagagcctaaatctgactgtttagccttgtcaagcatagcctgaagcacaattctctgacgggatgcccttaagaaatcatcacctgaggtgcttctgatacgtgcatagcatgtagcctgagttccatcaagatgctgcataccatccccctcaagataaggagtattatatcctgtagtataatcaacctcaggaatcagataattgatttccttcatctccgcattagtaatctcaagatcaaggccaccgatatcatctatagcatctacaagagccttccagtcaacacagacatacttggttatattcaaatccaaatttgaattaagcatagctactgctctctttgccccaccatttgcataagcggcatttgcctttgcaaactttccattgcctataggcagatacgtatctctgtagacagaaacaagctgaacctccttagtatcataattcagactagcaatcatgatacaatcggaatgcccctcatcgtatgaaccattacttctgttgtccagaccaaacaacgctacattgagatatccatgcatattggcaagaacatcctcatcaatctcctcattgattccggcctcactatttgtcagcgcatcctcatatttaacctgtccgagtgtcttattataagcccaaaccactaacagaacaattaacagcagcaggatttcaaatacaaagagtataatcttcttacgtccacttcttctcttttttcttcttctcttctttgccatgttatttttcctttttcctatgaatgtaaagccacgcgtctgcgtagtcctgacgttccttctctgacatattggtatactttccaaactccagattcgtcagacgcatctgcggcctgccacacttgaagcattcaacctctttccttcttgaaaccatccgtatccagccacaatccgggcaaatgtatattttcatcatagtctttattcaaactgtccgagaacctcagctgacaaagcatcaagcttagcctgtgaatcttcaagagacactcctttaactccgaaatagaatttaatcttaggctctgtaccagaagggcgtacacagcaccaagcgttatcgttaagttcgtagtaaagtacattggaagaaggaagacctgtcggctcgacctttcctgttgtcatatcttttcttgtgtcattcttgtaatcacggatagcaagcacctgataatcaccaaatttctttggctcagcggcacgtgcctttgtcataatctcatttatctgtgcagcaccatcaatgccctttaaggtcattgtggaaatgccctctctgtagtagccgtacttctcgtacatgtcaatcatgccatcccagagtgtcttgccctgtgacttgtagaaggcagccacctcacacagcatgcaaactgctgcaggagcatccttgtcccttgcatatgtgccaggtaagcatccgtagctctcctccataccgaatacatagttgttgcagccggtcttttcgaatttgagcatctgctcaccgatatacttgaagcctgttaaaacctcgatatgctttacgccatatgctgccgcaattgccttacccatatctgttgaaacaattgactcaacaaatgcaggattctcaggcagagtaccattagcgctcttctggcttaaaatgtactcaccgataagcatagctgacatatttcctgtaaatgtcacatactcacctgtctttgtatccttgcagtatacaccgagtctgtcggcatcagggtcagttgctaaaacaatatcagcatccttttcctttgccagctcaagtgcaagcttccatgcatcaggattctcaggatttggataaggacatgtagggaaattgccatcaggcactgcctggcttggctcaatgtatacattctcaaagcccatatccttaagcactctctgtacagggcgaagacctgtgccgtggagtggtgtgtaaacgatcttgatatcctttgccatagccttgataatctccggatggatagaaagcttgcggagttctccgaaatatccctcctcaacctcatcagagatgacattgtaaaggcctgcctcaatagcagcagccttgtccatagtctttacctggtcaaacgatgtaacctttgccacctcagccatgatgcttgtatcatgaggtggagtaacctgtgcaccatcctcccagtataccttgtatccattgtactcacgaggattgtggcttgctgtgataacaacaccggctattgtaccgagtgtccttactgcgtatgaaagctccggaacaggtgcgagctgtgggaatacatatgtcttgattccgttagctgcaagacagagtgctgtggcatctgtgaactcatcatgcatattacgtgagtcatgtgcgattgcaacacctctctttactgcgtcctctccctgtgaaagtatgtaatttgccagtccctgtgtagcctgacggactgtgtatatattcatcctgttggtgccggctcctattacaccacgaagacctgctgtaccaaactcaagtgtgcgatagaatctgtcctctatctccttatcatcacctgcgatagccttaagctctgcctttgtagcctcatcaaaatatgggtctgtacaccatttctcgtactccgctctaaaatccatttatattaacctcctgtatcagctagtaaataagcctattaatgttaactataccgattttaccacattaacgtgcatttgaaaagttttagttccttaatatttttttaaacacaaggctcctcatccaaagtggcatcatacagacaacaagctgtgccgaaatcgtaacaaaataatcggctgcgcttatggtccctgtctttaaaatacgttttctaccggctttgtatttaaggaaataatcaaagccgccacgcctccttagcatatcatcaccggttctggcatacacaagagtctcacctatatttgccatacgacagtgatttctgatcatattcgcccaaagaagagaatcctccataagcagacagtcctgataattgcccgcagcaagcaccgcagaccttttgtacataacagtcatgtgattgaacgcatcgcgctttctctgatactgctttatcacataattcccaagaggcactgtcctctctgataaaatattatgcgtatcatcggaaaactcgctgatgtagccacctatgatatcaagctttggattttccgaaaaagcattcagctgtctttcaaaccggtcaggcacacatatatcatccgtgtccatcctggccacaagctcattagagcaatgctttatgccttcagcaagggcaagaccgagcccgctgtttttttcaagctttaccgtaacaaaatttatctccgaaggcctgcattcatactcactgattgcctcataaagctcatctgtcagcctgccatcctccaccagcactatctcgtccggtaaaacagtctgtgaatatacgctttccatgcactccctgaaatactcaggcttttccttgtaataaattgacagtaatactgaaaatttgactttattcataagtatcatcctcccagacaaacagactaatgtattaccgcaagcacagtctctatgcacagtctgatatcatttatcagtgaaaatctcttaagatacttaagattgtacctcatcttgcccggcagcaccttgtgtatatatgtgtaatccacatcatcagaagcctcaagaagcctgtcctcatccttatacctgatgcttgcctcacttgtgattccggcaggcatcagaagtgtcgccatcatcgcaggtgtatatgccatgacatacttctccacctcaggtcttgtgccaacaaagctcatatcaccacatagcacatttataagctgcggaatctcatcaagcctgtactttctgatgacagcaccgactcttgtgattcttgaatccccaccgacagtcacgagtgaaccctttttgtcagcatcattcaccatggttctgaacttaaatatgcgaaacttcctgccatactgcgtgatacgctcctgtctgaaaaaaacaggtcctctgctatccacctttatccagacagcaaggaccagtataacaggcgaaagcagcacaagaagaacagcggacataatcacatcaaaaaagcgtttgaataccatgcttgtcctctttctgctcagatgcctgtaatatttaagtgtaaaatcatttttcatgaatgtaggaatctctccccatgttctccatctactcatgtaaaatctccaataaattattaattatatactccacatcctcatcgctaagctttgtgttgagaggaagtgtaatctcattctcatactgatgataagcgtttggaaaatcggctatatcaaagcccatattcttatatgctgtcatcatcggaagcggcttgaaatgcacatttgtggcgatacctcgctccgccatctgcactataagcgcattgcgcctatccacgccgatgcccggtatgcgaagcagatacagatgtccgctcgatgtatgcctgtctgtaaaatgaggcacagtcaagagaccaagcagcttaaatgcctcgtcatagcgctctataatatcacggcgcctcttgagaagcccctcatatctgtcaagctgtaccagaccaatagcagcctggatatcagtcatattgcacttatacgaaggagccacaatatcatactcccagttgccaagaccattcttgtggaaagcatcctttgtctgtccgtggagtgaaagcagcataaactgcttgtagatatactcatcatcaaagccctctataggtctccaggtgagcgctcctccctctgctgtggtcagattcttgaccgcatggaatgaaaagcttgtaaaatcagctacattgccacacataatccgctcacctgctctcatgtaagaagcaccaaaagcatgagctgagtcagccgccacaatcacacgtccgattgccctctgcacatcatttgacggatgaaaaagagccttctttctctccacaatatcaaaaatcctgtcatagtcgcaaggcacacctgcaatatcaaccggcacgataacctttgtcttttctgtaatagcggcttccagggcatcgtaatccatctcaaatgaatcaggtgctacgtctataaacttaagcgctgcccctacatgcacagcagggcttgcagatgcagtatatgtgtatgcgcttgtgatgacctcatcacctgcacctattcctaagaatctgagtatcgactcaagacacgcagtagcagagccaagtgccacagccttatccgtgccgcatagcttagcaatcctcttctcgaattccttggttcttggacctgttgtaatccaaccgcttcgcagtgcatcagcaacagctgacacctctgcctctgttatatcaggtggtgaaaatgaaatctgtctcttttccataattatgttcctcgcttccggcataaaatatgccaaacatccggcttttacagtctatattatgagcttcaaaagatattttagtcctccaggtcaggatgatatgtctttaccacagaggccactatctgcttgatatcctttgcttccgaggtgcatgccttctcgagcatctcaagctgcttctcaaagagctcatcatccatctcaataggctcaccaacatgaatcagcttgttcggagtctccttgaggccttcctcgctcatcagcatctcctcgtatagcttctcgcccggacgcaggcctgtgtatacaatctgaatatccacatccggctccagtcctgaaagcctgataaggtttcttgccatatcatcaatcttgaccggctcgcccatgtcgagcacgaaaatctcgcctccgtgagcatagagccctgcctgcagcacaagcgccacggcctccggaattgtcataaaatacctgataatacgcttgtctgtcaccgtaacaggaccgccatcctctatctgcttcttaaacagcgggataacactaccattactgccaagcacgtttccaaaacgcacagcgacaaaatcagtctccgtctgcctgttcatcatctgtataaccatctcacacagacgctttgacgcacccatgatattggtcggattgaccgccttatccgtagagataagcacgaacttcttcacatggtactctgctgcaatccttgagagctttaaagtgccaagcacattgttttttattgcctcattcgggctctcctccatcagcggtacatgcttatgtgctgccgcatgatagataatctcagggtgatatgtctggaatacataatgcagcctgttagtattgcgcaccgagccaatcagcgtctccaccctaacataaggatatttgcgcttcagctcctgctgtatatcgtatgcattattctcgtaaatatcaaaaatgataagaagcttcgggtcctctctggctatctgacggcaaagctcactacctatggagccaccgccacctgtaaccataaccaccttgccctgtaaaaatgaatgaataccatcattatccacaacaaccggatccctgccaagcaaatcctctatactgaccggacgcagattagaaaccgaaaccctgccgtccaccatctgatatattcccggaaccacagacacatcacagccggtatccttacaaatattgagtatatccttcctgtccttacccgatgtggaaggtacagcatacacaatctttgtgatatcatacttctcaaccatctccggaatgtcgtttcgattgccgacaataggcacgccgtctatgaagcggccgagcttcgccggattgtcatctatgatacagcaggcctttgtgtgcagatgtgagctcatgataagctctctgataagcatcctgcccgcatttcctgctcctataatcatgactctctcatcaccgtttgcaaagcctctctgctcaagcatcttctggcctgtcctgataaatctgtacgcaaaccggcacgctgtgcacagtgcaaagctgagcatcagtccgataatccagaaggcatacggcatcttaatctcatacacctcatgaatgataacgcacagaaccgtaagcaccagaaaggcaccaataatatgcataaactcattgatgctcgcaaagcgccatatactgtgatacagcctgaaaatataaaacaccacaagtgaaatcaccataaacaatggcacaatgtgcagatacccctccaaaaatgagagcggaatatgtgaatatgaaaactcaaacctgatcatcaaagcgaaaaagaatgagattgcaataatacacatatcaacaaatgcaagaaccaatgccctgaaaacccattgcttgtcattgcccatgtatgaatccggcttctccggaccatcgcattttgttttgtcttttagattatttgtatcttttttcatgtcaagtctattactcatatagaattttctccttttgtcctacactgcaaaaagcagcttctatatccctatgcaaatcaacttctcataaactgcatttaaatttacgctttattataccatacacacactattatagttcttattattttattaaatataccacatttagcgatttttgaaaacaaacagcttgcttatgacatagttgagcacaaccacaaccacctgtgctgcaagcttcacccacatgcttggatagtccaaaagcgtgataaaaataaagataatagcctcttcaataaccagtgtgataaatctgccactgaaaaaagcaaacatctgtactaaaaacgccgtctttgtcggcgtagcaaccttaaacacccacttcttgttggtaacatatgagaaaagtacagcaaacacccatgccagcgcattcgcaatcagctcattgattccaaacaaaacattaaaaatagcatatgcgcctatgctgatcacaaaggtcatattgccaaaaaccgcgtataaaacaagctccttaaactcctctttcctgtttcgtattataatattatccatttctccacctatgtnnnnnnnnnnnnnnnnnnnnnnnnnnnnnnnnnnnnnnnnnnnnnnnnnnnnnnnnnnnnnnnnnnnnnnnnnnnnnnnnnnnnnnnnnnnnnnnnnnnnttaaactcctctttcctgtttcgtattataatattatccatttctccacctatgtgacaggctatataactctgtcgtaatttatacgtgtaagttgatagtaatgttaatttgcgatttttatataataactgcatagccaaaataagtcaatatgtgatatgatatctgcatgaaaaagaaaacacaaaaaaacaagagtataaaactaaactacatatataatgtgagctaccagatactcacactgatcacaccgcttatcacagcgccgtacctctcgagggtgcttaaggcagacggaataggtgcatacagctatacctactcactggtatcatactttatcatgtttgccgcactgggcactgtaaactacggaaacagggaaatatcatacctgcaggaggacagagcaaaacgcaccaaaaccttctgggagatagagcttctatccgtcatcagcgtgattgtgtgtctgtgtgcatatatggtattcacacttgcatttgggcactcaccgctcaaaaagcacctgctattgattgaagccgtgtacctgatatcagttgcttctgatatctcctggctgtttcagggacttgaggaatttggcaaaatagtcggtcgaaacgtgatttttaaaatcataaacattgcttttatcttcatcgccgtacgctcagagagtgatttgctcatatatgtggcaggaatatgtctattagagctttttgccaatatatccatctggttttacctgcctcaatatgttgacagaccaaagcttaaggagcttaagccattctctcatctgggggctactctcacactatttgtaccaactatagcgacaaccatatacacagcgcttgacaaaaccatgctcaacaacataaccggcagcatgacagaaaacggctactatgagcaggccaataagatatccaaaatggttctcatgctcgtaacctcactcggtactgtgatgcttccaagaataggaagagccttcagtgaaaataaaaaagacgaagtaaaagccctcctttataagagctttcaattcgtctggtttataggtcttgccctgtgctttggcctgataggcatcgcacgcaatttctcgccatggtttttcggtcctggatatgaaaaggtaccatatctcatcatgataatggctacactgttgccgattataggcttaagcaatgtaatcggtatacaatatctggtaactaccaagcgtgaaagcctgctgacacgctcagtatgtatcggagccgcagccaattttgtcatgaatatgattctcatacatcagctctattcatacggtgcagccatagcctctgtcatctcggaggtaataataactgccgtacagctttacttcatacgaaatgagcttagcatcccgaaaatattttctctatcgtggaaatatctcatatcagcagtctgtatgcttatagtactgctgctcatggatgcaaggctgtcagtcagcttcatgcacacaatgattatgattgtgaccggatttatagtctatatggtgctgcttgtactgatgcgtgacgagatggtgtgggaaggcataaggctcatcaaagcccgaatcaatgccactaaataataccattctgcaacgcttaattacccggcagcttcacttatttggctgcctcatactctccaaccacctgtgcctctcnnnnnnnnnnnnnnnnnnnnnnnnnnnnnnnnnnnnnnnnnnnnnnnnnnnnnnnnnnnnnnnnnnnnnnnnnnnnnnnnnnnnnnnnnnnnnnnnnnnncccggcagcttcacttatttggctgcctcatactctccaaccacctgtgcctctcctctgtcagtatattctcttgccattttcagagcttttttagtcctcttcacagactttttccatcttgaaagctctgattttgccgtatcagactttataccatattgattcacagccatatcgccaatatatgacgaaagcttttggacaccataggcattcaggtgttcaaaatctgcgaaatcatgggaatcatctatccctacagaactctcataatcagtactcagatcaagaaaatcgtatccatactccttcgttatactttcaatctgctcaagacccgacttatcagccgcctgtgtctcatgaggtggctgcagcaaaagtacatgctctatgccaagcttattgcagtacgaaagcagctccttaagatatgccctgcactcatcagtcagcacataggcttctttagtaggctgtccgatatttgccagattatctcttcctccggtgatgcctgtctttgaataaaagcccttcagatagcctccaccgctgagcctcatataggcgcgagtgacaaatgaggtatacaccgcctcagggtccttccagttgccatgatacttctccaatggaaaataaagggtatccgatatgttatccttcaccttttcatcatccttattgatatttttaggaatagtctttaccgtgtcaagcttgttctgtgacataggcatattgtcaatccactttctcagataaacctcatcagtcagattccaattgccctgactaaatgcagaagcattgattacaagaagcttcggcttctgtctcttcacaatctccgtgacgatggacttgtacatattgcatggcacagctcctattgaaagattgcacgacttaaggccatactcctcccacgccagagccggcgcatagcccgtgtatacctcacttggtccaatcatgaccatatcaaggctgttctctggctctgcgtaaaagccatatatattttcaatatcgctgctgtcaatggcaataaatgcctttgatactatttgcatgagcaataggaggactattgcaaatgcagggattttaataaatttcatggtgtttccttttctattaaaacgctttattttgatattttttcagtaaacactatatagtatagcggattagtattaaaaaacaacaccctgattcatatttatcattttctgataggaagctgtttacccgggtagaatataaaatcgataagcctgattttctttatgatacactcatacaatatccagcatatagcagtgcttcctgcaaatccgcatacgcactgcagcgccatattggttataccggccctgttcaatataatcctgattccacctacaaatatcacattcatcgcataaaacggcatgctgtcacggccgatagtctgtaaccatttagggaaatcacaataccctgataaaaaatagcttactgcaaatataaatacagtcactatacaggcggtaagccgctcaaacagactgctacacaggggattgctgctcatgtcatcctgtaatactatgccggacgcctcaacaagcacactcataacggcaaggctcagcacagcatacctattatacagtttatcaagccacttcttaatcaggcatcccagataaaagtacatctgaaagccggctatgtagttaaagcccacatagtgaaagctgccatagcatgtgaaagcaattattaaaaacagcacaaataaaagctccattttataattaaaatgtggcagaagcctcgcaaacacataatcaaccatatacgcaacacaatataagagaaacagtgcgtataaataccataaaaactctatcggcttccacggtatgcttatcaggctgctaacggaaaccggctcccttatcaaatttgaaagggcaaatttaataatccagtaaataactgaaatcatcacgtaaggcagaaggatattaaatgctttatgacatatccggctaaaaatgccttgtgaaacattccctacatattcactgtataagaagcctgaaactgcgataaagcaaggcatgtgaaagctgtatattacatttgcaataccattcattgtatcatcaaatgaatacatgtctgtcaggcccaatgtagtgtgacctaaaatcacaaataaaataaggatgccctttatgaaatcaattgttttatctcgtgtggtgttggtttgcatgttatgacctttccttaaacacaaccagcttactaatcacgtaattcagcacaataacaataacctgcgcaatcaccttaatcagcatactattaaacccaagccatgtgataaacacaagcaatatagcttcctcaacaaccagtgtaatcactcgccctgaataaaacacaaacatctgctttataaatgcctgcacactatcagtcggtgactgaaatacccagacacgattcgtcagaaatgcaaacataacagttataatccatgaaagaatattggcaataagctcatttattcccataccaacattaaaacatgcatatgtagctatgctcacaataaagctcaatccaccaaaaaataaatacaatagcatctctttgtacttcttgtagaatggattaaaaattctgagtataggtaattccattaatttatcaaatactttcattccacataaaacctaataaatcacaacctttgttccatttggaatattatcatacagccactttgcattattaatgtccaatcttacacagccatgagaaacttgtttgccaagcgttccatcttgtatatgtgtcatactaccacgattataaagcactgaatggaacaaatagtttccataaaactgcgtataataccaacatgtataagacctgctaccaaaagatttacctcttccatagattgtaaactccccttttactgtaggcgtagaaggctttcccggcccacatgaccacgatgcaactcgactccaattaccatagcttccactataaacgcctacctgacatgcagatgtgtctgtcataataagccatcttgtagaactggctcttacctgtgcgttcttagacattacatctaatgctgccggtttcggtgtatacacgggcttatttttataataatttgcaacacttccaggtgcaggtgccccctttcttaccaaattaatccttagagcctctactctataactaataccagttgagcctgatgtctgcccatttgaagcccaacctaaccatccataattctcgtttggtgaactgtagtatatattataaaatgttgctaactgacctgtaagctttatctcaatggcttctacctgcttagccctacctgaggttccagaatattgccccaaagttttccatccagtccatcctatatcctgcacatgcgttctatacatgatagtaccggttaatgaatgtacagtatcctgagataaattgatattaattccttcaattctcagttttcgtcctgtcgtacctgtaatgtttccccctgaaacccacggcatattacctatatcctgtttatagttctattttatcacatatgcattttatttaaaacaaaaaaagaaactaatacaaattatctgtatcagtttcttttttattaatttatctgacaatatatgccattgtatttttagaaattattccaccataattgttgccaggtgctgactgtcctttcttcactaatactatctgcaatgcctctaaatgaagattttgtccggatgttcctgcattctgtccattctttgcccatccaagccatccgtaattttgtgcatgtactctgtaatagatatcgtattgatttgccatttctcccgtcagagacatatttattgcctctacattcagagctctgcctgtcgttcctgcaagtgcaccatccatcaccgtattctgccagccgatattctgtacatgtgtctggtattttattcctcctgaacacggctgcccgtcaagatctatctttattgcttcaagtccaagatttctgcctgttgttccactgagacttccgttttccactgcactctgccatccgatattacttacgtggctctgatatcttaccgatgcatttgtgttgattatcggaacagtactggtttttgatatatacgcttttgcgttattagatgtgtatcctccataaaatactgtaggagccatatctccctttgccgttacaactatctggattgcttcaagtctatatgcatatcctgaggttcctgctgcctctccgttttttgcccaggctaaccagccgtaattctgtgcatgtactctgtagtatatatcatacttatcagcatctttaccggtaagttttagcatcaatgcttccacatgcttattctggccggttgttccactctgttctccattgaacgagtttccaagccatccgtcatttttcacatgtgttgtatagatcacaccaatgtctgcatctgattttacatttatttttattgcctcaagctgcagtcctctacctacggttcccgccatagctccatttgacacaccattctgccatccgatatttgctacatgtgtctggtatgatactgatacactgtttaatacccaatgtgcatacagtacatgatcagaagctgtttttactacactctcagcatttatctgttctccactgtctacagccgtccaccagcctgcaaatgtatatccgcttcttgtcggtgtaggtaattcaccatatgcatttccaaaagtaacagtttttgtattagcagtaactgttccaccatcagcattaaatgtaactgcgtagctgtttgctgtccagtgtgcatagatagtctgatcagatgtaacctctacttttgtatctttagtaatctgtgttccaccgttagctgctgtataccagccggtaaatgtataaccatctctttcaggagattccaaatcgccatatgtgccgccatatgtaatattcttgcttgtatttgtaagattacctcctgctgcatcataatttaattttactgtaaccggagtccataccgcattaactgtagtatctgaagcaatcttattatatgccttatcccacgataatacatacccggtctttgttatttccggagctttcgcccctctcatacacaaaacattctgtgactcaacaatctgaccattatcaacaaaatccactttatatctaagtggtgacgcatcacgttcttcatttataccatatgatatgtaatggtctacataaccctcataatcatcaccaaacgcactttgtaagtccctatatcttgttttgtaacttataacatcaaaattctcacttgcctgacgtccctctcgtattccattttctagataatgctgataatataaataccaattatctccaaaagcattttgcaaatctatattattatccttataaaaatgcacatcaaaaatttcattaccacgacgaccttcagccatgccatatttaataaaatgttgcagtgcagcttctgcagtatttccccaattattcttcacatcaggattattattcaaataatatgatgcgtcaaatataaggtgatagtcttcttgttttaatccaaaataattaacaattccctgtgcatctgcgatgccaagtttttttaaagctgtctccgatccaaggtaattagtcgcgtcactttgattacttatatacgcatgttcaataataattcccgggaaaccggcctttttactatttcttattacactatagtaatcacaaatagatccatctgtataggtatctccactctcagaatttctgatacgcgttccatcatttgccagtcctaatgcgactaactgtttaagaacctcgtttgctaatgctcccccctgtgcaccaatatttgcatttaagctggaattaggataataaactgttgcgccatgaacactcgagctggttgtcgaattattatgaattgaaacaaatacacttgctcctactgacttagcatagtttactctatcttcaagagctacataatgatcatcatttcttgtcatatatacgtttacacgtttgtatttactaagttcttccttgcaatactgtgcaatcttcaaattaagtgttttttctaaataggtctttccaccataacttgcctgtgctccaccatcgttgccgccatgccccggatcaagaacaacattcactgccgaactagctctaaagagattattctgctgtacatcagccgctgctgcaatagcctcgctaattgtattccccgcagcttgtgttgatgtttcatccggatttattactactgcatcatacacttcactgcccgtattttcattatctgaattgctattatctgaatcctccgcatatgcatcagcattcaaatccattacaacagtatcaattccaaactgtgaattaattccaatagcttcaaagtctactgaatacccgtcagtttcgagagacttaactgtataacagcctgaaaccagatcacttgattcaaatatcaggtttccatcctccgtcatctctccacttatttcaaatgactgatttaaatcggtattttcaactgttaatctagcatttgattgatcaatgccatccgctaatccaacaattatccttacagcatctccctttttaacagatggatctgcaacagataaatatgtaactatctgattttcactattatcttgttgttgatagctctccgtactattacctgtctctgcagaatcagcaaaaacaaaagtgtttgccgaaatcagcatagaaagcgtcaacaacagtgctactacttttttcatcttaaaacgcctttccttttgtaataaatctaaaatatagtttatcacataagaaaagacgtttaaagagttacctttttatattttcttaagattttttataattcgacggattgcaacaagttaattatcaactcataatatgtatcaggaaatgctagtatttcatattttatcacaacaagaaagacaacgtttaaagactttttacctattttatttagtttttaccataaagcaatttcttcctatataattgagaatctttcaataattcaacatttatatagtccagaccatatttttcaatcaaagtatcctctccagaataaaggttagttcctaatccaagtctatttccctctatttgaacccctaaagctgccaatgttgttggatacaagtccaaagttgtatattctctttcaacacatggtttttcattaaccgctgcgccattaacaattgtaaaatatgttcttctattaaaatctgttgcattttgtctttctatataatcagaatccattgtaagatgatctccggaaataacaactgttgtattatcataaaaatcctgttgtttaatccaatccaggaattcagaaacttgcctgcttgaacatgcaataacattactatattgttcatcatattgattctgacataattcacatacatagccatctgtaaaatgcgtatctactgttaacattgtaagattaaacggttcatctttagaagctaaattatttaattcattttttgcatattcaaataatttttcatcttcatatccccaccaaaccatataatcatcatctatgtagcctctatcaattgcagtataataatcaaaaatatcatagtttccgtgtccgtgaaaatacgatgaacgtccagcaaatttcttatctgaaccaatcaaaaattcctgattgtatccttctcctttcaggacatctcctatagcccaaacacctggaacataattattatctgattcccactttgaatttaaggtatcattacttattaagttctcattaattggtacaccggatgtctgtgcaaccaatccacccattgtaaaagtcgcgcccgaagtcgtatacgcaccattcaattttccatatattccaaaattttcattctccaatgaaatttgtgtaagctccggaatataattttcactcatagcaccaccaacgctctgatctgaatatgtcatttccatagattctaaaaaaatatatatcagatttcttttttcctttgggaatgtaattgctacatctcttccatcaacataattatcttcatatatcgttgaatcctgctttgtatattttaaatacgatatgatatcaaaatggaaacaacacaatataattgaatatccaattgctatacaccctaaaagcgacatccaaaatttatatatccacttatttttcttttttctgaatatcaataatccaaatgtaaccattaaaacgcatattataataatcaaaataatggaaataaatatcacactgaatgatgaagtatttgttccttccaaaggtgtatttaaatgatatattatctgtcctattggcacatctttaaaatttttctgcatataccaaaaaccatatagcaatgctccacctaatgcagttaatatatatgttatgaaagcagacaggaaattaaaaatcctactatgtttcttatcatcattattctgacacaataatacaaattgcaaaataccaaatagcaaataacaaaacgtgcctatataaaacaatactaattgtctattcaaaaacagtttaactaccttataatttagtttttgtgacaaaataaacatattatcctgagtaagtgcagtaatatacaagccatcatcatgtacctcatactcaacatccttacgagatgatatgtatttttctagtttcgaaccagatacttctatggaatttccccaaaaatcagaaagtgtaatactcttaatcgaatatacctctaatgtatttataggatcaactctaaataaattattgttgatttctgccagacccatttttattttgaaattcgcttttttattttcaaaatatgcattaatactatcctcttctgtcattttcttaacactgggcgcataatacatttgggcatagtttttatttgaatgctcttctccatattcaatcgaaaaattatatgtatgttttccgaatattcctatacataatccaattaataataacgcaataaaagccacgtctattatagctaaaactacacttaacaagcgtctattattacataattcgttttttatctttcgcataataaaataccccttatttatatataaagaaacaaggagtattatattataatcttgtatttttttcaactttttcttaattttttcttaattttttcttaatctctttttgtgttcttttttaaaattgtatagattatacaaaaataaaatattaaaaacaacaccattacagaagtgagaaaaccgtatgctccaccttttattccatatctagccactaagtattcatttgccaatttcgcaactatagcagaaactatatatcctataattatcattcctgattttcgcatcacagttaaaacataataaccaaaataagataacgcattaattccacccgcaaacataagtaaaatcaataccatcctatattgtattaattctgaacctgttaaaatctgtaatacaggaattcctaaaatccaagccccaattatacaaattatagtaaagcctactattattactgatatttttgatattgaaacaataaatggtttcttgtaatctgaagcatattcgtctgctaatttagttaacgcgggcttcataacaaaagttgcaaatagatttacaatagaaacaggcataaataatgtctgaaaatatgctgaatagtttgataccatttttgcatctattgctattcgactagcacttaaaatatatgaccataaaaaagaacctataaataaaggaaaacaattcttgagaatacccaaaatatatttctcattccagataacagctatatttctaaatgttttcatcggcattacatcaaaaataatcaaaccaagtattgcaataagaattgacaacgatatagctaaaatcatatttttcgtaataataagaactactaacattacagtaactgacataaccgttctaaatgcttgagattttcctgttaaatctaaacgaccatctttttgaaatgctccctcgtataaatctgcatatgcatcaacaaatctataaatacacatcaataaaataacgatgcacttatatatatttgatttagctgtcaatatcgaataaacgatactaacaacaaccgacacaacaaataaaatatattttactgccttgtaatgtccaaattcaaaagtgcttttagtatctgtaacctgaaatgtccttgtttcataatactctataaaagcaagcatctgcgctactgttattgctatggcaaaaattcctccatcatcttcaccaactattctaattatcaataaagataatatcattgatgctgccgcaaatatcatgcttccaatcatattccaaacaaaattatttttttcagaggtctcactactaacatatttatgacacgctattgttaatagtttatttactttcattttcctcttctttcttataataatctctcactgcaatttcttcggtaagactgtttatcatattatctaaattggaaattcttaaagtcaaataaaaattatgaacaaaaagtaccattattgaaaatagaaatataaaatttaccgggctttttattccgcatatatctgcaaaaaaatatgcaatttgaggaaaaatacttaaaattaataataaaatacttgatacaatccaaaataaagcatattcaatttttagttttgctttctttattttcttcattataaagaaaaaaacacataatgacgcaacaaataaaataactctcaatgatgttgacatactctatatcctccctatctttttctaaaattctgtacaaacaatatagacattaacattctaaacatataagaaatggatcttgcaaaattcaaataacttgttcctgcaacacgctccttcatttcaacctgcacctcagcaacctttgctccattttttatcaaatatgatatcgtatccggttctggtccataattaatttcctgtgcaaattccttaatacattttctgctatataatctcataccagatgttggatcatttatttttactccagttgtcagttttattgctgtggatataagtctgcttcccaacattctagcagaaataggctttttttcatccacaaatcttgaaccaataacaatatcatagccttcatcaagcttctttaacattttgtcgatatattcaggtaaatgctgtccatctgcgtcaaactgaataaagcaatcgtaaccttttaaataagcatattttgctcccgcctgaaatcctcctgccaatccaagatttattggcaaatcaattatattatatttatttttttcacaaactgagtatgtgctatcctttgagccatcatttacaataacataatcaaattgtgaataattttctttaatattatttacaacttcttctatactttcttcctcattatacgctgggattactattaatagccgattcatatctacaccttactttctatacattgttttctttttcactaagagaatatatttttgttaagacctttgcaaccggtctattccaaaattttaaaaacatctcataatcctctttacttcttaaattatctcctattactgctgatgtttccgactcttcatgaattctgtgtgccattaatatttcattacaatataaaaactccccctctgctctagatattctttcccatgtttcccaatcaacattacttctaaaacctgttttaaataacggttcataatcacataaagcttcctttgaatatgtaacagaaggacagcaaattgcatttccaagtcttatagcacttctcttatttttaattctgtatgccttgtcatgattccttaaattctttaacattatccttttcagtttcaaattaaacccattgtcagaaaaatttccattaatgagctccgagtaatctgaaaacgcgattaaagcatgtggatatttatcaaatgtatttataatttcagttgaataattttctctataaatatcatcctgatgtgctattgttatatattgcgcatcagagcatgaatatgcaaaattccaatctcccgcaattcccttttcacctttattaacgaacatttcaatctgatatttattacataaattttcaatatagttgttcggtgttgatgttgctaacttaatatttgatttttttttctgttttttcaatgaaattatgcaatcttctaaatatttactttctttatatgcacaaatcacaaactcatgttttatcattttttctccctataacattttgattaaaatatactgatatatgcaccacattgaaacgctttgcataattatcattacaatataattatatactctataatcaaatttcaacctgattccactaccacccaaaacggcaaataatggataaatcaatggtgttatatatcttgattgacatccagctattgtatttgaaccaacttctgtatatgcaatgtacagtgatgtagctatcaaaactactgttccaaaaaacatcaaaatatcatatatataaactattttcgaatatgccttaacgtcgtattcacgtttatctgttaatgttgtaaaaaccaaaaatgcaaatactattatagcaactgttgttgtaccaattcccagatatgcaaagtgatcaataaacccattcatatttctaattgacaaatagtctttcaaaaaatttaataacgtacgtgtatattctactgggttatgaataatatacaatatctgttcagttggattaacacctgcaccacctcttacatcaccgccttttgaagtttcaaaaatggttttcaatagcaaatcaaataacataattacaaaggccatagagcaaatgctataatattttttcttattctcaattttgttcagtttcatcaaaaatggaattatcaaaaatgctaaataaatttgctttggaattattgctattgcaaatgctataaccataataaccgtatcttttgtcgaaaccacaccttcttcctgacagttgcccacaaaatacgccattccaatcatgacaaatccaataacccatgtatcataagaataattgcttgctataaataaagatgttggaaacatagccacaacagctaatatcatttttccactatgtaatcgtttcatggcaaaataacaacataatgaatatactaatactattggaatttgtccaaatttatatatcacaaaaaagtttgctccaaacaatcttagcaaggcaatcacaactccactaggcaatgccgtcaaagaaatattatgatctatatattttattattgcatcactattcttgtttaaagtattaatcttttcaatattttgagcataagtgtctgtattctgaataaaatcaaccccattagtcaagacttctaactctggttctgataaacctatatgtgcaacagacgaagaacttattgcaaatttaaaatgtgaatcaatatcccaactaatatgaccaattggagaaacaaataacatagtaatagaagaaacaaaaaccagcctgacaagtaatttctccggcttatcttttatcgttctatagctaatcaatacaaataaaataatagcgactatagcagaacaaaatagccacgtactatacataaactttagtccactaacaaaatacgcaattatagctcctataaccaaagaaactataaatataagtaaatctcttaatgctattttatattttctaccgataaagcaaataattgtatcactaaaattcaattttttgtctataaataataaaatcgatataataaaaacagtaaaacaaatagagtaaattattctttcataatgcatattttctttgtcaatactaattattgacttacctgaatatatttctatatcatcaaagttaaaatcagaatcaacatctattctaatttgtttaaggcttttgttagtaagttcaaaccctacgttgtcatcccctgaaaaaatagtttttatacaactatcattttcattaaattcattgccatcatcaaaatataactgtacatctaaatcgccagatactttatcttttaatttaataacaattgttgttacattcttaatattttcttttttaaaaacaatatgcggatctactccattaatacaaatttgaccactttgatttatataacaaccgctatattctattatatccgatgtatcatatcgttctaataaattatcagcatttccgcgaatctttaattctttacgaggggaccaaaccatggctactgtcacaagacttaatatactaaatattaagatccataatgatattttgctaatatttttttttgacatttcttactcctacaacaaatgatttcatttgtttattataatatgtcgttttgtcttcgttgcttttccattacagcacacatatatttgatacttacctgcatcaattttgtcgaactcacatataaatcctgataattctgcacctggttttcgcttaaaatgaatagccaaatcgcttctaaaaatcttacgagtagttattagataggacttattatctgatttcagtaataattgtatattcccattatacggtttttcattataaaatccccatccctcaattatacatttatttcctacataaatattatcaatcgcattcacaacttttctacaaatatcaaattcctttgtacattcttcaacaacacactttccaatattctctttcatcatattatatgagaaatcaggagcatgctgtgtcagatttgagctataaaatggatctttatttttaaagtacggatgcaatttatataaatgtttttgttctgccattaatcgtttaaactttttctcacttttcaaatcgttaccacgacttaccgattcatgatgataaagtataacatcattcctaacaacattataatatccagcctctacaagcctaaaacaaagttcaacgtcattatatgcaaccggcatatcctcattaaacccatttactttattaaactttgcagcatttacgagcatacaagcagccgtaacaacaagccagttataatctattttatttcgtccgaaataatatatattatcatcattataacctataaatgcatgaactggaccattagcaatattgataacaccaatatgctgaattttcttactattcgggtataacagctttgccccaactgctccaacatgctctaattctgcatgtccaaccattctttcaagccattcctcattaattatttcaatatcatcatttagaaataagtagtaatcacccttagcttctttagctcctatattacacattcttgaaaagttaaagttcattttttcatagatatatctaaaattatacttgtctgctaatccctgatacagtttcttattttcgtcattgcttccattgtccacaagaataacttcaaaattcctatatctggtaatttcatacaaggtctctatacatctttttaagactttatagttgtcttttgatggtattatcacgcttataagcggattggtctgcgagatataattcaccctatattgatacattatatctaccatttccaaattagccttgagaccacgtctcgcaagagcatcttccttgctcttctttgcagcctcgaatatatatggctttgcagatggatccaaagctgttgattcttttctttctctccaatgatataagattttatcaatatgagctattttatttgtcttttcagtaaatctaagagtaaaatcatagtcttgtgcaccttcataaccagctcttaatccacctatctcatttgcaatacttctgcgatacactccaaaatgacaagtatacatatgtgacattaatgtatccggagaccaatccggcttaaaatgtggcatatgtctattgaaaccatcatcatcaattttatcctcatcactatagataaaatccaaattgggattttcattcaatttttttacaacttcataaagtgcatttggacgcaatacatcatcacaatccataaatgcgacaaattcccctgtcgcaatttcaagcgctgaatttgtgcaacgtgaaatatgaccattctctgttctgtagacaatcttgattttttcgtttccttcatactttgcaagagtctctctcacactatcccatgaagaacagtcatcagccagacaaagctcccaatttgtatatacctgattaagtacagactcaatacaaggaataagatgtctgtccagtacattataaacaggtaccaaaattgaaatcttaggattatattcaaacttctcatcatagttctcatttgcttcaagcatagtaatccatgtttcatattccaaactgcgatttaatcttgctgccctacgtgctcttaccttctccggaactactttatgataaattggtcttgctactttttttatattttgcttgatagtattcataaataataacctgcacccttcaattgcttatcttttatcgcgcttcaatctcaatatatggattgtatactgcatatttatttaatttcttcaaagtcttacccaggattaattctaaatcattctcacatccagccttatccggcattatcatagataataatacactcttatctaacatcacacagtctgatgagactgaataacaatctcttgtacttacaagtctgttaaaatttcctgcttcgaatcttccatatcccttaaacggatatataacgcttccttcctgatctacatctatgccagcctgcaaaatatatttcttattacatatttttgcacctactgctcctacctccggtcttgttaaatatccaagcatttcttctatacattttaagctcttgacttcaaatctgttatttataatccatacataatcagttcgtatatcttttacaacttcttttatctgttcttttttttctataaacaagtaattcttattaacatacttggaactgcactcaattgaatccacacatgccttatcatatattctatcaccaaccacaataatagttattggcgttgtcttactatacccatatatgatgtgataagtcccatgatatggtccttcttcaaccttagcatcaattttctttcttttaatatggtcttcaagtgctttttttccggctttaaatgcataaagcttactatcaggattttcagatgtagaattttcatggcatcgccaatgatataatatcttaggtatatgatatatagaatcagttttttctgcacacctaagaatataatcataatcctgtgcaccatccaagtcaggatttaaaattccaacctgcttagcaatcgacattcttactacaaacaaatgacaaatataattattagctcttaaaagatctatattaaaattcggtttgaaatatggttggaagctttttgtaccaccagcaactattttatcttcatctgaatatataatatctgcatcaggctcattctctaaaagttttgcgcactcaaaaagtgcatccggagctaacatatcatcatgatctgcaaaaacaataaaatctcctgttgccatttctatagcagcatttgtatttgctgaaatcccatgattttcctctaaaactttaaatttaatccttttatcatcagccagatacttttcaattatattgatagtctctttatcttcaccagatttatattcgctagcatcgacaatacagagctcccaatcagaatatgtctgtgcttttatagaatcaatcatagctcttagatattctgcattggttctatataccggcacgactatactaaatttatagtcctctttgaaaaggtatcttctttgcagctctagcaaattatcatcaagtcggtttttctcctgccagattttatatgcattttcttcatcaagctttctcttgatttttttggcagttgcaaacagaccattttttttaatatttaatactattccactattcatatttacattgcatcttcattgacttctcttacaacaccagttatttctacacttgaaacgccatgactaaatgacatatctatccaaggatcatcctttccaaaatagaatacatcatcaacttgtctgccattcgtagctataatattgacatttgcatcttctgctacaatcttcaagtcactaagcgatatcgttgtaccctctaccggatcatatctcacatgctggcattttgtcgggaattcatatacctgtttaaagatattaccatccatcggcataacctgagtaaatgtagctctctcattaaagcctgttccatcatcaaagtaaagcttcgacaattcatcgttttcactcttcttaaactgatatgcatcacatacctcttttgccccaccaatcatctttactttgccatgatcaagccaaacaactgtatcacacatctcccgtatctgagatatcatatgtgatacaaatagcactgtagttccgccactcatcaaatcaagcattttattcttacttttttcctgaaagtcagcatctcctacagctaatatttcatccacaatcagtatttccggattcacaatagtcgccaccgaaaaagccagtctcataagcattccggaggaatagtttctaattggctgctctataaactctccaagctcagagaattcaaggatttcatcaaacttttcatccaggaactcttttgaatatcccagtattgaaccattaagatatatattttctctgccactaagatccatatcaaagccacttccgagctctagcattggaacaatattaccatgtgttacgacagttccctctgtaggcttcataatccctgagattaccttcaatattgtactttttccggctccgttgtgacctactattcccacaacctcaccttttttcacattgaagctcacatctttaagtgcccagaattcctcatatttaagttttcccttcactttctggatcatgaactctttcaggctattcaatttgtcatttgccattcgaaagcatatagacacatcttttacttctatcatgttcataggtcatactccttaatgtttacagattgaaaataaacttgtcctcattctttttaaagaaccagaaaccaagtataaatggtacaactgatagcagaatacaatataaataatgctgtggtgacggtgataccccatctatgagaatgcttctcacaaagtatataaactgatacatcggattacaatgaaaagcttttaataatataggtgaagtaataatattttctgtatagaaaataggtgtcgcatagagccacactgtgctcagtacattccatataaactgcgtatccttaaaaaacaccattgacgtactaaggaaatagctcattcccagactaaatatcatcatgcatatgataggaaatggcaataatataaatgccggtctaggccataatcctgtaacaaatgtcactatgagcaaagggataagtgaaaatccaaggtttactaatgatgacattgcccttgacaaaggatatatatatttaggtacatatacctttgttataagtgaagagtttgatgttatagctgaaattcccatagcacaacattcattaaagaagttgaacataacaattccactaagcagatatacagggtaattcgccactcctgaactaaatatagtagaaaataccacatactgaacaagcatcattaggagtggattcaaaaagctccaacacacaccaagcacagaacgcttatatttagtcttaaaatctctctttaccaactggcttatcaggaacttgtaatgtgaaacagaatctaagaatgcaataaccactgtttgtttacctgatttccgtttatttaatgatacaacaaaataaacaataagaagaattcctattgctcccattattatccaataatagttaccaaaccatattgtgttcattccatctatagagaggcataactccccctcaagaccctcgttatttacatacacgcgagtgctatcatcatatgatttggatatctctccttttgccatcttgatagaatttccatagtaaaaagagatttgactgtcgccatccaatgatttgcaaatcaattctaatgtgtagctttcattattatctgtcttgattttttcaggcaattttatatcatatggctgattatcacttagctctgacatatccacatcaatatcagcaatattttttccgtttgcatctgtaatcttcgcttcaagcataccctctgcggttttgccataggttgccggtgtaactgtcaccccttcaagatactgactatcaaccgtaaatgtctgcttaattgtatctccctcagcaaactctcctacaacctgagactgtgagacagtatcactctgagtttcctggtagtgaaactgcttacttgacactaaatatactaaacatatagaagcaaaataaaccaacaatgttattccaaatactttttttataaatttttcttccataacaattaaattctttcctaatctaaaatattatttgtcactaaatgcctaagaattatactctctactgatacttttgtcaaatcatccccacacagcctgtcccagccgtctcatggtcccggtcttatacatatcattttccttataaaaccgttgtctcacgcatctggattcaccctccagtgccgcataccttaccgccaggctgtcatcggacagattatatgtctttgcaaattctctcgcctgaagccgtcccagtctcatgctctcctgtatctgttttttctgccagacacggcgcacaatatatgatagcttatttatcccgagtgctcccaggctgttgtctccatgctgtctatacagtatggtgggctcatctatgaatgctgttttaccaaactgtgctgctacaagtgctgcccaccagtcatgcattatagtgttgtctatatcggtgatgcgaagcatcttatctcttaaggccctgtttaccatcattgtacagcctgtcacagaattctgcaatataaactggttgattgtacgcttgtgacagtcaagactctggtatccgctcatcgtgtccgctattgtatttagctcgctatctaccacacgaagctccgtgtataccaggcacggaacatctgctttggtctcaatagtaagcatcttatcatatgtcagccctatctttttatccagccacacatcatcctgatcacaggtcatatagtatggtgcttccacctgaccaaacaggtagaagaagttatattttgcgccgccggttgatttaccatctatcagatgtatcttattaggatatttttccacatagctttctaatgcagctatcgtgttgtctgtagagccatcatcgtgtatatatagctcccagtccttgcaggtctgcgacaggatagagtctatctgctgacatatatatttctctccattgtatgtagccattagaatggctatcttgtctgtgctatgcattcttcctcttccactttcttccggccctgttgcccagaaactttgccgcactgtcaaatatgcagtgcactgctgccccaatcttgaactgctttaggagctgtttttctatgaaaagcaccatcctgatgccctcacctgtggtaccgtcacactttatctcatccttataggtctccataaagaccgctacatcaaagttgcgcttgtactgctgcttaaatgtatagttgtgtgagtgatacacctgcgctgtggcacaatagcctatcttgtatcctgccttgagtgccctggctgccatcaacatatcctcatttgtgagcagtgggctttcaaagcctcctatgtcttcaaagaaatcacgtctgtaggctgaacatacatctgagaagaaatatgcctttattccaagtcgtggtatatcctctttgcttctgacaaagccttctgccggataattaaactccctgactaaagcttcatccggcttagcatcccttctcgggagctgtctggctgatatcataacaacttcttcgttttcaaagcctgccaacatattttccacatagtgttcatctgaaggcagcgcatcctgcgacagaaacatcactatatcaccctttgacatgactacagcatagtttctcgtgccaccatgatcaaattcgcttctcttgacctttagtgtcataaagcctgcctgctctgccatgcgcactgtggcatcctcggattctgagtctatcactattatctcatcgggcttacgtgtctgcctgcccagtatatctatcagacctggcatatactctgcagcattgagagtaggtattatgagacttatttttatactatttaaatccaatttcttcatcatatttctcacatatgttctgattattgtgctccatcctccctgattacagagaaaacggttctgaaaagtatctttatatccagccaaagcgagcagtgctccacatagtacatctccatcctctggcgctctccgctctcataggtggcattgtttctggcatatgcctgccagtagcctgtcagtcccggctttacgctcagaagctttgcgatgtccttgccgtatatctgggtttccttctccacgattggacgcggtcccactatggagagctcgcccttaagtatgttgattagctgtggcagctcatcaaggctggtctttcgcaggaagcctcctatttttgtgattcgaggatcattgtctatcttgaattcctttacatactgctcaagctgttcaggtgtcagtatcttttccagatcacctgcgttcgtcttcatgctcctgaacttgtatacagatattttctttcccttatagccgactcttgtgtgcccatagaacacgctgccgccatcactcattctgattatcacagcgagtatgataaataccggtgacagtactataagtccaagcagcgaggcaacaatatccaccagacgctttataaatctgtataccggctttccgctgccttcagtggccggatatgcctgtatgtcatagcttaaaggctctctatccttcactagctcactcaagcatctcatctcatcaaccagctgtgccggcatgacaagctctctctttgacacagacctgcacagaggacatactgccctgaaaataatcctcagatcaaggcccacagtccagttcagtatatattcctggtcgtactcgctttgctcctcctcggtaagcagcctgtgttccctgctgtatacctgccagaagcctatgattccgggctttaccgatagactttttctgtgaaatgcagagtattctataaactccggcagtgatggagcaggatttcccaccatgctcatatctccccacagcacattccaggctgatggcagattttcaatccttaatgccctaagcattcttccaaccggtgtaaatctcgggtctttttccttctttccatccagtatccatttgtcatatctatccctcgcatccatatacatggtgcggaatttatagtaataaaatcttcgtccgtttttgccgactctgacaagcgatatgagcaccgggccatggtcgcctgtgactattttgcctataaatgcaacaatccacacaggcactataagtatgcttccggccacaccaaacagcagatctatcagctttttaataagcagatgccttacgcggtatgtcttattcttccatgtgaccactgcgtattttccaaggaaatccatatagtgctcaccgaccttggcctcatactcattgacattcaggtgcactgtcttgcccatttcattgagcactgtaacaaactctctctgcttaaacggatagttgtccggcagatgtacaaacactgagtctatctctgctgttgatatcacctgaagcaggttatcggcagttgcgacgacctctatcttgtctactatctcaccgaccatatcacagtccaaaattgcaatattcgatatacgaaaatcccagtttcttgtggtctttatcttttttatcactcgctccacctggtccgaggttgtgacaagcatgattttctcattggcccctgagcggtgatattcctttgtcaccagtcttttcagcagctgtctgactatcacagtgaatatagtactcagtatgaaggtcatacccatctgccctctggagaaatattcacttgtttttgtgaaatatacacagccgactgtgattgcacccacatatacatacatcttcaggacattatatatttcaggaaagagctttcggtttatcagattatcatctgcaaatgccacgaaatgtactaccacatatgctacgagctccaccagaaaaagcgtaagatagtgctctgtatggtttataagtcccgttctaaagaaaccgaacttgtaccagtttgcaatcagataagatgtaaacatcacaattatatcaagaagtacctcgaggtactggattatccatttttttgagttcatatctttctcccggatttttcctcatcagcagtatctataccggcaagcagtacaagcaggaacggatcatatgccacctcgagcagatgatgctccatgaaggagtgcactccaatcatgactattgctgcaaaaagcacatattgctttgcccctattgccctatgacctataactattaataatataagcactacagcaaatactattattccatactcaaacagcattctaagatacatatcatctataaagaaatactttgcagggtctatcccggtcgggtctgcaatgcctccccagccctgttcctctataaactgtccaaatgccttgatgctatactcactccacactttgtggctcaccatcagcctttgagatagtacagtgtctattttaaccattacagcattgctcgcgctataaaaatagctcagcgccaaaaacagacccgcccacactatcggcagatatttaaatatctcacacaccctgcgtgccagatttttcctctcaagcagataaatcaggcctgtcagaaccaggaatcctgtcaggcacactgttcccgtaaaggctcctgcttttatatatataaatacacctgccgcaattacgattagccatctgagccctgccggatatctgtatttttcgttttcctgcaccctctgccatataccaaggcagcttaccgccaatatcaggtaaaatacatgtgccgcaaagtccgtcggatatataatgccgtatgaatgtctggccgccgctgcatttctcggtgaatagcctatcacatccgctatcacacctgtctgactagctatagctgccactataagcatgaccgataccaccgccgtatatacctttagtatattgtcaaacctcacattttttgccccggcaataagtagtaccggctgcagcagttcataataaccggtttgtaagcctactattccaaatataagaacaactacggcaattgcaagctgctcttttctgctgtaatatccggaaaaaaggaccttggctcctgtatacaaaaccatcgctgcaagaaaaagcttaaaggttcctaccagcacctgctgcgagaacatagtagtctcgtatacacattttgccagcacaataccatataatataaagtatcctacatcccatctgtgaattttctgtgttgaaatcgatttatttttgtccataaatgatattttaccatatttgatatataattgccacatttcaaaaaattataacaaaaatttaataaaagctacagtttatgcgtctccgctcaactgtagcctttaaaatcgacctatttaattacttcaggtcatcatctgtaattgtttcaccattcataaccttctgtatcaactgtttagcatgctctacgctgctctcatccggaatagtaacataaactttctgaataggcatagaatattttgttttcttggtaccctgaccagttactgcaaatgacttaatattccagcttcctccctctgacagctgcatattgataagagatgaaatatctgagcttttaaaatccatggaaatcattccctcaagactgtcaagaataccggagtagttggtcaataatgccgtactgtttgtcatcttatctattactgctgaaataagatccatctgatggcgtcccctgccattatctccgtccggaagattatgcctctcacgggcatatgccaatgcttcctctccgtttaattcatttggaccctttgaaaacttgtaagaatccatagatgaactaaatgcctgttcagaattcacagtaactccacctatttggtctataagagtctcaaaacctgtgaaattaatctgagcatagtagttgattgtatccagatcatatactgaagccaatgtcttcattgaacaatctataccatacaatccacaatgtgtcagtttatcctttgccccatgagataccgacgtttcaacatagtaatctctaggtgtatttaacaataacacctgtctactctcaggattgacaaaagccagaatatttacatcgcttcggctctttgcaagcttcttgcttctggtatctgatccactgatatatacaacgaacggctcctttgtcacctgaacatccttttctgtcttctcaacctcatatgtcttagtataagcatacaatacctttgtctttgtttcaaaatcttcatacccctctgtatctgtgataacagatacatatgaggtattgagtatcatcgcctttacctcacccgaataaagggcatccaccatctctattgcagacgcatatggctttgtattgattgtactgtctgtttttttattaatatcatctattgtttcctttgtctcttcatatccatatgaatcagtatatgcaaaggtataatccttggcatcatcaatagtctcagcgggatcatccttcataacatagacaacaatcttatcctccatgacatttttatttccggtcatatcattaagtgtgcccatcaccttgctaagcacagacgtgccatataagctacatatgataaccagtatagatataaatgttcccaatcctcgcttaaaatagcccgacgcttttggtttcattatgttttgtcctaagtgaacaagtgcaaacaccaggaactccataattaataaacccccggctgcaaacataatatactttgcaggtaacatttttgtttttacagccatagcaaatatcatagcactagcaataagctgtaaaaccaataatacccttgcaaatattatccattttgtagcctttttctttttcttcatttgtttctccttctatctataaatacatagtacttatctattttaacaaatgattttgatttttcaatattttaacaatgattataacaaaattaataattttttttaaaatttaaatgtgttttccagtgtctcccacttctgatccttatcactcaagttgattggtgtgccatcctcaagtgtgtatccgcttccgtcagcgcttcccggatactctccgacaagctgtggccactcgatgccgattgcaggatcattccatgcaaggccgctctcatctccaaggtgccagaaatctgttaccttgtagcagaactctgctacatctgagagtactaaaaatccgtgtgcaaagccctccggaataaggaactgcttcttgttctcctctgtgagctctactccgaaccacttgccgtatgtctttgaatcgcttcttaagtctacagccacatcaaatactgagccttttactgcacgcacaagctttgcctgtgggtattccttctggaaatgaagtccgcggagcactccctttgtggagcatgactgattatcctgtacgaacactctgtcaatgccagcttcctgcatatcctttgaattgtatgtctccataaagtatccacggttgtctccatgcactgtaggctcgatgatgcaaagtccttcgattccacctacgtttttctgtactttaatctgtcccatgatttctatgtcctttcttgtattacgtgaacatcccaacatctaactcaacctcgctacttcgtagcttctttgctcactaaaattctatctcctgcagatatctgtgcagcgcatcctgccatgtagggagtggcttaaatccattctccacgagcttgctcttgtccagtctgctgttaaacggacgtgctgcctttgacacaccgtactctgctgttgtaacaggtgctactgtaagtctgtcctcagaatactctgtatgaccaagctccactgcctgcttaaagatttcctttgtaaaatcataccagcttatatatcctccctcgtttgtagcgtgatagtaaccgtatttatcagtctctatcatatctacgagcaatcttgaaaggtcgagtgtatatgtcggtgtaccaatctggtcacttactactgtaagcttatcgtgtgtcttgccgacatttagcattgtcttgatgaagttcttgccgtttacaccaaatacccatgctatacgcactataaagtacttctcaagtgtatttgccactgcaagctctccgtcaagctttgtctgtccatatacattgagtggtgcatagtccttgcagtcaggctgccatggtgtggtgccctgtccgtcaaatacataatctgtgctgatatataccatcttggcatctatcttcttgcaggcatccgcgatattctgtgtgccgtctgcgttgattgcatgcacctttgcttttttatcatcatcctcggccagatctactgctgtccatgctgcacagtgtactaccacgtcaggcttaagctctgtgattgttttttccactgcatcacggtctgtgatatcgagtgagacatatggcatagttgtaactgctgtgccatcgtctgctccactatactgtggtgctatatctgttccgattccttcgtaaccgcgtgctgccaggtcgttcattacgtcgtgtccgagctgacctgcaactcctgtaacaaatactttcattttgggtctcctttttacaaatattcgtaaacaggcccaacatatatgcgcaatcccgcatgctttggcatgctttcccgctgcttacgcagctaagattgcttatatacgttgttcctgctctattctagagcctcaaagaatcaaaatgcgcttatgtaagcgagcttacaacacgcatttcgattcttcaaggtttacgaataacagttatctattcgcgtacatcttctcgtagtaattctggtactctccactgatgattgtctcccaccactcacggttatcaaggtaccatttgattgtcttcttgatgccgtcctcaaacttggtctctggaaaccatccgagctcgttgtggatctttgtagggtcgattgcgtaacgcatatcatggcccttacggtctcctacgaatgtgataaggctctccggcttattgagctccttgcagataatctttacgatttcaaggtttgtcttctcattatgtccacctacgttataaacctctcctacacgtccgttgtggatgataaggtcgattgccttgcagtgatcctctacatagagccagtcacgcacgttctcgcctgttccgtataccgggagtggcttatcattaagtgcatttgctatcataagagggataagcttctccgggaaatggtatggtccgtagttgtttgagcaacggctgattgttacaggaagtccatatgtgcggtggtaagcaagcacgagtaagtctgctgctgcctttgatgatgaatatgggcttgatgtatggattggtgtatcctcatggaagaaaaggtcagggcggtcaagtggcagatctccgtatacctcatctgttgatacctggtgatatcttttaatgccatacttgcggcatgcgtccataagtactgatgttccgatgatatttgtatcaagaaatacctgtgggttttcgattgaacggtcaacgtgtgactctgctgcgaagtttacaaccatatcaggatgctcttcctcaaataatttgtatacggcgtcacggtctgtgatgctctcctttacgaaacggaagtttggattgtccattacaggttcaagtgttgagagatttcctgcatatgtgagacagtctaagcatacgatacgataatccggatatttgttaagcatgtgaaatacgaaattgcttccgataaatcctgctccacctgttacgataattgtcattttgatttcctccttaatataactgctcgcggtattttccatcaagtacatcctttaagtactgtccgtactggttcttctttacgagctcatatgtctttaatacttcatcctttgtaatccagccgtttaagtaagcgatttcctcaagacatgctatcttgcggtgctgatgtgtctcgactgtcttgacaaagtttgtggcatctacaagactctcatgtgttcctgtatcaagccatgtgaagccctgtcctaaaagctctacattgagtgcctttttctcgagatagattctgttaaggtctgttatctcaagctctcctctggctgatggcttaaggttctttgcgtactctactacattgttgtcgtagaagtaaagacctgtaacacagtaattgctctttggatgctccggcttttcctcgattgaaatagcctttccctctttatcgaactctacgataccgaatctctcagggtcatctacatagtagccgaatactgtggcgcccttaccgctcttagcgttttcaactgcggccttgagtctcttattgagtccgtgtcctgcgaagatgttgtctccgagaaccatggctactgtgtcatcaccgatgaatttctcaccgataacgaatgcctgtgccagtccgtccgggctaggctgtacctcgtaggtgaggttgacaccaaactgatgtccgtctcctaagagctccttgaatcttggtgtatcctgtggtgttgaaatgatcaggatatctctgatgcctgcattcataagcactgacataggatagtagatcattggcttgtcataaattggaagtaactgctttgatgttaccattgtgagtgggtaaagacgtgtgcctgaacctcccgctaatataatacctttcatgttgttctcctttaaactgaaactacgtgctacacttgatgctttcggtctgtagaatacactgacctagttcatcatttacctgcattataaaaggtgccccaagggcaccttcaagtacttttttatatttttagcatttttcacaaaatatatgcttataatatcctgtttttgaatcattttcgtgcaataaatacacctgcatcctttgtgatatggaaccctccctctgtcttctttctgacaaatgccgcaaattccttatagcggtccacaatatacctgttctggttgccgtggcacgaaagcacatactctatcacaggctctgctttttctaccacaagctcatcctcgtacccatgccagcttacctcaccaaagtattttccaagtattgcctcaccattttctttaccgaattgctcatacagcctttccgctgacagctctatacggtcatcaaactgctgcaccaggtcgtttatttccttcatatgccgtgagctgtatgtactgcacacaaacacgccaccgggctttagcacccttaggatttcactgcacacagcatccagattgtcacaatagaacagtacatggtctgctatcacgcagtcatacgatgaatccggcttatacagcctgtgggcatccatcacctcatatgtgaagcgcttgtcatctgcgcctacatttctcgtcgcatcccttaccatgccatacgatatatcagtcagggttatctgcatatctgccggtatcctatctatgttctgtgtccagagagaggcatcaccacagcccacctcaagcaccttttccccttcaaaaaagctgcactcatcaaatacccagctaaaccagctcaccggattcatcgagaaatccctgtgcagattgattctggctgatatatttgaagcatccctgtactgctgctttagcttttgctccatctcgtttatattaaccagctccagcatatggctccagtccacgcttcgcccctcgtctattacctctgaagcctcctgcagtgctgatttcataagcttcatctgctctatcctctcctccacgagaccaagctgcatgtgaagcgactcagacatgacattgctgtccgtgtttctgagtgtcatctccttgatatcatccagggaaaatcccagatatttaaggaacagtatctgctgtagacgcgcaaagtcgtcatcattatagaatctggctccgttttcgtttacgtaggatggttttaaaatattgtgctcgtcatagtacctgacggtcttttttgtaatatgcgctttttttgcaaattctcctgaggagtagtagccgggtagtttcatcgttgcgttgcctttcctcttattttcttacttttaaactttctatatctaagtatatcataattttctaatacaggatttattaatatttacttattttcattgtttctgcttgtttttccagaaaatgtacttataattataatatcactatgtaacaaggagaaaacaatgaaatacgattatatagtagtaggttccggtctctacggagccatcttcgcccacgaggcaaaggccaagggcaaatcagtgcttgttgtagacaagcgtcctaacatagcaggaaatgtttacaccgaaaagcaggagggcatcaatgtacacatgtacggagcccacatattccacaccaatgacaagaaggtctggaactacatcacacagtttgctgagttcaaccgcttcacaaacagccctgtagcaaactacaaaggtgagctgtactcaatgcctttcaatatgtacaccttcaacaagatgtggggtgtggtgacaccggaggaggctgctgcaaagattgaggagcagaaaaaggaaatcaccggtgagcctaaaaatctcgaagagcaggctatctcactcgttggccgtgatatctatgagaagctcgtgaagggctacactgagaagcagtggggccgtgattgtaaggagcttccggctttcatcatcaagcgtcttcctgtgagacttacctttgacaacaattacttcaatgctctttaccagggtattccaatcggtggatacaccaagatggttgagaatctgctcgacggcattgaggtcagactaaataccgactaccttgagcacaaggctgagcttgatgctcttgctgacaaggtggtatacacaggtccgattgacgcatactttggctttaagctaggtactttggaataccgctcagtgcgctttgagaatgagaccctcgatattcctaacttccaaggcaatgccgctgtcaactatacagaccgcgagactccatggacacgtatcatcgagcacaagtggttcgagttcggtaaggatgaggatggaaatgatctgccaaagactattatcagccgtgagtactcttctgagtggaaggcaggcgatgagccttactaccctgtaaacgatgagaaaaacggacagctctacgccaagtataaggagcttgccgataaggagaccggtgttatattcggtggtcgtctcggcgagtacaagtactatgatatggatactaccattgcttctgtacttgatatgtgtgagaaggagcttgactaatagtcaggcttcccacaaaatgctttgtttatgtcatacaaaaccgcccatagcatattttgccacgggcggttttatttacattatttttttccggtcagatttatctcagccgcaggaatatgctccctcaggcactcatatccatactccttcgaatatgcatatatagccggaagctgtcttgacagaaagagcgccggtgcttctgtcacagagtatgcgccacagtgcccgaactcaagaacatcaccaagttcaagcttcttaagcttcacctcgcgtaccagcacatctgccactgtacagaggcttccgcagagtgtatagtctgtgtccggcagttctgtgaattccacaccggcagctctatatatactaatcggcggcacctgcatagccattctctgtccaaagtaattcagatggtggattcctccatcaagaatcgcataattggcatcgcctgtcgatttaaggtcctttacctgtgtgtaatatttaccgcatgaggctgcaaggaaacgtcccatctcaatgccaagcggatattccacagcaaattctctaagcacctctgctgcctcatcaagtgcttgtttttccctttcctgccagtcttcctcaaaatactccacacaaagtcccgggccatactctacaagctgtggctcaaaaccgtatttttcttttaatccggtaagtgcagactttattttttgcaagtccttatttattttgcgcaagctcttctgtgtgccggaataatagtggatgcctattaccatgatgcccttaaactcatccggatgcgaaatgatatattcaatatcctcaagcgacatgccaaactggttgccgcttgtcaggcgcagtatgacctgtgccttcttttcgaccaatccagcttcatgcgcaccttccggcatacgttcaagcatcacttctgatatcagcgctgcatgtcttatgctctcacaggtgagtataccggcgccatatgaaactgctcgctctatatcgcatttttccttcatcacacctgaatagatgatgctctccggcttcacgcccagtgctatacatatctcaagctctcctgggctgcacacctccacatggtctaagccctccggcagcctgtgaagcaggaatggatttgcctttatcgaaaagcaaagcggtatcctacgtcctcctttacaatcaagagcagcccttatcatggctgctctttttgcaaactcgtccgtatcaaatacatagtacggtgtctgtctcatatgcattattcctccacaagctctttcacaagcttctcgattgcatctactgagttgaaattctcaggaaccagatcctttggtctgattgtgatgtcaaactcatctgtcagctccgatacgagtgaaactatatcaaatgactcaagaattttgtcatcgattagctttgtctccttttcaaaatccacatccggtcttaattcctctaaaatctctaaaattgtgtctctcattttacatttcctccagttttttcatatcatattttccgtttggaagcttaggaagctgctccagcttcttgattttccttggcaccataaagcccgggagctcgtccctcagtgccagcgcgaggcttctcctgtcacagtcacctgtgtagaaaagtatcagcacctcttttgctttattatatataacacagctttctgcgactccctcgaccacattggcggcatgctccacctcgtcaagctccacacggtgtcccatgtgctttatctggcggtccatacgtccacagaaatgaagtatgccatcctcattgagccttccgtaatcccctgtgcgatacatccgctcaggataagccttattgagtggattgagtgtaaatgccgcagctgtcctctccggatcattataataacccagcgccaagattggtccacatacacatatctcgccctgttctccaacagccggctcatttccatgctcatctatcaggaaaaccctgtaattgtcataggcttttcctataggaagcacctcgtcatcttccactgtatgatccacgctatagtatgtgcatgatgctgtggcctctgtcggcccatactggttcacaaaatgcgcttccggcagattttcctgccatttcctgagcaccctgcacggcatcactgagcctgagaagcagatttttctaagactcttaagccctacttcctcaaatgctccaagcgatgtgaggatggtaaatgccgaaacactccagcctacactgctgactttcttatcattcatgtaatcaaacagggcatttggctccataaaatactcttttggaataatcgctgtgctgcagccggtctttagcggcagataaatgtccctgattgccgcaatatagtcaagcggcgactgattgcccagcacatcactttcctctatatgcattacatcacagtaagcattgatgtatgtcataagtgacagatgcgatgtcatgactccctttggattgccggtggagcctgacgtgtagatgatatacagtgggtctgtcatggacatctgcctgcggactgcagcgagcatatccagtgagctgtcatctgtttttcctgcacagcctgccacaacaccaccatctgtatcgttctcactatccgtcacatcgtctcctgctgattcactgattttacaatcactatcagcgcacgccacctgctcaaagcgcgatatatcctcagcaataaatatctgcggtctatcgaagccttctgcctttgccagctcatccactatgctctccacatgctcaaggctttccctgtctgccacaatagcccttggacacagattttcaagtattttttcaattctcttgtcaggaagcgatgcatcaatcggcgcatacggtctgcctgcatatgccactcccaggaagtatgccggtgtcaccattttccttccggcaaatactgcaacaggggttctgtccactccaagctgttctatcagatatgctcctgtatttcttgctatatcatatacctgcgcaaacgtaatactacattcagtatccgaaaatgcaggcttgtcagggtattttgccactgtggcctcaagccactccagtacgtttttcatcttagtcctctttcatgcattaataaacgttgccgaaaaaattatagcacataacatccgaaaaaaatgtcatgtgctatcgaattaataattcttaagaaagccttaatttttttctgtaggtttttctatatttgattctcctattaaatatatcggtctgtcctttgcctcgagataaagctttgacagatacagtccaagtatccctatgctaagaagctgtataccaccgataaaaagaatgataaccaccgttgatgcccagcctgctaccggatcaccaaatacaagtcttcttattatgataaaaagcatagctgctatcgccacaataaagctgaacactcctgctattgaagccatgtatagcggagcatttgaaaatgctactattccatctaaactatagagaaacagctgccaaaatgaccactttgtctcgccagccacgcggtttacattttcaaactcaagccacttcaccttaaagccaacccatccaaacaatccctttgaaaacctgttgtactcttttagcgataaaagagcattcacatatttcctattcatcagcctgtagtcgcgtgcaccgtcaaccatatttgcctttgatattctgctcataagcctgtaaaactttcttgcaaaaaaagatctaatcgctggttcacctttgcgtgtcactcgccttgtaccgacagcatcatagccctcttttgtaaggacctgatacatcttcggaagcatttccgggggatcctgaaggtctgcatccattattgccacatattcacccaccgcatgctgcaagcccgcatacatggctgcctccttgccaaaattgcgtgaaaaggatatgtattttacactggaatcatttgtggcaagctcctttgcaacatcgagcgtcccgtccatagagccgtcatccactataatcagttcatatgacaatccctctgcctcactcgcttgactcatctgattcagtacccaggttattttattataaaaaagaggcagagcctctttctcgttaaagcatggcaccacaatgcttatcttatttttttccatataagccaccctgcatataatatcaaataaataaaaaatccgattgctgatcctgccgtatttgtcacaaaatcatcaagctgacaatatcccctgccggtaaccagctgcgtgtactcaattgctgcgcttataagagcaccaacaggtattgtaaaccatctcatccaatttttaaaaaccagtggaaacaaaagcccaaatggtataaacaatactatattttctataaaataagcgtgcatctgaagtgtcatgccccatgtgctccacagcaccatatcggcgacgccggttctgcttcccggctcccttgaataatacactatcattataagcgtatacatataagccacaaatgtgccgcagaacagcatatgccagattttgcccactatcttttttcttctctcatctgcctgtgatacctctctcattgtgaaaagatatcgcagcagacacacaaaaatatacatcgcaatgcagattaaagccaaatataccgctgacggaagatatttgaacttttcctgtatgtctcttattatataatcctttaaactcaatgtccttttttatgctccttgtaggcacgaatgaactccagctgtcgttcatcgtcctttttctgttcgtcatcagacatatgactcactttaataattatacacaatattatgccaattacaataataccggcacataatataaaaataattaagatttcaggcatagactatttcctccggcagaatttaattactattctctctacagattaaattatatccacttaatttatcttaattcactcatttatgaaccccaataacagcaaaagctgcatgatattctcacacagcttttgtatattacgtgtattatctttggcattaacctttattttaattttgcaacaaccatatccacatatttctgacagatttcctcgctctctgcctcaaccatgacacggataacaggctctgtacccgactcacgcacaagtatacgtcctgtatcgccaagctctgcagtaacctggtcgacagccgcctgaacctcaggatttgcaagtgcctcggccttgtcagccacacgcacattctgaagtacctgtgggtagatactaagcccctcacagagctggctcatcttctgttttctcgccatcatgacctccatcatcttaaggctggtaaggataccatcacctgttgatgcatacttagagaagatgatatgtcctgactgctctccgccgatgcggcagccgttctgctgcatgtactcgtatacatatttatcacctactgcagtctttgcgtagccgattccaagctcatcaagggccttatagagtccaaagtttgacataacagttgtgacaacagtattgttatcaagctttcctctctctttcatgtactttccatatatgtagaggatatggtctcctgtgattacattgcccagttcgtctacacagagacatctgtctgcatctccatcgtatgcgaagcctacatcaagaccattgtccaccacgtacttctgtaagccctcgatatgtgtagagcctgcattattgttgatgtttagaccgtttggctcattgttgatgacatagcactttgctccaagtgcctcaaaaatagactttgccatgttccatgagcttccgttggcacagtcaagacctaccttcatgcccttgaatgagtagacaccaagcgatatgaggtatcccatgtaacggttacggcctgctacatagtcaactgtacatccgatagcatccttatgtgcataaggcaattccttccactcctgaccaaacaggcgcagcttgccgtctatatagtcctcgacaaggagaattgtctcctcatccatcttctctccattgctgttgataagcttgattccattgtcatagtatggattatggcttgccgaaatcatgataccacagtcaaaatcatcggttcttgctacatatgccactgatggagttgtggtaacgtgtaatagatatgcatctgctcccgatgctgtaagtcctgatacaagggagtactcaaacatgtagcttgaacgtcttgtatcctttcctattactatcttcgccggctcgtcgagctgcttctgcttcttaagctctccataataccagcccaaaaatctaccaatctgatatgcgtgctctgctgttaaattgacattggcctctccacggaagccgtctgttccaaagtattttcccattgttgtccccttgtgaataaatttttcttatattatacacttaataaatgtgtttgtgtagtaaaataagcttatttgttaaattattcgacttcataaaatcaattgtttataaatatgataaaattaacatatgtatataaatcaaagctacaaagatatcttatgacactccatataatatctcttctcattcgcttctccgattgagaatgtctttctaggaagcaccccgcccgcatttattgcagggaacaatgtgctcttgtctatcgactgaagaaagattccacatccattagtctccctaaccagtccgtgaagtgcctcatcaccatggatatagtctatttccacattgtcatgtgtctcaagatacttgtctaaaataccctggagtatctcaaccgggaggcggtcacctctatttgtgatattaattccggaattctttatttcggtagcgcctgattcaacatactcaaatactatctcatcgccctcagtgctcgcaagtccttgttttgtgatttcagcttcgaaaaacgacagcatgtcctttacatcaacatttgtaagcagtctgtgaataggcttaaactcaagcgcctcactgtgcagattacagatttccacaagagcatgccttgcaggatgagttttcaactgctcctctgtgaattttcctgattttttgatattttcccagcatgtcttcgctgttgcaagggaatggtttccatcacctactgcaaataaaaagcctccacagctattctgttttgctgcgaatgcctctgtcacctgccttgctgcctcaccctcgacagcatagccgcggatatgtccgcctccctgcatgagctctgtatcgtaaagcttacgaagagtgtccctgatggcatacacatactcgattattccatgctttacagctgctatatttactgcatcttcctgtgaagcaccctggcaaccatcaatcttttgtctgtctataggatcatcaacaagcagcataacatgtggcagctcaatagctgcattctctcttattttcactctcggaggtatacgtgagattactgttccctctgttgctctgatgagagtcttctttttcgggtcgaaatcatagtcatccagatcaataagtcctactattccaagacgcacccctgactccgtagtacgctcaacaagcacatagccatctgccaccgcttgctttagggttccatctgtgagatatgtatccatagtggtattaatatatttgattctctcatcatcagtcattgaagcatattttgtttttctgccggtttctttgtcatttttgacaccatcccctgacgaattgcaatcattctcctgtttcgcaattgttcccagatatatttcagggaataccacattaagtgttgacggagcatcgcccacatacttttccacagcatcccaataatcagcctgacttgtgaactggtcacaggcgataactgaccatttttccatatctataccatcgtttggcaaaagaatatttgccggattgaaacaatttgacatatcaacaattctcctttaaatatacaaaatatataacaaaaatccgctatactctatagtataacggatttacttttatttgcatatattaaattccttttgttgttagaattcttccaactgcatcatctaatttttctgccggtatctcaccactgttaactgcagacagcactgcattatagctgctctcaaagcctgttgaaacataaagcatgctcattcctgccttaacagctgccacagccgcctcatcctgtgtacataccttattaagagatgcatctgataaatcatctgtaatcaaaaggccattaaagcccatggtagttctcatatagtttacggcacctgctgatgtagagcatggcgtggtttcctctcctgtcacactctggcaaatcacatttcccatcatgactgccggaacacctgcttcaattgccttctgatatggcacaaaatcagatgcctcaagatcttccagcttatctgtcatccagagcattcctgtcgctgaatctgtagtagcctttccttttccgggaaagctctttgctacagaattgattcctgcactattatagctgcttacctgtgctgcaacacagtcacctacagtcgctgactcgctgccaaatgcatatgtatcgttatctgcattatcaccatatgctatatccgctgtcggcccaaaattcatattaaggccattggtagccatatatgagcctatctttcctgcactgctgcccgctgcgtcagcatctccaagctgtgatggtgcctgctgtgcctcatatccattagctgaagcaagaggaagtctttctccaccttcttcatcaattgcaagaaacagattcacgcccagtcgctcctgcgaaaatgactgcagactgctcatcatctttgtaactgcggcctctcctgaaaaattttcctgtctgaaaacaaaaccaccaagaggatatgtaccaatagctgcctttgtcttgttaccggcctgagtgaactctgatacacctgtaatctcctcaggtctcgtaatgaatagctgagctaccttttcctctgttgtcatagaagacagcttcgtcttgacagaatctgacggagtaaatgccggtgctgtctgctgtccatcaacttgtacctgcttagttccatccgtctcctgagtaggattctgtgtctcctgctggctttctgttattttcttattcgacttattccccggcatcacaaaatgcactgctccaaataccagcacaactatcagtgcaattacttctattgtgatgaggtacttatctccattttgtctgaagttcatatttaatccccaaaatttgtgtttgttaaatcgttattaggtccgcttacttttcctgataatgcactgctgtattcgtttacagttgcactaggagtatagcctgtatcaccttcaaggaactgatgcactcctgtagccatgtctgcaagtgtagtcggcacctcaacccatgcaccatcgacctttccaccatagaacacctgtggatacgccgtcgaatcctctactgtatagtctgcaagatttttaaatactgaaagaatctcatcagtattatagttagtgttgacatgtccaatcaggtctgataccatcttaatctttgccgctgtattcatctgcttagctgattcaaaaaccttgaacagcactgttctctgtctttcagcacgcttatagtctcctccagctgtataacgtattctggaatacgcaactgcctgagttccatccagtgtatatgtgccggctgaatcaatatgggatgagcttgttccacgaatcttattgacctcatcaatatatccgtttatcacctttgcctcagatgcatcaatatcctgtacaatgcctcctacctcatctataatttcaccgactgtattgaaattgactgtaacataattctttatgtctaagtccagatttttgttaagtgtatctactgcaagctccggtccgccaaacgcatgtgcatgtgtcaccttctggtatccatgaccatcaatattcatcatacagtctctgaaaatagataccatgcggattttcttagcatcatgatcaaccctgacaatcataatggaatcggaacgtgttcctttatcaagctgatctgagcggctgtcaacaccaaatagtgcaaattcctctatgcctgatttgtctgtaatgttgtcatcctcagtctgagtatcggcttttgtcttaactgcctctgtacccggctttatgtctttggcttctttattcttaacattactgctgttaatctttacaagtattatcgctataatagcaataagtacaatcattactgccgtaataattatatttttcttttttttcatctgcactattctccgtcattcatatatgtctgtgcctgctaattttcgtcatcgtccctgccataataattgccataataattaccataatagtttccatagtaatgaccatacttagactcctcaaacctgcacttattgagcacagctccaagaatcttgacgcctgagtcctcaagtgtacgctttgtattgatgattgcacggctgcttgtagcattctgggcagcaactattactgctccgtctacattcttaccaactacggccgcatcaatcgcagctcctgtaggaggagtatcgacaagcacatagtcaaagttcttctctccaaactcgataagctctttaaactcctctgtctcaagaagctccgtaggatttggtacctcatgtcctgcaaaaagaatgaacacacccttgatgtttgtcgcatatatcactttgtccaaagatacctgacctgagagataatgtgagagtccgtatatctttccaccgctctccagcttcgctctgattcgtcctacaaggactgacttacgcatatcggtatctactacaaggactgacttcttagagtccgccatcgaacgagccagatccataactacggttgtctttccctcattaggcaagctgctggtaaagaggatggacttcacaccctttccactgaaactgatgcttgttttaagagctcgaagagactccttcattgtatagctctggtcttttatctgattaataactactgtttccattaaattgccctcttcttactcttgctatcgtctgatttagatgactgtttttttttgttttttcttctctttgactttgctccatcatactctgcctcatcaacaggaagtgatgcaagcaccttgaggcctgttctggcctccatatcatctgcattggaaattgtatcgtcaagcatgtatccaagtacaactatgccggcagcaagaaacagtccgagtacagcaccgataactgtattcttaaggatattattattcaccggtgtctttgaagcatatgctgtctggataatctttggctgtgactgatccatgttgtcagcgatatactgtgatgaaacttttgcaatctcatctgccactgtttttgaagcttctaaatcagtgtctgtaaccacaatcttgagcacacgtgtatctgtcggattctctattgaaaccctcttactgagctgctcgtatgtctcgtccatatccagattgtcaattacctgtgataaaactgtcctgcctgtgataacgtactcatagtcgtttgtcagactcgagcctacctgaatatcagcaagactggtgatagatgttgacttgctcagtacatacatctctgcagatgcctcatactccggtacaaaagtaatcttggagtataatccaaatactgctgcaagaagcaccattgatgccacaagtgccttccagtgcttcactaattcgtgaaacatcgctactaaatcgatttcaatttcctgatctcttattggttcgttgttttccattttcctaccctttacatattgtaacattatttttcggtttaatcctatgctatattactacacttcatttcttttgtctatttttagaagtcacaaaaaaagtattaagaatatgtcatattttgtaaataattatgccatataatagaaaagtgccgtttccggcacttttctttattgtattttcatttgctatattttatttgttcctgttctattgttgctgttctagttctgctgtggctgttctgatggttcagtcggtgccaccggctgtggctgtggttttggatttactgttacggttattgaactgcttgcgctattccagcctgccatttcacctgctatagctgtaatctgtacgctaccagccctgtggatagtcacatttccggcagcatccaccgatgcaatcgatgtatcacttgacttgtaagaaagccctgctccgtttgaagcacttgctcccagagaaaatggtgcatctccctctgttacagttttattaccgcaacctattgtcacagatggtgtctgatttggctgtggctttgcatttacagtgattgtaattgtcttgctgccggccttatagcttgtagtagcctcagacttgacagtgattgttgcagttccgacacctactatcgtcacattaccgttctcatccactctcactacaccctcattatcacttgagtatgtgagctttgcattatcctctgctgtcacaccgagattgaatgctccgtcaccctctgtcacattataagagccagctccgccaaaactctgcgctttgccggccaccttgtcaacaccaccatatacaattactttttcatctaatgtcacattctcatatagcttcttcgcagctgaataaggcatatttatgcagccatggctgccgctgtacatgtagatatttccaccgaaggtacttctccacgaagcatcatggaatccaattccaccattgaatggtataaagaaattaacccatgacttatatccgtctccccttaagtatctgtccttatctcttgagaagatagaatacactccggtaggtgttccatgaccttttgaaatacatcctgtaacacactgacttgatacaacaagctctccattcttgtatacatataccatctgattggtaagatccacttcacagtaattgccaccatatgtgacatattcacctgtttcttcttcctttgcctcactgtaaactgcttccactgttgcagactttttattgtttattgcctcagcaatcgcctcatacagcttgtttccatctacagtctgtcctgatgatgtaacaggcacatttattatacttccgcctgtagtcttaaactgacctgttttcttctttgacacatcatgcttttttgcaagctctgtacagtatgtagccatattctcaccatcaagtgaaactgacaatccgtcattgcccactataagccactgggctatctgatcctttcctacagcctctgtagctgcttcacctgttgccggtgtgaaattacatgtcaccgtcacatcaagatatgcattggcttcttttaatgccttctttaccagctcgctgtccgcaaccttttctccatcaacatatcctgttgcagatgtaagctctaccttatccttcagctcctttacagcgcttgtcagatttgtagctgcattgtcatatacaggtgcatctcccgatacaccgtcaacaccctcaaactgtcctgcctctgcattgtatgctattgtagcacgatatggcacaattgatcttatatcaaaggtctgtgtgtctgcctcagccttcttttgttcgtcatcatttgcctctgcatccgtatcactctgtgccgtagcatcagactgtgactgtgtttttgcagtgatataagagtctacaagagcagtctccagctcatcagacttatccattttaaaaagcttcacctgcttttccggtttcttatccttattggccgcatttatcagttcctgaagatctgctttgtcattgtacttgagtcccaaatccttagctgtcatatcaaatgatgcatcgtcaagcttcactgatatcttatacttgcctactgcagtctttatggctttctttgcctcgtcagcagtcattccacctacatcaactgatgcaagcttgtacttttcagggaatgtcttgtatgctttctttccacagcctgccattcccaatgccataagcacacaggccaaaactaccaagagttttatacttttcttcttcatctttgtcctctttatcttaattttatattattctcacagcaccatattttatcactttcttatatatgcctcaagtgagatttgtcacatattttccggttatttagacacattattcatcattatgataacaaaaaagcttcctaatgacgcacaatatgtaacaggcgtataaaatagttctgataaaccttatcgctcatatgcattttattcaacgcacaaaatactttataattcttatttacacatttatacatatctgtattctttttttcgatttgactgacaaacagcttcatcctttttctaagctgttttttatcagtgttcctaatcaggcaaagctgcaaatagtcgttgataaatttgcttgttttatcaaaccacagctgctttccgcctatactaaagtgctccgcatcccggcctgcctcaatcagcctcatgataaccttctcataatggtcaagcctcttcagtgagctttctatcgaaacgctctgatttacgtcaccgactctatactcataaagtgccttatcatatgcatagatactttcggcatatgccattgggattattgagaactcctgatcctcgtagaataccccctcagagagtgtcagtcctgtatttctataaaactgcgtattatatatcaccccatgcaggctcagcccccaccagaaatcatacagatgctcatccacatatcctgcattatatggtccaccattttttgttatatatttatcgtcgtatggatactcatcagtattttctctctgcagcacatatgatctatagctcatcagcactgcatctgcgaaattctcatgtttattttcattatctctaagataacagatagtttctttcaacacatcagtgtttacccagtcatcagcgtctactaccttaaaatagcttccttttattatttttacgccttcattaattgccgagccatgaccaccgttttctttattcagtatccggtacacgtcaggatatttatttacatatttttgtgcaatctccacactattatcggtagagccgtcatttacaacaacaatgtccagcatatttaaaagagagttatcatcaataataaatgatgataaccctttatccaaaaactttgccgcattatatgtcggtattattattgatagtatctttttattttctgtttccatatcctatctaattcctgtttctatatgttaatttccacttatatcgctgtctgtcaccatatttgacaatggtagtcagtattattttctgtatagtctgtctgctctgccaaccctttttgcaaactcaagcagctttgcaaattgattctcgtaaaagctgttgctcacatgcagcttattaaacatacgaaatactttatatttacgctgtactgcctcatacataagtgcacttttttgagcgagtttcatgttaaactgctctactatcgctctgccggattgtctgtcggtattttttatcaaagctatttgataatagcttgtgattatgcccgacgtctttctgataaagtgttcctttccaccttgtggcatttttgcaaagctcttctctgcctcaagtacattaaatataacctgctccagatccggaagacgcttcacctgactcgctgctgaaacactttgatttacatctccaactctgtatacatacaactcttcctgaataaatctgacagtttttgcatacgaaaacggaacggttgcatactcctggtcttcgtaaaatacatgctctgtgagcttatatccaagtgctttatagaaccctgtgttatatatcactccgtgaaatgatagtccatcaaatacatcatcccacatgtttactatatcctttaaattgtactctcgtgtaaaatcaggcacactcacatctgccggtctgtactcatcctttgatatgtcataatacctgaagctttgtatcaccgcatccgaatctacatgctcgagatattcaaccaggtgctttagcgcaagcgtatctacccagtcatccgcatcgaccacctttaaatactttcctctcacatgctccactcctgtgttgattgcagaaccgtgtccaccatttgttttatttactatgacaaaggtatccggataccagtccacaaatttctgcgccacttcaacacttctgtcaggtgtgccgtcatttacgactatcacctcaagcttatcgagtatagccttgtcaatatctatttcctcaaagcggccctccgttgccattttacagttgtgctgtgctgtctgtgcatctgtatccctgcataccagaaatgacgacagccccttattcagaaacttttctgcattatatgttggtattatgattgataatattttactcattaactgttctatccgtcctgattactattattaaaaagagtattgcatactcattaacgcctattcatgaaattaattaccacgcagtctgctatagacccatgctgccatcggaaatatcttaaaacctgtttttctaagcatccagacgctcttcctgctgcacgcctggtacactcccgggtgctcctcacgcagcatctcgtcaaacttcttcatctgctcaacgtttcttgtatcattgccctttgccagaaatatctggtactcatcatcgactgcctcggctatgccgcgctcaaggtactgcttcttgtaggtctgcagattgccgtgcacgttgttgtactcaaacagcgcatcaagcaccttaagatgctggtcatgacgcttgatcatcatctttatgtccacgctctgaccactccttccaagtctgtactgatacagcggcagaggtgaaaacgtgatgcttgtgcagtatggtatagggtagagtatatactcctgatcctcgtagaagcagtgctcatccacacgaatatcattcttctgcaatacatcagtacggatggtcatggaatgtatagtgatcagcgggtccatgactgcctcagcaaagccccactccctgttgtagtgataagagttggacactgcctttctgcgctttgtgaccttctttgtcctatcatccaccaggttgaagtcattggatatgacatccgagtgcgtgtgcttcaaaagctgtacaaattgtggcagaaggctcttgtccagccagtcatcaccatccaccaccttgaaatactttcctgttgcacgcggtatcgcatagttgattgtagatccatggcctccgttctccttggagagcaccttgaagctgtatggatatttctgctcgtaggtatgtgccaggctggctgtggaatctgtggaaccatcatccactatgagtatctccagacttctgagcacagacaaatctataaacgagtcaagacagttctttatatacttttcaacattgtaagccggaacgactatggttaaaagcttctccatatatgtttctccatgtatacctgtttccttgtgtactactctccgagtccatccttgatgtactgtataagatattcaagcgcctcactctcatcctcgccattgcagataagctctatctcatcgcctgactttatgcatgctccaagcactgaaagtacactctttgcattagctacatttttctcgtcatatataaatgttacctttgatttaaatttcattgcctctttgcagagattgccggccggacgtaaatgtaatccggtaggattcttgattattattttttgtgctaccacttttattacctcttttcggttatatatctatcaatgtgatgaactgtcagagccgttatttccggtgtttcctgacgatgtgctgcccgatgacgtaccagctgacgatgaaccacctgtgccggtgtcgcctgatgttgtaccgcctgttgttgagcccgaggctgttcctgtaccatcagttcccgttgtgccgcctccgtcacctttccttccgataactatctgaacctttatctcgccccatgtgtacttggtctcatccagatttggctttaccgtcactgtatgtgtacctgcatcaaggcctgtcacatcaattttacccttcagtgtagttcccgaaagcgtatctatatcagactgggtgccgcttactacgacactgctcttatctgttacaaatgtaagcgtatatccatcttccagtccgtcatatgtgatattggagctgttcagcgtcatggttgaagtcgcatttgtttcaacctttatatctatactgagctttgccttgtatgagttcactataaaaactccatccggcagatatcctgtcaggtcaacagatgtacttatatcgtctgttgcgcccgatatatcgattgggcccacatctatagatgtgatattgttcaatgcttctgcattacccttgagcattacagactcctctgatagttctactccgagcacgctctttcctcctgccggtgagcctgtcgtagtacacttgataggtacctccttggtacttaagacatcaactgtcactgctatagactgatactggctgtccacatcaagctttgatatatctatctcatcgccattatcatcaatcagagtgagatcaccgcgatcagttatctgattatctgatattatggtattgtcatcgacctttatatttacattagccgatgctatagttgaaacaactgactcaggacctccgatctttactacctttggatttgcctgtggcttgtttcccagtgctttcgcacctgagagacttccaatcactgatacctttacctcaaactgcttctgcatatatttttcaactgaaagcgggagcatatggtctccaccgttgaatgtaatcgaatgtctgtacttagtgcatccaatatctacctttacgcttgccttattcgtatcatccttatctactatgatatttgcaaggtcaacatttgcgtaaaaatcggaatcatcaagctcgttcagatagcttctcttacctgataccgaaaagctgatggtcttttccgaatccttgatggtaggccatagccccttgtcaacaaccgaatcgcgccctgtgacggtgactgttgtggtaaatgtctttgtcttgaccgggtcattgagattgtagaccacaagccagagtataaatgcaaatgctatcgcgagtattttaaagcctatattatttgtgaaggtttttagaagcttctttcccattcttaaacctccttttaattaattcaaacttacccggctccctatgtctgttctgcagaagcttaagctgtgtgcgtagatgatcggcatctatatcgtgctcaatctgccccttgtatgctgtagaaactgctcctgtctcctctgagactatgatggtaagcgaatcacttacctcactgactccgaccgctgcacggtgtctggttcccaaatccttcgagagtgccaggctgtctgatagcggaaggtaacatgtagctgacaccacacggttgccacgcacgataaccgctccgtcatgaagcggtgtatttttctcaaaaatattgatgaggagctgacttgtaagtatggcatccacatctattcctgttctgatatactctcccagatttatctcatcctccatgactattagtgctcctgtctttactctgcccatcgcaaagcatgcacgcaccagctcatcgattgtcttgtctgagaatttctcaatctcgcctctgccggtattgaaaaaatcacccaaaaaggtctttccaccaatattctccaaggcatttcgaagctcaggctgaaaaataacaacaagtgccacgagacctatattaaagagtttctcagcaagccacagtattgtatccatctggaacaatgctgcaacaagcacaaacaacagtatgataataaggcccttgaacagattccatgccctcgtggtctttatccacaaaagtatatgatagaagagcactgaaataataagtatctctataatgtctatcacaccgattttgatgcccggcacatttgtgaatgtaaggaactgatccttgaagcgtatcaatacaccactcacattatccatagcgccctcctttctcttatactatgtaactatttgtcatcctcaaatatattttcgtctatttcgagatcttttgcaatagcctctttgctgatattttcctgattatgtctcggaatcttctttccaaggcttcctgtattgccaaagtgctttacaaccttttcctccttggcaatcatcttctttggaactgccttgacgtaataataatattcatcatcctcaaactgtacgttttctgtacgtgcatagtcaagattcataaatataaactgtatgacaacacctgcaaaaatagcagctacagtgctgagcacaagccagattatcttctccggcagtccgagcaccagataagcaacaacaagtgcaaccaactgtatgagccctcctgctatggtagcaacagtccatgaattattgattttcaatcgtctgacctgatacaccaccagtgtggtgataacaaagattgccataactataaacatctctttgttgtcaagaagctgtcccattgtcacattgagctttgtagtgctctgcccctttttatctaccacctctgcaagcgctgatgcattctgtctgattccatcaaagaaatagtacagcagtgtgccacatattattgcaacaaccgaataagctcttcttaaaagacctgctgcaaccggcataacagatggtatgtgaagctgaaagcatataggtgtgagtatcacaagcatgccatccttcggtgcaaaacgaaaatagacaaaatacagtactaaaaaaagtacaaatgtgatagcacaaacctctatggacagcgcatacatatctaaaagtatcataatcgaagcaatccagagtattgcattcaccggaagcagtgcacacacaagcgctaaaagcagtgccacaagcatcgagctgattttcgccatatagccgatattcaaatctattgttataaatgcgataaatgcaacggcaaatctcacaaccggaagtataaagtgctcatactcaccgcaaaatttgactgccttatccttaatttccagtaacttgttcataaagcctccctaacgcttaatcttttcctcacgggaatatattctgcccactgccttcaggtgatctgcgtaattgcgcacttctcttctgccggccttatatcttgcagtatacaccacaattgtgacaaaaatgtaaaccgccataaatgcaatatacagtatgcctattgtgacacctattgccttaaaatcaagcttattgattctgtccaaaagctctgctgcattgacagcaacccacatcacaacaagccctgcaaatgcgaatgtacctgtaaagaagctttttaagctctctttccatatatagtcccatccgtagtagcttgcggactgtttctgcacacggctgtcatcgcttttgctgtcacaaagagcaatattaaacagttcccttactttttcttcgtttatcataaatcatcctcttacctgttatatctcatacggtttttgtcatcctgctgccacagcccttgcaattagatattctcatctgataaaaccctcctaacttccctgtcctatgcaaatacacagcacatatacacggccaggagatttctttgctatctcgtgcccaatcgactccgccgtactgcctgtagtatatatatcatctactattagtatatggtcatattgtacaatactatcggccacttgaaaagccccctcgagacaatttctgcgttcaacataccccattgtcttgagtggactggtatttttcactctgcgcacaagcccttttgccatccttatgcctgttttttcagacaatgcccttgcaaaacactctgcctgattgtagcctctctggcgcatttttttacggtgcatcggcaccggaataataacatctatcccacatctctgtatccagtccgaatatctttccactgctgtctgtgcaaaataagccgcatactcacgtctgtttgaatacttgaacctgtacatggtctgctttatgctgcccttgtatgcaaaaagtgccttgccctgcctgtagctgtcatcttcccgcatctgcctgtgatgctcgagtgcccgtgcgcagtcgtcacaatactctcttcgctcagacaaaaccggcttcccgcagcgcatacactgtggctgctcaaccggaaagagcttttcacagcatctgctgtgtatatatctttcaaccggaccaattataccatcacataccggacagcgaggtggaaataccagattgattacgcctctcccaatatcctttattttgttcactaatccccctgactgtaatatccccatttgtaacaatattaacaaaaaagcgacaatacattcctgcaatgcagggacatatcatcgccctcacggctgcctgttataaaacgtatattctagaattcttcatctctcttgcctgcaaggaactctacatactttcctgtaccgatagcaacacatgtcataggctgctctgcagtcattgtattaatgccggtcttttcctcgataagctcctcaagacctctgagcagtgaaccgcctcctgtaagcacgattcctctgtctgcgacatcggctgcaagctccggtggagtcttttcaagcactgagtgcactgcctcaactatctgaagagttgcctcacgaagtgcttcctctgtctcctctgagctgactgtaatagtccttggaagtcctgttacaaggtttcttcctcttacctcaattgtctccggctgtgcgagagggtagcatgtaccaatcttgattttgatatcctcagctgttctctctccgatgagaaggttatgcttcttcctcatgtatctaacaattgcctcatcaaaatcatctccggctatcttgatagatgtgctgactaccgaaccaccgagtgagataactgctatatctgatgtaccgcctccgatatctactatcatatttccgcatggctttgaaatatcaatacctgcaccgattgcagctgcgattggctcctcgataatcttaacatctctggctccagctgcaaatgtagcatcctcaacggccttcttctcaacctctgtaacaccacttggcacacatacgctcacgagcggctttctgaagctcttcttaccaagcgccttctggatgaagtgcttgatcatcttctctgtaactgtataatctgagataacaccctgacgcagcggtctgactgcaacgatattacccggtgtccttccgagcatgaggcgtgcttcctctccgattgccttaatcttgttggtgtccctgtcaaaggctactactgaaggctcctttaacacaacaccctttccttttatataaacaagtatacttgctgttcctaaatcgattccgatatctgatccgaccattttaatagcccctttcctgccatatctttaaatttacacatacactctcttattatatacaataaatcccatttttcaaactttttttttgaaaaaggtcatatttaataaaattttaaaatttatccttgtctttttccagatatggtttcaaaaaccgacctgtatatgactgttttacctcgcatatctcctcaggtgtaccctgcgctatgacggttccgccgccgtctccgccctcaggtcccatatctatgatatagtcagctgtctttatcacgtcgaggttgtgctcgataacaaccaccgtattgcctccgtctgagagcctgcgcagtatctccacaagcttgtgtacatctgcaaagtgcagtcctgtggtaggctcatcaagtatatatatggtctttccggtgctctttctgctaagctctgtggcaagcttgatacgctgtgcctcaccacccgaaagctctgtggacggctgtcccagcttcacgtaggatagtccgacatcatagaacgactggattttgttctggatctttggcacatttttgaaaaactcaagtgcctcctccactgtcatatcaagaacatcgtatatgctcttgcccttgtactttacatcgagtgtctccctgttatatcgtttgcctccacagacctcacacggcacatatacatcaggcaggaaatgcatctctatcttaaggattccatcaccgccacaggcctcacaccgaccgccctttacattgaaactgaaacggccctttttatagccctttgccttggcatcaggtgttgatgcaaacaggtctcttatcatgtcaaacacacctgtatatgtagcaggattagagcggggtgtacggcctatcggtgactggtcgatgtctatgaccttatcaagctgttcaagaccatctataccgtcgtggtcacctgcgatacacctggctctgtttaaggatttggccagatgcttgtagagtatctcattggtcaatgagctctttcccgagcccgacacgcctgtaacacaggtcattataccaagaggtatctgcacatcaatatttttcaggttattctccctggctcctcttatcgtgatatatccgcttggcttgcgcctctcctgtggcaccggtatctttattttaccgctcagatatgctcctgtgagtgattttttgcactttataatgtcctttaacgagcctgctgccactatctccccgccgtgcgagccggctcccggccctacatccacgatataatccgctgcacgcatggtatcctcatcatgctccacaactatgagcgtatttcccagattcttaagattcataagtgcaccaagcagcttgtcgttatccctctgatgcaatccgatacttggctcatcaagtatatatgccacacctacaagtcctgagcctatctgcgtggcaagcctgattcgctgggcttccccgcctgaaaggcttgccgtgccacgggtaagggtgaggtaatcaaggccgacctgctgcaaaaagccaactctcgcacggatttcctttagtatctgatctcctatatagtgctgctgctctgtaagctctatatcagcaaggaacttcacaagctccttcacagacatggaggttatctcatatatgttcttgtccgcaaccgtaacggcaagtgacgacggcttaagcctctgccccttacagctcgtacacggagtaatgcgcataaactgctcatactctgcctttgccgtatcagaaaaggtctccttgtatcggcgctcaacattgtccacaaggccgttccatacaaggtcatagacgccttcgcctctctgacccttgtatctgaccttgagcactctgccatctccaccgtaaaaaagcagttttttcatatctgcagataaatcatcaatcggtgtgtcgagaggaagcccatagccctcatgcagcgcacgaagtgtcgcataggtatagctctttgggtctgtacatgactgccagcccatcacctgtatggcaccctcagatatggaaagcgatgcatccggcaccataagctgcgggtcaaactccatcttgtagccgagtccgtagcaggtcggacatgctccgaacggattgttgaaggagaagcttctcggctcaacctcatctatgcttatgccacagtcagggcacgcaaaattctgggaaaaggtcatctgttcgccatccacaatatcaactatggcattgccatctgtcagttcaaatacattttcaagtgaatcagtaaggcgcttctctatgcccggctttacaaccaaacggtctacaacaatgtcaatattgtgctttatatttttctccattgggatatcctcggagagctcatacatgctgccatctacaatcacacgcacatatccgctctttttggctctctcgaacagcttctggtgctcacccttgcggcctctgaccaccggtgcaagaagctggatacgggtgcgctcaggcagagccataacagtatcaaccatctggtctatcgtctgctttgtaatggcgcgcccgcacttcggacagtgtggtattccaattcttgcataaagcagtctgaagtaatcatatatctctgtgaccgttccgacagttgaacgtgggttcttgttggtggatttctggtcaatggaaatggcaggcggaagtccctctatagactccacattcggcttctccatctgtcctaaaaactgacgtgcatacgatgaaagtgactccatgtacctgcgctgcccctcagcatatatggtatcaaatgccagtgatgacttgccggagcctgaaagccctgtaaaaacaacaaactcatctctcgggatgtcaagactgacgcactttagattgtgttcgctggcacctcgtattttgatgtattttctttctttttttgccataatttgtgttcctccaaattgcttccaaatgtcataagcttttatcgtatatccctcagtgtgtttttcagcataataagcttatccctgtactctgcagcagcctcgaaattgagctctgccgctgcttttttcatctttttctctatatctgcaatatgcttctcaagctcttttttgctcattgactccggatctttgtcaagagcattctcatcggccgctaccttctttgagatagctatgagatcacgcacggatttctgtatagtctgtggcgttatgccgtgagcctcattgtactcttcctgtacctttctacgacgctttgtctcgtcaattgcgacacgcatggagtctgtaatcttgtcagcatacatgataacatggccctcactgttacgtgcggcacgtcctatcgtctggataagtgaggtctctgagcgaaggaagccttccttatccgcatcgagtatggcaacaagtgtaatctccgggatatcaaggccctccctgagcagattgatgccaacgagcacgtcaaatacgtcaagacgcaggtcacgtattatctccgctctctcaagtgtatctatatctgaatgcagatactttaccctgatgccaagctctgccatatagtttgtgagatcctcagccatacgctttgtgagtgtggtgataagcaccttgtgatggtttgcagtctccttattgacctctgacacaaggtcatcaatctgtccctcaacagggcgcactgatatctcaggatccaaaagtcctgtcggtctgataatctgctccgcacgaagcaactcatgctcattctcatacttattcggagtggctgagacaaagagcatctggtctattttaccctcaaactcctcgaaatttagaggtctgttgtcaagggctgagggcagtct

SEQ ID NO: 114 - DNA, 28700 bp, unidentified
  source 1..28700: mol_type = unassigned DNA
tcatatgtgaaggagggcgacaccatactggtgaaggcatcgcacttcatggagtttcctaaggtggtagaggctctgagtaagtaaaatcaggtaaaatcaatctgatagaaattaattcgatatttaattattgcgaggaatggatattttccaagcctcataatattataaaagaaagagagaaaaataatggcacagaatccaatcgtaacaatcacaatggaaaacggcgatgtaatcaaggcggagctttatccggaaatcgcaccaaacacagtaaacaactttatcagcttaatcaatcacaacttctatgacggagtatgcttccaccgtgtaatcaagggcttcatgctccagggcggagatccggacggaaacggcacaggcggccctggctatgaaatcaagggcgagttcacacacaacggcttcaaaaatgacttaaagcacacagccggtgtactttcaatggcacgtaccatgatacctgattcagcaggcagccagttcttcatcatgcatcaggatgcaccacatctcgacggcgagtatgcagcattcggtaaggtaatcgagggcatggatgtggtaaacaagatcgcagaggtgcgcacagactacatggacaaaccacttgaggctcaggtcatgaagacagttacagttgagaccttcggagtggactatccggagccggagacagtttaatgataataattatcgatgaggcaagcgcaaaacttgcctctttttactatcatgacgagatattcaagctgcagtggagaaatgtggcaggcaaggcatctatgtcagaagagctgcaagaaaaactgtatggtgcactactgggaaaattgctggatgagttgcagaagaaactgccggatgagcagcagaataatttgtgtgtgtatgaaatagaaaataattcaggatatacagaatctgcagataacaccgcgaaagctaatacgggaaatctaagaataccgaaagctcccgccgactgcatctggatagtctcaagcaaacagcagaagcacatagccgactcactcggcatagcatcagtaggagaaccgcagtgcggcacgcgctatgcagtcgagagccttgcagagcttgatattgagtatctggagcgggtgcgcaggcggtataatcacatcccgtgggacatcggcgagacagacagatgtctgatacgtgagctgtccctgtcagaccttcctgcgctctatgagctctatgacaagcccggcatgaccgactttgtggaaccgctttacgactacgagacagagcttgaataccagaaagcatatatagagaacatgtatggcttttacgagtatggtatgtggcttgtattttccaaggaaacagggaagctgataggcagggcagggcttgagcatgatgaactgggctatatgatagcgccggaattatggaaccaaggctatgctacggaggtatgccgcttcatcatagactacgcgcgcgaaaacacagactttgaagagctttactgccggatagacgagagaaatacggcatcggtgcgccttgccaaaaagcttggatttacaaatagcgggcatatggatgatgatataaacgcttctatatatagaaaaaacataaaaaacaatgaaaaacattgaaaaatatgcaattaggcaataaaatataaacatagtttaacgatttggaggacgaaaaaatgaagaaatatgcatatggagtagatataggtggaacaactgtaaagatgggctttttcgagacaacaggaaagcttgtcgatacatgggagattcctacacgcacagagaattccggcgagctcatcctgcctgatatcgcagcatccatcaaggagaataacgagaagcatggtatcgagatgggtgacatcgagggtataggcatgggagtgccgggacctgtaaaggatgacggaacagtattaagatgtgtcaacctcggctggggcgtgttcaacgtggcacagtcactctcagtactgtgcggcggcatcaaggtaaaggccggaaacgatgccaacgtagctgcactcggtgagatgtggcagggtggcggaaagggtcatcaggatgtagtcatgatcacactcggcacaggtgtaggcggaggaatcatccgcgatggcagaatcgtagccggagtaaacggagcaggcggagagataggacatatgcctatggtagatgatgagtcagagtgctgtggctgcggcaagaagggctgcttagagcagtatgcatcagcaaacggtctcgtaagagtggcagagagatacattgcagcacacagggatgtggcaacaaagcttgatttaaatgcaggcttcacagccaaggatgtatgcgatgcggcaaaggcaggagatgcagcgggcattgcggcagtagagcagtctatgaagcttctcggcaaggcaatggcagcagtagcatgcgttatggaccctgaggtatttgttgtaggcggaggcctctcaaaggcaggcagcatcatcatcgatacagcagcaaagtactataaagagtatgctttccatgcaagccgcgagacagagatcaagcttgccacactcggcaactcagcaggcatgtatggcggagtaaagatggttatcggctaacaacatgagattgcaatttttaaagaaataaaatataatggctactaaagatacactacaatcgaggtgagactattggcagattactcaacagaagaattagaaaaaatagcggacaaatttcgctcagataccagcggtataaggggaacaaaggattttacgagcccagaggagctttatgatgagctgaaaaaggaaatcaaaaagtatcatccgtcggatgacacgagccttgtggacaaagcctacagggtagcttatgatgcccataagggtcaggcacgtaagtcaggagagccttatatcatacatccgctgtgtgttgccatagtactcgccgagctcgagctggataaggaaacaattgcagcaggactgctccatgatgtgctggaggacaccatcatgaccatggatgagatgcgtgcggagtttggagacgatgtcgcacatctggtggatggtgtcacgaagttaaagcacctgcatctgacagacagcaccaaggatccgaaggacaagaatgcggacaggcttgagatgcaggctgagaatctgcgtaagatgtttctcgccatggcaaaggatatcagggtcatcctcataaagctggcagacagactgcacaatatgcgtacactcaagtaccagtccaaggaggcacagcagcgtatcgccagagagacacaggatatctactgtcctatcgcacagcgacttggtatcagcaagataaagatagagctcgaggatctttgtatgaagtacctctatccggatgcatattacgatctggtagagaaggtagcactaagaaagacagagcgcgacacctacatccagggtctggtaaacgatgtcaagaagtatgtttcggatgccggcatcaaggcagagatatacggcagggcaaagcatttcttcagtatatataagaagatggtcaatcaggacaagactatagaccagatatatgacctctttgccatcaggattctggtggataccataccggactgctacgcagtgctaggtatcatacatgagaagtataagcctataccgggccgtttcaaggactatattgccatgccgaagcagaacatgtaccagtcgcttcacacgacactcataggcccgagcggacagccgtttgagatacagatacgtacctatgagatgcatcgtacagctgagtacggtatcgcagcgcactggaagtacaaggaagcaaacaacggcaatgccactaccaccactgtcacagaggaggagaagctcagctggctgcgccagatactcgagtggcagcaggacatgtcggataataaggagtttatgactttattaaagagtgatttaaatttattctccgacaatgtatttgcattcacaccgtccggcgatgtaaagaacctgccaaagggctccacacctatagactttgcctacagcatacactctgcggtcggcaacaagatggtcggtgccaaggtaaacggcaagctggtgccgatagactatgtcatcaaaaacggtgaccagatagagataatcacctcacagaactctaagggaccaagccgtgactggctcaaggtcgtaaagagcacacaggccaagaacaagatcaaccagtggttcagaagtgagctcaaggaggagaatatacagcacggcaaggatctgatagcagcctatgccaaggcaaagggcatcaactttgctgaaataaacaagcctgagtatcaggagaaaatacgccgcaaatacggcttccacgactggaactcatgccttgcaaccgtcggccacggcggactcaaggagagccagatagtcaacaggatgtacgacgagtacaagaaggatcatgtggtgccggtgacagatgcagatgtgcttggcagcatcgcagaaaagcagcaggcggcagcaggtatacagcccgagcacaagtcaaagagcggcattgtggtacacggactctatgatgtggctgtgcacttctcgaagtgttgcaatcctgttccgggagatgaaatagtgggctttgtcacaagaggccgaggcatctccatccacaggacagactgtgtgaatatcatcaatctgtccaagatggaaaaggacaggctcatagaagcagagtggcaggatacagccctcatggacaacggtgccgagtatcaggcagacctaaagatattctgtcatgacaggccgggactgctcgtagatatcacaaagatatttaccgagaaggaaatcaatatcagtggtatccagtccaagaccagcaagcagggcatcgctacaatcgaggtatttttcaatatcaaaggcagggaccagataaaggttctagtggagaagctcagacagatagaaagtgtaatagacgtagagaggaccaccggctaaatcccggtggttcttgcgtgaagcataacatataacagacaaggagtacactcatatggtaaatatgaagatagaccacttcgtagtgggaccggtgcagaccaactgctactttgtcaccaatataaagacaaaggaaatgataataatagacccgggcgcgtgtgcggatcagctcgccaaaaaggtggatgagtcaggcgcaaagccagtagcaatactgcttacacacggacactttgaccatgccacggatgcaaagcctctcgcagaccgctacggcatcaaaatatatatccatgaggcagacaaagccacactcgatgacccgcagcttaatgtcagctatatgatgggtcagtcaaaaacattttatgcagatgtatttttgaaggataagcaggaaattgacattgcgggctttcacatagtagtgcttcacacaccggggcatacaccgggcggctgctgctattatttcccgtatgaggacgtgatctttacaggagactcgctgttttgcggctcaatcggacgtacggatttcaagggtggcagcatgtcagacctcgtgcgcacagtgaaggaaaaaatcatgacactgcctgagcatacagaggtgtacccgggccacaacgacacaacaaccatagaaaacgagaggatgtataacccttacttatgatagtagtagtatttaataaaccggattttgaatatgatgtgcactcactgctcaaggagttcttcccgcaggaagatgtgcagatgtactatagctgcccacctgatgaggtggaggggaaaaatctagcctgcacacaccacgagatgacagatgatggcgtaaaggaatttgcggatgcctcacaggtatttaagatagactatgtgggcgatgaaattgcagtggagtggacgctgaatagagacggaaaaagaatctgcacaaaaatatccgtagacagtgcagaccgcaaggaaactaaaaatcgccttaagctcgccctgtattccatgatagaaaagggcacaggaaagagtcttccgtggggcacactctcaggcatcagaccgaccaagatagccatgaaatgcatagaggacggcatgagcgataaggaaacatacgactatctgaagaaaacctacctcgcaagcgatgagaaaatcgacctctcaataggcatagcaaagcgcgagaaggcactgctcgatagggtggactatgacaacggctatagcctgtacataggcatacccttctgcccgagcacctgtgcatactgctcgtttacctcatacccgctgggggtgtggaaaaaccgcgtggacgattacctcgacgcactcgagaaggagatagactacacggcgcagaaattctaccacaaaaagctaaactccatctacataggaggcggcacaccgaccacactaagccctgcccagcttgacaggcttatcagaaaaatcaaatgcagctttgatttaaaggactgcctggaatttaccgtggaggcaggcagaccggattccatcacgagagaaaagcttatggcactaaagaaaaacggcatcagccgtatatcagtaaatccacagaccatgaagcagcagacacttgatataataggaagacaccacacagtagacgatacgatacaaagcttcaagctcgcgcgtgagctgggctttaacaacataaacatggatctcatcatgggacttcctgaggagacactcgatgatgtaaggcacacaatggagctggtgaaggagctggcgcctgacaacgtcactatccactcactcgcagtaaagcgagctgcaagactcaccatcttcaaggaccgctacagagatatgcagatggtcaacacccaggagcatatggatctctgcgcagcctactgtaagcagatggggcttgagccatactacctctacaggcagaagggcatggctggcaatatggagaacgtgggctatgcggcaaagggcaaggccggcgtatacaacatattgataatggaggaaaagcaaacgattgtggcgtgcggagccggagcaagcaccaagcgcgtctggccggtaccgaatcccgatggcactcaccgaattgacagatgcgagaatgtcaaggatgtagggcagtatatcgcaaggattgatgagatgatagagaggaagcagaggctgtttgagggaaaataagcagtatgatatataataatgtataatattggtgctgtaataccatagtgattagcgaatgtgtcaaaaattataaagaaaacctaatattcattgacatagaattaaaaatgagtgaaaataaattactgaaaaaccctgattagatacagaaaaagatacaaataaccgaataaaacaaaacaggctaaaataattcgagggaggacaaaggtacctccccccgtagtaggtatagagggaaataaaagataccacaaggagaatttggaaagaatgtacagaaagaaaggcagaggatgggcaaagcatatagattttatgctttatgtagcaagactagcgctcaagagcttcatttcttcaatatactagtgggagatatgagccttgtgggggagtgggatataatagggacaaccagagaaaactccagtatttatgcggcatgtgtggcttaaacgttttatgataattcgatttttcattgctgcagcagggtcacattatagcggttcatagatattggatggctctttggatgctcagtttgacccaatcatagagcaataaaaatcgaaaaggagaaaacttgagcctgttaatctgaaaagaatgacgggctaagggacgttaggttgccgatatgaataatgaaaaactaaaaaattagaatcccccagagtgtgtatgtgtgtgggggggggtaaagcgaggtatgaaaaatgaagcagatgcggatcgctgagtgcaaatgcaattccctatccccttatagtgggaaagaaacaaacggaaaaattgaatatggcaagaatctgatgaaacatcggaaaatctatctggcagtttctataggctgtctgcttatggctgctatctattttcaaatagaatcacatttcgtaattaatacaaatccatttttttattgtgctttgcctgccctgataattgggttgtgtttcgggcatagattgtttcttagtagtattgaatgtaatatacaaagttctgtgaaggacttcgtattttcttataaaaagtctttgttcgttggtaagtcagaggattgtagcagttagttgaaaacgaacgtaatgggatctgaaaaatgagtaaaggggaaagaaagtatgtatagaaaagattctacaggatggataaaacatgtggattttatcatcttggacttaatctgcttgcaggtggcgttcgttttggcgtatgcgttaagcggatatggagctaatccataccagctaattctttacagaaatatggctgtctttatggaagtagcagatttggtagtgctgtttgcaatgggaacattgaaaaacgttttgaaaagaggatactataaagattttgttgtaacagcacagcatggagtaattcttggagcatgtttattgctttatttgtttatgcttcaggaaggacagcaatattccagacttgcattggtactgaatatcgttatctatattctacttacttatctggtacgagagctgtggaaacatttgctcagaaagaaaatggaagatggtgaaaatcgttccttgcttcttgttgtttcagcagatgtagtgagtgcagtagtagagagtatgaaagagcataattatgcccggtataagattgctggaattgctgttatagataaggaaatgacaggaaagtatgttaatggtgtgaaagtagtggcaaatatggaaaatgctgccgaatatgtctgcaaagaatggattgatgaagttctgattgtgacatccggtgtagttccatatcccaaagaactgattgagcagtttacggaaaccggagtaacagtacatctaaatcttgcaaaggtacaaagcgtgccggggaaaaaacagtttgtagaaaaagtcggagattatacagtactgactaccagtattaactatgcatctacaagagatctgatgctgaaacgtctgatggatattgccggaggtttggtaggatgcttgattaccggaatattgtttatatttgttgctccagcaatttacatagcatcaccgggaccgattttctttgcacaggaacgtgtaggaaagaatggaaagagattcaaaatgtataagttccgaagcatgtatatggatgcagaagaacgtaaggctgaattgatgaaagataacaaattgggtgatgaaaagatgttcaaattggattttgacccacgagttatcggaaataagattcttccagatggaacacataagactggtatcggggattttatcagacgaacaagcattgacgaatttccgcagttttttaacgtgttgaaaggtgatatgtcaataattggaaccaggccacctttgatttcggaaacgaatttttatgagctgcaccatcgtgcaagactggcaattaagccaggaataaccggtatgtggcaggtcagcggacgtagcgacattactgattttgaagaggtagttcgtcttgacaaggagtatatcacaaattggaacattgggctagatataaaaatattgtttaaaacagtaatggtagttcttagaaaagatggatctatgtgatgaaatgattgtggcttgatttctgtaaaaagaatttaagccacagaaagtaataatagataagttataaatataataagaggaagttatgaataaaaggaaaaataatacttctccacttaaaattgcagttcttggacataagacaattccgagtcgccaaggtggaattgaaattgtcgttgaagaattaacggttcgcatggcaaaactaggacataagataacagtatataaccgtaatggacatcatgtaagtggtaaagaatttgatgagaagaaattaaaagaatataaaggtatccgaatgaaatatgtaccaacgatagataaaaaaggactagcagcgatgagtgcttcattttttgcagcggtagcagcagcgtttggaaaatatgatgtggtacattttcatgcagaaggaccatgtgcaatgttatggttgccaaaattatttggaaaacgttgtatcgctacggttcatggacttgatcatcaaagagcaaaatggggcaagttagccagcacatatattatgcttggcgaaaaatgtgctgttaaatttgcagatgaaattattgttctcagtgagggagtacaaaattattttaaagagacttatggacgtgatacaaagtttatccctaatggtgtgaatcgtccagttattagaaaggcagaacttattgacaagaaatttggtttaaagaaagatgattatattttatttttaggacgacttgttccggaaaaaggaattacttatctgatagaaagctttaagaacgtaaaaacagataagaagttagtcattgcaggaggcagttcggatactgatgaatttgctaaccagttaaaagaaatggcaaaagacgatgacagaattatttttaccggatttgttcagggacagttgttagatgaactatacagcaatgcttatatttatagtttaccaagcgatttagagggaatgccattaagtcttttagaagcaatgagttatggaaattgttgtttggtatctgacatagatgaatgtgcttctgtagtggaagataaggcaatcatatttaaaaaaagtaatgtagcagatttgcagagtaagcttcaagaagcatgtgaggatgcacaacaggtacagaaatataaagatgaagcagcaggttatatttgtggaaaatataattgggatgatgttgtggagagaacattagaattgtataggagataaaatgagcaaagaatttattgaattgaaaaacaagacgatttttattacaggtgtagctggatttattggatcaaacttggctgaaaggttattaaaagaaatagaaggaataaaaatagttggactcgataatatgaatgattattatgatgttcgtttaaaagaatatagattagaaaaactttcatctagtaagacattttcctttgtaaaaggaaatttggcagataaggaacttattaattcgatttttgagaagtatactcctcaagtggttgtgaatttaggggcacaggcaggtgtgagatattctattacaaatccagacgcatatatagaaggtaatttgattgggttttacaacatattagagggatgtagacattattcagtagaacatttggtatatgcatcaagttcttctgtatatggaagtaacaagaaagttccatacagtacagaagataaagtagacaatcctgtatcgttatatgctgctacgaaaaaaagtaatgaattaatggctcacgcatattcaaagctttataatattccatcaactggtttgcgtttctttactgtttatggaccggcaggaagacccgatatggcatactttggattcacaaataaattattaaatggagaaactattaaaatttttaattatggaaattgtaaaagagattttacttacgttgatgatattgtggaaggcgttgtacgggtaatgcagggggcaccagagaaaaagaacggagaagatggtttgccgattccgccatatgctgtttacaatattggaaataatcatccagagaacttattagattttgtacaaattcttcaggaagaattaattagagcaaaagtcttaccagaagattatgattttgaagcacataaagaacttgttccgatgcagccgggagacgttcctgtgacatatgctgatacgcaagcattggaaagagactatggttttaaaccatcgacaactttacgtgaaggattacgcaagtttgcagaatggtacaaagagttttatatgtaaatatattttaagaataggaagaagagagaaaaaatgagagattttaattcattgaaaattgctgtggcagggacaggatatgttggattatctattgctactttattgagtcagcatcatcaggtgacagcagtagatattattccagaaaaggtagagttaattaacaataagaaatctccaattcaggatgattatattgaaaaatatttagaagaaaaaaatttgaatttaactgctacattggatgcagaagaagcttataaggatgcagattttgttgttattgcagctccaacaaactatgatagcaaaaagaatttttttgatacttctgcagtagaagcagttataaaattagtcattgaatataatccggaagcgattatggttattaaatcgactattcctgttggatatacaacaagtattagagaaaaatttcattgtgataatattatttttagtccggaatttttaagagaaagtaaggcgttatacgataatttgtatccaagccgaattattgttggaacagatattaataatgcacgtttagtaaaagctgcacatacgtttgcacagctcttacaggaaggtgctattaaagaagatattgatactttatttatgggctttacagaggcagaagcagtcaaattgtttgcaaatacatatttggcattacgagtttcttatttcaatgagttagatacttatgccgaaatgaaaggcctgaatacacagcagattattaatggagtatgtctcgatcctcgtattggaacacattataataatccatcttttggatatggcggatactgtttaccaaaagatacaaagcagctgcttgctaactacgcagatgttcctgaaaatcttattgaagcaatcgttgagtctaatagaacgagaaaagattttattgctgatcgagtcttggaaattgctggagcatatgaagcaaatgatgactgggatgaaagtaaagaaaaagatgttgtggtaggtgtatatcgtcttactatgaagagtaatagtgataatttccgtcagagttctattcagggagtcatgaagagaattaaggcaaaaggctctacagtcattatttatgagcctacattgaaagacggtgaaactttctttggcagcaaagtggttaatgatttagatgagtttaagaggcagagtcaggcaattattgccaatcgttacgatagttgtttggatgatgtaaaagacaaagtttatacaagggatatttttcagagagattaataaactaaaaatagaaaacggtgaaattagtgaaaaaattagttattttgtttaaattattacttttgacagttttaaagaaaaaccatgctaaagctgaagtgattagaaaatctaatatctttaaagaatatggtcggggggggtattggcatccatgttggattcctacccatccggatctaattagtataggaaataatgtcactgtagcggcagatgttagaatctatgaacatgatttagtagctagaatgtggaatagagattgtaattacactggtccaatgattgattattatactggcccggtagtaataaaagataatgctgtaattggaggaaggagtattattttatataatgtcactattggaaaaaatgctttagtagcagctggcggagttgtaactaaagatgtacctgattttgcgattgtgggtggaaatccggcaaaaataattggagatacaagagatctttataaaaagcgattatccatcacagaggggaataaaaaagagtaggtttattgtttattaaatatttgtgtataaaaaatagtaaataatgctatttataaagataaggagaaaacgttgagaatacttatagtaaattatagatactttatttctgggggcccagaaaagtatatgtttaatattaaaaagatgcttgaagataatgggcatgaggttatacctttttccatacattccaataaaaatgttgcaacagaatattcaaaatactttgtagaaccaattggtggacgagatgcaacatattttgatgaagtgaaaaagacacctaaatcaatttggcagttacttacgcgaagtatttattctcgtgaagtagaaaaagcaataaaaaaagaaataaaggatgtaaagccagatttggtatatattattcattttgttaataaattgtctccgagtgtaattacaggtgcaagtaaaatgggaatcccggttgtgttaagattatcagattatttcttgttatgtccaagatttgattttatgtatgaaaagaaagtctgtgaagaatgtttatcaaagggatataggagttgtattaaaaagagatgtgtgaaaggatcactatttgcatctgtcgtaagagtgttttctatgaaatttcataaaatgataaatgtatataaaaatgtatatgcatttataacaccatcagaatttttgaagaaaaaattggcattaaatggctttgatgaaaaaagaattcattgtattcctacttttacagcaagtaaaacaacaataggggaaccgcagataggatcgtatggattatattttggacgtgttactgaagaaaagggagttgaaactgttataaaagcgtatgaaaaattgcctgagtatacagttaaaattatgggagacgatacaacagatgaggcaaagcgtctgaaaaaatatgtaaaggatcataaaatgaagaatgttgaattccttgggtttaagagtggagaggaactagaggatattataaaaggagctagatttacattgattccttcaatttggtatgataacctacctaatactgctttagagtcgtttcaatattcaaagccggttatcgctagcaatataggaagtcttccagaattggttagtgatggggaaaacggatatttatttgaaccatcaaatgttgaggatcttattaaaaaaattaagatgctagatgatgatattttggttaaaaagatgggacaagctagtagaaaaaggcttgaaaacagattcgcaccgcaatcacattatgaagctttgatgaaaatttttaatgaggctgtcaaaaatagaaaataaaggggtaattaataaagatgaaaaagaatactgaaaaaaaattaaatggaacagtaattgttacatatcgttgtaatgccagatgttcaatgtgcaatcgttataaagcaccatctaagccagaagaagaaatcagtttggacacaataaaaaaattgccaaagatgtattttacaaatattactggtggtgaaccttttattagaactgatttgaaagacattgtacgtgagttatataagaaatccgatcgtattgttatttcgactaatggattttttacagatcgtattgtggacctttgtaaagagttccctaatattggcatacgtatttccattgaaggacttgaggagacaaataacgaaatacgaggccttcagaatggttatcagcgtggatatggtacgttaaaaaaacttagagaaatgggaatgaaagatgttggatttggtatgactgtacaggataaaaacgcaccagaccttgtaccattataccaaattagtaatgaaatggggatggaatttgcaacggcttctttacataatagtttctattttgtagaagcaaaaaatattattcatgatcgtccgatggttgcaaagaattttgaaaagttagttaatgagttattacgtagtaatagtcctaaaaaatggttcagagcatattttaatcatggattaattaattatatttatgggcaaaagaggcttcttccatgtgacatgagttttgatacatttttcattgatccatatggtgatgttatgccttgcaatggaactaaggataaagaagttatgggaaatttgaataatcaatcttgggatgaactgtggaatagttctcaggcagaagaggtgcgaaaaaaagttcgttgttgtgatcgagattgctggatgataggctctgtttctccggctatgcataaatatatttggaaaccagcaacatgggttttagtgcataaatttaaagctttatttactaaacaaccatacagtatgtatgaaaacaaaatttgctgtgattatcgtgatggaaaagttacgaaagaagaacttgataaatgtagtacatgtgacataaattgtgtaattgataatggcttaagtgaggcttcaaaagagcagttaaaacataaatctggagaggaaattgtggacgaggatattgcaaatcagcttggaaataaataaaaaacatgattaatatagcataaaaatctcggaggttatctaaaagtgctgaaaataaatttaaaaaaattttttatgggaatagcatataattgtttgtttttttccatcatacttaaaatgctatatcaaacaaaccaaaatggcactataagacttttggggtttggtatgcaggcaattgttttgttatgctatttttttgaggaattgataacgctaaagaggaaatcaataaacagtattactttgattttaggaattttaattgtatatcaatgtgtaattactatattaaataattcaatttacttaccctatacgccaattgatatatttatttggccgttaagtgttattgtgtattatgactttacttgtcataatgaaatgaacaaaaatattgaaaaaaagacatttatatattacttaataatgtgtcttatctcagtatcacttataagaatacatttagctggaaatggaaacatagggcaggtagtatttttaacatattattgcttaactgcattaccgttaattatcatttttcttaaagaaaagaatttgcgaaatttatgtatgttattatgtattgctatatctgttgcatcaacgaaaagaactggaacgatagcattaattttaggaatattggtgatgttagtattagatgcacatatacaaggttcattaagagaaaaatggaaaaaatatatgtatctttttattgctatttgtataggtagtggagcagtattgtatctcgagaatagatcgggacttgagatttttgaccgtttttcaaaattaagtacagatggaggaagcggtcgagatattatttgggcgattactcttcaagcgttcaagacgtcaaatataagggaaaaaatttttggacatggtttccaaagtgtttattatcgccttaaaccaggtggattttctcgcttttcacataatagttatatagagtacctatatgattatgggataataggattatcattattagtattatttgttttatctttaattataatagaaataaaatttatacgagaaaaaaataaatatgctccagttatggggatgttattgattattactattttcctaagtgcgtttagttatttttttgaagaatcaaatattatacagccaatagctgttgcatatggaattattttaggacaagctcataaggaaaggaagaggtatgaaaattagtataattgtacctgtatataatgcggaaaggtatttagataaattagtacaatctgttttgagtcaaacatatgaggattatgaattaatattagtcgacgatagttcaaaagataatagttattcattgatgaaaaaatatcaagaaatggatagtagaatcaaagcgtatacgaaagaaaatactggacctggtttaacaagaaaatttggatttgaaaaatcatcgggagatttgtttttctttgtagatagtgatgattggattacgacttctgatgtacttagagaaatcaatgatctgtttgaaaaaaatgaaaaaatagatgttctcttttttgatagggaggatattattggtgatacgaaagatattatttctgggttcaatgaaactagggaaggattgcacaatattgatgaattaaatgaagttgtcagacctggtttaggtgcaaagatttttagaaaaagtatattaacagaagatatgttttatgagtcaactatatttgaagatttatatactacatatatctatctggataaatgcagtaattttttctattcagctaaatgttattatactatatatcatgatattgattcatcgtcattgtcctcaaaacctactgcagaatcttttgcaaaatcattagagatgattttgatggtacatgaaaaattggagaaaagttcactaagatatagtttggaattatggatggcacttctctttactacatattggaaagcacgagtgaaaaatgatacttcttataattcaaaaatgataaatgatagtattcaaaaaattgctggaattttgaaagaaaataaaattgttataaaaccaagtgggaaaaaacatattaaggtattaatatataagatgcttttaatgattagcaaaaaaaaatgtgaataatagtccccaaattatatattattacatttttgctatgaggaacttatatagaggattaattatgaaaaataataaaaaaacagcagcgattgtttcactgtatggtaattcaaattttgggaataaactacaaaattatgcggtgcaagagattctgaaaaaagaaggattaaatacagttaatattgtaaatattccctgtttgaataacaaaaaggtgaatcatattgaagtattaaagttatacataaaaggttggttccgttatattttgaaaggcgacaaaataaaggactgtgttgatcccaaagaccctaaagaaagaaagaaaaactttttggaatttaacaaaaaaattgtaaactcaaaacattttttctctttttcaagattgcaagaatttgataaatatgattactattttgtcggttcagatcagatatggaatccgatttatggcgggctgagtgatttggatttacttacttttactcagaaaaaaaagattgcaataagtgcatcatttggaatagaagagataccgttagattataaaggaagagtggaacagtatatttcaaaatttgatgcaatatcagtaagagaggaagctgcaaaaaatataatagaaaaaataacaaaccgtcaggacgtagaagtactgattgatccaacaatgatgttacaaaaagaagaatgggatcgaattgtaaaaaaaccgaaggaaatacttccggataaatatattgtttgctattttttgggaactgaaacaaaggaatatataagtgctatacataaaatcgcagcagaaaaagattgtgaaattattgatttatctaatttagaaagtgaattttattgttgtggaccgtctgagtttgtatatcttataaaaacagctgaatttgtatgtacagattcatttcatgcgtcggttttctcaattttatataatagaccatttctagtatttgatagaaatggaaaacacacaggaatgggaagtagaataaacactttattaaaaacatttcatttggaaaaactgcattatactggaaattttcaagatgtcaagtttgaatatgatttttcaataatcaatcagtcattaaaaaaggaaagggaaaaggcatacagatttattcaccatgcattagatgaataatgatagtacagaaaggataatgcgaggctaaataaatgagtgagaataattataaaaaattagtatataataccgcaatttttgcggtggggaattttggaagcaaaatattaacctttttgattgttccattatatacatatgtgttgacaacagcagaatatggaacaattgatttgtttataacgtcattaggtatggtaattccattttcaactatgatggttaatgaagcacttatacgttttgttcttggaaaagacttaacgccaaaagaggcagcaagtaattgttttgcagtttttttatttggaactgtaatatctatagcatttactccactgtataaaatgattttcaaatttgatgaatatatttggctatttgttgttcttctagttgttcgaacatttaatcaaatatatagtgagtattttcgagcaataaatcagaatgtaaaatttacaatttttggcttaattacaacagctacgacattgggattcaatgtactttttcttttagtttttaagtggggaatggctggatatttatatgcgacgttgctggcagcagttattggcacaatatatattcttgtattcagtgatttttttaaagttgtttcctttaaatgtattgataaaaaaatactgaaaatgattttgaagtatagtattccgttagttcctaacagtttaatgtggtggattatggcggctggtgataaatatattatcaattactttttgggtgatagtgcaaatggaatatattcacttgctttaaaaatacctcagatcataaatatggtatattctttgtttgttcaggcttggcaaatgtctgctattgaggttgaatcaagtgaagataaaaaaggattttatcaaaatgtttttaatgttacgtcatttggaatggtatttattacaattggaatagttatgcttattaagccggtctatgtaggcgttatgagcaaggagtttgccatagcatgggaatatgtacccttattatcagtgtcaacaattattagttgctatgcatctttttttagtgttgtgtatacggtaggagctaaaacaaataaagtttttattacaactgcattaggtgctgcgaccaatcttttattcaattttattttagtcaagccgcttggaatgcagggaattgcgattggaacttgtttaggatattttgctgtgcttttgataagggcacgtgatatgaaaatagaaatgaacatagggataagtttcaagcgtaatattttttcgtttgtattgctaattatacattcacttattcttatttcatttggtgaaatacaggcatttttatttggaatagtttctttgatgataacttcgtttatgtatcgtgaggaaatgaaagcgataattcataaatttgccaaaagaaagtaaatgaaaggaaaaaacatatgaaattatataaaaaagtctttgtaaatttagctaaagtcttgccggattcaatttatttaagaatggttttttttagtaaattgaagagaaagctgaatttgagtaatccaaaatcttataatgaaaaacttaattggttgaaaataaatgaccgaaaagaacactaccaaataatggtagataaatatgaggcaaagaaatatgttgcagataaaattggtgaacaatatgttatacctacttatggtgcgtgggatcgttttgaagatatagatttttcaaaattgccatctaattttgttttaaaaacaacacatgattctggtggagtagtacttataaatgataaaaacaatatggacatagatagaacaaaagatgtattggaaaagagtttaaaaaataattactattatctatgccgagaatggccatataaaaatttgagacatcggattatagcagaaaaaatgataacgaataccgtaccaaatgattataaattttttatgtttaatggaaaaatggatagcgtgatggtatgtacgaatagggcatctggacatccaacttttcgtttttatgataaagagtggaatcgcttattatatcaaaaaccggaattagaacccgaatcaaatgtggaaagaccggaaaactatgaaaaaatgataaggattgccgaacaactctcagagaatttggttcatatgagagtagatttatataatatagatgggcaaatttattttggagaactaaccttttttgatcaaggcggttttgatacggatattacgcttgagacagatttgaaatggggagaactcatggatttggagaagatcaaataaggcgtatttgggaaaatttacagtttcgagggagattagaatatggcgataaacgaaaaaaaagcgtatgcggcatattatgataatgacataaggatgaaaagctcttcaggtgcaattttttctttattggcaaatgaggttcttgaaaaaaaaggaattgtttatggagttgcaatgaatgcatcttgcacagaagctgagtatattggagttacagaaaagcaagatttagagaaacttctaggatctaaatatttacaagctaaaattaaaaatatttttaagaatgttcgtgaaaatctagtgttaaataaattggttttatttactggaacaggatgtcaaattaatggattaaagaaatttcttcagaaagattataaaaatcttatttgtgttgatattatttgccatggggttccatcacctgcattgtggaaagaatatgtaggttatatggaaaataaaatgcaaggcaagatggagaaagtcaactttagatgtaaagatcaaggatgggaaaactttggaatgaaagagtatggttcatctaaagaagtttacatctctaaaagcaaagacccgtatatgcaaatgtttttaagtgatttctgccttagaccatcctgctatgaatgcaaagctaagacattaagattatcagatttaacgataggagatttctgggggattgacactattgctccagaaatgaatgatagtaaaggaacatctttggtaattgttcgaacgaatcaaggagaaaaaatatttaacaggctcatatctaagtcatctgtaaaagttatggaagtagaatatgacgacgctacaaaagaaaatccagcagagttccgttctgtttatagaccaaaagagagagagactttttttatagatatgaagaaaatggattttgaagagttaagaaaaagttatttatctttgccaataaaacaaagaataaaaaatgctattaagaaagtattaaaaccggtgcttaaaagagcaagacgggggggtataaagtcaaatcttgattatggtatgttaatgcagttcaatatgggagagaagaatgaataaaaaaatacaaataatgcgagggttatcaattattgcagtaattgttatccatacatataacactaatacatatgcttggggggggtacggagtaataattcgaccatttgttaattttgcagtaggtatgtttatatttctttccggttatttaaccaaagaaaacgaaaatggagtatatagagatataatatatcgcagaattaaaaaaataattattccttatataatttggtcatttatatttgcggtcgtgaatcggagaataaatacatttataccggatgtttttatgtcaaaatgtaatggaatatattattttattctggtttatatacagatggtactattaataccagttacgtttaaacttttgcggagtagattttctaaattagggtggtttgtaacacccgttagcatttttctaattcgttatataagcttgtggtttaatcttgaattaggctttccatttcagggcgaattatttgttttttggtttggattttattacttaggggtaagtttaaaaaacgggtatattaatttacaattatctaaaaaatgtttaactaacttgtgtctgttctcattagtaattcaaggtgttgaaggatttatttggtattggatgggaaactttgatatggcgacaacacaattaaaaatgagttccattataacaacggggcttttttgtataagagcatacatatatatagaagctggtgatttaaatttgaatgagcaaccagttattttgaaaaaatttttaaaagttttgggtgataattcttttggaatatatctgtgtcatatgctgataattagaatcttaaataagttagttccaatggcaaatgtatttccgataaatgcaatatttgtaatcatgatttctacagtgtgcgttatgatggcacatagaatactaggaaaatatgcttatgtaataggcgtataaagggaggaaaagatggacaggaaaatacctgtactatttaaagaaaaaaaagaatgttgtgggtgtaccgcatgctatgcaatttgttctcaaatggcaatttcaatgattgaagatgaagaaggatttgaatatcctcaaatagacgaaaagaagtgtattaaatgctatcaatgtctgaaggtatgtccatttaaagaaacataataaaataagggaaacaataaagtaaaagctaagataataattttgctataaaagatttattataaggcaagattacgagtaaaagggagtaaataattatgtgtgggattgtaggatttacaggtaaagaacaggcagcacctattttattagagggcttgtctaagttagaatatcgtggttatgactctgcaggaattgcagttcgtgatggagatagggatgttgatattgtaaaagcaaagggacgacttaaaattcttgctgaaaaaaccaatgatgggaaggcagtaattggttcatgtggaattggtcacaccagatgggcaactcatggagaaccatcggaaaataatgctcatcctcatagaagtgatgatggaaatattgtagcagtacataatggcattattgaaaattatcaggaattaaaagaaaagcttgtgagaaaagggtatacattttattccgatacagatacagaagttgcagttaaacttattgattattattatacaaaatatgaaggaacaccagtagatgcaattaatcatgctatggttcgtattcgtggctcttatgctttggcagtaatgtttaatgaatacccagaagaaatatatgttgcaagaaaagatagtccgatgattctcggagtagaagatggggaatcttatattgcgtctgatgtacctgctatcttaaaatatacaagaaatgtatattatattggtaacatggagatggctcgtgtaagaaaaggtgaaattactttctataatcttgatggagacgaaattgagaaagaattaaaaactattgactggaatgcagaagcagcagaaaaagctggatatgaacattttatgatgaaagaaatccatgaacagccaaaggttgtaggtgatacaattaattctgttgtgaaagaggattttattgatttatcaaatgtggggctttctgaagaagatataaaagaaatcagtcagatttatattgttgcgtgtggatcagcttatcatgttggtattgcagcacagtatgtaattgaagatttagccaaaattcctgttcgtgtagaacttggttctgagttccgttatagaaatcctttgcttgataagaatggcttagtagtagttataagtcagtctggagaaacagcagatagtttagcagcacttcgggaagcaaaggaaaaaggagtacgaacattaggaattgtaaatgtagttggctcatctattgccagagaagctgattcagtattttatactttggcaggacctgaaattgctgtcgctacaacaaaggcttatagtacacagcttgttgcaacttacgctttggcaatccaatttgcaaaagttcgtgaagaaatttcagaagaaagatatgttgagcttattaaagaagtaaagactttaccagaaaaaattgcaaagattttagaagataaagaacgtatccaatggtttgcatcaaaacaggtaaatgcccatgatgtattctttgttggaaggggcattgattatgcaatctgtatggaaggtagcttaaagatgaaagaaatcagctatattcattcagaagcatacgccgccggagaattaaagcatggaacaatttctttaattgaagacgatattttagtagtcggtgtattgactcagccagaactgtacgaaaaaactatttctaatatgctagaatgtaagagtcgaggagcgtatttgatgggactgactacttttggaaagtataacattgaagatacagcagattttacagtctacattccaaagacagatccactttttgcaacatcacttgcagtgattccattacagttattgggatattacatcagtgtagctaaaggcttggatgtagataaaccacgaaatctggcgaaaagtgtaactgtagaataattatctttaagggaaagaacaaattatgagaacaacattagttatcatggctgccggtatcggttcccgattcggcggcggaatcaaacaacttgctccggttggcttaaatggagaaatcatcatggattattctatccatgatgcaatcgaagcaggcttcaacaaaattgtttttattatccgtaaagatattaaggatgcatttaaagaagcaatcggtgaccgcatcgaaaagatttgcaacaatcttgatgtggagattgcctacgcatatcaggaattaagcgaacttccagaaggtgtggagcttcctacaggacgtaccaaaccttggggaacaggacatgctgttcttgcctgtaaagaagttttgcatgagccatttgcagttatcaatgcagatgactactatggaaaggaagcatttgttaagcttcatgatttccttgtaggctatacgccggaaaaagcgaatcagttctgtatggcaggtttcattttaaaaaatactttaagtgagaatggtgccgttaccagaggtatctgtgagacaaatgaggaaggctatctcacagcagtacatgaaacttccaatattgttaagactccagagggtgcagcagtagataacgatggacagctcacttcaattaatgcagaatcctacgcatccatgaatatgtggggacttacaccggaattcatgcagactttagaagatggatttaaagagttctttgctaacatgggggacaaagatattttgaaagcagaatatttactgccaatttacatagatgaacttcttcaggcaagcagagtttccgtaaaagtgttagatacgaatgacaagtggtttggagtaacctataaagaagataaagactatgtagtgaaatcatttgccaagctgatagaagatggtgtatatcagaagaatttatttgaagatttgaaataaataataaaggagaacgatgggaagtaagataatcgaaatatttaataagatagcatataatgtattatcagcattttatcagcccttctgggctgccgttctccttgcctttttaacaatgttcttatatttatatggtaaggagcatgggtggaaaaagaataattttatccgaaatatgtttgcaacatggtggagagcatttagaagttcttcaaattttcgccggacattcttattagctttttatacagcaatgatattactccgaacagttttaaatcgtgagatatggtttgatccacttggaaagcttttgggaggatggggactatatgaagatggagagtttacaacagaatctatagagaatttcatgttatttgttccattttctattttactattgtgggcatttcaaaaagaattacttgatgaatctgagaatattagatttggaaaaaccgtttgggaagccacaaaagttgtagcagtattttcttttctgatagaatttactcagctattattccatcttggaacatttcaaatatcagatctgacctataatacacttggtggagcagtaggcggtgtcatctattatttgggatattccagaaagcgaaagaaataaaataagaaacagaggacagctatcggagcattagtctggagcaaggaagcctctgttttaggtgcaagatgattggattcacatgaaaatgggagttaaaaaatggcaggaagacccaaaaagaaaccagaatataatccagaacttcaatttaataattttcttcaagagttaagagatgtctatgaagaagcagattcattaagatcactggcagatgagttaaatattagtctgcttaaacttcgtaagctacttattactgctgatatattcacatcagatatatgtacacaaatcaatgatttgcaccagtcaggaaaaaaaattccggagattatgaaactcacaggtctttccagagcatcggttcattcctatctgccctacactaagggaatttataatgcagcagagataagtttaaatgcggagcggtgccgggcatataagattcggcaagagcaggttcggcttctaaaggaaatagcatcagaagaaaatttgtggcaagctgttattgcatttcaggattatccatttaaaacggcaacaggattaccgtttcggtataaattaaaggttggcaaaaatggagagtataacagagagctgctgatagaccggagagagaaaagtaagagccttgcctggagtagtgtggtgctggcatttgaaaatagtaagaggatttcagaagaagtgaagaaaccgaag

SEQ ID NO: 115 - DNA, 11331 bp, unidentified
  source 1..11331: mol_type = unassigned DNA
ttatatatttaatcctgctgcaaacccttcaaaatttgcattcataatgttcgatggactgatacagtccccaattgctatggtatctttacagattccgtaaaatgcttctacaagctttttctgtgccgaaagtccggtagaaagaatcaggttgtcataggaaatactcttctcttctcccttttcatccttataaacaacaacatcctcttcgattctgctgcaaccgcattttaacaggctgtgaagattctcatactgcaaaaacttctgacgtaatgcttcccggtataaagagttggcatttgctgccagtgtatcggtcagttccagaatggaaacattctttccctgctcggcaagttccaatcctatctcgcatccaatacttcctccaccgaggattacaatctcctgtcctaactgctccggatgcataatcgcttttgttgcaagctgtacctttggattatcaattcccggaatcggaagaacccgctccgtagcaccaagggcaactatcaatgaatccgtctgaagctcttttatgaactccggtgttgcttctgtgttcagacgaacctctatctttctttttgccatctgcgtccggtaataatttaaaagccgcttaacttcttccttgtgtgcttctttttcaatgaagcgaagcatgccgcccagttcactttctttttccagcaatgtcacctgatgtccccggtcatatgctgtcatggcagctttcatgcctgccggacctccgccaacgattaccacatgctttttctcttttgcttccggcaaatcaagccctgatggaataaattcctcattgtgatatcttggatttaccgagcagcctacattccagtggtctgtggaaatgtgataacagttggagcatctgagacacggaacaatgtcttccggatgcccctccagtgctttcttcggccagttcgggtctgccagaagtgttcttccaaatgccaccatatccacgtagccctttgcaataatttcatctgccatttccggcgtcataacggcgctgaccacagaaaccggaatcttaagctcctgctttgcaatttttgcccatttgagattcggcatttcttcttccagattggttgtgatgcaatgcacatttgcttcaaacactttatcaattccagatgaaatctgaacggtatccacatactgctctgcctgcttcaggaagtacatcacatcctcaaagcttatggaatcttcaatccattcataggcactgacacgcatatcaatcggataatcttttccaactgctttccggacggtttctaatatccgaagtggaaaacggctgcggttttcgatacttccaccgtaggaatctgtccggtgattgtaatgtggggaaaggaactgtgccggaagccagccatgtccgaagtgaagaaaaatggaatcaaaaccaatttttcttgcacttgctgcggtctcggcataccactgcaacgtttcttccatcaacgcttcatccatttcctttacttccactccatccgggcggataaatccagacggtcctttcgcataatccaccgttcttgcatcctgtccggcatgaaagatttcgatagaagctttcgctccgcctttgtgaatcttaagcactttctttctggtggcttctctttcatacttggcaaatggatacggttcttccggacttgcaaaactggaacgtcccggttctactattgcatgtcccgcaattacaagtgctgcaccgcccaatgctttttcttcaaaatcatcacctgtcggtgttgccacaattctattttttaatatcattccattaatagaaattggctgaaataaatgattatacacgttcttctcctttctgctgtattttatttaccttcatcttaaggcacttaaaccgcagaaacaagccactgaaaacaactggaaaatatttttcacaatctgtattttttcatcatttatttatgaaatttattatctttttataattttgggcttcactttttgcttatatttactttcatacagcaactacgagaaacacgctttgcgagtttctcgagttatcgcgttgctcgccaaatctgagtagaaaaggagttcactcaagcaagcttggctccttcttttctcccagatttttctcgctactcgcgtaaataaaacagccatctggaatttcatccaaatggcttgctaatatacatattattatttttttaacctgtcatacaaaacaatttcttcacctgtgttcaaattatatttctttttatataacagggtccatgaagcctgcttcttggtataatctttttcccctttcggaaagaatgacctgcaaaaatacttatcatctgtagcatgcgataaaaacagatataaatctttctcttccattttatttttcatcagataatcagcctctatcatagaatacatatttgccttcttgttatacttaaatattgtatcattactatctaataactgctccaacaacggaaggaaattcactctttcttctattcttttataaaaatccgatgactcaacttgttctgtgctaatgcttcccaacattattccatcaaatacttttcctctgtctcgatttaattcaggtcgatcaaccaaatactgtaatcccatcaaatgaaagcagtcctttttatcaaaagtaattcttagagttacagctacctcttttctccccaatacaatcttgtattcagtatttaaaagcggaaggaaagcacttacacaatcttttatatttcgcataaagtcagttcctcctaattatgtaaaaagaaaggctctgctaaaattagcagagcctccgacattttctttcgaaacccacggtctctagccagattgtggtaaatgtcaaacccttataaagctcgtaaggcactgctctctggcacaacaccttacctccacgcttggcagacactcaagttgcctgtctttaatattatactaatcacattgaaaaaatatgtcaatccataattcttaattttataaaaaattcatatttcccactcatgcgatttttttctgtcctctacattacccggaacactgcgacaccaaacggcggcagtggataggaaatggaatattctcttccatcgcattccgacttcacagccttatagcttgccggtctgctcttatctgcttctgtaccgccgaaacgggcttcgttgctgtttaacagcagatggtaagtgcctttctttggtacacccacacggtaatcgtctctggctaccggtgtcatgttgcagacaaagagaagtgagttcttgccattcttgctcttgcggacaaagctgtagatgcttcggtctgcatcatccgcatttatccattcaaatccgttccagtcactgtcctgctcatacattgccggatatttccggtaaatgtgaagcagttcacggaagtattcatttaactgtctgtgacgtggttcttccataagataccagtctaactcacgctcttcactccactcacgaagctgtccgaaatcctgtcccataaagagaagcttcttgcccggatgtcccatcataaaggagtatgcactctttaaattgcggaacttgtcttcctcatcacccggcatcttctcccacatggatttcttcagatgcaccacttcatcatgagacagcaccagaatgtatttttcagagttgttataactcatggcgaaagtcatcttgtgatgattatttttgcggaaatacgggtctaaggacatataatccaggaaatcatgcatccatcccatattccatttgtatgtgaaattcaatccgcccttgtctgccggtccggttaccatcggccatgcggtagattcctctgcaatcatgacagtaccgtgatttcttccggtgattaaggtattgatatggcggaagaattcgatggcttctaagttcttgttctcgccatatttattggcaatccactgtccttccttcttgccatagtcaagatataacatggatgccaccgcatctacacggagtccgtcaatgtgataatgttcaatccacattaaggcacttccgattaagaagttctttacttctgatttgccataatcaaaaattttggtaccccactctggatgttcacccatccgcgggtcggcatattcatataacgggcagccgtcaaagtcagccagtccatgggcatccttcgggaaatgtgccggtacccagtctaagataacgccgatgccgtgcttatgcaggtagtttaccagataaacaaaatcctccggcgttccataccgtgaagtcggtgcatagtagccggttacctgataaccccaggaaccatcgtatgggtattcggaaattcccattaattctacatgagaatatcccatgcctttaacatacttcgtcagtgccgctgccatttcacgataggaataatatccatcatcctctcttcccggatggcgcatccaggaacccggatgtacctcataaattgccattggctctgcataaacatcttctgtctgtttccgtttgtccatccacttatcgtcagtccatttgaaatgctcaatgtctgcaatacgggatgctgttcccggacgtacctctgcatagttggcatatggatctgctttatacaatttccgtccatctggtgtgataatcagatatttgtataaatctcccagctctgcctttggaataaatgcttcaaaaattccaattcccgccggctctaaccgccgcatcggatttgctgtctcattccagtcattaaaagttccaatgacatagacttctgcagcatgtggtgcccagacatcgaaaagaatcccctttttcttccttatctctgccggatgagctcccagtttcttgtaaatatcatagtgtgttgcctggccaaataaatacatgtccagttctgtgaagttccccatttatactacacctcgtttctttctttcctattcttcgaaatccttttcatggagaatgacgtaatcatcatccttgtatttctttgaaaaaaatactttcttaatgctgaatttctcggaattggcaattgcttcatccacgatttctttcacctcggtcagcgtggtcgctctgtctaagcgttgaatgttactaattctgttgtatagagcaagaaccgccatctcatctatttcataggtcagttcgtgggcatacgattttgcaaaggataccagctcgtcactggtaaatatcggaagcgtaatcttctcggtaaatcgtctggcaaaggactcatctcttcccattgctttggtgattccctctctggtatcttctgcgattacaaggattccggtgtcatctgcttctaatgccagtgataatttcacggctgtttcccggctgattcctccgattttttctataataagacatccaccggcaactttctttaaaagctccgggatatttttctgatttaatgaaacggcatctatctttccgacacgcttgcccggctttccgatttcattctggattgccttcaccagtgcggtggcaagtaccgtcttaccgcttcctcttgctccctgaatcaggatgttgccacctttgattcccttttctaaatgttcaatggatccttccattgcctgacaaatctgcggctccattccggataccggaacaaaataagtaaagatagctttctgctccttggaaagatgggtaatcggttttctctctccgatgttatcctcatctgaatccggctctgcaatctccggaagtttctcctccggctttgcatcctctgtctcagcttccggttctaactgtatcttcggtaagacttcttctgcagcatcggatacttcctctgcttctgttgctgccacttcttctgctatatcgtccggcagtgcaatctctgggagttcttcttccggagaaagttctgtcatttcttctgtgccagccggctcttcttcatcggcagctgcaataccttctccttccggaatttccatcgcatctgctgcacctgcagccgcctctccgttctgtcccggtacaccggcagctaggaattcatcgattttcgcatttgcctgactgatggaatcaatctgctgctgcaaaatatcattcatattggcaacaagctgtccggcttcttcctccggcagcttgcctaagtattctttttctaataattctttggaggtaagtcctgcatccagctgcggaattacatctgcaagacgttccatgatatctccggcttctgctaatgcctttgccttggcagattctaacttctgctgctccgcttcctgtaatgctttttctgcggcacgcttggtcttctcccactcctctaaaatatcctgtatgctcatctgtccggtaatctgtgcttctaatgcactcttctccggaactaccatacgcatctgaccatcataatcttcgcctaacatctcctggaaattaattttcagggagccatcgatttcttcatcggttgggatatccgcaaaacgctctttctgtgcttcttcatcctgtggaagctgtaaataaggaatttcttctacaattttcttgattccctgcatggtatctgccacttcttccttctctgtggcattcataatctgctgcatgctgcgggctaattcttcctgcaggtttaccgtattaaatttctctgcattggtggttaccggtttaatctgtaccggctccttgataatctcaccggattccagataatcctccggccgcacttccacgattccgtccttccgctgtttaaactggcggtacttgtcctcctgtgcccggtttaatggctgataaagcatctttaattccagtgctttctctacatatggaccatcgccaaaccagagaatcagttcatcacaggcattgatacattcttcgctgcgtcctgcctgatgatataaatatgccagttcaaatgcccatttctcggtatattcctgttcctttaattcttcgagaatctgaattaagacatccagacctgcaccctttgctttattcatctcatagcggagaatatatttcaaattatcatgtggtgcaatctctacaaactcatcataatattcctgtgcttcatcaaattccttcgttttgatggcaatctctgccagcttatagataatcattcgtccgataggagaacggtcatatgccatcaggagaatctcttttgcttcatcataacgaccaatctgtgcataaatatctccggctttcatcagtgcgttgacattacggacctttcgccagttgatactgtcagcaatttcagcagcttctgtatactgcttcttcgccatcagattttttatttcatctagttttaatttgtattcatatttatccaaaatatgtcacctcaatatctatttcaagtaaacttaaattcatcttttttcgtcagggtatactgaccccaattattgttttaagtgtaccataaggggtgccttctgtcaaaaataatccgaagaatcataacattttatctgctatgattctccggattatttatttctttaccagaatttactttttctcttttttctttatggatggaatatgaagttcctttttctcagaggcttcctctaccggttcctccaaaagtacgatttcattggtcttttcatcgactttttccaggcgaatatattcgtccgtatcctccggcagctttcgcttccgcagacagtaatccacagtcttatcaataatataatagatgactgcgaaggtcggaacaccaagaatcattccgccgattccaaagagtccgccgcctaccatgatggcaaataccacccagaaggaattcagtccggtggaatctcctaaaatcttcggtccgataatatttccatctacctgctgcaaaataaatataaatatcaggaaatagattcccttaatcgggtctgccagtgcgatgataataacgctcggtattgctccgataaaagggccaaagaacggaataatattagtcagtcccacaaatacggaaaccagcagggtatatggcatcttcataatcagaagacagatataacacaatacaccgataatggcggaatccaataatttaccggaaataaatccaccgaatatttcattgctcttccggaaggtgtcaataattacattgccccgcaccggcttgaaaatggcatatacaatctttttggactgaccgataaatttctccttcgtcatcagcacataaacagatacgataagtccgatgactgcattcatcagtacctttaccatattgattacaccacttgtaatggatgtaatgtaagtctggatgtttggcagaaaggaatcctttacccagttttcaaggtacgttaccatatccatcatgttcgtttctaaggactgtatgatttcattatctgaatttgtcagtccattgaaccagtcaataaatgaatccacctgctttggcagggaatttaccattccagaaatactgctgattaactgcggaatcatcatggcaaacagcaggattacaattaatacaaagacaactacggctccaccggttgcaatacttcttgcaatcttcttgcacttcttctctttctgcactcttggttctaagaaatgcagcaaatgcttttcaaagaatttcataattggattaatgaggtatgcaatcacaagtccgaaggtaatcggctgtaataccctcattatagtgtcccagccctttgagacaccattgtaccggtatatcataaagaaaaacattgtgcagcagcagaacagtacaaataccagcactgcaaggctgatgtaccagcgcatctcatgttctgttttcccgctctttttcttatcttcttccattccgttctccttctttttccggatattattttcggttatagttaatgaggcatcctttacggataatccctctctcctcgtcagtaaggtcacccaaggttaatgagaactcggttaactgtccgtcttttacagcatacgcttttacttccggagctttctcttctactgctttgcggatttccggtacaaagagatagtctccgttggcaaatggcagttctccttctttgatgataaatggaagcataccccagttaatcaggttggaacgataacgcttggttgcatattcgttggcaatgtttgcccagccgcctaatactttctggcaggatgctgcctgctcacgggcagaaccgtcgcctggttttactgcaaaaatggtacttccgattccggtattctcttcattgatatccgggaactgtgtacggattgcatctacagctgcctttaattccggcagcacagcgtatggttcttcgcctgcttctcttgctgcttctgccttctgtacttctttggcacgtccaacgtatgcagggtcttttctggaaagtgtgaactctgccagtcccagcggattagaacgataagaagatgtctctccggaaggaatcagctcatcggttgtagttaccggatcatgaatctcggatactacctttaagatgaggttatcggttaatgctaccatcttcggccagtctttaatgtttggtcccatctggatttctacggatggatctgctacaccatggctgtcaaagacacggttctcatatatggtcttatcaaagaaatacttcggcttgctgaagtttacatccacatcagttgctgcggttaaatatcccttgtttgctgcggttgctgcaatagaacgggcatccatcaatgctacggatgcaatctggccgttctgtaccttggagccttcacggttcgggaagtttctggtagaatgccggatggagaatgcattgttagcaggtgtatctcctgctccgaaacatggtccgcagaatgcagtcttaacgattgctcctgtctccattaattttgctacagctccgtttttcaccagttccatgtaaatcggggtacttgccggatatacgcttaaggtaaattcatccggtccgatgctgcttcccgctaagatgtctgctgcatcacagatattttcaaatccaccaccggcacagcctgcgatgattccctggtctacatatagttttccattgcggactttatccttaagatttaagtctactgctccattgaagcttacctgtgctttcttctcgcagtcatccaagatgtccataaggtttgcattcagttcttcaatggtataggtattgcttgggtggaatggcattgcaatcattggacgaatggtgcttaagtcaatttcaatcatgccatcatagtaagcaacctgtcccggatttaattctttgtattcttctactcttccgtgaatgtcatagaattctttcactttctcatcggttgcccagatagaggaaagacaggtagtctctgtggtcattacatctacgccgatacggtaatctacgcttaagtttgcaacaccaggtcctacgaattccattactttattctttacatagccattggcaaatacttcaccgatgattgccagtgcgatatcctgcggtccaacgccttttaccggttctccggttaaatatacggctacaacgcccggcatattgatatcataagtctgctctaaaagctgttttacaagctccggtccaccttcgcccattgccatggttcccagtgctccgtaacgggtatgggaatcagaaccaagaatcatttttccgccgcctgcaagcatttcacgggcaaactggtgaataactgcctgatgaggtggtacatagattccgccgtatttctttgcacaggtcagtccaaacatgtggtcatcttcgttgatggttccaccgactgcacaaaggctgttatgacagttggtcagtacataaggaattggaaacttttccagtccggatgctctggctgtctggataattccaacatatgtaatgtcatgggaagtcagcttatcaaatttgattttcagcttctccatgctgccagatgtgttgtggtcctttaaaataccgtatgcaatggtattttttgctgcttcttctttgcttaccgcagtgcctgtcatggatgcaatagctgcggatgcttcgctattgtcttctactacggtacatccgtttacgagatatgcccctgtctcatgtaacttcat

SEQ ID NO: 116 - DNA, 8554 bp, unidentified
  source 1..8554: mol_type = unassigned DNA
atgatgaaaaagttgattaaaatattatcattttttgttttgatgattgtcgtattgtctggttgtcggaaagataattatgatgaacctgaatcttttataaccggacgagttgtatatcaaggtagaccacttcagttaaaaggaaatgaaggtgttgttttacaattgtatcaaagtggttatgaacttcatgatccatttaatgtacatgttaatcaaaatggagaattttcgatttgtatttttgatgggcaatatcagttgataacaaaagcaggacatggtccatggacttctgaaggaagagatacaatatatattgatctgaatggttatgctaatgttgatgtaaatgtgcaaccatattatttggttgataatgcaaaaataactcttgatggaaataaggttaatgcttccttcgatgttaataatgttgcaggaaagggtattgaccgtgtgatgttattattgggaactacacagttcttatgtgatgataatcataatgtggatagatatgatgaaactgataacatggctgaatacaaagacggaggtaagacttatgtatttcaaacaagagattatgccgaacatcaaatgtttcaaactgctctgaaacgtggtactttgtttggtcgtattgcattatggccttccggttctgaccaagctatatattctgaagtaatacgtttaaaatgataatggttatatctttctaaatttacatttataggctataaagggacttactttagatataattttaatgtaagtccctttttgtatataaatgaatagaaaatgccattaattgcacaagaattatcggtgaatgaaataagaacaatttttctttgcaataagtgagttgttttgtaaaaaatctgtattctcatacaatacttcggtaaaaatttaccgaagtattggtttaaagaatagggatttaaatctagaattttgggatgcataatataaaaaggagttgtatcaacgagatacaactcctttttgttttatcaacagtggattttataaaacttcggtattgtcttgttgtttggctggatgcggatagtctatggtgtaatgtagccctctgctttctttacgttccatagcctgacgcgtaattaaatagccgacattaatcatattacgcagttcacagatttcacgtgaagcctttacacgcttaaacaatcgttctgtttcttcgtataagatgtccagacgattccatgcacgaacaagacgaagattgcttcgtacgatacctacgtatgattccataatctgatttacttctttcatgctctgagtaatcaggatgcgttcttcattgctgattgtaccttctgcattccattcaggaatatcttcattgaagtcataacggtcgagaacgcttaaagcatgtttcgcagcagagtctgcatacacgatagcctcaataagcgaattggaagcaagacggtttcctccatgcaatccggtacaagagcattctccaatagcatacagacgtttgatgctagattgtccgtccaagtcaactttgataccgccacacaagtaatgagcagcaggagccaccggaatataatccttggtaatatctataccctggctaagacattttttataaatattggggaagtgtttctttgtttcttccggatctttatgggttacatccaaatatacatgatcttcaccccgttgtttcatttcactatctatggcacgggctacgatgtcgcgcggagcaagtgataaacgtggatcatatttttgcataaattcttctccgccgagatttcttaatacagctccatatccacgcatggcttctgttattaagaaactaggacggtctcccggatgatacaaggctgttggatggaactggatgaattccatatcctttacaagtcccttagcacgataaaccattgcgataccgtcaccagtggcaaccagcggattggttgtatgggtatatacagcttcacatcctcctgtagccattactgtgacttttgaaaggaaggtatctacatctcctgttttttcattcaatacataagcaccaaaacatttaatgcctggtgtatgacgggttacgatgatgccaagatgatgctgagtgataatttctacagcatagaagctggtaaatactgtgatattaggatgtttttttacagcttcgatcaggctcgtctgaatttctgctccagtattgtccttatggtgtaaaatgcggaattcagagtgccctccttctttatgtaaatcgaattctccgttttcggttttatcgaagttaactccccagtttattaattcttcaatctgagcaggggcattacgcactactttttctacagcttccgggtcgctaatccagtcgccagctaccattgtatcgtggatatgcttttcgaagttatccactttcagattcgttacagaagcaattcctccttgtgcatagtaggtattggcttcttctagtccggctttgcagatcagtgcaaccgaacctttatgcgcaactttcagcgcaaagctcattccggcaattcctgaaccgataacgagaaaatcgaattttcttaccataataaaatatgtatatattgttgcaaaactacaaaaaaactgacatgagagcactgtctctttgttttttttctaaagaaccttatgataagtatggttttcggtgataaattgctatcttcacaaagaattaataaatcttgtagatataatggacaggacttttcactctaaagtagactggtggtactggttactgatggctgtaactgcttttttattgttcgatttcttttggtttcattataccatagccacattactggttgctgctgtgatgatatttgaaattgaaatgttaatacatacacgttatattgttacgggtagtggcaagttattgattgaaacaggacgctttgtggctgataaaactatattactgaatactattgtcggtatgtgcgaagtaaattctttctccattgctcctgccctttctgttcatcgagttgagataacttatcgtgtcggtgataaacatgaaaaagtttttgtctctcctcaaaatgcggaagattttatccgatgggtacagaaaaaaatgaaaagtggcgaaaatacagatatgatcgataactaaaatatgttttatgaaaaatttcaaacctcgaaaatcggtaaagagatttatatgtgaaactcttataagtgctcttgtcctgactgttatattaggtataatctattatcaggaaagactttgggtacttgctatggtattgatttttatacttgatgtattgttctgcatgttcgaagaaataaaagaataccggatagatgatgatggaacagtacatgtagtttgttatttaggcttttcaaaggtcgttttgaagggaattaccaaagtgtattttgacccccagcgtaaagctctgcgtatcattgctgaaaaaagtgacaggtggtatcctttacaggagccggaattgtttgtagatactctatacgaatattatccggatatggaatacgaaaactggagctgatataaattgaaacctattaatctaaataaaataatatgaaattccaacttgcaattattggtggaggtcctgccggatatacagctgccgaagctgccggtaaggctggattgagtgttgttctgttcgaaaagaatagtttgggaggtgtttgtctgaatgaaggatgtataccgacgaagacattgctttattcagctaaagtatacgattatgcccgtcatgcatcgaaatatgctgtaagtgtaccagacgcttcttttgatttgccgaaaattatttcacgaaaagccaaggttgtccgtaaactggttttaggcattaaggctaaactggcagcacagcaggttactgttgttaatggagaagcttatattgtggataagaatactgtacgttgtgcagatgaaacgtacgaatgtgaacatctgattatttgtacaggtagtcagactgttattcctccgatacaaggtattgatcaggttagttattggactcaccgtgatgcactcgataataaagaattgcctcgttcgcttgctattgtaggaggaggagttatcggaatggagtttgcttctttcttttccagcttgggagtacaagtaaccgtcatcgaaatgatgaatgaaatcttgaatggcatcgatcgtgaacttgcggcttctcttcgcacagaatattcaaagaaaggagttaaattcctgcttggcgccaaagtaaccagtctttcacaggatgacgaaggaatacatgtacattatgaaaatgcggatggagcaaacagtatatgtgccgataagctgttgatgagtgtaggtcgtcggcctgttacagaaggctttggtcttgaaaatctgaatctggagctaacagggcgtaggcatatccgtgtcgatgctcatttacgtacctctgttcctggagtatatgtatgtggtgatctgaatggcgtttctttgctggctcatacggctgtgagagaagcagaaatagccgtaaaagatattttgggtgagccggaagaaatgagttaccgtgctattccaggagttgtttataccaatccggaaattgcttctgtaggacagacagaagaggtgttgcaggcaaatggtacttcatatcgtacagtgaaattgcccatggcatattcaggacggtttgttgctgaaaatgaaggttcaaatggagttattaaagttttggtagacgataaagatacggtgcttggcgtacatatattgggaaatcctgcttccgagttaattgtcttgggaggtatgatggtagaagaacaccgtaatctggaatattttaaacgttttgtttttccgcacccgacagtaggtgaaatctttagagaattgtaatatatgaagcgaacaggactagtattaatctctctcataatatgttgttgtacactggctgcccagtctattgccggaaagctggatgcattggtttcttcagaaaaagtattgacgacttcggaggttggcattagtgttttcaatttgacacaaggaaagcagatgtatgcctatcaggataaaaaactttatcgtcctgcctccattgaaaaagtgataacatcggttactgcattggcagagcttagagaatattatcttttcaatacacggattgcttatacaggaactatcgttcaggacagtatattacagggagatttatatctagtcggtggattcgatccggagtttatggatgaggatatgaataaactggtagaagctgttcataactccggaatacgttgcattcaagggagcctgattgcagatgtatcgttgacagactctatttattggggggcaggatggtcttgggatgatactcccgaagcctttcagccatatttatctccgctcatgttaaacagaggatgcgtaaatgtaacagtaattcccacatcgaagggaagaaagccgaaaatagaggttataccagaatctgattattacaccgtttgcaatttagctcagagctatgctccgcaatgtggaaaactgaaagttacccgtaactggctggataatggtaatacgatttgtgtagatggaaatgctaattacagatgtacaaagacactgaatatgtattcgtcaaaagatttttttctgcatacatttgcttatcgtttaaaagaaacgggtatttctatacagtcagtccggtatggaatatgtccggatgaggcaactggtatgtatacattttcacgaccgttggaacctgtattaaaacgtgcgttgaagaaaagtgataatctgtctgccgaagcaatgttttatcatctggctatcagtcgttctgggaaaaaaaatgtaggttttaaggatgcgcaggaagttattcactcctttatgaagcatgagatcgggcgtaatcccgataattacagtatcgtagatggcagtggtgtatcactttacaattatatctctcccgatttgatgatggagtatctgaaatatgcttatgcacatcctgagatctttcatacattttatgaggctcttcccgttgcgggagtagatgggacactgcattatcgtatgaagcagggaaaagcatatcggaatgtacatgccaagaccggtactgttacagggataagttcgcttgccggatatgtaaaagcaggaaatggcgatatgcttgcttttgttattatcaaccagaatgttttacgaggtaaggaagctcgtgcatttcaagataagatttgcgaaatattagcacactaataaaaagaaattagtatatttgtgaacttagaaaattagaataaataaatccgtgttcgtaaacggaaaaacaatttgcttttttaaggttgatattagttattaacaatataaacactaaagaaaactatggttaatttttcactcgaaggtaaagtagctcttgtaacaggagcttcttacggtatcggttttgcaattgcaacaggttttgcacaggctggtgcaaaaattgtattcaacgacatcaagcaggaactggtagacaaaggtcttgcagcatataaggagctgggtattgatgctcgtggttatgtttgtgatgtaaccaacgaagaagctgtaaatgctctggttgcccagattgaaaaggaagtaggtgttatcgatattctggtaaacaatgcaggtatcatcaagcgtattccgatgtgtgagatgtcagcagccgaattccgtcaggtaatcgatgttgatttgaatgctccgttcatcgtatcaaaagctgttattccgagcatgatcaagaaaggtcacggaaagattatcaacatctgttcaatgatgagtgagcttggccgtgaaacagtatcggcttatgcagcagcaaaaggcggcttgaagatgcttacccgcaacatcgcatctgaatatggtgaattcaatatccagtgtaacggtatcggtccgggttatatcgctactcctcagaccgctcctttgcgtgaacgtcaggcagacggttctcgtcatcctttcgatgctttcattgttgccaagactcctgctgcacgctggggaaatccggaagatctgatgggtccggctattttccttgcttcggatgcttcaaacttcgtaaacggtcatgtactttacgtagacggtggtattctggcttatatcggaaagcagcctaaataattttagttcttcccgagagatataaaaaaactagctgaagttttttataaaacttcagctagtttttttattttttgtacgaattttcggtcaaacttcatgatgttttttccggcttatgcgctttatccaaagataatatcctgtaagtggtaaaatacctcctacgaatgcagacagaaaatatagaacacgggttatgatacctccccattgtccggtgtggaatgaatatatgattcctttcatcttgctggatataggttgttcattggcatcatagattgttatttctgtaatttttccagtatgagcatcaaataatgctgtgtcacctttccgttttcctgtctgaatgatctgtgcattatttttgtttaactggattgtgccatagctgttatactttgtttgcagttccgcaagggcagtatcccaggtcagatagtttgtttgctctgctcgctttcttttttctttattattatgtccttctccatgtgcggcagtctgctgtggctgttcggtagaagctccaaagagtgcataaaatccggtacgataccatcggaacgaccacgttagtccggtaagagccatgattagcagaaagatggttgcatagaaacctaatgatacatgactgtcgtaccagaaacggaaccagcctttgttgcatgataatttaagccggttttgcagacttttgcagctacggggccaccagattactaaacctgatatcagaataaccaccatgagcagggtacttatgcctacaatggtttttcctgttgacggagctcctttctgagcaggagcatccagtagccagcgatgtaatttgcggacagtctggaagaaagaacttccttctacccatccgtttatttctcccgaatagggattaatacttaactggcggcgtccggcatttttaaagcttaccatccaggcttcttcagtattttgggctgtttgcaggctgtttacttccagggtatcacttatttggttgttgataagtgcgacaatctgcgaaggttttagcggcgtagccccttctgtatagtctacggtatatagatgaggactgactgcacgggttatttccttctcgaataccaggagtgcccctgtcaggcagacaattgaaataatcagcccgacaggaacagatatccataagtgtatttgtttgaataattttctcat

SEQ ID NO: 117 - DNA, 26258 bp, unidentified
  source 1..26258: mol_type = unassigned DNA
atgagcaaacccatcgtagcagtggtcggccgccccaatgtgggcaagtccaccctgttcaataagctctgcggccagcggctggccatcgtggaggataccccgggcatcacccgcgaccgcatttttgcaaactgcgagtggagcggccacgagttcatgctggtggacaccggcggcatcgagcccaaggcgaccgagggtattctggcccacatgcgtgagcaggcagagatcgccattgacaccgctgactgcatcatcatggtggtggatgtccgcgacggcctgaccgccgccgacgaggaagtggcccacatgctgcgccgcagccataaacccatcatcctggctgtcaacaagtgcgataagaccggcgaggcccccatggagctctacgagttctataacctgggctttgacgaggtgatgcccatctcgtccgtgcatggtcacggcaccggcgacctgctggacgctgtctgcgcccacctcgatttcagcgagaccgtggtggaggaggatcgcatccccgttgccatcatcggccgccccaacgtgggcaaatccagcctgaccaaccgcatcctgggtgagaaccggatgatcgttgccaacgaggctggtaccacccgtgatgccattgacacccctgtggataacgcttacggcaagttcatctttaccgataccgccggtctgcgcaagcgcagcaacatctctgacggcctcgagcgctatatggttgtgcgcgcgctggccgctgtggagcgcagccgcgtggccctgatcctggtggatgccaccgttggctttaccgagcaggacagcaaggtggccggttatgcccacgagcagggcaaggcctgcatcatcgttgtcaacaagtgggatgctgtggagggcaaggagaccaacaccatggagcatcagcgccgggattacgccgattgcttcagcttcatggggtatgcgcccatcatctttatttcggcccagaccggctataacgtgaacaagctgatgcagctgatccgtgacgtggatgcccagaacggtgcccgcgtgcccaccggtgtcctgaacgagatgctggcccgcgctaccgcccggatgcagccgcccagtgacaagggccgccgcctgaagatcttctacctgacccaggcttccacccgtcccccgacgtttgtggccttcgtcaactccaagcagctgttccatttcagctatcagcggtatctgatcaaccagatccgggagaactttggtctggaacacacgcccatccgcctggtgatccgtgagcgcggcaccggcagcgtcggcgcaaaagatgtgtaacaggggaggcggctgttgatgatgaccttcttcatcgttctggctgccgctgcgcaggcttacctgctgggcagcgtggacaccggcatcctggtcagcaagtacctgtaccatgatgatgtccgcaatcacggcagcggtgcagccggtatgaccaacatgctgcgcacctttggcaaaaaggcagcggcgttcaccgccgcaggcgatgtgctgaaaggcgttgccgctgtctgcatcggccgctggctcttcgggttcctgcccgcagatgccgccgtttcgccctatctgggcgtgtatctgactgccattctggccgtggtgggccacaccaagcccatctatttcggcttcaagggcggcaagggcgtgctggtggcgggaggggccatcctggcgatccagcccatcctcctgccggtgctgaccgtcgtctttctgctctgccttgtccccaccggcatggtgtcgctgggcagcattgcaatggcggcatcctatccggtgctgaccctcatctacggcctgctcaagggctttgccgctgacgacctcatcgtctgcgtggtgggagctgccatcatgggcggcatggtcatctggatgcaccgggccaatatccagcgcatccgtgagggcaaagagtaccgctttggttccaggcacaagcagtaaccggaacaaaaataacagcgcatccttcgggcagagcctgcctgcgggatgcgctgttttgcgtggagggggctgtgcccggtcgatgtgcctgcacggttcagtttactgaaaaatctttgcaaaaaaggttgacaaagggcggcgcagctggtataataattcacgttgcaggacacgaaccaaatatgtgggggattagctcagctgggagagcgcttgcatggcatgcaagaggtcagcggttcgatcccgctattctccaccaaaaaagcactgtacttcgtagaaagtatggtgcttttctttttctcagccgcaaaaaatgggggctgcactgccttgtctgcatcgttttcagatgttttgcaggcggttcagtgcagcccccgagtcattggtgcttcggcaggtcagaaggtgccggttcagctgacgatctccagcatctgatcgaacacctcttccatctggcgcaccagcgtgaactgggtgcgggcgcggtcaaggttgtggtcggggcgggcggtgtggaaatagtgatcgccctccagatagtcggtcagaaagcggatgccgcactccagcgtcatcagcttggcaccccaggcaaggctctttttctccgcagggctcatggaagccccggcagtggagagataccccttggcgaacacctcgtacaggtgcaggtcaaagtggaccttgctctggtcgggctcgtcctcggcgcagtcgttggcaccggtgcggatggagtcgccgaaatcgtaggccgacaggcccggcatcacggtgtcaaggtcaatgacgcagatgccttttccggtggcggcatcgatcaggacgttgttgatcttggtgtcgttgtgggtaacacgcagcgggatctcaccggctgccagcagatccagcagggtgtggcagtccttttcccgcgcgtggatgaaggcgacctccggtgcaatgtccttggcacggcccagcgcatcggcggcaagggctttttcaaagtttgcatagcggttgggtgtgtcgtggaagcgggcaatggtttcgtggagggtagaggccggataatctgccagctggttctgaaatttgcccagggtctcggcaacagtgcggaagtcggcctcgctgcccacctgctgcaggcagatggtgtcctccacaaaatcgtaggcacgccacgcgccgccctcggcatccagatggcaggccgcgccggacagggtggggatcacgttcagggtctcccgtgccgggtcgccgcctgcggcaaggatcttctcccgcagatgccgggtcacgccgcagatgttctccatcaggcccaccgggtcggtaaaggtgtcggtgttgatgcgctgtaagataaagcgcttggagtggtcctcccgccagaccacgaaggtatcgttgatgtgaccttcgccgtagtgacgggcatcgcagaccacaggcccgccaaaatcaaaggcatttgcggcggcgcggagaatgggttcagtaacaggtttcattttgagttcctcatttcttatccttcatgccgtttggcaggtgcagggcgttgtccctgccgcacctgacggcggtattcgttgggggtcaggccttccgccttgcggaagcactgcgaaaagtagctgggggaggaaaatcccatcagctcgctgatctgcgccaggctgtaaccggtgttgcccagcatatatttgctctcttcaatgcggcggcggttcaggtaggtgatgggagaaatgccgtatgccttctggaaggtgtgggccagataatatttgttgatgtgggcaacctcggcaagggtatcaagggagatttcctcccggtagttgttgtccagataccgcttgatctccacgcattcccggttgtcggagcggggggattcctccacctgcaaagagagggtggtgcaccgcaccagccagatgagcaggacttccagcaggtcctggcagacggtctcgcagccgtccagactgcggtctgcctcagccagcagcatgtgcagcagcgttaccatccgctcccggttttcccggcagttgaagatggcgtaggtggaatcggctttgccaaacaggatctcgatacccgaaacgcccagtacgatgtattccaaaggcgaggcgttcaggctcagctcggtgtgctccacctgcgggttgacgatgaccatatcatccggcttgaccgggaacagctgcccgctgagcagaaactgcccctcgccgctgaggcagtagaacagctccgtgcaggaatgggtgtggaccgtgctgttccagtcgccgccgaatctgctcttgctgatgtacagcagccggaaggattcccgtggagcgggagcgtggcggatatcaaagcgctcggtactcataaaaggctccttttgaagcagacgcaaaaaatataaaaataaaagcaagatactaaaaattaaatgcgaaaaacgccgcactgcttcgtgcattttttctcattataggggcaaataagaaaaaaagcaagccctgttttttagcatggtaaatattttcctctgcacagaaagacggaaatgtgtcaaattggttacaggttgggagaatgtaccaaaacaatgccgcaaaatttagtacttttgctgaagaaaatgataaaaaagcaatatttataaaaaatgaaacaacaaagaccttgttgaaaactgcaaaaacctctatattggaatcacaaaaaacacagcccctcgggcaaaacctgtttgctccggctgtgcatgaacggaactttatgatggaggacacattatgaaacgcatttctcgtcgcaatttcctgaaagtggccggtgtgggtgccgctgcactgggtctggctgcctgcggcggttcttccagctccacagcttccagcacggcttcttccgctgctgcatctgccgctcccgctgaggacgtgaccatcaaggttgccgccatcgagaccggctatggcgctgatatgtggaagaaggtcactgaggcctttaccgcccagaccggcatcaaggtggagctgaccaccgacaagaagctggaggatgtcatcggaccttccatgcagggcggcgattaccccgacgtgatccacctggctaccggccgtgaggctgccctgaccgagcagttcatcaagggcaacctgatcgcggatatcaccgatgtgctgagcatgaccgtgcccggcgagagcaagaaggtgagcgagaagatcgccggcggctttaccgacacctccctgaccaacccctacggcgacggcaaaacctatctggctcccatgttctacagcccctgcggcctgttctacaacgccggtttcctgaaggaaaagggctgggacgtgcccaagacctgggacgagatgtgggcactgggcgacaaggctgccgctgagggcacctacctgttcacctaccccaccaccggctacttcgacgccttcttctatgcgctgatgtacgctgccggcggcccggagttcttcaacaaggctacccactacgaagaaggcatctgggacacccccgaggcaaagacctgctttgatatcgtggcaaagctggcttcctacaccaaccccattacccccgcacaggccaacgatcaggactttacccagaaccagcagctggtgctggacaacaaggccctgttcatgcccaacggcacctggatcgtgggcgagatggccgaggctccccgtgcagacggctttgagtggggcatgaccgccctgcccgctgtcaaggccggcggcgaccgctacagctacacctggttcgagcaggcatggatcccggccggtgctgagcatctggatgcagccaagcagttcgtggcttacctgtacagcgacgaagcctgcaagctgtttgccgagagcggcgctatccagcctgtgctgggcatcgccgacagtctggaaggcgacaacaagatgttctactccatctacgacaacggcgcaaaggccgctatgggcaactttgcagccttcagtgccatccccggcgtggaagtgcgcaccgtgttcttcgaccctgtcaactctctggtgtccggcagcatgaccgagcagcagtggatcgacggcatcaagtccgccagcgaccagatgcgtgccaatatcatcgaataattgaaccctgcccagcgggggcggttttgaccgcctccgctttttgtggttttcgggttccgatagaaaggagcggtttgtctatgagatctgacaaaagccgcagacggttcgtctttctctgcgtggcaccggccacgatcctgttctttctctttatgatcctgcccaccctcaacgtgttccgcatgagcctgtacgagcgcggtgcctactcgcccaacgagacctttgtgggtctgaagaatttccaacacctgctcaaggacacccagttcatccgctccatgcagaatatgatcctgctggtggtagtggtgaccatcgtcacctttgcctttgcgctggtgtttgcggccattctgacccgggaaaagatcaaggggcagaatttcttccgggtcatcttctacatccccaacatcctgtcggtggtcgtcatctccggcatcttctcagccatctataagccggaaaacggtatgctgaacagcatcatcggtctgttccgggatatgacagaccccatcctctggaagggcgaaaagctggtcatcccctccatcatcatcgccatggtctggcaggccgtgggctattacatggtcatgtatatggcttccatgtcttcggtgcccgccagcctgtacgagagcgccaatctggacggtgcgggccgcctgacccagttcttccagatcaccattcccctcatctggaccaacatccgcaccaccctgaccttcttcatcatctccaccatcaacatggccttcctctttgtcaaggccatgaccagcggcgggcccaacggtgcttcggatgtggcgctgagctatatgtacagccagaaggacgcgggcctgtatggctacagcatggccattggcgtggtcattttcctgttctcgtttgcactgtccgcctgtgtcaacaaggccaccgaccgcgatccgctggaattctaaggagggaagaagatgcagaataccaccgaaagatcttcccgctcggcggaaggtctctacaagttctttatctattttgtgctggtcctgctggcggtgatcatcatcgtgccggtggcatgggtattcatggcctccatcaagcagaacgcggagttttacggcaacccgtgggcgctgcctgccgggttctactggcagaactttgtcaatgcgtggaacggagccaagatgggcgagtatatgctcaactctgtcatcgtgaccgcattggcgctggtactgctgctggtcattgcgctgcctgccgcctactgtctgtcccgcttccggttcaagggccgcaaattgctgaacaccctgtttatggcgggcctgttcatcaatgtcaactacatcgtggtgcccatcttcctgatgctgcgggacggcgatgtctggctgaagagccactttggcagcagcttcctgctgaacaatctggtggtgctggcggtggtgtatgcagccacggccctgccttttaccatctatctgctttcgggctattttgccaccctgccccatgattttgaggaggctgcctacatcgacggtgcaagctacttctccaccatgacccgtatcatcttccccatggcaaagccctccatcatcaccatcatcctgttcaacttcctgtccttctggaatgagtacatcatttccatgacgctgatgagctccaccagcgcgccccgcaccctgccggtgggccttttgaatctgatgcaggcccagcagagcgcggcccagtacggcaccatgtatgccggtctggtgctggtgatgctgcccaccctgatcctgtacatctgcgtgcagaagcagctgacacagggcatgaccgtgggcggtctgaaagggtaaggtgacaaacgatgaaagcattctggaaaaatcatcccgccctgcgcatggtgctgatgctggtgctgtttgtgctgtccatcgcgctggtgacagcaggctggaaaatgaccgggcagctggctggtcttggcatcatgcttttgggggtggcgctgctgctggccgtgctggcgctctataacgccccctatcaggattgaggagaagagaggtaaaggagaattcccatggaagaaaatagaatgaccgggcgcgtaacgatcccgaccgatctggacgtggtgcccgaaacgctggagatcctgaaaaagtggggcgcggatgccatccgcgactgcgacggcaccgactttccgcaggagctgaaggatgccgacgcaaagatctactccacctactataccacccgcaaggacaacgcgtgggccaaggcgaacccggatgaggtgcagcagtgctacattatgaccggcttctacaccgcccccggtgacaccgtgaccattccactgatgaagggcatcagcccggagttgatgcaggtgaacaccaacgacgacatcacccgctggtgggaggtcatggaccgaaccaccggtcagcccgtgcccccggcacagtggagctacgccgacggcagcgtgacggtgcaggccgtgccgttccacgagtacaccgtcagctttctggcctacctgatctgggacccggtgcacatgtacaatgctaccaccaacggctggaccaactttgagcaccagatcacctttgacgtgcgccagcccaagacccacaaatactccatggagcggctgcggaagttcattgcagaccacccctatgtcaacgtgatccgctacaccaccttcttccaccagtttaccctgatcttcgatgagctgaagcgggagaagttcgtggactggtacggctattccgcctcggtcagcccctatatcctgaagcagttcgagaaggaggtgggctataagttccgcccggagtacatcatcgatcagggctactacaacaaccagtaccgggtgcccagcagggaattccgggattttcaggcattccagcgccgggaggtggcaaagcttgccaaggagatggtggatatcacccacgagtgcggctgcgaggccatgatgttcctgggggaccactggatcggcaccgagccctttatgccggagttcaagaccatcggtctggatgccgtggtgggcagtgtgggcaacggttccactctgcgcctgatctcagacatcgagggcgtaaagtacaccgagggccgctttttaccctacttcttcccggacaccttccacgagggcggcgacccggtgcgggaggccaaggaaaactgggtcacggcccgccgcgccatcctgcgcaagcccatcgaccgcatcggctacggcggctacctgaagctggcgctgcagttcccggagttcgtggactatgtggagagcgtctgcagcgagttccgtgagctgtatgagaacatcaagggcaccacgccctactgcgtcaagcgggtggccgtgctgaactgctggggcaagatgcgggcctggggctgccacatggtgcaccacgccctctactacaagcagaactacagctactccggtgtcatcgaaatgctgtccggcgcgccctttgacgtgaagttcatcagctttgaggacatcaagaaggaccccgccctgctggatgagctggatgtcatcatcaatgtgggcgatgctgacaccgcccacaccggcggcatttggtgggaggacccggagatctcctccgcgatccggaagttcgtctggaacggcggcggcctcatcggcgtgggtgagccctccggtcatgcctatcagggccacatcctccagctggccagcgtgctgggcgtggaagaggaaaacggcttcaccctcaactacgacaagtacaactgggaagagcacccggaccacttcattctgcaggatgccgaccagcccatcgactttggcgagggcaagaagaacatctacgccctcgagggtaccgaggtgctggtgcagcggaacagggaagtgcagatggcggcacacgactttggtaagggccgcgcggtctacatcagcggtgtgccttacagctttgccaacagccgcaccctgtaccgtgccatcctgtggagcgcccacagcgaggaggagctgcacacctggttcagctccaactacaatgtggaagtgcacgcctatgtaaaaaatggcaagtactgcgtggtgaacaacacctacgagccgcaggacaccacggtctacaccaccgatggaaaccatttcgacctgcatctggaagccaacgagatcaaatggtatgagatctgagttctccgtttcataagcaaacacccctctgcattccgaaaggagcgcagaggggtgtttgtgtatccgggcggctcagcggggagagcccagacggtatttgaaatcgtggtagccgaagcgggccagcggctgggtggtgccgttttcatgcagcacccagatatccggcaggggcatcccgttgaaggtgttgttcttgcaggtggaatagatggccatgtcgccgaagatgagccggtcaccctcggtgaggggggcggcaaagctgtaatcgcccaccacgtccccggcaaggcaggtggggccgcccagccggaaggtgcagggcttttcccccggctcgccagcgtccagcaggggcgggcggtagggcatctcgatgacatccggcgtgtggcaggctgcggacatgtccagaatggcaagatgtgtctgaccattctgcagggtgtccagcaccgtggtgacgaggtagcctgcgttcagcgcccaggcctcgcccggttccagatacacctgcacgccgtacttttcctgcatcccggtgatgcacgtttccagcgtggcaaggtcgtaatccgggcgggtgatgtggtgcccgccgccaaagttgagccacttcatccggggcagcaggtcaccgaatttcgcttccagcgcgggcagggtggccgccagcgcgtcggaatcctgctcgcacagggtgtggaagtgcaggccgtccagcaggtcgggcaggtcagggtgctgcgccgcagcggcatcccactgggcacgggtggtgccaagacggctgcccggggcgcaggggtcatagatctcgtgtccctcctgggtggaatactcggggttcacccgcaggcccacgctcttgcccgccgcctttgcggccgggccgaactttgccagctggtggggcgagttgaacacgatgtggtcagcgtattgcagcagctcctcgaactggtcggcccggtaggcggcgcagaacacatggttctccttctccggcagctcctccctgcccaggcggctctcgtacaggccgctggcctcggtgcctgccagatagggggccagcaccgggtagaggtcgtagttggaaaaggccttctgggccagcaggatcttgcagcctgtccgctgctgcacgcccagcaggatctcgccgttgcggtgcagccgggcttcatccagcaggtagcagggggtgggcagtgcagccagtgcagcctcagagaggctcgccagccccgcaaagggcgggcgggtgtcggccagccgcatcagtccaccagagccggggcgtggctctcggagcggggcaggccgtacttgtccagagcatccagatacgggtccggatcaaactcttccacagtgtgcacgcccttggtggtccacttgccggtcagcagcatcagcgcgccgcacatggcaggcacaccggtggtgtagctgatggcctgagagccgacctccttgtagcactcctgatggtcgcagacattgtagatgtagtaggtcttttccttgccgtccttcttgccggtgaagatgcagccgatgttggtcttgcccttggtgcgggggccaaggctggcggggtcgggcagcagggccttgaggaactggatgggcacgatctcctgaccgttgaagttgaccggggtggtggacagcatgcccacgtcctccagacagcgcatgtggtcgaggtagctctggccgaaggtcataaagaagcggatgcgctttgcctcggggatgttcttggccagagactcgatctcctcgtggtggagcaggtacatatccttctggcccacctgatcaaagttgtactcccgcttgatgctcatggccggaatctccacccagtggccgttctcccagtagctgccgggggcagagacttcgcgcaggttgatctccgggttgaagttggtggcaaaggcatagccgtggtcgccgccgttgcagtccagaatgtcgatggtgtcgatggtgtcgaactcgtgcttcttggcgtaagcgcagtaagcctgggtcacgcccgggtcaaagccgctgcccaacagggcggtcaggccggcctcctcaaacttcttggcgtaggcccactgccagctgtaatcaaagtaggcggagaaaccggcctccttgcagcgcttctcgtaaatggcgcgccactccgggtcgtcggtgttctcgggctcgtagttggcggtgtccatgtagttcacaccgcaggccaggcaggcatccatgatggtcagatcctgatagggcagggcgatgttcatcaccagatcgggctggtagctcttgatgagggcgatgacctcgtccacgtggtcggcatccacctgtgcggtggtgatcttggtggtggtcttgggggccagctcggcggccagcttgtcacactttgccttggtgcggctggcgatgcagatctcggtgaacacctcggggacctggcagcacttgtggatggcaacggaggccacgccgccgcagccgatgatcagaactttgctcatatcggttactcctttatctgtaaagttgtctttttacggtctgtccttatacctgaaagcccggccagcccttgtccagcgcaatcagcagctcccgcaggaccttgcaggccgtggccgtggaaacgccggtggtgtccagcgtgggagccagctcgttgaggtccgcacccacgatgttggccttggtcacggtgcggatggcctccagcagctgcaaaaagctcacgccgccggcctccggggtgccggtgccggggaagcaggaggggtccaggcagtcgaggtcgatggtcaggtaaacgggcaccttgctggcacagagctgctcagtgagctgggcaaggcccgtgaaatcgaacttgtgcatctcagtgtgagcagccgcgaactcaaactcggtgcggtcaccgctgcggatgcagaactggtggatgcgtccgtcgccgatgaggtcatggcagcggcgcaggacacaggcgtggctgagctttgcacccagatagtcgtcccgcagatcggcgtgggcatcaaagtggacgatgtggaggtcggggtacttttccaccatggcccgcacggcacccagcgtgaccagatgctcgccgcccagcaggagcgggaacttgccgtcgtgcaggatctctgccgcgcggctctggatgtcggccagtgcgctctcgctggagccgaagcagagctccagatcgccgctgtcgaagatgtcaaaatcggtcaggtcggcgttctggtaggggctgtaagtctccagaccgtagctctcatgccggatggcagccgggccgaaccgggcccccgggcggtagctggtggtggaatcgtagggggcaccgtacagcacgatgctggcggcacggtagctgctgtcgcagccgataaaggtttcaacgttggggtaaagcatcagtgttcctccacttcccgcagcatctcctccagaaaagccggcaggtagaatgctccgatatgcagtttggtggtgtagtaccgggtgcgcatgttcagggccttccaggcggttgcatccagatcatcaatggggtggtacttcttgctggcaaagccgaacagccagtagcccgctgcaaaagtggggatgtgggcctgatacacccggctgatggggaaggtggaagcaatgcgtttgtggctgcgctgcatggcgttggcatcctcggcgtagaaggggctgccctgctggttgaccatgatgccgtcctctttcagggcgttgaagcagctgccgtagaactcacgggtgaacagaccctcgctggggccgaagggatcggaggagtccacgatgatgaggtcgtattcttcctcgcactggcggatgaacttgagggcgttctcaaaatagatgtgcacccggcggtcatccatccggcaggcgttgccgggcaggtaggcgcggcaggcctccaccacctggggatccatctccaccaggtcgatgcgctccacccggtcgtagcgggtcagctcccgcaccacgccgccgtcgcctgcgccgatgacaaggatatcctttgcctcccggtgcacggccatgggcacatggacgatcatctcgtcgtagatgaactcgtcccgctcggtcagcatcacattgccgtccagtgtgagcacccggccaaactcgggcgtttcaaaaatatcaatgcgctgataatcgctctgcttggagtagagctgcttgttcacccggatgctgtgcttcacatcgggggtgtgaaattccgaaaaccaaaactccatctgttttccctccttatgccagaacgttcaggtgcaaaatatcagggtcctcagggccggtcatgctgcagcccttggccttggcgtactcgatatagttcaggatctccttggtgatgcgctcgccgggggccagaatgggaatgcccggcgggtagcacatgacgaactcgctgcagaccatgccctcggtctcccgcaggggtaggctctttttgggggcatagaaggcctcctgcgggctggcggccaccacggggtcgatgtattcttggctcagcaggccggtgccgtcggtgtggtagcggcgcttgatctcggccagagcgctgaccagccgctcgatctcctgggggcggtcgccgatggagaggtaggccaggatgttgccgatatcgccgaactcgatctggatgtcgtactcatcccgcaggatgtcgtagacctcgatgccggcaaggccgatgtccagcgtgtggacgctgagcttggtggtgtcaaagtcaaagacagagttgccgttgcacagttccttgccaaaggcatagtagccgcccacggcgttgatctcttcccgggcgtactcggccatatccgccacctgatggaacacctgccgcccccgcagggcgaggttgcggcgggagatgtccagactggacatgagcaggtagctgccggaggtggtctgggtcaggttgatgatctgccgcacatagccctgatgcacattgggcccgatgagcagcaggctgctctgggtcaggctgccgccgctcttgtgcatggagaccgaggccatatcggcccccgctgccatggcggaaacgggcaggccgttgccaaagtagaagtgggtgccgtgggcctcgtcggccaggcagagcatcccggcctcgtgggccatcttcacgatggcgcgcaggtcggaacagatgccgtagtaggtggggttgttcaccagaacggccacggcgttggggtgctccttgatggccttggccacctgctcccgcttcatgcccagcgagatgcccagccgcttgtccacctcgggattcacatagaccgggaccgcgccgcagagcaccagcgcgttcagcacactgcggtgcacattgcggggcaggatgatctcatcgccccgcttgcaggccgtcagcaccatgctctgcacagagctggtggtgccgcccaccattaaaaaggcatgggctgcgccaaaggcatcggcggccagctcctcggcctcccggatgaccgataccgggtggcagagattatccagcggcttcatgctgttcacgtccacacccacgcactgctggcccagaaaggccgtcagttccgggttgccgcggccccgcttgtggccgggtacatcaaaaggtaccacacgcatctgccggaattgctccagcgcctcataaatgggcgcgcggcgctgatccagccggaaccgtgtacggttctcactcatctcttctcctccgtccctggttccggcgcaacaaaaaagcgcaggcccaccacactggtgcagacctgcgcttgaaaaagcgttctgaacatgcaaacaaagccccggtgatactggggaaaacctccgcatggttcaaaaagacgggatgacgagagtctatatagcaattacacttttactactcttattgaccgtttcacaagtctgcacggcgttccgcgcaatttcatggttgtaaaggaaccaacttataaaatttgagcttcaaactcaatcaataatggcagcttgcgccgccggtcggcagtggacccggctgtccgtatggccttagccccgatgggcggtcccaggtaatttgctttgaaaagactctgacacgctttgtctctcaaaatcgatgatatcttatcatgctatgagggtggtgtcaatactttttgggaaaataaagcggaaaatgggcaagcggttcgcattatgacaaggacactgtaaagacatggtaaaagtgtggcaaaacactttgcacagacacggcaaaacgcttttgcttgacaaatgaaagaaattctactatactgattcttaccggtgcgccatcgccaagcggtaaggcaggggactttgactcccccatcgtaggttcgactcctgctggcgcaactgaaaaagaacccgcagggggcctgggcgacaggttccgtgcgggttttattttttgtgaaaagagggtgtttgtgtgaacgaagagaattctctgctgaccggggcagtgcggcccgcgctgctgcggtacgcgctgcccattatcctgagcatggtggcaacacagttttacgccgtggccgataccatgatcatcggcctgcggctggatgccgatgcgctggcggcagtgtccaacgcttccacggttctgatgatctttctgttcatctccggcggcatggagctgggcggcggcctgctggtggcggcgggcaagcccactgccacaaagcatgagatgacagagctgctgtacaacctgctgttcgtggatgaggtcatcgccctgttgaccacggcagtgggctttgtgaccctgccggccctgctgcggctgatcaacacgcctgcggagatcctggataccgctgtgctctacgggcgcatctatctgctggggctgccatttctgatgccctatgatctgagcaaggagtgtgtcatgggctgcggcgattccaaaacgccgctcaaggtcattgtggcgaccagcgtgatgaacattgtgcttgaccttgttctggtggggcccttcggggtggccggtgcggcggctgccacagcggcggcgcaggtggcgggcgcggtctacatggtggcgtttctgcgccgcacccagatggacgcggccttctcgccccggatgctcaaggcgcgctatgccagggatatcttccggctgtcggcccccaacagtgtccagcaggccagcggcaccatcatcaccacggtcaaacaggggctgctgggcggcctgggtgtggaagccattgcaggcttctcctgcgcaggcaagctgtccagcctgctgatgatgccggtgtttggctttgtgcagtccacagtgttctttattgcgcaaaacacagccgcccttcagccgggccgtgtgaaagagggcctgcgggaagggcggcggatcttgttggtgtattcgcttggggtggtggcggtctgcatcggcctgcgggggccgctgctccggctctttaccaccgacccggcagcggccagctatggctgcaccatgctggcctttgagtcggtgacctacctgtttgtggcacagaagcatctgttcgaggcccgcctgcgcggtgcccagaagatggggctgtatctggcctccagcctggggcagatcgccctgaacctgctggcctgcgtgatcctggtgccccgcatcggttttgcaggcttctggatgtccagctggatcagcgcacccatcggaatgctgctggcggcggcgctggcgaacctctcaggcgcttcgcaccagctcccctaataggggggcttgcctctcctattaggagaggtggcatcccgccgggatgacggagaggttcagccaatcacctcatactgaaaatactcgcacttgaccttgctgcccacctcgatctcgggcggcagcagggccagcgcaacgggattcagctcgtcgctttcaatgtcagtgcggcgcaggttgacataatcgccgtcaaagctgacgacctcgtaataccaggggcccataggataccttctttcatttgagcttttctttgagctgtcgctttttggagcggcggcttttttaatgcttccgtcttttcttttcgtcccaggcaaagtacccggtgtagagcaggaatacgggcagggcggcaagggtgacagtccggctcaggtggatgccgtccggctgatagacaaagtcgatggtgaccgttccggcagggcagaggacggccatcaggccctcgtccacccgcaggatctcggtttcctgcccatccacataggccgtgaagccgtcatcgtagggcacggagaagaacatcaggttggtcctgtccagcgtggcttcagcgtggaagcctgcgctggtcatctcaaaggcggtgcaggcagaggcccggcggtcggcgcagtcctgagtgtagcgggtgtaggtcaggtcgttgagctctgccgtgggcaggggcgtgaggtactgcccgtaggccaccgcatcttcctcagtgagcaccagtgcccgcatgagcaggttggagcgggtgggggtcacggtgtcctcgtactgggtctcggtgagatagtaatcgtaggtgaagcccatgggaacgtagttctggttctcgtagagaacatagccgtccagggtatcgtaatacgcccagccctcatcggcctcagcgtggaactgcttctgatgcgcaagcgtggtcagcaggtatctgacgctgagcaggccgcgcagggcgtagttggagagctcgggctgactgcgcacatcccgcttgacccccagtgccgggtagaagctgaggatgctgggagcggcggtgctgccgaaatactgcaggcagctcttgtccagccacaggcccagattgtcgtgggtcttgtaggtgtcaatgcgccagtcgccctcgggcagatcctccttcagggccagcgcgttgatgtactgctccacaaggtcactgtcggtgttccactggccgaacttgccaatgccgatgtggacgatgccgaacaggcagctgaacgccagcacaccggccagcaggcggcgggcaaagaccctgcgctgctgccagcgcctgcagatgcaatggtagacggccagcccgcccagaccaaaggcgagcactgcgcagtactggcccggattctgaagcacgcccaggctccactccttggtggtggcatcctgcacgggcaccagtgcaaaggccagcgtggcgatcatcacaaaggcaatgctccgggcggggcgggcgaggtcgaggctggggtcctcccacgcgctcgccgtcatggccgcaaggatgagcaccggcatatagaaccaccgggcatagtagctggaattgagggcataaaacgcgctgttcaggatgggcaccagcgcaaataccatgcagacggcaatgatccgctttttgctgtcgccctgccgggcacgccagtaggccaccacaccggccagactgcacaggggcagataggctgtcatgctggtccatttgatgatgccctcagaccagatggaggtcatatagggggaatccgggggcagcacccagctcagcaggatggccagatactgctggggcttggaataggtcagaaagccccagccggaggaaaggtcgatggtgcgcgggttctgcagcacgctgaggacagtgggccagagcaccacaaagcccagtgccacgcccagcaggctctcaaaggccagctgaccaaagagccggggtgtgagccggaactccccggtggagagcttgcagacgaagtagatgacaaggaagagcacctgccccacaaagaaaaagtagttgttgagcaggttcaccgccacccagaaggcaaaccaaccgtggcggcgctcgtagatggtctcatccagtgcccagagcatccaggggaagagggccagcacatcgatgaagtggttgaagaagatgttgtacagcccccagcccgaaaaggcgtagagggccgcgcccagcaccgcaaagttcgggtctttgacgtagcggcgcaggtacagatacgcgccgccgcccgccaccgcgaacttgagcaccagcagcggcaccatgagataggggagccagttctgcgggaagagcagggaaacccagaagaagggggagccgtacaggtagaacgaataggcgttcatggttccgctgcccaggtcagttgcccaggaaaaggtgttcttcacgcctccgtatccggcggggtagcctgcccccttgagaaagccgttcatgtagcggtaaaagctgatctgctggctgttgaaatcgcctgcatagtggaaaaagccgccgtccagcagatagaacggcaggaagatgagggcggctgtcagggcgcagagccccacggtgagccagaacttatcctgcttctgccccagcatccggggcgaagaatgaaatgcagtcatgcgtcagtcctcttttcagtatcggaaatttcccgcttacgggaacggcacctcgcgggtgtcatcggggtcctgcgcggccctgcgctgctgctcgaacaccgcgtcgatgagggtgtcgaggtcagagaggcggctcagctcacagcagtagcgccgcaggctggcggcccccttcaggcccttcatgtagtgcatggtctgggcccgggcctggggcatggcaacgaactcgcccttctgctccaccatctcctccacctgccggcgcagggcgttcatccgggcctgcaggttcggctccttgggggcgggcaggccctccagcgcggcgttcacccgctcaaaaagccaggggtcgcccagagcagcccgggcaatcatcacgccgtcgcagccggtctcctccaccatccgcacagcatcctcggcggtgcggatatcgccgttgcccagcacgggaacgtggacggcatccttcaccgccgcaatgatggacgggtcgatgcccggggtgtacatctgctcccgggtgcgggcgtggacggtgatgagcaccgcgcccgcctgctcacaggctttggcgcattccacggccgtgacgtgctccgcgtcccagcccttgcgcatcttcacggtgacggggcgggaggtgtttttgaccacttcctccacaatacggccgcagcggtcggggtcaagcatcagcttgctgcccgccccgcccgagacgatcttgggggccgggcagcccatgttgatgtccagaaaatcgaacgcgtactgctccacggcggcagcggcctgccccatgatttcgggcacttcgccaaagatctgcacgccgtagggggcaccgttgggttcggccttgagcaggctgacggttttgtggtcgccgtataccagcgcccggctggacaccatctcactgacagtaaaaccggctccgtgctgggccatcagccgccgggccggggcatcggtaaagcccgccatggggccgaacactgcccggtggggcagggagatctccctgatcttcaaaggggtgttgaaaggttccatgatactccttagcgctatctgatttagttgataacatgataaaatttggattataagtataccatatttccggcggcagaacaagaagcggaacatctttcttgtcagcgcgggatttttccggtatactgggggcaaaaggaggagcggctggaacacggcagccagctgcacaaaagagatggaatacagaacatggaaaaagcagaacggcgcaggggagagcatccgcacctccctgctgggttatggctgtatgcggttccccaccacaccggagggagccattgacgagccccgggccgaagcgctgctgaacgccgcgcgggacgcgggcgtgaactattttgacaccgcctacccctaccacggcggccagagcgagccctttgtgggcagggtcattgcaaagtggccccgggagagcttttatctggccaccaagatgccgctgtggcagtgcgggagcctggaggaggcccagcacatctttgaagagcagctccggcggctgggcgtggagtacatcgacttctacctgctgcactccctgtacgccgcccggtacgaccgggccaaggaaatgggcatcgtggactggctgtgggagcaaaaaaagctgggccgcatccgcagcttcggtttctcctgccacgacaacgcggcgggccttgagcacatcctgcgggatcagccctgggatttctgccagctgcagtataactatctggacaccgatgaccgtgccgaggagatctcgggtgaccgcggctatcagctgaccgaggagctgaacatccccctcatcattatggagcccatcaagggcggcacgctggccaacctgcccccggaggccgaagcacccctcaaggccctgcggcccgaggcctcggatgcctcctgggccctgcgctgggtgggcagccaccggaacgtccatgtcatcctctcgggcatgagtgccgaggatcagctcacggataacctggccacctttgcccgctttgagccgctgaccgctgcagagaccgccgcggtggagcagaccgccgccttcctgcacagccgcatcaagatcggctgcaccggctgccggtactgtatgccctgtctcatgggggtggacatcccggacaacttcagtatctggaacaagctggggatgttcggccagcccgaggccatcaagcaccagtgggaagcccacttccccgatgccgaaaaggccagccactgcgtccgctgcggcaagtgcgaggcggcctgcccccagcatctgcccatccgcaatgcgctggcccagctgcagcaggagctggatcagctgtaatctgcatcagaaaagccaccggtaaaaaccggtggctcttttctcttattcgctccactccatcccgatcttatccagcattgcgcggcgctcaggggtgagcttggggtcgtgggtggtatcccactcccgcatccggcggagccagtcgcccaggcagaagccggtttcgtcggatttgtagttggcggcggcgtggaggttgccgtgggccttgtagtaggccctggcctgctgataggcagttccccacttggcatcccgggcatcccacaccatgccgatgctgttcagctttttgatgtgggcgggcgtgacctgataggaatccgggcggttcttgcgggctgcacgcaggttggagatccacacgcccagccggacaccatcgctgtccacatagctggcgggaaccagcagatgtttgtacttgcgggcgtagcgggcggcactgcggaagttccgctcccagttggcctcgcgcacggtgccgtggtcagcggcgggatcactggggcggcgctcgcccttgaacagggtgcgcagcagcttgcggcgctcactgctcagggcgctgctgccggagttcagggtctgccgctggcggctgacccagctgcccagccaaacgccgtcggcggtcttgtagacagaggggatctccagatcgccgtgctctgtcttgtaggccagagccagatcatagcgctcctgccaggggtcgtacttttcccacaccatgcccagcttgtccagcagggccttgcgctcaggggtgacccgggcgctggagcggtccgggttcaggtaggcatagcgctggcgcgccacccacttgcccagcagtactccgtccggcgtgacatactccgaggggacgttcaggctgccgtgctcatggtagtagacggcggcaacatcgtacagggacatccacttgcggtcgttgcggttggtccagtccatgcccagagcgtccagtcgcgccacctgctcctgaggcagctcgcctgccttgtgagcggcgcgctgggcccccagccagacccccagaccgaagccggagggcgtttcgtacttgatgggcacttccagatcgccgtgttccagataatactgggtggcggcggcatagttctgctcccacaggtcgttggaggtactccacaccatgccgatggcttccagccgctcgatgcggttctgggtcaggttgccgcccagatagcgctggcggttgtagacgatccattcgcccagtgcaaaatcatttttatcgcggtagcgcaccggcaccagcaggtcgccgtgctcggtgcggtatttctgcgcggaggcaaagcctttttcccaagcagcttccagccggtggttccagcggatgcccagtttttccagcttggcggcctgctcagctgtcaggcggcccgggcgctgcccggcctgtacctgccgctgaagctcgagccacttgcccacgggcacgccgctgtggatggtatagctccggggcagctccagggtgccctctttggcggcagcagcggcggcggcctggcacagcacctcccagcgggcctccatctcccggcgcagcttgccgtacaggcggtaggtctgctgcatggggcgctcctgccggaagcccggcgttttgctgccggctctggtcatggcctcggtgcagtcacgctgcagggtacggccgttgcccagcccctcgaactgcgccacaaggtcgaacaccggcacgctgcggctgcctgcagccaccagcgcgcggcagagcatctgcttgaaggtggacatcaggctggactggcgcaccagaatgaccccagccagcccctccagcggctgctggactcccggcgcgttgacgcagagcaggaccttggggccgggggctgtatcggagaggaaggtctccacggcggcagaatccgcaaagcaggcgtgatctgcagcgtaaaagcggacggcagggtccacagtgcgcagcagctgttccagctccgtgcccagcttttcctgataggcggcggattcaaacaggaccagataatggccgctggtatcgctgagcaggcggggcagcagaacggtcaggttctccacctgacgcagagaccagctcagctcttcatattgaacgcgcagggaggtgtcgcccttgggcatacacaggtttttgatccgggcgcgcagggtggccagctcctcctcctgaggccagagcagggctgcataggccgagggcaccggcatggtcccggcggccatggcctcggccacagtcatgtgggagacgatgcagtcggcaaacagctcctgcgcggcggcgcagacgggggcaccgttgggcacacccagccccagcacctttgcctgggggcacatccgcagcagcttctgcaccgactgtgcccaacacacggcgctcaactcatggtagcagtccagcacgatgcagccgggtttctgctcccccagccgcacccactgctccggggtggcggcggccagcttttcgcaatcacagaagcggacattgccgggcagggtgccgccgttgtagcgtgtcagctctgcctgccgcagggccagacgctgtgcaccggccaccagccagaaaaaggtagtctgggggtgagcctccaccaccttccaggcaatacagcttttgccggtgccggtgggatggaacacggcggcccggttcagggtctccagagactgtacagctttctgaaaagcggcttcgttgacgggattcagggtcatcgacatggtggtagtgtcctctccgagttgcatgtttgacat

SEQ ID NO: 118 - DNA, 13536 bp, unidentified
  source 1..13536: mol_type = unassigned DNA
gttcagggcttcccacaactttccggcaaattcgtcggcatcgttctggtccagtgtcacgcgcagcggctcaccggcaaagctggggatgggggagccgtttttctggtaggtggtaatcagctggccttcgcctgcaacgggctgcggatagtcaaaggtctggcgctgcacgctggcggggttgccatcgcagcttttcaggatgctcagcttgtagccgccgcgacgcatatccacaacgccggaaatgcggggggtaaagttgggggcatcgtcctcaaaagtgcgggtggcaagggctgcttcaaagccgtaaccagggaacaggttatcccgcatgtagcggtaaatggtatccgtctggtcaccgttggtcacaatagtggtatcgttcagggtcagaaccgggttatagatgatcaggtggggatcttccagcttggcggggtctgcggctaccgtgcggatgccgccggggatggcgtcaaacacgcggttgcggctgttggcgctgcggcccataatccagtaagcaatcatggccttggtgccgtccggcgaacggccgatgcagatgccgcggccgggatattcgttaccggccagataagtataaagattctttttcatgcgggaatcctccttgttcggtcaggcttcgccattgcacaccatggcaatggcctggggcagcaacttccattcagcttccaccatcacgcgcttctgcagcacttcgggggtatcgccgggctgcacttccacggctttttgcagcaggatgggcccgccgtcacacacttcgttgacaaagtggacggtagcgccggtcactttcacgccgcgcttcagcgcttcctcatgcactttcaggccatagtagccggggccgcaaaagctgggaatcaggctggggtggatgttcaggatgcggttggggtaagcggcaatcacgctggggcccagcacgctcaaaaatcctgccagaaccaccagctcaatgccatggtctttcagcacactcagcagggcagcgtcaaactcctcgctggtggcgtaatccttgcggcgcaccacggcggtttccacgccgaagtttgcagcgcgttccaacgcatacgcaccaggtttgctggcaaccaccagggtaaccttaccgttggggttctccccgcggcgttcgctttccaggatggcctgcaggttggtgccgccgccggaaaccagcacagcaatcttcatcataccagctgcaccccgctgccttcgccaatcacaccaaggcggtaagcatcctcgccgttggctttcaggatctcaatggccttgtcggcatcctcggcagccacggtcaaaatcataccaacgcccatgttgaaggtgttgaacatatcgcgctccggaatgttgccctctttagccagcacatcaaacagcacgggggtgcgcacatcgctcttcttgatcacagcgcagcagccggctttcaggctgcggggaatgttctcgtaaaagccgccgccggtaatgtgggaaacgcccttgacggtaacttccttcatcacggccagcacaggcttgacataaatcttggtgggggccagcagggcttcgcccagggtcttgtccatgccgtcaaaggtctttttcagcacatcggggttgttctccaggtcaaagatcttgcgcaccagggagaacccgttggagtgtacgccggtggaaggcagggcgatgatcacatcgccgggctgcatggtggagttgtccaggatcttgctcttgtccacagcgccaacggtaaagccggccaggtcgtactcgtcctccgggtaaaaaccgggcatctcggcggtctcaccgccaaccagggcacagccagcctgcacgcagccttcggctacaccggcaaccagctcggcaatgcgctccggcacgtttttgccgcaggcgatgtaatccaggaacaccagaggcttggcaccggcgcagatgacatcgttcacgcacatggcaacgcaatcaatgccaacggtgtcatgtttgttcatgtactgggcaatgcgcagcttggtaccaacgccgtccgtgccggaaatcagcacggggtggggcatatcggtgcagtccagctcaaacaggccgccaaagccgcccaggccgccaatgcagtgctcgttcatggtgcgggcaacgtgctgcttcatcaggtcaactgccttgtaaccggcggtaatatccacaccagcggcagcgtagcttgcagaatagcttttttccattatgtttctctccttatcagcttacaggcgttttttggtctgggactggctcaggggtttatcgtatacaatgtccatcgtctcgttgggggcgggcaccgggtaatggccggtaaagcagccggcgcagaacccgcacttgctgtggatggccagctgggtcacatgttcaatgctcaggtagcccagggaatcggcccccacgatctggcggatctcctccaccgtatggccggtggcaatcaggtctttttcgtccgggatgtcggtgccgaaatagcaggggtgggcaaacggcggggccgaaatgcggtagtgtacttccttggcaccggcgtcgcgcagcagcttgatggtgcgggcgctggtggtgccgcgcacgatggagtcatccacaagcacaacgcgcttgcccgcaacggtggaggaaattgcgttcaatttgatgcgcacactgctttcacgctgggcctgggagccctggatgaaggtgcggcccacatatttgtttttaataaagcccacgccatagggaataccgctttcctgcgcatagccaagggcggcatccaggccggaatccggcgcaccgatgacgacatcggcttccaccggatgctcctgtgccagaaagcgcccggcctgcaggcgggcgtcatgcacgcaggtgccctcgatgatggaatcggggcgggcaaaataaatgtactcaaacacgcacatcgtgtgcggcgcggtgccgcagtgggtgcggatggtgcgcaggccggtgtagtctgccaccacgatctcgccgggcagtacatcgcgcacaaagcgggcgcctacagcatccagcgcacaggattccgaagcaaaagcccagccggagccatccggcagctggccaatgcagagagggcggaagccattaggatcgcgcgcggcgatcagtttggtgtgggtcataatgaccaggctgtaagcacccacgatctgctccatcgtgcggcagacagctgtttcaatatccgggctgatcaggcggttctgggtcagcagatagccgatgacctcggtgtccgaagtgccgtggaagatcgaaccgttcatttccagcttgtggcgcagctggggggcattggtcaggttgccgttgtggcagatggccatagcgcccttgcagtggtgcagaaccatgggctgggcgttggcgcgggtgcgctggccgctggtggcatagcgcacatggccggtggccatcttggcatcctgcggcaggtcagccagcacgcgcggggtaaatacctcgctgaccaggccaagatcgcggtagccggtcagcacaccgtccacgttcagggcaatgccgcagctttcctggccgcggtgctgcagggcatacaacgcgctgtacacggcgctgaccatgttggttttgccggcggaatcatagataccgaacacgccgcattcttcatgcagtgcttcggcgggacaaagctccttcattcagttctccgtttcctgtttcaaacgatggcagggtgcaccggaagagcgaacggcggttccagtacaccctgaacattggctggactaagcttggttcaatcagcccagcaagcgcttcataacttcctggtaggcatcggcctcaccgccaaggctgcggcggaacaggtctttatccaggtgggcaccggtggtggcatcccagaagcggcaggtatccgggctgatctcgtcagccagaatgatggtgccgtcagacaggcggccaaactccagtttgaagtcaatcaggcggatgttggcatccagcatgatcttcttcagcacttcgttgaccttgaaggcgtacttggcaatggtgtccagctcttcctgggtggcaaggtcaagggccaaggcgtaataatggttgatgaacgggtcatgcaggtcgtcgttcttgtagctgtactccaggatgggggtcttgaacaccttgccctcgggcacgcccatgcgcaggctgaagtggccggcggcaacattgcggatgatgacttccagaggaacgatctgaaccttcttgaccagggtatcgcggtcgttcagctcctcaacataatgggtggggatgccttctttttccagcttctgcatcagagcgttggacagcttgttgttgacaatgcccttatcgcggatggtgcccttcttttcgccgtcgccggcggtggcatcgtccttgtaatgaaccataacgatttcggggtcagaagttgcgaatacctgtttagctttgccttcgtacatctgttctttaatttcaacgttcattgtaatgcgctcctttatattctttcatgaattgatttatggaatcctttttataaaaagggataaaacaacagcaaataaaccgggatttgaagttacatagctgcggcttcggcagcgatggcggcgtcctttttggcaatggcggcggcggtgtcggcacggaactgatccagcttagcggcaagctcatcatcagcaacagccaggatggcaacagccaggtaagcggcgttcttggcaccgttcagggcaaccgtggcaaccgggaagccggaaggcatctgcacggtagcaagcagagcatccagaccgtccatggcaccgcctttcatcgggatgccgaccaccggcaaagtggtgttggcggcaaaggcacctgccaggtgggccgccataccggcagcgcacaggataacaccgtaaccattggcgcgggcagatttggcaaaggcagcggcggcttccggcgtacggtgggcggaaagaatgtgcgcctcaaacggtacatcgaaatctttcagcaccccgcaggcactttttacaaccggccagtcactgtcagaacccatgatgatggcaacctttttacggttcggcatgttacagatcctccttcaaaaaataagagcgcggtgtacacgggtacactgcgcttatacaaggctattatgcttataatacaccgcatgaagaacacagctgcgcaaaccgaccgggaatggtccgaaaagattcgtgtaatgcacaaagtcgccctccatcctttaatgtatggctggatcccccggcgggctgtgtacagaataacacacaaaacacccgtacggaaaatctctgtaattaaagtgtaaagcgtgcagcgcaaaaaagcaagagccaaaactttttttggcgcacttcctattgtgtttaaaataagatagggctttttgtcaaagttgatggagaaaaacggggtgaagtatgacttttttgataaggatttttgtgctataataaccataccagaaaatactgccataaggcaggatgggaaaggggtatcgcaatgaaattgttccacacggcccttgtgcttggcaaggggggctttggcacacagctgggagaaatgctggcggaagccggcggctattcccgtattttgtacctggatgaccaggcaccggacgctgcgggcaaactggcagattacctggatcccgccatcagggaacgctgcaccgcggcttttgtgggccttggcaacaatgagctgcggctgcaatggctgcaaaagctggtggctgcgggctaccagacaccggtgtttgaacacccggcggcagaagtatgcagcagcgcagccctgggggcagggaccgtggtgctgccatttgcctttgtgggcgcaggaaccaaagtgggggcagggtgcatcatcaatgccggtgccattgtggaccataacgccgtgctggaagacggtgtgcatgccgccccccgtgcaaccatcaaagccggggcaaccgtggagcgctgcatgaaagtggacagtggcgaaattatccgcagcccatgggaaaaataatgcagctgcgcggaaccgacagccaaacaatgcaggcagaattttgaaaaaagcggccccgcaatttgggtatattgcggcattgcatggcatataaaaacaggggacaatagccgcacagtgaatgaccgccggaaagcaaggaaaaaaagacggccatgacgaaagagaatctgcagccaatttcagaattgatgaccagtgcgctggcaccgattcatacccatttgaatcaaatggataaacgcctggatgcgatagaaactcgcctggattccatggccgaagatattactgcaatcaaagaggattccgccgttacccgcaccgcatgcaacaccctgatcaaatggaacgagcacacaagtgccgtggtgcaggtgccggagcggtgcttaagccgcaaggcgggaattgtgcggtgttgccttaataataagcgaacgtaaaaaccagccgcctgccgtgcaaatgcacaaagcagacggctggttttataagtcgtaagcaaaaggtgaaaatcaagcagggaacaacctgccaaaagaagcaaagcgcttacccgacgttttcaacattctcctcaccatccaccggcagggtggtgcgcggggtcacgctgagggggtcgggcagggtgttgttttcaacatcctgcaacacctgcggcacaccggggaagaacttggcaatgccgcagcccttgcagtgcaggccatcgaaaaagtcggtctcatccaaccccttaatgcaggtggggtcataactgccgtacagcggaatattgtagtcatgcgcatactggcggatccagttttcggtttcaaaaaagccctggtgctggtcggtttccgtcagcagaaagtcatacaggtacgggtgccagggggagagggccaaaatcaccgtggtgccctggttttgcgcatactggataaacttgtcaaacgcttcttcctgcttgggggaaagcgagtcgaacccttccatatgtacgctgttgaacgtggggcaggcttcggcggcaagggcgcgcacctggtcggtgttggcatcccggaatgcggggtcatacagcacactgccgtcagagcgcttgatggtggtgggctgctcgtaagggtcgccgtccaccgggttaaagtcaatggggttgccatcgtcatccgtcacaacgctctggccgcggttctttaagtaatagtctacgttgccctgaaaataagccggttccaccagtgctttccacagcgccacgcggtcctcttcctcatagtcggtttcaacaccgagaaccttagtcaaaaattcgttgtacagctccacatcggcgcgcttgtcaaaggcggcttcgtccccatacagcacccagggatccacgctccaaatcagcaccttgggcgctttgccgtaacagaccatcttataatagctggtcatgttatcgcgcacatccgcgccggtaacgcccatgttgaaaaaactgtcggtcccgacaagttcccgtgtgaactgtaatacgcggctggagccaatgccgatcacttccggggtgtccgggacatcctgtgcaaacagctggacaacctcgcgctcaatttcgttcatctgctcaaagttgctcacatcatagccctgcagcatcaagtccacaatgcggcggggggcaagctcaccctggaacaggccactgcggtctaccgtatagctgaaccagaccatgaaaaccagaatgggaatgaacagggcaaacttgaacaacgttttgctgccaaagtataaccggcggaccaaaccatgcaaaaagcgaacgaagatatttggctttttggggcgtctgcgcggtgaggaagcggattttttttgctttgtggtgggcttgcgggccggggcggcaacagcactgcggctgaccttttgggtgccgcgcggggcggaagcaggggtctgtgttggcataattgatctccctcccccgttaaaattgctggtaaatgaacgccgactgcccgaacgcggcaaagaacaagatggataccgcagcggcataatagaccgtccaacgcagcacaaagcactgcttgcggatccagcgggcaacattgttgccgttgtgctccatggccagcacaatggcggtaccgcaggtcaacaccaccggcaggcggtcgtcaatgccgctgctggtgaccagattggtaacgctttcccatccagccgcaaagccgccctgccagccctgcagtattccggcgaatacctcgccggggacagcgttgtaaatggcggaagcaaaaaacaccattgtaaagctgaacagcaggtaggtgatgcagcgctggagaaaggtctgtacggcaggctcgcggtacagcgggttatagcgccacagcactttgcgaggagctttggtcagctgggcaatgactgaaatcacgccgcaggcaatgccccattccagatagcgcaggtcagccccgtgccataggccgctgacggcaaacacgatcagcgtgttcagcatatggcgcaccacgttgcagcggctgccaccaagaggaatgtagatataatcccgcagccagccggtcaggctcatgtgccagcgctgccacagctcggcaaagctggtagcctcgaacgggctgtgaaagttttccagcaggtcataccccaaaatgcgggcagcaccgatggcgatatcgcagcagccggaaaaatccaggtagagccgcaggctgaacagcagggtggcggccaccaggttggggccattcatatcagcgggggtatcgtacaccatcttgatgtacaggttcatgttgtccgccaggaccatctttttggtgtagccccacagcatgcggaacgcaccgcctgcgcagcgggtgtagctgaaccggcgggatttgtggatctgtggccgaaaatgggggtaccgctcaatggggccggtggtcatggcgggaaaaaagctgacgaacagcgcataatgcagcgggttcagctcaaccttgcagcggcgcttgtatacatcaatggtgtagctgagcgcagcaagggtaaagtagcccaggcccagcggggtaaccatatccgtgcggggctgcaataccgtgccgcccaggatatccgtggcgaacaggttccagtatttgtaatagaacaaaagccccacacaggtgaacaccgccaaaagcaggaaaatcacccgcacgggacctatccggcatttgccgatcaccagcccgcagccccatgtgaccagtgttgccgcaatcaaaactggtaccagcaggcggtcgttggccccccagcagtaaaacaggtagctggcagccagcaaacagtaagggcgcagaacacggggcagggtatagttcaaaagcgccactgccgcaaaaaagccaagaaatagcagtgttgtcagttccatcctcaaactcctttggcggggttatttgccgctgagttttttctccaaatcccgcacgcgcttttccaggatggcattttcctgggtaaggcgcttgcacttatccgcaagctggctgacgccgatgcttaaactgagcagcaccagcagcacaaagcagaacatgagcataaataccaggttgaccggcatttgtacatccagcagatcacgcaggacgtaaacaacataggggaataccgcaaagatgacaagaaccacggccagtgccagccagagaaggctgtattttacgctcatttggccctttttcagcagcgcaaaaataatcagcagcaggatggccgcacccaaaatcataaaaaactggaaatgtgccgtcatgggcgttgtgcctccttatttgcttttcggctggtggattttcttgatagaaaggcggtcaatgatcaaagacagggaaaccttgatcatgtaatacgcgcttttaaaactgcgaatgctggaaacgccgccctgacgttctttcatgacgaccggggcttcgcctacgcggaacccggccagcgtggcagccagaatggcttccggctccggataatccgaagcataatgctccgcaaaataggcggttaactggggaccggtggcacggaaaccactggtgacatccagaatgcgctgagcacagagaatatggatgagccagcttaaaaagcggatgccgacccggcgcataaagcttgtctggaagccttcgcacttgataaagcggctgccgatgcacatatccagcttgccatccaataccggctgaacgacctgcatcagataagcggggtcgtgctggccgtcaccgtccatctgtacagcaacatcataaccattggcgcgggcatagcgataaccgcactgcacgccgccgccaatgccaaggttgaccggcagatccaaaaacgggtagccatgctccaccagcaattcagccgagcggtcggtggaacaatcgttgatgatcaaaaagtcaacctgcgggcaggtggcacgcaggcgttccacggtgctgacgatgttggcttcctcattataacagggaatgataacaagaattttggctgggtgattcaaaagggcacctcacatcaggggaacagccggtttggcatcaaacgcggccttccaaaataaaatgttccagtttgcgcagcagctcgctgcggcggtaatgcgcaagataatattctttggcgctctggcccatggcggcgcgctgggcggcgtccatgcgggtcagtgccagcaggttgtctgccaaggcagcggcatcacaggcaggggagcttaacccgcctgccgcggcaaccgccgcattgccggcgccgtccatactggccaagaccggcttgccggcggccatataactggcaaccttggccggtacggtcagccccaagtccggcgaatccgacaggcagacgatcaaagcatccgccagcgcggtgaacctggggatatccgttgccggaacactgccgtaaaacgtaacggcgtcctcggcgtgcagctctttcactttggcttccagcgcggcgcggctcatgccatcgcccaccagcaacaggtgcaacatatccgccccgcggctgcgcgcatcctgcaccgccgtgatgacggtctccaggctttgggcgggggtaaaagtgccggtaaacaccaagttgaaccgcccgccgaactgcgcctgcaaagcggcatccggctgaggaacggcgtaaaaatcctcgcagtactgcgggatcacagcaattttttgcggcggcataccggtgcgctggcacagccgctgctgcagcggctcactcatggcaatcagtcggtcggccttcttatataaagcgtcgcttacaccctgggcaatcgcgcgcagggctttgtttttcacattcagcacgctgtacaggttttcgggccagatatccagcacatagttggtaaagggaatgtggtgctttttggcatagcggatggcgggccagcacatcagtaccgggctggtgttaaagcagaacaccgcatcgtacccgcccggcaggcggtgcagcgcatgggcggcgtaccacggccaactgacatagttcaaaaaaatgttgaccgaggtgttgcccctgcgcggaacctctttgcagcggtacaggcgggcaccgtgccattcttcttcaaaagggccggcggcgctgtaaccgggaaaccattcgccttttgggtaattgggcagcccgcaaagcacatccaccgcaatgccatcctgcaaaaaaccttccacaatatcattgatgcggaaattttccggccagaaatgctgcgtaacaacaagaatctttttttgagagggcaaagggcacacacctttcgaaagttaggagttaggaagtaggagttaggagttgaagaacggctgctagacttgaggtcttttgcaatctataaaatgctctgtagggaacgatcttgaccgttccaaagcattcagcttgtcgcagcctcaaaaaactcctaactcctcactcctacctcctaactaaaaaaactcagttttttctccacaccatcttattaaccaccccggtgtagctctggatgatcttgacgaccttggtggaaacgtcttcagtgtagtaggggacggggatgccgttgtcgccgttggcgttcatggcaacggcggtggcaaccgcctgttccacgccgccctcgctgatgccggccagcacaaagcagcctttgtccagtgcttcaggtcgctcggtggaggtacggatgcagacagccgggaacggatgtcccacgctggtaaagaagctggattcctccggcagggtgccggaatcgctgaccacggcaaacgcgttcatctgcagatggttgtaatcatggaagcccaggggctcatgcagctttacgcgctcgtccagctggaagcccatggcgtccagtcgctttttgctgcgcggatggcaggaatacagaatgggcatatcataggtctgggccaggtgattgatggaggtgaacaggtcgataaagttcttttcggtatcaatgttctcctcgcggtgggcggaaagcagcatgtatttgtgcggctccagccccaggcgctccagcacatcgctggcttcgatcttggccaggttggcgtgcagcacttccgccatgggggaaccggtcacaaaggtgcgctccttggcggtgccttcggcattcaggtaacggcgggcatgctcggaatagcacatgttcacatcggaaatgtggtctacaatgcggcggttggtttcctcaggcaggcactcgtcaaagcagcggttgccggcttccatgtggaagatgggaatgtgcagccgcttggccgcaatggcggaaaggcagctgttggtatcgcccagaatcagcagggcatcgggcttctgttccaccatcagggagtaggacttggcaataatgttgccgatggtttcacccaggtccttgccgacggcatccagatagaaatccggcgcacgcaggcccaggtcctcaaagaatacctgattcaggttataatcatagttctggccggtgtggactagaatctggtcaaaatacacatcacactttttaatcacagccgacagccgaatgatctccggccgcgtgccgataatggtcataagtttgagcttgttcattgtaaaacacccgatacagttaggaggtaggagtgaggagttaggagttgaagaacgactgctggttttattgtcttccgcaaacgataaagagtttcgcagggaacggctttgaatgttctgaggcatttaccttgcccaggtttcaaaactcctaaggcaataccgcataattctaagtgccgatacggcgagcgaggtgcggca

SEQ ID NO: 119 - DNA, 21032 bp, unidentified
  source 1..21032: mol_type = unassigned DNA
tcaaactccgtagcctctgctcttgatagtctccacgacctgagacacatacttctggcaggtatcgtggtcgggagcctctaccatgacgcgcacgaccggttctgtgccggactcgcgcaccagaatacgaccggtgttgccaagtgcatcagccacatcctggactgctgcctgcactgctttgtcatcctgtgcggcctttttatcggtcacacgaacattctccaacacctgcgggtaaatcttcagaggctcagccagcttgctcataggcagcttcttcgccagcatgacttccatcattttcaggctggtcaggataccatcaccagtactggcgtacttgctgaagatgatatgaccactctgttcaccaccgatacggcagccgttcttcgccatatactcatagacgtacttgtcacccactgcggtcttggcgtagccgatacccttctcatcaaaagccttatacaggccaaagttggacatgaccgtggtgaccacggtattggtcaggagttttccacgctccttcatgtagcaaccgtagatgtacaggatgtggtcgccggtgataacattacccttttcatccacacacaggcaacgatcagcatcgccgtcataggcaaaaccgatgttaagtcccttctctaccacaaacttctgcagaccctcaatgtgggtagaaccagcattgttattgatgttcagaccgttcggcttattgttgatgacgtaggtgtctgcacctagagcatcgaaaacagacttagcgatattccagcttgcaccgttggcgcagtccagaccgaccttgacccccttgaaggagtagatgcccagagagatcaggtagcccatataacggttgcgacctgccacatagtccaccgtgcagccgatatgctcacgatgagcaaagggcagctccggccaatccttatcaaagacatggagcttgccgtcaatataatcttccaccagcagcagggtctcttccggcattttctcgccgtagcagtcgatcagcttgatgccgttgtcatagtacggattatggctggcagagatcatgatgccgcagtcaaagtcatccacacgggcaatgtatgccacagacggcgtggtggtgacgtgcagcagataagcgtctgcgccggaggccgtcaggcctgccacaaggctgtactcgaacatgtaggagctgcggcgggtatccttgccgattacaatgcgggccgggttggtgtcaccgttgcgctcacggagcatattgtagtaccagcccaggaagcgacctaccttataggcgtggtctgcggtcaaagtgattccggcttcaccactgaagccgtcagtaccaaagtattttcccattatgtaattgtatcctcatccaaagagcgaataagcgaataggtatatgctttagccgaatggatatccgttgcctgctgctcaccacgaagaggtagcatacttgagcagcacagccatgctggtgcatggctggtaagtattagtctctgcggaacaggtcacgggtgtagaccttatcctgcacgtcatccaaacagctatcgtagcggttggcaataatggcctgactacgtttcttaaactcctcaaggtcattcaccacttcactaccgaagaaggtgctgccattttccagagtcggctcgtagataataaccgttgcgcccttggccttgatgcgcttcataacaccctgaatagaagactggcggaagttgtccgaattggatttcatggtcaagcggaaaacaccgaccacaacattgtgctccttgctcggatcatagtcctcatttgcctcgtatgcgccagcaatctccaacacacggtctgcaatgtaatccttacgagtacggttagattccacaatcgcttcaataaggttttccggcacatccgcatagttggcaaggagctgcttggtatctttgggcaggcaataaccaccatagccgaaggacgggttattgtagtggctgccaatacgcgggtcaaggcagacgccgttgataatttgctgggtattcaagcccttcatctccgcgtaggtatccagctcgttgaagtaggacacacggagggcgagataagtattagcaaacagcttgactgcctcggcctcggtgaagcccatgataagagtatcaatattctccttgatggccccttcctgcagcaaaccggcaaaagtatttgcagctttcaccagacgagcattctccacatcggtaccgacgatgatgcggctaggatagagattatcatacagtgctttcgattcacgcaggaattccgggctgaagatgatgttatcgcaatggtacttttcacgcacagaggccgtaaagccgaccggtatcgtggacttgatgaccataatggcatccggattgtactggatgaccagtttgataactgcttcaaccgcagaagtgtcaaagaagttcttcttgctgtcatagttagtgggagccgcgatgacaacgaagtccgcatccttataagcggcttctgcatcgagcgtagccgtcagattcaaatctttttctgcgaggtacttttcaatgtactcgtcctgaataggcgacttcttgtggttgatgagctcaaccttctccgggatgatatccactgccatgacctcgtggtgctgagacaacaacgtagcgatggataggccaacatatccggtacctgcaactgcaattttcatttgttcttcctcctctttttttatttagaaaacacgcttttcacatactcatagctgttgatatccccaatatcatagcgttttcccggcattagataggcgtgcatttccgtctgtttactcaaccatgcggcaaagctacccggtgcatcgtaaccacatccgttatccaatgcttcctgaatgcactttacatcgcaggcgcggtagcaatagaacggcggcactgccagattgcctttcgggtcttgcggcttttcctcgtagctggcaattaaatcattactatccagcgtgataatcgccgtcttttgttgctttttcagttcattttcctcgtggcacatcacgcaggaggtattcttttcctttgcgaactccacgaacttagaaaggctaaaatccagaacattgtcaccagccatgaccagcagatcatccgtcaagttcagcttttcgactgccagctgaatatctttgactgcgccgagtcgcgtttcattggtgctggtaccatcatcaatcaccgtgatcgcataaggtcgtaccttttgcttattgttcttccaatcctcaaagtgatgcgcgaacttatggtttgaaatcaccacaaattcgtcaatatcggtggtgtccaccagatcatccaccagccaatcaaggatggacttttctcccactttcaagagcggcttcggaaaattctccgtcagcggataaaggcgtgtggcataacctgccgccagaatcaaacatttcatcttcctgttctcctattcatgtatctccagtggcaaaccatctggatcaaagaagaaagtcattttctcccctgtatagctgtctgtccgaatcggttcacattcaatgtccatctcggccagttctttcacagttccttctacactttctacgtggaaggccagatgtctcaaaccgcaagcttccggtcgtttcacccacttcggtggattcttctcagcaaagatttcaagttctgtgtgttcatccacccgaaggtccaacttccaatcgtctcgttctttacggtaattctcacgaatcacttcaaaaccgagcttctggatatagaattctctggccttttcgatatcggaaacgatgattgcaatatgatggacagaattcagcttcatagttccacaccgtcagcactcttgcacaggtggaagctgtattttccttccagttccgggaacactttcagatactcagaacccactttagcttcaatctcttcggccttgcccgggtcgatcagtgccatgcagcagcctttgaagcctgcgccggagaagcggccaccgtagatgccatcggtatcagccataatctcatacagctttttcagttcatcgcagccgcattcgtagctgtaaatagaggacttgccactttcgaaaacgagttgaccgtaaccatccaaatcacctttgcgccacagttccgcacctttttcggcacgagcaaactcgctgtaataatgttccgcgcgtcttcgccacaactccggcagtctgtccttataactctcaaacacctcaaaaggcacatcccgcagccgagtatttgcaaaggtgtcatagtccatacctgcatagcccatcaatgcataggccgctgccttgcactcgtcctgccgcagattgtacttagagttcttcaaagaacgctccaaaccggagaagaaaattgccactttatagggtttcatcttctcgcttgtggggataagttcataactatcgtctttcgtgtcgaggtagagcagatgattcttcttggaaagcacctcacagctctggtcgagcttgccgcaggaaacgccaacatactggttttccgctgcctttgccgtgagaatcatctccaacggttccagatggatgccgttcactttacacagtgctgacaggaaacaaatgataaccgctgcggaggaggacaagccgccaatcggcaagctaccttcgatgatgcccgacagaccaactttaagacgatacttctcacccagcatttttgctgcaccgcgcagatgatccgcccagtcaccctgcttttcttccggcacatcgccaacaaagaactgtgcacgcttcggaaagttcaaagactgtaattcaacaacaccgttctgctttggatgataggccatgtggatgcctttatcaattgccagaccgttgattttgccatactggtgatcaatatgtgcccccaacgggctgatgcgatatggacaaaaagcgactccatacggttcctgatggtagaggtcttcatacacttctacgcacttcattttggattccttccccacagggagcccctgcgctaatggctttaggccatgtaaaaattcttataccactctgcaaactttcgcagaccttcgcgcagcggagtatgcggcttaaagccgaagtcgcgctccaacggttccgtgtctgcaaaggtcaccggcacatcgccgggctgcatgggcaccagctccttgtgtgcctcgaaatcatagtccgcaggcagcacaccggcacgcaccagctcctccgacagaatctgcacaaagtccagcaggttctccgggttagaattgccgatgttgtaaaccgcatagggaggaatgggcaacccgtcctcgccattcttcttttccggcgcttttgccatcacacggacaacgccttctacgatgtcgtccacataggtaaagtcccgcttgcagttaccgtaattaaaaatcttgatagtctcaccgttgaccagcttattggtgaaaccaaagtaagccatatccggacgacccgcagggccatataccgtgaagaaccgcaagccagtggagggaatgttgtagagctttgaataagcgtgtgccataagctcgttggacttcttggtggctgcatacagagaaaccgggttgtccaccttatcatctgtggagtacggcaccttcttgttggagccatagacggaggagctggaggcgtacaccagatgctccaccggataatggcggcaggcttccagaatgttgtagaaaccgatcatattgctttcgatgtaggcatccgggttggttatggagtaacgcacaccagcctgcgcaccaaggttgactacaatgtccggatggtactgctcaaagatgctattgatgagggctttgtctgcaaggtttccttttataaaggtatagtcctcaaatttctgaagttcagcaagacgagcttctttgatgcggacatcatagtagtcgttcatgttgtccaaaccaataaccctagtatcaggttctgtagtcagtagacgtttggcaaggtttgaaccgatgaagccggacgaaccggttatgaaaattgttttcattgtgcttccttctttttttcagattttttattcagtaagaccttcttgccaacgacgatacaaaccgtaaagataaaaacaattgcacaatatctcaaaactgtatttccatagaacagaatacctgacaaggaaataagcgtcgtaattatagcaagaacaatcataaacttgtcattgtaaatagtaccctttctcattccatgctctttacatatttttctcgcccagattccctgaaaaagtgcaaataaaatataggagaagagtgtcgtatatgcagcggccatgtacccatacagatttataaaaatgtagttcaaaaccaaattggtaagtgccgcaataatcgcgggatacattacatactttgtttttttataataaatggcaatatctgaatataaattggcaaatgatgtaaaaaacacacctgctgcaatcggaggcataatataaattgcttcatagtattcctccgttgctagtattttcactatttctggagccaagaatgtcatcagaacagcgacagcggcataaaaagacatcaattgaaccgaaacacgtttaattcctttattatcgccttcgatattcctgaatatatacggaacaaaggaagaatgaacagcctgccataccaaaagtgacaaagaactcactgtatataacgtactataaattccaaccgcactgtttcccaccatctgactaatcatcattcgatctgaaacggtaagaatttgagaggctaccgaatagcctactaagggcaagcttaatgtaagagatagtttccaaaattctctattataaagagtctttccccttacaaaagtgcatatccatataacggccgatacgccatatataaccagatagttactgaataggcgtccttcagcaactattgattcatttacggcgcttaattctataacagccgcaatagaaagagccgacgcaattaatgctgaccccatcataaccaagcctgacaatttatacttatattcatatctttgcctagcaagccaaaagtctctcgctggagcaaatagaaatcctataagcataagaataatcagttcatttggaagtcctaatatactactccatagttgcggagctaaagcatagatacatgcaattaaaaatgcaatgagcgaggtgagggaaagaacggaagattgatatctatccctttcattttcgtattctttaagtgccacaacatatccacctgaagttaacgatagcgtagcaatggcacttatcatcgaataccatgaattatacagatttacaacaccaatttgacttgttgtcatcaatcgtgtaaatatcggaactgttattatagctagacctcttgaaaacaaggttgaaagtgtatatacagctgccgactttgcttcaataggaatttttcgttttgtcgagagcaattttctcatttcatcactttctccacaccatcttgttgacaacaccggtgtagctctggataatcttgacgaccttatcggacacattttcatccacataatccggcaccgggataccaaaatcacggttcttgttcatctcgacagcaacgtccactgcctgtagcagatgatcaccatcgataccagcaagaatgaagtcgcccttatccagtgcctccgggcgctctgtgctggtgcggatgcatactgccgggaacggatgtcccacactggtgaagaagctgctctcctccggcagagtgccactgtcagacacaacgcagaatgcattcatctggaggcagttgtagtcatggaaccccagcggttcatgctgaatgacacgcttgtccagctggaatccgctctgctccagacgcttgcggctgcgaggatggcaagagtacagaataggcatatcgtacttctcggccattttgttgatagcagtgaacagagaagtgaagtttttctccgtatcgatgttttcctcacggtgagcagacaataggatgtacttgcccttttccagccccagacgggcgtggatgtcggatgcctcaatcttggccagattctgatgcagcacttcggccattggggaaccggtaacataggtgcgttccttgggcaaaccagtatcagccagataacgacgagcatgctcagaataagccatattcacatcagagatgatgtccacgatacggcggttggtttcttccggcaggcactcatccttacagcgattgccggcctccatgtggaagatgggaatgtgcagcctctttgcgccaatcacggataggcaactgttggtgtcgcccagaaccaacacagcatccggctgaatggcaaccatcagcttgtaggattctgcaatgatattgcccattgtctcgccaagatctgcaccgattgcgttcatgtacacttccggatcagccagctgcaagtcatggaaaaacacgccgttcaagttgtagtcatagttctgaccagtgtgagccagaatgacatcaaaatacttgcgggtcttattgatgacagccgccagacggataatctctggacgtgtgccgacgataatcagcagcttcagcttgccattattcttaaaagatacattgctataatcagccattaaatctgccctttcctccatggaaaaattcaattaagtttacacaattagaaataaatcccttttgactcaccgctataagcataatacttcatcaaggccaaatctttttcttgtccctttaaatgacccaaatgcaaagattcaccttttattttttcaaaatattcatctgctgttttaatcactcttgctggcacaccaacagccacagaattatccggtatattatgagacacaatagccccagcaccaatcacaacattgcttccgattgtgacacctggcaaaattatcacattattccctatatagacgtcattcccaattgtgataggctttgtaatctccaaatctgggatatattgtctatagatcaatgttccaccatcatgagtaataaattttacgccgtctgttatatgcacattatttccaaaagtgattaaccacggttcagtattccatgaaacttttccgtaaatatgaaccccccgtggaaaatttatcccaactttctccatatactcatacggacgaaaatgttttagaaagcttcgatatatcttttttatgtttattataaatctcttcttacaccggctcgaagaaggtatccggatgattcgggtcaaaaatctcgttacaggtcatgaccgtcaccaagctttctgtttcagacaaattgataatgttgtgtgtccacccagggatcatgtggacggcctcaatcttgtccccggaaacctcaaactccaccgtttctccggtgttgatgttccgctcctgaatcagtccgtgaccagccactacaatgaacagctcccacttggagttgtgccagtgctgccctttggtaatgccggggcggctgatgttgatgctcacctgtccgcagtcggcggtatggaccaactcggtgaatgagccacggttgtccacgttcatcttcaaagcatacttgaatttgtcggtgggcaaataggtcagatacagggagtacagcttcttggcgaaggagccgtccggcattttgggcatcatgagcgtagtcggctgtgccttgaactcctgcagcaagtccacgacctcgcccagcgttaccttatgggtaacaggcacacagcagtagcgaccatccgctttcagaacagtctccacgccgtcaaattcacagtgctgctccttgccttccagcaggtcgaacatcccttctacaaggtcgtcgatgtacaacagctccagctcggtgctgcggtcgttgacggtgaagggctcatcattggcaactgcccagcagaaggtgctgacggcactattgtacttggggcggctgtgacccatcaggttcacgaaacggtaaaccgcaacctttgccccggtctcctgagcatactggaagaacagttcctcgccagctttcttgctgcggccgtactcgctgttgccgaagcgacctgccagcgtggcttgaatggaggaggacagcatgatggttgccttattgttgtgcttttttaggcagttcagcaagtcggatgcaaagccgaagtttcccttcatgaagtcttccgggttttccggacgattcacgccagccagattgaacacgaagtctgctttctggcagtactcgtccaactcctccggggtagagttcaggtcatactcatagatttctttaatatccaatgccgggcgggtcttgtttttcccatcccggatgtttttcaggttgttgcacagggcggttcccaccatacccttggcacctgtgactagaatgttcatcctatcacctctttaatgtactgcagtgcagtccggaatatctacgccatccggcacagttgcgttattgcaaatagtacagttactgccaatgcgcacacgtttgccgaccttcgcatatgtgcgcacgacggagtttgtatagatcaaagcaaagtcatcgaccgagcaatcgtgatgaacctcgacacccgggttcaacagaacgccatttccgaccgtggatccgttttgaacaacagagttattcaaaaggacacagccccagccaatttttgcatacggactgacatacgcactcgaatggatcaaattcgggaaagcatatcctatcttctctgccgtatcataaatgcgttcacgtacagcattattgccgatcgtgacgaccagcaacttgtatgtcccaaaaagcttcggcaggtcggaaacccgcccgacgaccttcacaccacatatttccgttccgacttccacgccatcatcaacgaaagcgcagtcgtatttctgtatagccaattcggacaccacgcgaccaaagccaccggcacctattaccaacaacttttctgtcataaataaaaccttcacaatcagtgaattattttgcaaacccttgctgtcagtttttctactgtcattctaaatagagctgccaaaacaagtgtgagtaaaacgcaacttaacaatgccataagcatcaccatatccgatttcagcgtatttgtaaatttcactataaaccaacatcctatagaatttatagtcggccaatgaagtgcatagattccaaaagaaactgcgcccaacctcttggccagtttacactcgaagatggatttcactcgttcttcttggggaacagcaatcaaaaagcacgcaaaagatacacttgtaaacacaagatttccagcaaaaaaagctacaagaggcagtaatagaccgactaaaactagaatgtgttttttactttgtatctccgtcttctctctaagtagtcttgcgcaagatccacaaaggcacgccatgataatgcttctacctgtaatggctgccaatacggtaagtacacaaatagcaattgtctctgccttttttgacttgcaaatccaacttaccccgtaaatcaaaaatgaagaaattaacatatctcttaaacaccaaaacggtgagttaaacttgctcgttcccagtatcaagacaaaaaagggttctttcaatatatccaaaattgtcaaacgacttccatataggtgcgtcagccatgtgttttgtacgattgcctgcacactatagttgtagaaacctatagtgttctggattacaaagataaatatcgctgttccccaaataggtatcgcaaggcgaaggactcgcttagtacacttcaccaaaaagtcccttatttttcggggggggggtagacattatcaacaaatatccacttatcgtaaaaaacaagtaaagccagaaactctctgctgtaaaaaatgaaactggtccttcagtcaatattctgacaaaccaagaatcaatttgtgaagcgttttccgcatacttgtatattcctgtgaagtgacccaaaagaatgaaaaggcacgccaagcctttcattccgtcaagatagccttctctttgcgattttatatattccaccttatacattaggaatgcccttcagctcattctgaacatactcggtggtcaggatcttcttgacggtgccttccacgtccagacgggtggtgttgtggctggtgtaggactcatccgccatggtatgtacctcgccgttgaccacgaacttgtcgtagttcaggtcacggttgtcagcggcaacacggaagtagtgacccatatcctgactacgcagacgctcctcacgggtcatcagggtctcgaacagcttctcgccgtgacgggtgccgatgatgttcgtaccagtatcgccgaacagctgctgaacagccttggccagatcgccgattgtagaagcatccgccttctggatgaacaggtcgccgggattggcgtgctggaaagcaaacatgaccagatccacagcctcatccaggttcatgaggaaacgggtcatgttggggtcggtgatggtaatgggattacccgatttaatctgatcgatgaacagaggaatgacactgccgcggctgcacataacattgccgtaacgggtgcagcagatagtggtaccgccacgctcagctgccacacgggcgttagcgtagatgacgtgctccatcatggccttggagatgcccatggcattgattggataggcagccttatcggtagacaggcaaacgacgcgcttgacaccagcatcaatagcggcgtgcaggacgttatcggtaccgataatgttggtctgaacagcctgcatgggaaagaactcgcaggaaggaacttgcttcagagcagcggcatggaaaatgtaatcaacaccgggcattgcatcacggatggactgcgggttacggacatcgccgatatagaacttcacctttttggcattctccggatgcttggcctgaagctcatgacgcatgtcatcctgcttcttctcatctcgagagaaaatgcggatttccttcaggtcggaatccaggaaatgcttcaaaacagtagaaccaaaagaaccagtaccaccagtgatcataagggttgcgttatcaaatgcagacatttttaatttcctccaaatcttatagctaaaacagcggtattatctatgctgttttattcgaaagtgcgaattgtgattctctttcctttgaaaaatagaaagccagaatccatataacagcaattctcatatggggttccttatttaaaatacacaagaatatggttattaaacttatattttcaataagtcctctctttaacccgataatactcttgacaacgaatactgtcggtagcgctccaacaacaccaaattcaaccatcatgaaagttgttgttgatgtatcagagaagttagaggccaatctgtacgcattacttattccacttcctataattgcgttctgaacaaataagctccagttcttaatcaacgcctgcattcttgcagaactacccatattatcactcagaagttttgcgtaagcgcgctgttgtgcaagccccgtcaaagttagaaatgtatcaaggttaacaaacagcagaagaagaagcatatagactatgaaaaagacacaatatttcaacacctttttatttgaaatcgaatccataaatctattgagcatcagaagatcacaaaatagtataagaacaatgcccgctgatgaggctgtagtgaaaatgcaaatgtgataaataagcgctctccaaaatggcacttccttttcgaacgtcaaatccataatgaaggataggataatcattgtcgcaaaaagtcctggttcccaataaattcctgaatttctttccggatgcgacaataaataattgaaaatgacgcctattctgtagccttctccgttgctattgtaagcaatcggtaaaaatgaaaattgcccaactctttgaagtacgaaatagattaacgtgtcaaccacacacatcgtagttataaattttgtaaaaatcttcctaaagtcagaaaatgtaaactcttgagtgatgtaaaaggcaaataggaaaatcaatgatgttcgaaaataggaacccatattatccttattaatcatgcctatcccaattacaaaagccgcaaatccataggcaagaaggcctctacaaaatgcaggtcccgaaacatttcgcctcatggttgacactattacaggactcatcagtataattccggctgcagctatacgttctgagcttgaaattaatgttatatatgttgagccgcttaatatgtaaagaatgagcagtacaagtattcttctaattgtaagcttattatctaaaactttattcatcatttccccataattatcttccttaacggcttgtcagggagattaaacttgtcacgtaaaaaagaagaaacaaaatacttatatctttgcttgcgcggaaatagaagaatatctccaatcttcttttcatacacctcatcaattctaacttccttgggatgctttaatggaaattcaagtgggtaagaaggcatcgtacaaaatcgtcttgtcatttcattcatagttgaagtaccaccatgttctgaaatttcgtcaacgccaatattctttatttgattctttgcaggtgaaatgccgtacaaatcgtagtatttgagagcaaaatccatttgataatcccaagatttagatctgccgcactcctttattctttttctctccgctctccatctatacatatattgatagtaaagttgcgttgaaacaaacctattccgcattcctgcaaaattctttttgtcgtcgcatagtttcaaatccaaatcgtagtatttcaagaattttgaagaccacgacgcccacccacaaggaagaagatgtctagtaaacatataagattctccattgggagcatcatatttgccgagatagttcgttccgcatatccaaaggactttatcgttatcacggtatcttaaaagaagttcctcgcaatattgaaagaacgaaacctccggaaggttatcatcctccaagaaaattgccatctcttcacgctcgaaaacccactgcgctcctttgccaatattcccataaacgcccctattctcaacagcgtaattcttgatgacttcacagtcccaatcaattgcattttcggctgctcttctgcattcttcggcctgtttaatctcagcatcgtttcttccataatcggccattagataaattctgctcgcttgtatctctcttaaccgatctactatttgagtgatcttgtctcttctaaaaatcaaaagcacaattggaacattaaacgccattccggtttcctccatttatcacgtctaacacaaactgattcaacttcgattcatagcccctgtagtcaaaactttcgattgccaccttccttgcagacattctcatcatctcaagttcatccgtgctcatcttcaaagcacgtctcaatgtcttaagaatatcttgctcgctatctgaatccgcaatcaatccattaatgttgtcctcaacatacactccaatatctccagttttgttagcaaataccggggttcctaccgccatactttctgctaatttcgttggaaatccagcattagatgactctctattcggtctaatcacaaggctaaagtctgcctgcctaacagcatttgcaacttgattctgtggaattctgccgaagaaattaatctgatcttttagtgaatccgaaatttctcggtatttacctagctgttcttcaacttgttccttagacggcccatatatatttaaaataggaatacaattctcactattgtgaacctcatacattgcccttatgaattccactaatttatcttttccaccgcccaaagtacccgcaaaaacaaatgtcctctgttccgtatcattacactttgttcggctttctgtcttttcaacatccaaaattgttggaattctcaatgttcttaagccttgttccgaatagtaattttctaaaaagcgactaattgcaattactccatcaacctttggataataccatttccagcaactgtgaaattggtagtatctgtaatccgccttgccaaacctccaatttgtcgagtcatatttctcacaactttcaagaataattggaattctatacttccttgctgcatgtaatacgcacggaaatctgtcatatgccgaactgctaataattaaatccgggtgttctgactgaatatagttttctaaaaaagatgacaaacgtggtcttgttaaaaaacgattcagcttacttttcttcggcactatctcatagattctagtattttcaaatctcccaatgttatcatgcattctatacttattatcactcaagtagtcacatacaacatcgacattatatcccaactccgaaagggccctactaaagttctgtgcccgtgaagaataggcaataccgtatggaaacgattgaggcattaaaaatactattttcattttttccccttctattaaagaccgtctatcccactacttttccctagaattccatcaaactcttctggttcaaacggtaaaaagccactgcagggaaagaatgtcatttcgctgaagtatacttttccttgaacttcgtacaagtcaactctcacaaatggaatatcttttgacaattttcctgctattgtcttcatttcttcatatctttctggcttaggaggaacagtactcaacggtcgataatcgctccttttaaaccgcgcgacttcccagttcatatctaaaaagctcatctgagccgtcgtgtgatcctctaaaccgcaagaaacatatacaaattcaggcgttccattgaagcaaaagaatttgtagtctgtaaggccattactacccagcacttttgcagctgtgtcttccatatatttttcagcaataatacgcggttttacatttttgtatggccactcacgttgtccccagaagaaattatatttgaggcatttttcaatttttgttcgtactgaggatttgtctaatttcgttttatctctgcaaataaccaatccgccactgtcatgtgtgcatttcagaacaaactggttcggtagtttatcgaaatcgatgtcatcaaagctatcccaaacaccgagagtaggtatgacatccccccccgattttatcagcaacccatttcttcgcctcatacttatcgaccatagtcgtatactccgggttacgatcatggatcttcaaccattgaagtttttcattgaaggttactggtggatcgaggttcagctttttccccatcttaacccgataggcaatcttcagataggtctcatcatccatccaatgaaaccatccacgatgcccaagcgaaataaaaaggagccctggattatcaagaaaattctttatgctcttagacattgtctttccccttatcctacgatttcctcataaacggcctgatattttttgctcatctttactgagctgaaattctcatgtgctgatgtataggctttttttccggtctctttcacattgctgtgatacatctgctcaagttttcttccaaggtcttccccatcatcttgacggtaaaggaatccgattttgtcgtctactccaaagatttccttatgttgttcaatatcagaaagtacaactggcaagcctgtggccattgcttcaagaacgccattcggcagtccctccgacttactcgtagaaacataaacatcgcaggcttttaggtaataattcacattggatacacttccacggaaatcgatacgcaaattagacgcatacttttctgataacgcctttaattccggcccgcctccaagtagcagcatataagagcgttcatcatttccgaacttcttcacatagttttccaacaagaatgggatattcttacgctcaataaattgcccagtataaacccaaataaatgcattctcaggcaatccaagctctttccgaatcgccagtttttcgctctcatcgggcatggtatactgctcaatatcaacaccattacgaatgaaatcataggactgttgcagcttttctttgtaaatctttgtaagactttcagagcaagcaatcgttttgtcgctctttttcatagccgatagctgcatctttgccagaattgttcccttcacctttccaaactttgccgggtaatcatcatacacatagttcctcaaagtatggatttgcttatatttagcaatctggctgactgcatagtcagggaaaacgccaactgtatggattaaatcaggctgaagttcctctaatttcttccgtagagcactatcctgccccagcataatgctcttttttccggttttcacaagataatgagcagaaacatacgggagataatccgccattctgctatccgcctcttcgtcatacagcgtaatcagaatcggctcgaattcctccggatcaagatttttgataatattcaatgtctgctgcgttggtccacattttttgcaagcggtcattaaatacacaattctaattctcttcttattatttacaggcctaaccaattttgtgccgacggtatcgctatacgcaaatttgatagtgtccagtggaatcatatacaaaccgcgatgtccctcatagacagaatcaaaacagatttttcttccatcacggctccagcgtggatgcaaatcacatcgagtatcattgtcatatttaaacggagcgaacacctttgcgattacaatattaaagtcttcattcaaaaccttcagaatcgccatgcgtttgcgattggggtatgtatctgtcacaaccaaacgcctgtccggggagtaacttggatgaccatccgaactgatatgtggccacagatggcggtactcctgcgttttatcatgcatcagatagtatcccgcacctgttttctttttgttctcgaatgcaatgatcgtctgatcatctttccaatagcagtggctgaccatatcgtcatcgctcagattgtacatttccgtaccatctacattcacagtaacaagacggctatattttctttctccattaaaccatcgatgtaagaccataaaacgctttccgctcggagacaccataatatggtttaccttatgctctgcacccgccatctccctacgaggttcaaaggaagcaaaatctgcatacttcagaacaggatctaccgtattattgataatatctagtttccagatgcatggggcatcaggaatcttctcattttttgttgtttcctccacattcgagtatccatagccaggtcgaagacgatgcaatctcgcaaaatctagtgtcaacgcaaaactaccatcggaagcaacactataaaccggtttttccaacacacgttcttttccggtaaaaacattcagcacgaccgaaacgaacttaccatcacggaagtcattatagataattttctgatcaaacttgggccccagccactgtgccatacacccctgctgaacattccacgagtgagtggtcgcaattctagtggccatgttattctgttttgtgtcaataagcagaatatccgcaggatctttcggtgcaacatcggaccatgtatctttcgcttttaggcaaagcacataccgcccagaggcatcccaaggagacttatcgtagtagccaaaaaaatactcatgatttggatcatccggtgatagccgaatgacagttccctcatgatccactttagacgaaatagcatacattgtatgctgatacacactctttactgtcctttttatagctggatacttatttaactgctgattgattttttgttccaatcccatagcaatatttctcctcaacctgttactttctcaatacctttttaaacatgaactgccgtagccaattaggagcagaggccgaacaaactcgaattgccgaagactttaagtactgtgggtatgtaatgtatccagctttatacattttcttaaaaagattgacctgaatttcgacataaagctttcccgaacgccgcttaaacaggttactgtcagctcgcatccataccaatggttcctgaatgttataccctttcatgcctgcaatcagcatatcgatccacagatagtagtcctgcatatatcggacatcagaataatttcctgctttcaaaacgtctttcttgcgatacattacagatgggtggttaaagggattccttttcttagaaaaggctacaatttcatcgctagtttcaggcacaacacgctttgcatctatgacttctggggttgtagaaaactcctcaataacactgccaacaatactaagttccggatgggccgcaaatacttcaagttctttctcacaacggtaaggtcggctaatatcatcgctatccattcgaacaatcagatcattgcggcactctttcacgccaacctgcagggcatgacctaaaccgccgttcttctcaaatctaactgtgcgaattgtttcgccatacttctgttgcagctctgcaatagtcgcatccaattctggagttaaagggccatcgcaaacaagcacaaagtcattcgtcggcatcgtttggttcatcatgctttcaatactcgtcttcaagtactccggtttttccttaaagtacactgacatcaaaaccgagtaattttcatacttgtttgcgtccattatcttgttcctctctccgcatatcaaagattacagcccagactcaatctcaaagagtctgagccgtttattccttataaagctctactaatcgtcctcag

SEQ ID NO: 120 - DNA, 5805 bp, unidentified
  source 1..5805: mol_type = unassigned DNA
cttccagccagcatctacaactgcacgagagcagcttactgtaccgccgatagcttctgcaaggtcatcaagaagcttgaagttctcagcgcttcctactccacgaccaccagatacaaggatcttagcatccatgatatctactgtctcagataagttcttaactactttcaggatctctacatacttgttatcaggtgtgaatccaggattgaactcttcgataacagccttagcaccatcgttcttaggaagcttctgcataacaccaggacgtacagtagccatctgaggacggaactcagggcaagcgattgtagcgattgtgttaccaccgaaagcaggacgagtcatcagtaactgattatgcttctgctctcttccaggaatcgggttgatagggaaatcaccgatttcaagggatgtacagtctgctgtcagacctgtatggattctagcagatacacgaggaccaaggtcacgtccgattgctgtagcacctactaacaaaatttcaggtttatatttctcaacaacagatgctaatgcatgtgcataaggctctgttctgtattcctttaattcaggatcatctaccaggataactctgtctgcaccatatgcagcaagttcatctgcaagatccttaacaccactacctactaatactgctgttacttctgttgataatttctcagccagtcttttgccttcgccgattaattcaagtgcgataccgcttaccttgttatctacctgctgagcaaagacaaacacgcctttatattcttctaaattcatgttgaacctccatatttaatagcacttcgtatgttctaaattaatgcattattaaatcacatgcttctcttttaacttgtccatgatataagttacagattcggaaggatctaaagtaaccttctcgccctgtccttttcttaccttatcagatgctcttgcgatctgtgtaggtgaacccttcagaccaaggttagaatcttcaacatcctttaagtctgctctgccccatacggtaatgtcagctttgaatgcatcgaaaattccgcctggtgtcatataacgaggctcgtttaattcagcaagtgctgtaactaagcaaggcattttagcttttaatacatgatatctgtcatcatactgacgttcaacgattacgctgtcgccttctacttcgatcttctgtgcataggagattacagggattccaagatgctcggaaatctgaggaccaacctgtgctgtatcaccatcaatagcctgacggcctgtgatgatcagatcatagtcaaggttacggatagcgcctgcaagtgtctgggaagtagcccatgtgtctgcaccaccaagtactctgtctgttacaaggattcccttgtcagcgcccatagcaagtgcttcacgaagtacttcttctgccttaggaagacccattgtgataacggtaacttctgcaccgtactgatcttttaatcttaatgctgcttcaagacctgctttgtcatcaggattcatgattgtaagcatagctgctctatcaagtgtaccatcaggattgaacttaacgccaccctttgtatcaggtacctgtttaacacatactacaattttcattgttattctccttatcaaacttaatttagggttagttacatcttactttaacagatttgcagagataaccattctctgaacttcgctggttccttcgtagatctctgtaatcttagcatctctcatcatacgctctacttcgtattctcttgtataaccataaccaccatgtaactgtacagccttagttgttacttccatagccatctctgctgcgtataacttagccatagctgcttctacattgtaagatgtcttatgatcctttgtatactgatcctttgtgcaagctgccttgtataccatgaactgagctgcctgagcctttgtagccatatcagcaagctggaactgtgtattctggaactgtccgatagcacgtccgaactgttttctttcttttacatatgcgattgttctctctaatgcaccttcgccaagaccaagtgcctgagcagcgataccgatacgtccaccatccagtgtatgcattgcgataccaaagcccttgccctgagcacctaacatattttccttagggatacggcaatctgtgaagatcagttcgtatgtggatgaaccacggatacccatcttcttctccttagtaccaaagctgaatccaggtgtgcccttctcaacgatgaatgcggagatttcctttgtcattctgccacgcttctcaaccatgcctgtgatagcgaagattacatatacgtcagcttctttaccgtttgtgatgaatatcttggaaccgttaagtacccattcgtcaccatctaatacagccttggtctgctgtccctgagcgtctgtaccagcgcctggctcagtcaaaccgaaagcaccgatcttcttgccgcttgcaaggtctggtaaatacttcttcttctgatcttctgtaccgaatgtaagaataggatcacagcacagagatgtatgtgcagatacgataactgctgtggtaccgcataccttagctaattcttctacgcacatagcatatgttaaaacatcgcagccctgtccgccgtattcctttggtacaggaatacccatgaagcctgcttttgccattttctctacagtctctctagggaaaacttctgtctcatccacttcaattgcaagaggtttaacctctttttcagcgaactctctgaacagagctctcgccatctcatgctctttacttaatgtaaaatccatgttaaaaatcctccattatctataatcttataaatccgaccaagggagctgtcctgccagctccctttgccgatcttatattaactcttatttactgtaatcgtagaagccaacacctgtcttcttaccaagcttacctgcacgaaccatctttctaagaagtggtgaaggagcatacttggaatcgcctgtctcagcatagattacttccatgatagcaagtacgatatcaagtccgatgtaatcgccaagtgctaaaggtcccataggatgatttgcaccgagctgcatagcaacatcaatatccttaacacttgcaacacctgctgcatatacattgattgcttcgttgatcatagggatcaggattctgtttactacgaaacctgctgcctcgttaacctctacaggtgtcttgccgatctctgtagcgattgccttgatcttctcaactaattccttaggtgtattagcacctgcgataacttctactaacttcattctgtcagcagggttaaagaaatgcatacctactaaaggacggtcaagacctgcacccatctctgtgatagacagagaagatgtatttgtagcgaagatacaatcaggttttacaatatcctgtaattccttgaatgttgtcttcttgatttccattttctcaggagcaacttcgattaccatatcacaatctgtacagatatcctttaagccagttgtgatcttggcagcgattgcgtctgccttttcctgtgtgatcttttccttgcctacgaggaagttaagattctttaagatcttagccttaccgccatcagcaaattcctgcttaatatcacataagcatacttcatagccatcggtcattgcaaaagcctgtgcaataccggagcccattgtaccagcaccaataatacctactttcattgaaagttcctccttgtattatgaatcatatattttaatttagttgaattagcaattcttgaatggctcttttaccttttccttattcttgtcaaggaagaaagccataccatacttctgatcttctgtctcgaagcagtcaccgaagagcttctcttcgattacgattgcttcatccatatctgcgtctaagccttcgttaatagccttcttgcagttacggacagcgataggagcattctttgcaatagtagctgccatcttctctgctgcaggcattaactcttctgcaggatatacagcatttacaagaccgattctgtatgcttcgtctgccttgatatttcttgctgtgtagatcatctgcttagccataccagcacctacgagacgggcaagtctctgtgttccaccaaatccaggtgtgataccaagacctacttcaggctgaccaaatactgcattctcagaacagattctgatgtcacagctcatggaaatctcacatccgccgccaagtgcaaagccgttaactgctgcgataacagggatagggaatgtttccagcttgcggaacacatcgttacccttcttaccgaaagcttcgccttcagccttggttaatgtgctcatttctccgatatctgcacctgcaacgaatgacttagcacctgctcctgtgaggataaggcatcttacttcgtcaaggtttacagcatccagagttgcgtttaattcatcaagtacctgagaatttaatgcattcaaagccttttcgcggctgatggtgatcttaccaactgcgccgttctgctcatatactatatattccatgttcgaatctccttaatattagtctctctcaacgattgtggagcagcccataccgccaccgatacaaagtgttgcaagacccttcttagcatctctcttctgcatctcatgaagcagtgtaacaaggatacggcatccggaagctccaacagggtgtccaagtgcgatagcaccaccgtttacattcaatacatcattggagaatttcagatcagcctgtactgctaatgactgtgctgcgaatgcttcgttagcttcgatcaggtcgaaatcattgatatccataccagtcttggcaagaaccttctttgtagaagctacaggaccaacacccatgatagaaggatctacaccgccaagagcaccagctacccatgtagccataggcttaacacctaattccttagctttctcttcgctcataacaacgattgctgctgcaccgtcattgatacctgatgagttagctgctgttacgattccgtctggcttgaatgcaggacgtaacttagcgataccttcctttgttgtgccaggacgaggaccttcatctgtatctacaatgattgtttctttcttcttcttaacttctacaggaacgatttcatccttgaacttgccttcagccatagccttctcgcatttctgctgtgaccatgctgcgaactcgtcaagctgttctcttgtaagaccatacttctctgctacgttctctgctgtgatacccatatgatagttgttgaatgcatcccataatgcatcgtttaccatggtatctactaatgtagcattgttcattctatatccataacgtccctgcatagcagcgtaaggagccatagacatgttctccataccacctgcaacaacgatatcagcatctcctgccttgatcatctgtgcagccatgtttacacagttcagaccagaaccacatacaacgtttactgtaactgctggtgtttcgataggaagtccagcctttaaagctgcctgacgtgctacgttctgtcctaaaccagcctggataacacatcccatatatacatgatcaacctgctcaggagctacgcctgctcttttaagagcttccttaataacgatagaaccaagtactggtgctggagttgtgcttaatgcaccgcccattgtaccgattgctgtacgacatgcgcctgctaatacgattttctttgacat

SEQ ID NO: 121 - DNA, 12819 bp, unidentified
  source 1..12819: mol_type = unassigned DNA
cgcacctcgctcgccgtatcggcacttagaattatgcggtattgcctttattctttttaattgctcattgctaattcctaattcgtccagcaccaaccttgtggtgccgcaaaactcctaactcctccctcctaactaaacttccctcttccctttctgcccgcaatttgctatagttaaatcagccccaaagcaaatttattcaggaggaaactgccttgatttacaaaaagcaatacggccacccatttgataccgaaagcgtggtgggttcttttgtacccgcaatggaaacgattccatatctcaccagggaaccggacggcttctcttatgccatggacccgcaggatatcctgtatggcctgggtgaaaatatccgcggcatcaacaagcgcggctgggtgtacgagagcaaatgcagcgatgaccccaaccataccgaaaataaatcctcactgtacggcgcttacaacttcatgatcgtgtccggcaaagccacttttggcttttttatcgactatcccggcaaggtcacctttgactgcggctacaccgatctggacaccctgcgggtgacagtggccgaagaaaattacgacctttacatcattgagggtgaaagcctgaccgatattgtgcagcagttccgccagctggtagggcgcagctacatcccgcccaaatgggcctttggtgccacccagagccgctggagctacatgaacgaggacgaagtgcgcgaggttgtggccaactaccgcaccaacaacatgccgctggacgccgtggtgctggatattgactacatggagcgctacaaggactttacggtggacgagcagcgcttcccccattttgcagattttgccgccgagatgaaagcccagggcatccgccttgtgcccatcattgatgcgggtgttaaaattgaggacgggtacgatgtatacgaagagggcgtgaagaacggttacttctgcaccaatcaagatggcaccccctttgtggccggtgtgtggccgggccgggtgcatttccctgatatgctcaaccccgaagcccgcgcctggtttggcagcaagtacaagttcctgctgaaccagggcattgaggggttctggaacgatatgaacgagcctgccatcttctactctgaagaaacgctgaaaaagacctttgccaaaattgacgagtaccgcacccagaacctggatatctccagcttttttgcgttcaagaatcttgtggccgggctttccaacaacgaaaatgactacaagctgttctatcacaacaccaaacagggccgcatgcggcacgataaagtgcataatatcttcggctacaacatgacccgtgctgcgggtgaagcctttgagcagctggagccggataagcgcattttaatgtactcccgctcggcctgtatcggtatgcaccggtatggcggtatctggaccggcgataaccagtcctggtggagccacattctgctcagcctgcacatgatgccctccctgaacatgtgcggtttcctgtacgaaggccccgacattggcggctttggcagcaacaccaccgaggaccttgtgctgcgctggtacggcgtgggcatcttctctcccctgctgcgcaaccactccgccgccggtacccgcaaacaggagccctaccgctttaagaataaggcggcctttgccggtattctgcagctgcgttacctgctgctgccctatatttacagcgagtacatgaaagctgccctgcgcgatggcatgtactgcatgccgctggcctttgctttccccaatgacgcctttgcacgccaggtagaggacgaggtaatgatcggcgaaagcctgctgattgcccccgtttacgagcagaacgcccgcggccggtatgtctatctgccggaagagatgctgcaggtgcgggtaaagtgcagtgagaacgaccgcatggaaaccaccgttctgcccgctggtcatcattacatcccggtggagctggacgaagtggtgttctttgtgcgcaaggggcatatcctgcccatcgccaagggcggcgatagtattcaaaatgtggcaagcgtgaattttgcggatcttcgcctgttcgcccatgctcccgatggtgccgcctatgagtattacaccgacgacggcgagacgaaagattacgataagccggagcattttgtacatatcacgctggacgcggatggaaacgcggagagcgacagcgagaatgtaaaagtggaaggataagttaggagggaggagttaggagttatctcaatcagaaatgagaaattagcaattaggaattgatatagaggcagggcccggtgcgattgtaccgggctctgcctttctgttaatttctaattgctcattactaattttctcttcactttttgctcatttttcttcaatttttttcacttttttcgtgacattttcctttatttggtgtatactgatagcaagaatacggcaaaaaaagcaaattttgcggttttgcacgcatcaatgttacggaccaaaacaaacggaggtttcaatccacgtattatgaagacaaccgcgtaaaagacttgaaagttgcctacatcggcggtggttcccgtgggtgggcgtgggggttcatgatggaccttgccgcggatgcccagatggaaggcaccgtggcgctgtatgatatcgaccacgaagcagccgagcacaacgagatcatcggcaacaagatctctgcccacccggatgcggtttcacactggaagtatactgtggcggatacgctgcagcaggccctgaccggcgcggattttgtcgtcatctccatcctgcccggcacctttgacgagatggaaagcgacgtccacgcgccggaagcttacggcatctatcagtcggtgggcgataccgtaggtgcaggcggtttcatgcgcgccatgcgcaccatccccatgtatgtcaccatcgctgaagcgatccgtgattacagtcccaatgcctgggtcatcaactacaccaacccgatgaccctctgcgtgcgtaccctgtaccatgtgttccccaagatcaaggcgttcggctgctgccacgaggtgttcggcacccagacgctgctgacccacattctggatgaggaactgggcctgaaagatgttgcccgccaggatatcaaggtcaacgtcaagggcatcaaccactttacttggttcgataaggctacttacaaaggcatggacctcttccccatttaccgcaaatttgtcgaagagcactatgaatccggttatgagtacggcgacacgaattggatgaacagttcctttgcctgcgccaaccgcgttaaatttgatttgttcctgcgctatggctgcattgccgccgcgggcgaccgccatctggcagagtttatgccgggcaagacttatctggaaagccccgaagccgtgtgcgaatggaagtttggcctgaccaccgttgcgtggcgcaaaaatgagctgcaggagcgcctggcccgcagccgccgcctgcgcaccggtgaagagccgatcgagatcaagcccgatggcgaggaaggccacctgctgatgaaagccctgctcggcctgggcgatctggtcagcaacgtgaacattcccaaccacggtgccattgccaacctgccgtgggatgccgtggtggaagtgaacgcgctgttcagccgccagggcgtgcagtccgtgaacgccggcccgctgcccgccaatattctgccgctggtagcccgccacgtttacaatcaggagaacaccctaaccgctgccctgacctgcgaccgcacccttggcctgaccacctttatgaacgacccgcaggtgaccctgaactggaaccagggcaaagaactgtttgacaccatgctgcacaatacccgcgcatacctgccgaaagaatggaacgcgtgatgtagttaggagttttgcggcggggcgaagtcacagcgcggaaaaattaggaattagcgattagtaattagaaattgatagtaggcagggcctgatgcagttgcgtcgggccctgcttttttaggtaaagcattcaaaaagaagcgaattaccgttgttgtccgtagtgcattgcgaagtggaacctgtacggctggcatcaatctgttcaaaaggtccaagagttaccaacagaataatcatataaacacaaaatgcgaaccacgttgtacgaagtggttcgcattttgttatcgtaatgtatattttatttcggcagctgaatttccggcatcagttcatcggatacgatctgcagcatttcttccagcttggccaggtcatcggggctgaaccgctgtttggcacgctccatgaccagatggaggtaagaatagctgatgttatagtaatcaatgtacttttgggtcggccgcaggcggtattcccgcttatcggtggtggattggatgcgctccacatagccttttttgaccagggagttgatcttataagctgcgttgggggtggaaagattcatcatgtggctgaactgcgcaatcgtgggttcccccagtgccatgatgacttccatgcagaaagattctaccgtcgtcagcgtggcttcacggtcttcaaaacggttgaagatctgtttataaaaatgcagcttgaattttgtgtatacctgcccaaatgtctgatccagcatggcgagaatccccctgtaggttaatgaatttattatagcacaatccaccatgcaaaaccagccctcaggcatccgtgataacaaatgtcagctcggcgttggccgcgcgcacaccatccacccaggcggtggctttgccgatgcccaccgggccatgctgctctaccagctcacattccaaagtcagcacatcgccgggcacaacctggcggcggaaacgggcattttttaccccgccaaacagggcaatctttccacggttttccggcaggctcaacgcggccaccgcgccggtttgggcaagggcttccagaatcaatacccccggcataaccggatggccggggaaatgtccctggaaaaacgactctgtgcgggtcacgcacttgattccgcgcgcccactggccgggggtatagtcaagaatcttatccaccagagcaaacgggtaacggtgcggcaggatcttttcgatttccgccgccgtcagggtccggggcggttcattgggtgtatagttcatcctcatccctcccaacgcttgaacaccacacatgcgttgtggccgccgaagcccaggctgtcgctcatggcataatccacctgtaacgcgcggccctggttgggaatatagtcgagatccagttccgggtccggctcctgcaggttaacggtagcgggcaaaaaggcatcgtgcagggccagcacggtaaacacgccctctaccccgccggcgccgcctagcaggtggccggtcatcgacttggtcgaggatacggccagctcatacgcgtggctgccaaaaaccgacttgatggccgcggtctcacagctgtcattcagatgcgtggaagttccatgggcattgatgtagccaatctgttccggctccactccgccatcagccaatgccagccgcatacaggacgcgccgcctgcaccgcccggtgccggggcggtaaaatggtaagcatcgcagttagcgccatagcccacaacctcggcgtaaatcttagcgccacgctctttagcggtctccagttcttccaacagcagcacaccgctgccctcgcccatcacaaaaccgctgcgccgggcatcaaaggggatcgaggcccgggccgggtcgtctgcgatgcagagggctttcatgctggcgaaaccgcccacccccaacgggctgatgcagctttcgctgccgccgcagagcatacggtcctcgtatccatcgcggatacggtggaacgcatccccaatcgcattggtaccgcctgcgcaggctgtggtggggcagctgcacataccctgcaggccaaagcggatggccacctgccccgccgccatattgccgatggacatggggacaaagtaggggctgaccttttcaaagccccgctgctggccgcgggtgtgttcttcctcgatcgtgggcagaccaccgatcccgctggacaggatcacgccgaaccgtgtgtggtcgatattttccagtgcaatgccgctgtcgtggatggcttcgtcagcggcggccacggcaaactgggtaaaccgcgccattttgcgggcttcgcgccggtcaatacgttcggcagggtcaaaatctttgacttctgcggccagtttcaccttaaaatccgttgtatcaaaagccgtgatcggcccaacggcgcagcggccagctttcacggcggcccagctttccgccacggtattgccggttgggtttaccgtgccaaggccggtgataacgacccggcgtttcttttctatcttcatagctgcacctcacattcccattccgccgtcaacacaaagaacctgcccggtgatgtaaccggcctgttccccggccaggaaagccaccgccgcggcaacatcttcagcacggccgattctgcctgccgggatggccgctgcggctgcggcgcgggcagattccggcatagcggcggtcatatcggtttcaataaatccaggtgccaccgcattggcggtaatattgcgtgcggcgtactctttggcaacgcttttcgttaggccgatcagccccgccttgctggcggcatagttggcctggcccgcgttcccgtgcaggccgaccacactgctgatattgatgatacgcccataccgctggcgcatcatcaagcgggaagctgctttggtgcagaaaaacgtccccttcaggttggtaaaaagtacattgtcaaagtcggattcggtcatgcgcatcagcagtttatccgcggtgatgcccgcattgttgaccagcacatcgatccgcccaaaagcggcagcggtatcttccaccagattttggcaggcttcggggccgcgcacatccgcttgcagcgtgatggcctgcacaccaaaggcgcggcaggcagccgctgtttcctcggccgcggctgcgctgcctgcgtagttgactgcaatgttcatgccgttttcggccaatgcaaggcagacggcacgaccaatgcccttggcgccgcccgtaaccagagcggcacggcgcatgctttcggtttgcggcatggtcaggctcctttcatggtgcaaagcaactgctgcagctgtgcagcagtttccaccggatagcacgagatagcatttcccaccgtctttttcacaaatccggtcaacaccctgccggggccgatctcaatggcggtatccacccccagttccgccaaacggcggacggtggcttcccaacgtacgccggactgcacctgtttttccagcagcgtggcgaccgtgtcattctctgccatttcatgcccaaggcagttgaacagcaccgggaactgcatcggcgcaaaatggatggattggaacttttcccgcagcgcatctccggcggggtgcatcagcagcgtatggaacgcaccgctgacgttcagcggcaggcagcgccgcgccccagcggcaagcgccaggtcggcagctttgtctacagcagctttctcgccgccgataaccagctggccgggacagttgtaattgcagatctgtacaacgccctcttcggcggctgcgctgcaacatgcctgcaaggatgtttcatccaatcccaaaacggctgtcatcccacaggtgcgcccggcagcggcagcagccatcgctttgccacggaaagccgttaaagcgaccgctgtctgcatatcgaacacccccgcacaggccaaagcggaatactcccccagggacaagcccgccgcatagtccggcataatgccctgctcccgcagcacagcggtaagaccggcggcaaaagctgtcatacaaggctgggtgtattgcgtttccttcagtacgcccgccgcgtcggtaaagcagacttctttcaaatcaaaatccaccgctgcggcagcttcgtcaaaggcggcgcggaaggcaggaaaggtttcataaaggtcctggcccataccggcatgctgactgccctgcccagcgtataaaaatgctagtttcatcagatggtctccttgtacaaccccgtgatgcaggtctttgcctcgcttaccattgcggcaaaaatctcttctaccgggcggacttcatgcagcagccccgcggcctgtccggccatcaggcttccgttttcggtgtcgccgtcaaacacagccttgcgcagactgccaagcgtaaagcgttccagcgccattttgtcggccccggctttttcctgcctgacatactcgcggctcattcggtttttcaacacacgcaccggagtgccgccgatccgcccggtcacaatggtatcgctgtcgcgggctttcagcagcgctgccttgtagttttcgtggatggggcactcggtgctggccagcagacaggtgccgacctgcacgccgcaggcccccagcgccagcgctgcggccaaaccgcgcccgtcagcaatgccgcccgcggcaatgaccggcacgtggacggcatcaacgacctgcggcaccaacgccattgtggtcatttcccccacatggccgccgctctctgtcccctcagcaatgacagcgtcaatgccaagcggttccaggtgtttggctaagattgcggcagctaccaccgggataaccgtgatgccggctgctttccacattgccatgtactttcccggatttcctgccccggtggtgacgatctttacgccttcttccaccacgattttggcaaattcatctgcctgcgggtgcatcagcatgatgttgacaccaaaaggctggtcggtcagcgcacggcagtggcggatgttttccctcagggcatcggcatccataccgccggaaccgatcaggcccagcgccccggcgttagagcaggcagcggcaaattcgcccgtggcgatattggccattccaccttggataatgggatatttcgtacctaaaatttcattgagcagcttcattttctaccctcatacgtcagcagcattccgccccaggtcagcccgccgccaaaaccgatgcaggccagggtctggccggggtgcagtaaatcattttccaccatttcatgcagggcaatgggaatgctggcagcactggtatttccatggcggtccatatttttataaaattttgacggttctgcgtgcaagtgtttgatacaatggtcaataatgcggctattggcctgatggcagacgacccaatccaggtcagccaaggtcttttggctgcgctccaacacggtttgcaggcaacgcggcatggtttccaccgcaaaacgaaagaccgccttgccatccatcgtgatcggggccgtatcgcaggctgcggggccgccgacacggatggcttcgctcccccgtgcgcccaacgtgacggcaaacggcacatcttcggccagttccagaatagccgcaccagcgccatccccaaacagtacgcaggttgtgcggtcggtcgggtccaccatgcgggacagcgcttcgcagccgatgaccaacgcatagcgtccgcccaaggtgttcaacagcccgtgggccgcagcaatagcataaataaaaccggaacaagctgcatttacatcaaaagcgggccggttctccggcagccccaaggccgcctgcacacggcaggcaacactgggggtagccgttggagccgaaagcgttgccgcaacgcagcaggcaatctcgcttgctgccagcccgctacgcgccagggcctggcgggcggcggcaatggccagcgtggcggcatcctcactttcggtgcagtaataccgctggcggatgccggtgcgggtcgtgatccattcatcgctggtgtccacctgtcggctcaaatcctcattcgtcactacatggccgggcagtgccccgccggtggccagcagctgtaagcctttcatgctcccctcatttctccgatacggcggtattttttgtatctctggtcggccaatgcctttccactcatcttgcacaaggcggcaaggtgcgcggcaatggcggtatccaaccggctgaaaagcagctgccgcccgcgctgtgcaccgcccagcggttcggcgatgatctcttccacaattccatccgtatacaagtcctgcgccgtcagtttcatcatggtacaggcttcgccgctgcgggaggcatctttccacaaaatgctggcaaatccttcggggctcaacaccgaatacacggcgttttccagcatcagaatatggttggcaacgccaagccccagtgcgccgccgctggagccttcgcccgtaacgatggccagtaccgggacggtcagaccgctcatctccatcaggttgcgggcgatggcctccccctggccgcgctcctcggcatccttaccggggtaagcaccgggggtatcaataaatgtgatgatgggccgcctgaatttttccgcctgcttcatcacgcgcagcgccttgcggtagccttccggtcccggcatgccaaagttgcagcgcaggttttcttccagcgtcgttcctttgcggtgccccaaaaccgtaacgggcatcccatggaatcgcgcgataccgcacaaaatggccgcgtcctccttgcattgccggtcaccgcactgctcaaaaaagtcggtaaacaggttgtcgatgatttcgccgatatgcgggcggtcagggcggcgcgccagaaaaactctgtcctccggcgtcagtgatgtgcagcgctgcaaaagcatgttttcctgggcggaaagctctgccagctcagcggcatgggtagtcgtattcgccatttcggcatcatcggtgctgctacacaatgcatcaatctgcgcgtccagcggttccagctgctgcaaaacctctttgatcatctgcatttcctcccctgtgtatggagctgcaaaatccgcgtcaaaaccccttttaattcagtgcgcggcacaacctgatccacaaagccgtgttccagctggaactcactgcgctggaaaccatcgggcagcttttctccgatggtctgttcaatcacacgcggcccggcaaacccgatcagcgcacccggttcggccagcgtgatgtctcccaggctggcaaaactggctgtgacaccgccggtggtggggtgggtcagcacactgacatacagcccgccgctgcggctgaaccgttccagcgcggcactggtttttgccatttgcatcaggctgaaaatgccctcctgcatccgcgctccaccgctggcagaaaaaataaccagcggaagccgtttatcagcagcatattcgattgcacgggtgattttctcccccacggcagtgctcatgctgcccataaaaaatcggctgtccagcacagctgccaccgcctgcacgcccccgatcctgccggttgcggtgacggcagcttctttcaggcccgttttgaccgaagcagcggccaacttttcctgataatcgggaaaatgcagcacatcgttgggggcaaggtctggattcagttccttaaaggttccgtggtccaaaatcgtgctgagccggtaataggctccaatgggcagatgtaccccgcaattggggcatacatacaggcttttggtccagacctgacgggtggcgcggcggccgcattttttacattcaacaaattgcggctgcacccagccgggcgcagccgtaccagcatcgcggcggactttcagctggaagctgcgctcctgctggctgactgggaacagcttttcaatggcattcatccctaataccctttaggctgcccgcgcaaccagatagttgaagatatcacccacagtcttgagcgttcccaggtcctcatcggcaatcgtgatgccaaacttgtcctcaaacgccatgttcagctccaccgcgtccaggctatccgcctgcaggtcctcggtcaggctggcttccatcgtaactttgtctgcatcgcagttcagggtatcaacaaatacttctttcaattcttcaaagctcataatttatacctcgtaattatttatctaaaaatattgactcaattgtcaacgaggctattatatcacatttgtcttgtatgtcaatattgttaggtaaaaatatttatctaattatgctgatttcttatccactctaccagaagcgaacatcatgcaaaaattcgcacaacatcatcccctgcagcgctgccattgctgctgacaggtagacgcaatgcaatactttgggtgagggcactcccccgcttcgtctattgacaattctgccacctatagataaaaacgcctgcaaactcaggcgtaaatccgcctttatgcacaacggcgtgattgcccgcgctctggtgctggacaagctggtttctacctacctggcgcagcaccccggcgcagtggtcaacattacctgcagagcatctccttgcttcttacatattttttataatgcagcaaacccaatattttctgagtgacacaccgcaccacggtccaccaacattattctttattttttacattattcactcaaaaagcagggctcggtgccatttccgcaccgggccctgctctatttccaattcctaatttctcattgctaattcctaaggcaataccgcataattctaagtgccgatacggcgagcgaggtgcggcagc

SEQ ID NO: 122 - DNA, 8313 bp, unidentified
  source 1..8313: mol_type = unassigned DNA
gatatatgcaacaaatactcaagcagaccgttgaaatacatcggcacttaatgagcggcagcaattttgctgctgcgaatttagtaccgttatgtattgaaccgagcgagagcgcgtctgcggaggattctgttgcatatattatccgtaggataaatggggctcgcaattcaaaataaaaaagacgatcgaacctggaccgtcttatgaactgggctaccaggattcgaacctggaaaatgctggagtcagagtccagtgccttaccatttggcgatagcccatcattatgaagtttggagactcttttgtgtctcacaagatggtattatattacatgtcttttgaaattgcaagccttttttgaaaaaaaattacaaaaagttgaaacatactacaattccgcctacttgtcaggaattggataaataattgtttgacaaacggaaacaaatactatatgattgcttacgttgaacgctaggagaaaacaaagatttatgtaaatcgattgcgtagtgaacaaccatttgaaaggaagtaagtatgagcagcgtaatatatgtggttccgtgggccatttgtgatacagaaagcatatatgtgaagaaagtcaagggcgacgatgtacaggtgccagagaagggcagtgagtttaattcatggtgcatccgaaacgtgattgcaagtccggatcgcagaacaaaggatacgtatgcgattgtggatgtattcaatggctataaggaaaagatgaatgagaagggcatgtctgtgttctcacttaccaattcacaggatgtattggaaaatctgggcttccagaaagcggatgatacagaggcatcatttataaagaataaagttttgaagttgaataaggacaagaaaaaatagaccacgcatgtttgtggtctattttttagaaagtaggaaaaaatgatagaaattggaaaatggaatgatctgaaagtcattcgctcgaaagactttggtatataccttggtgaagaggacagctcgacggcagagacggtgctgcttccgagaaaacaggtgccggagggtgtgaaagccggtgcatccctgcgcgtctttatttaccgtgattcacaggaccgaatcattgcgacaacgaatacaccattgatcacagtcggtgaggtaaagaagctgcaggtaaagagcgtgacaagcttaggtgcatttatggactgcgggctggaacgtgacgtgctgcttccatttaaagaacagacggcgaaggtggaggctgggaagtcctatctggtgcggatgtatgtggataaatccggacgtctggcagtgtcaatgaagataggaaaagaattgcagccaatcgaaggctacgaagaaggacaggatttcgttggaaccgtgtatgagttcaagaaggattttggtgcatttgtggcaattgacgacaaatatccgggactcatctatacaagtgaattgtatgcgccagtgagggtcggcgatgaagtacatggcagaatcgtaaagatccgtccggatggaaaggcagatctcgcgttgcggaagcttgcgtatgcgcagatggaagaggacagtgagatggtatatgccgttataaagagttataagggcgttttgccgtttacagataaggcagataaggatataatcaagaaggagttcggactcagtaaaaacgcgtttaagcgcgcctgtggacgtctcttaaaagagggaaagatccgcattacggagaagacaatcgaactcgttgattagataacatttataggaggcgcatatgtgcgaagcacatattcaggatgcgccgacgacatgccgccgaacgaatgtgagggggcaacaccacaaaggaggtacttatattatgaagacagtgattcagacaccaaaggcaccagccgcaatcggaccatattcacaggcgattgcagttggagatatgatttatacatcaggtatgattccaatcattccagaaacgggcgagcttgagacaggcgatgttaaggcacaggcgaagcaggcaatcggaaacctgattgcgttgttgaatgaggcaggcagcgatgcggagcatgtggtaaagacgacggtatttattaaagatatgaatgattttgcggcagtgaatgaagtatatgcaacgttctttgagaaagactgtccggcacgttcgtgtgtggaggttgcaagacttccaaaggatgtgaagattgaaatcgaagcaatcgcaatcaaaaaataatataataagtatattgaacagtaaaaacaagtgaaaacgctcgattatgttattttctgcttgcataattacatatgagtggtaaaataaagggcagataatacgcatgagggaaaggaagtaataaatcatgagcaaaaatattgattggtcttcactcggctttggctatgtgcagacagacaagcgtttcgtatcaaactataagaacggtgcatgggatgatggtgtactgaccgaggatgcaacagttaatctgagtgagtgtgccggagttcttcagtatgcacagacctgttttgaaggtttgaaagcatatacaacagagaagggacagatcgtgattttccgtcctgacttaaatgcatcccgtatggcagattcctgcaagcgtctggagatgcctgtatatccggaggataagtgggttgatgcagtcgtaaagacagtagaggcgaatattgactgggtaccaccatatggttccggtgcaaccctgtacatccgtccatatatgttcggcagcaacccggttatcggtgtaaagccagcggatgagtatcagttccgtgtattctgtacaccagttggtccttacttcaagggcggtgcaaagccaatcgtaatccgtgtcagtgattatgaccgtgcagcacctcatggaacaggtcatatcaaggctggattgaactacgctatgagcttatatccaatcgtagatgcacataatcagggcttcgctgagaatatgtatctggatgctgcaacacgtacaaaggtagaggagacaggtggagcaaacttcatcttcgttacaaaggatggcacattggtaacaccaaagtcagacagtatccttccttctatcacacgtcgttcattgatggtagttgcggagaagtaccttggcatgaaggtggagcacagagaggtttacttcgatgaggttaaggatttcgcagagtgtggtctgtgtggtacagctgcagttatctctccagttggaaagattaacgaccacggcaaggaaatctgcttcccaagtggaatggaagagatgggaccatatacaaagaagctgtatgacgctctgacaggtatccagatgggacgtatcgaggcaccagaaggctggattaaggtaatcaaataatttatgaataaaaaaatattaaccatcacaattccctgctataattcgcaggactatatgaagaagtgcgtggatcacgcattgcttggtggcgaactggtagaaatactgattgtggatgatggatctacagacgacaccgcgaagatcgcagatgcctatgcggagaaatatccgacgatcgtaaaggcaattcataaagaaaatggtgggcatggcgatgcggtgaataccggtatcgctcatgcaaccggagtctatttcaaggtcgttgacagtgatgactggcttgataaagaagcctataagcaggtgttgaaggtcttgaagaagcttgtggaagatgagaaggatttagatgtcctgctctccaactatatctatgataaggtggaacgccggaagaagcgtgtcatgcgttatcatggtgctttgccggagaaacggatcataagctgggaagacagccggattcggttcaacaagtttcagtatgtattgatgcattcggtgatttaccggacacagctgctgaaggactgcggactgcaacttccgaagcatacattttatgtggataatctctatatctttgaaccgatgatccatgtgaagaagctgatgtacttaaatgtcgacttgtatcactattatattggcagagaaggacagtcggtcaatgaaaagacgatgatgaagcggatcgatcagcagatgcttgtcaatcggacgctgatccagtttttcagtgagaaccgaaaagaactccctccacagatgtaccgtttcctgttccagtacttagatatgatgatgtgtgttgcatcgagtatctgtgttgtatcgaaggacaaggagctgtataagaagaaaaaagagctgtggaagtatctgaaggatacggatgcagaattatacaaggagcttcgaacaacgttgtttggaatcacattcaatctgcacggaccaacgggcagatggtttgcaagaaccggatatcgtctgttccagaagttgtttggatttaattagacaaataaaaaaattccgaagtttgtttatatcagacttcggaattttttatttatcattgtttctttctgccccaagggattacatagacaatcggatagaggattgctgccagcgcaaatgcaccgatgacatcccatacggaatgctgcttcaaaaacatggtagataagatgatcaggatgccgatgattgttgcgattaccttgatccatgttttatctttcatgcccttgctcctgtacagggcaacgagacaaccaagtgtgttaaatacgtgcagacttgggaatacgttcgtgcttgtgtctgtcttatacagcatcttgacgagttttgcacacaggttattgttgtaggagatatcctgccgcagatccagaccattgtgccagatggtgcagatgatcaggaaaatcgtcatgccgctgaacagatacgcacagcattgataatattctttcttggaatagaaaaattcatagccgacaatcgccgggacgaacaaaaaccacataaaatacggaataataaaatattcacagaacggaatcttgtagtcgattggcatcgatacaagatgaaaatccgtagttactgtcttttccagccacataaaccatggcatgtagaaaacgatgtagagtagtgtccatatgtggttatattttctgatgaattttcctgccttcataagggggtgtgaaaacctttctttttcttttgtgtcacaaatctgtttgccgacaggagttagtatatcatgcttcctcagaatgtgcaatcgcagcgccaacaaatcctaagaataatggatgagctttgttaggacgactcttaaactctggatgcgcctgtgttccgataaaccaagggtgatctggaagctcgatcatttctacgatatgaccatctggagataaaccagacaggagcatgccgtgatcggtcagaacctttctataatcgttgtttacctcataacgatgtctgtgacgttcgttgatgtggtccgtaccatataactggtatgcttttgaactcttatcaagtacacaaggataagaaccaagtcttagtgttccgcctaagtctgtgacaccattctggtcaggcatgatatggatgacctgatggctggaactagggttgaactcggagctgttcgcatccggatagccgacaacatttcttacgaattccacgatggtaagctgcataccaagacataagccaaggtatggaatcttgttctcccgtgcataggtaattgcctcgatcataccctcgataccacggtcgccgaaaccacctggaactaagataccggatacatctcctaagatctctgcaacattttcctttgttacaagttcggaatctacccacttgatctcaacatccgcacgatgtgcgacaccggcatgcttcagggattctacaacagagatgtaagcgtcgtgcaggctgacatattttccaactaaagcgacacgtaccttcttttgcggatgcttccagttgtccaccatggtgatccagtcgtcaagatctggctttggacatgggatatggaggcatttgcaggccgcatcggcaagcttctcgtgctccatagcaagtaccacttcatataatacatccacgtccagattctggatgacacattcgctaggaacgttacagaagctggcaatcttatctttaattgctttgtctaacggaaggtcggaacggcaaaccaggatatctggctggataccaagtgactgacaagtttttacacttgcctgtgtcggctttgtcttcagttcgccggatgattttaagtaaggaatcagtgtgacgtggatcatgatgcaattctcatgtccgacatccaactgaaactgacgaatggcttccatgtacggctggctctcgatatcgccgacagtaccgccaacttcgatgatcgcaatctcatcgtcttttgcatctggattgcgatagaaacgatctttgatttcatttgtaatatgagggatgatctgaaccgtatgaccgccgaaatcgccacggcgctccttgttcaggatgctccagtaaacctttcctgttgtcacgttagaacccttgttcagactctcatcgataaaacgctcgtagtgtccaagatccagatcggtttctgcaccgtcatctgttacaaatacttcgccatgctgaatcggattcatggttcctggatccatattgacatatggatcaaatttctggctgatcactttgtatccgcgcgctttcaacagacgtccaagtgatgccgcggtaattcctttaccgagaccggatacaacgccgccagtgacaaaaatgtactttactgccatagctcattcctctttccgtttgatttttatattatcattctttttgctttagaaaaattcaaaaatcattataaacgaaaaggaaaacgaagtcaattacaaatggttagaataaaacataagctgaaagacgcggttatcctttttattctgccggaacaaatatttgccggattttcccattttgcggtaggatttcacgtcctgatacttcgttacaatgttcaaaaactgttgtttctcctctggcacatggtagattcgttcaaaggcttttgcctgtctggagatgtgaccgccatttgtacggctctgcttcaggcggcggaagaatttggaacagccggaaggagctgctgcaccaagcgtatttcctgcatgctggcggtacttataatgagcggcgctgtcgtagtaaacttcgccgaaacaggacgcaactagatagagccaccagtcgtgcatgtagatatcctgtggcatactgattcggatataagacataagtgcctgattaaatacaatgcttgcaccgcgggcgatgttctcaatcaatgcgttccgaaagtccggaatcagttctttgcctgcggtctgcatagattctgaaagtggatttaatgcgtcgtcagtattccatgcatcacaacagtagagaagtggtgtggtaaatgtacggatctgggaatcattcttctttttctttggggattttgatttgcgcatctgttcaagcttctggcaggcgatggaaagcttgtcttcgtcccacacatcgtcctgatcggagagggcatagaaatccacatccgggtcagataattcgaacagacgaaagaaagaagcgaccacgccgcagttttcgccacataggtaacaaatgttatcgtggagtgcggcataggcgcgcaggatatccacggtgccatcggaagaaccgtcgtcgcggacgaagagcttcacggcaacatttttctgattcaagatactgtctaattgttctttcaagtaagtttcgccattgtaagtagatagcagaacctgaactgtatacataatagtctccttttataaatgcaatgtcgtagaccgttaatcggtcaactctgtataaatcgtagtcataagcttgtgtacaagcgaaatatcaaaatatttcctgcagtttgtctggttttcttcaccaagtgcctgtgcaagtgccggatcattgagaattttattgatttttgctgcatatgcgtctgcgtccttcgttggaagcaggtaatgcttgctgcgtgtatgtggctctgaggcaagcagatcgcggtttccgcggatatccgaagcgatgattggaagtccggcagccatcgcctgcatgacagcgacggataatccctcctgaaagcttgtaaataaaaacaaatccgcgcagtgatacagatccagcacatccgtatgatagcccgcgaaaaatacacggtcaccaacctgcagtttct

SEQ ID NO: 123 - DNA, 74385 bp, unidentified
  source 1..74385: mol_type = unassigned DNA
agatatagatacacttgagagagcggagataatacgtgacctgcgtcttgacgtatttgacgtgctcgtcggcatcaatctgctcagggagggccttgatatcccggagattacacttgttgccatactcgatgcggataaggaaggcttccttcgctcagagacttcacttatacagacgataggacgtgccgcacgtaacagtgagggccatgttatcatgtacgctgacaagattacagactccatgcgtgtcgcaattgacgagacaaagcgtcgtagaaaggtacaggaagagtacaatgaggctcacggcatcacgccacagactatacagaaatccgtgcgtgatctcatagctatctcaaagaaggtagcggccgatgagaatgctcttgacaaagatccggagtcaatgagcaaaaaagagcttgagaagcatattgcagatatagagaaaaagatgaaaaaagcggcggcagagctcaatttcgaggcggctgctgagtacagggataagcttattatgcttaaaaacacattgagagacgtaaaataaaagcttataacatcctgaagcaatttggaggaacacaaattatggcaaaaaaagaaagaaaatacatcaaaatacgaggtgccagcgaacacaatctaaagtgcgtcagtctagacatcccgagagatgagtttgttgtttttacagggctttcaggctccggcaagtcatcactggcatttgataccatatatgctgaggggcagcgcaggtacatggagtcactttcatcgtatgcgcgtcagtttttaggacagatggaaaagccgaatgtggagtctatagagggacttccgcctgccatttccattgaccagaaatccaccaacaagaacccacgttcaactgtcggaacggtcacagagatatatgattacttcagactgctttatgccagaattggaataccacactgtccgaagtgcgggcgtgccattacaaagcagacgatagaccagatggtggatactgttatggcgctgcctgagcgcacacgtatccagcttcttgcaccggtggtcagaggccgcaagggtgagcaccagaagctgttcgagagagccaaaaagagcggatatgtgcgtgtgattgtagatggcagcatgtatgagctctccgaggatattccaatggagaaaaatataaagcacaatattgacattgttgtagaccgtctggttgtaaagccgggcatagagaagaggcttactgattcacttgaaaatgtatttgaactgacagagggcaatgcaatagttgatattgtggatggcgaacagatgactttttcccagaattttgcgtgccctgactgtggcataagcatagatgaggttgagccgagaagcttctccttcaacaatccgttcggagcatgtccgacctgctacggactcggctacaagatggagtttgacccgcagcttatggtgccggatgcatcgctttccatatctgagggtgccatacaggtgatggggtggcagtcatgtacagacccaaagagctatacctatgcgacacttcgtgcgctgcatgagggctatgggcttcctctcgacacaccgattgatgatttatctgcagatatgaaaaaactgcttttttacggtggagacggcagagtgctcaaggtcagatacaagggtcagagaggcgaaggcgtctatgaccttgtatggaacggccttgtggacaatgttgagcgccgatacaaggagaccttttctgatacggcaaaggcagagtatgagcagtttatgcgcattactccgtgtacgagctgtaaggggcagagacttaagccgtcgtcacttgccgttacggttgcggacaagaacatatatgagatgacctccatgtctgtgaaggagcttgtgaagttccttgctgatatagagcttacagagcagcaacactatataggagaccagatactaaaggaaatccgtgcgagagttggctttttgcagcaggtcggccttgattacctcacccttacccgcggcacggcaagtctttcaggcggggaagcccagcgaatcaggcttgccacgcagataggctcaggacttgtaggtgtggcatatatacttgatgagccaagtatcggactgcatcagagggataacgacaagctgcttggcgcacttatgaatcttaagaatctgggaaatacgctcatagtggtggagcatgatgaggataccatgcgcgcagcggattatatcgtggatgtagggccgggagcaggctcgcacggcggggagatagtggcagcaggctcgttaaaggacattataaagtgcaaaaaatcactcacaggagcatatttgagtggtaaaataaagataccggtgccacaggagaggcgcaagccaagcggatatatcacgataagaggagccagggagaataacctgaaaaatattgatgtgcagatacctcttggtatcatgacctgtgttacaggcgtgtcgggctcgggaaagagctcattgaccaatgagatactctacaagcatctggccaaatccttaaacagagccaggtgtatcgcaggtgaccatgacggtatagatggtcttgaacagcttgacaaggtcatagacatcgaccagtcaccgataggccgtacaccccgctctaatcctgccacatatacaggtgtgtttgacatgataagagacctgtttgcatcaacacccgatgccaaggcaaagggctataaaaagggccgtttcagtttcaatgtaaagggcggtcggtgtgaggcctgcggcggcgatggaatccttaagatagagatgcatttcctgcctgatgtatatgtgccgtgtgaggtctgtggaggcaaacgatataacagggagacactcgatgtaaagtacaagggcaagagcatatacgatgttcttgatatgacagtggaggaggcacttgagtttttcaaaaatgtgccaaagatccagaacaaaatccagtcgctctatgatgtcggactatcctacgtgaagctgggacagccgtccacagagctttcgggtggtgaggcacagcgtatcaagcttgccacagagcttagcagaaagagcaccggaaagaccatatatatacttgatgagcctactacggggctgcactttgcagatgtacacaagcttgtggagatactgcgcaggctctcggacggaggcaatactgtagttgttatcgagcacaacctcgacgtgataaagacagctgactatatcatagatatgggacctgagggcggagacggcggcggaaccgtcatagcgcagggcacacctgaggagatatgcgaggtaaaacagtcatatacaggccggtttttgaaaccatatctggaaaaagacaaggataaactttaaaattttattaaatatgacctttttcaaaaaaaaagtttgaaaaatgggatttattgtatataataagagagtgtatgtgtaaatttaaagatatggcaggaaaggggctattaaaatggtcggatcagatatcggaatcgatttaggaacagcaagtatacttgtttatataaaaggaaagggtgttgtgttaaaggagccttcagtagtagcctttgacagggacaccaacaagattaaggcaatcggagaggaagcacgcctcatgctcggaaggacaccgggtaatatcgttgcagtcagaccgctgcgtcagggtgttatctcagattatacagttacagagaagatgatcaagcacttcatccagaaggcgcttggtaagaaaagcttcagaaagccgctcgtgagcgtatgtgtgccaagtggtgttacagaggttgagaagaaggccgttgaggatgctacatttgcagcaggagccagagatgttaagattatcgaggagccaatcgcagctgcaatcggtgcaggtattgatatttcaaagccatgcggaaatatgatagtagatatcggaggcggtacatcagatatagcagttatctcactcggtggttcggtagtcagcacatctatcaagatagccggagatgattttgatgaggcaattgtcagatacatgagaaagaagcataaccttctcatcggagagagaacagctgaggatatcaaaatcaagattggtacatgctaccctctcccacagccggagacaattgaggtaagaggaagaaaccttgtaacaggacttccaaggactattacagtcagctcagaggagacagaggaagcacttcgtgaggcaactcttcagatagttgaggcagtgcactcagtgcttgaaaagactccaccggagcttgcagccgatgtcgcagacagaggaatcgtgcttacaggaggcggttcgctgctcagaggtcttgaggagcttatcgaggaaaagaccggcatcaatacaatgactgcagagcagcctatgacatgtgttgctatcggtacaggaaagtatgtagagttccttgcaggcaagagagatgaagaattctagaatatacgttttataacaggcagccgtgagggcgatgatatgtccctgcattgcaggaatgtattgtcgcttttttgttaatattgttacaaatggggatattacagtcagggggattagtgaacaaaataaaggatattgggagaggcgtaatcaatctggtatttccaccgcgctgtccggtatgtgatggtataattggtccggttgagagatatatacacagcagatgctgtgaaaagctctttccggttgagcagccgcagtgtatgcgctgcgggaagccggttttgtctgagcgaagagagtattgtgacgactgtgcacgggcactagagcatcacaggcagatgcgggaagatgacagctacaggcagggcaaggcgctttttgcatacaagggcagcataaagcagaccatgtacaggttcaagtattcaaacagacgtgagtatgcggcttattttgcacagacagcagtggaaagatattcggactggatactaagatgtgggatagatgttattattccggtgccgatgcaccgtaaaaaaatgcgccagagaggctacaatcaggcagagtgttttgcaaaggcattgtctgaaaaaacaggcataaggatggtaaaagggcttgtgcgcagagtgaaaaataccagtccactcaagacaatggggtatgttgaacgcagaaattgtctagagggggcttttcaagtggcggatagtattgtacaatatgaccaaatactaatagtagatgatatatatactacaggcagtacggcggagtcgattgggcacgagatagcaaagaaatgtcccggccgtgtatatgtgctgtgtatttgcataggacagggaagttaggagggttttatcagatgagaatatctaattgcaagggctgtggcagaatatttaatgtactgtcagatgagcagtactgcccgaactgccagaaaaaaatggatgagaaatttgatatagtaaagagatttgttgaggataatccaaatgtgccggttgagacagtggccaaggagacggatacatccatgaagcagataaataggtggatacgtgaggaaaggctttcgttttcaccggattcatcatatggtataccatgcgagaactgtggcaggatgatacgtacaggtagattttgtgatgagtgcaagactaagctcacaaacacactacgcagtgcccttgacacaccaaagagccaggataggcagctgtggcagcaggatgacaaaaaccgtatgagatatatcaagtaacaggtaagaggatgatttatgataaacgaagaaaaagtaagggaactgtttaatattgctctatgtgacagcaaaagcgatgacagccgtgtgcagaagcagtccgcaagctattacggatgggactatatatggaaagagggcttaaaaagcttctttacaggtacattcgcatttgcagggcttgttgtgatgtgggttgctgtcaatgcagcagagcttttggacagaatcaataagcttgattttaaggcaatgggtgtcacaataggcatactgtatattgcatttatggcggtttacatttttgtcacaattgtggtgtatactgcaagatataaggccggcagaagagaagtgcgcaaatacgcaaatcacctgaaggcagtgggcagaatatattcccgtgaggaaaagattaagcgttagggaggctttatgaacaagttactggaaattaaggataaggcagtcaaattttgcggtgagtatgagcactttatacttccggttgtgagatttgccgttgcatttatcgcatttataacaatagatttgaatatcggctatatggcgaaaataagctcgatgcttgtggcactgcttttagcgcttgtgtgtgcactgcttccggtgaatgcaatactctggattgcttcgattatgatacttttagatatgtatgcgctgtccatagaggtttttgctatcacatttgtactttttttagtactgtattttgtctattttcgttttgcaccgaaggatggcatgcttgtgatactcacacctatatgctttcagcttcacataccatctgttatgccggttgcagcaggtcttttaagaagagcttattcggttgttgcaataatatgtggcacactgttgtactatttccttgacggaatcagacagaatgcatcagcgcttgcagaggtggtagataaaaaggggcagagcactacaaagctcaatgtgacaatgggacagcttcttgacaacaaagagatgtttatagttatggcaatctttgttatcaccacactggtggtgtatcaggtcagacgattgaaaatcaacaattcatggactgttgctaccatagcaggaggactcgtacagttggttgcacttgttgttgcttatctggtgctcggactgccggagaagataatctggcttgtgctcagcactgtagcagctatttttgcaggtgttgtcatacagtttatatttatgaatcttgactatgcacgtacagaaaatgtacagtttgaggatgatgaatattattattacgtcaaggcagttccaaagaagatgattgccaaggaggaaaaggttgtaaagcactttggcaatacaggaagccttggaaagaagattcagagacataatcaggaaaatatcagcaaagaggctattgcaaaagatctcgaaatagacgaaaatatatttgaggatgacaaatagttacatagtataagagaaaggagggcgctatggataatgtgagtggtgtattgatacgcttcaaggatcagttccttacattcacaaatgtgccgggcatcaaaatcggtgtgatagacattatagagatacttattatttcagtgctcttctatcatatacttttgtggataaagaccacgagggcatggaatctgttcaagggccttattatcatactgttgtttgtgcttgttgcagcattgttccagatggatacaatactgtggcttgctgagaaactctttaatataggtctcgtggcacttgttgttatttttcagcctgagcttcgaaatgccttggagaatattggtggaaagacctttttgggtgatttttttaataccggcagaggcgaaattgagaaattctccgacaagacaattgatgagctggtgcgtgcatgctttgcgatgggcagagtaaagacaggagcgctaatagtcatggaggatgagataaatctgggagagtatatcagaacaggaatagatgtggatgctatacttacaagtcagctcctcatcaatatttttgagaaaaacacaccgcttcatgacggagcggttatcgtgcgtggcaaccgtgtggtgtcagctacatgttaccttccgctatcagacagcctgtcactctcgaaggatttgggaaccagacaccgtgcagcggtcggagtcagcgaggtaagtgattcgcttactatcatagtttcagaggagacaggatcagtttctacagcatacaaggggcagattgagcacgatatagatgccgatcatctacgcacacagcttaagcttctgcagaacagacatagggagccgggtaaatttgaattaattaaaaggaggtttaagaatgggaaagaagcttctaaaaaccttcacaaataatataggctttaaaatacttgcgatagcatttgcatttatactctggcttgtggtctacaatctcaatgacccggtcaagacaaagacatttaccacaacagtcaccgtcacaggccgtgattcggttgttgacaaggggctatggcctaccatcaaggattcggaaaagaccatcagcttttcggtatcaggcaagagaagctatctgaacgagcttgatgattctgatttttacgcaaatgtcgaccttgcaaatatcatagtagataaggatgatacgaataaggcaagcgtaaaggtagatattggatgcaccaagtacagacattcgattaccttcaacggtggagaccatatgctcccgctttcggttgaaaaatatatgcagaagcagtttgaggtaaaggtatcattggatggaagtctctcaggtgcgaaagcactgggaaacaagccacaggcaaatccaaaggtagtaaagatcggaggtcctgagtccattgtttcaactatagcatcggccaatgtaaatataaaggtcgatgacaataccataatatcagataatcagataactgatcgcggtgatctcactctgattgatgataatggcgatgagatagatatatcaaagcttgatgtggacagccagtatcagtctatagcagtgacagttgatgtcctaagtaccaaggaggtgcctatcaagtgtactacgacaggctcaccggcaggaggaaagagcgtgctcggagtagaactatcagaggagtctgtaatgctcaaaggtaatgcagaagcattgaacaatatcacatctatagatgtgggaccaattgatatatcgggcgcaacagacgatataagtacatctgttgacctgacaggatatctgccggatggagtttttatagtgaactcatccaaggcaaagctcagtatagatataaagattgaaacaaatgcgacttcaaccatgacgctgaacagttccaatatcacatatgacggactggaagagggatatacgcttacatttgtaacagataagagcagtgtcatagtaagcggcacccagtctgatatagatacactttcgggaactacactgaagggtaaaattgatgtgacaggccttggtacaggtacacatacagtgacggtaaagccaaatctggatgagaccaagtacacatggggcgagataaaggttcagatagttatcggaagggaaggtgacggaggcggcacaacgggaactgatggtacaggaacagcctcgggctcaacaacaggcggtacaacatcaggcgacaccggcacaggcggttcatcgtcatcgggcagcacatcgtcaggaaacaccggaaataacggctctgacagttcatcacattgatagatatataaccgaaaagaggtaataaaagtggtagcacaaaaaataataatcaagaatcctaccggattacatttacgtccggccggcaatctctgcaaagaggcaatgaaatttaaatcaaaggtaacatttatatatgacgagaaaaatgtagctaatgcaaagagtgtactttcagtgcttggagcatgcataaagtcaggcgatgagatagagcttatctgcaatggcgaggatgagagtgaggcgcttgaacatcttatacagtacatcaaggatggactcggagagtagtacacaaggaaaatggtatacatggagaaacatatatggagaagcttttaaccatagtcgttccggcttacaatgttgaaaagtatataaagaactgtcttgactcgtttatagatttgtctgtgctcagaagtctggagatactcatagtggatgatggttccacagattccacagccagcctggcacatacctacgagcagaaatatccatacagcttcaaggtgctctccaaggagaacggaggccatggatctaccatcaactatgcgataccgcgcgcaacaggaaagtatttcaaggtggtggatggtgatgactggctggacaagagccttttgccacaatttgtacagcttttgaagcacacgcactcggatgtcatatccaatgacttcaacctggtggatgataggacaaagaaggtcacaaaacgcagaaaggcagtgtccaactcttatcactacaacagggagtggggctttgcggaggccgtcatggacccgctgatcactatacattccatgaccatccgtactgatgtattgcagaagaatgatattcgtatggatgagcactgtttctacgaggaccaggagtatatactctaccctataccatactgcacaagcatcacgttttcgcccctgccgctgtatcagtacagacttggaaggagtggccagagcgtggacataaagatgatgatcaagcgtcatgaccagcaccttaaggtgcttgatgcactgtttgagtacaacaacgtgcatggcaatctgcagacctacaagaagcagtaccttgagcgcggcatagccgaggcagtcgatgatgagtaccagatatttcttgcaaagggcaatgatacaaggaacgttgagcatatgaagaagtttgacgagatgctgcgtgaggagcacccgggagtgtaccgggcgtgcagcaggaagagcgtctggatgcttagaaaaacaggttttaagatatttccgatggcagcatgggtctatagcagactgcgtggtaattaatttcatgaataggcgttaatgagtatgcaatactctttttaataatagtaatcaggacggatagaacagttaatgagtaaaatattatcaatcataataccaacatataatgcagaaaagtttctgaataaggggctgtcgtcatttctggtatgcagggatacagatgcacagacagcacagcacaactgtaaaatggcaacggagggccgctttgaggaaatagatattgacaaggctatactcgataagcttgaggtgatagtcgtaaatgacggcacacctgacaaaagtgttgaagtggcacagaaatttgtggactggtatccggatacttttgtcatagtaaataaaacaaatggtggacacggttctgcaatcaacacaggcgtggagcatgtgagaggaaagtatttaaaggtggtcgatgcagatgactgggtagatacgcttgcgctaaagcacctggttgaatatctcgagcatgtagattcggatgcggtgatacaaagcttcaggtattatgacatatcaaaggatgagtacagaccggcagatgtgagtgtgcctgattttacaggagagtacaatttaaaggatatagtaaatatgtgggatgatgtatatgatggtctatcatttcacggagtgatatataacacagggttctataaagcacttggatataagcttacagagcatgtattttacgaagaccaggagtatgcaactgttccgttttcgtatgcaaaaactgtcagatttattcaggaagagttgtatgtatacagagttggagatgtaaatcaaagtgtttcagcagcaagtcaggtgaagcgtcttccggatttggagcaggttatatttaatgtacttgaggcagagaagagctttgcaaaaatgccacagggtggaaaggaacactttatcagaaagacgtcgggcataatcacaagctattatcaaatagctttgataaaaaataccgacagacaatccggcagagcgatagtagagcagtttaacatgaagcttgctcaaaaaagtgcacttatgtatgaggcagtacagcgtaaatataaagtattttggctgtttaataagctgcatgtgagcaacagcttttacgagaatcaatttgcaaagctgcttgagtttgccaaaagggttggcagagcagacagactatacagaaaataatactgactaccattgtcaaatatggtgacagacagcgatataagtggaaattaacatatagaaacaggaattagataggatatggaaacagaaaataaaaagatactatcaataataataccgacatataatgcggcaaagtttttggataaagggttatcatcatttattattgatgataactctcttttaaatatgctggacattattgttgtgaatgacggctctaccgataatagtgtggagattgcacaaaaatatgtaaataaatatcctgacgtgtaccggatactgaataaagaaaatggtggtcatggctcggcaattaatgaaggagtaaaaataataaaaggaagctattttaaggtagtagacgctgatgactgggtaaacactgatgtgttgaaagaaactatttgttatcttaaagataatgaaaataaacatgagaatttcgcagatgcagtgctgatgagctatagatcatatgtgctgcagagagaaaatactgatgagtatccatacgacgataaatatataacaaaaaatggtggaccatataatgcaggatatgtggacgagcatctgtatgatttctggtgggggctgagtctgcatggggtgatatataatacgcagttttatagaaatacaggactgacactctctgagggggtattttacgaggatcaggagttttcaataatcccaatggcatatgcagaaagtatctatgcatatgataaggcactttatgagtatagagtcggtgacgtaaatcagagcgtttcgatagaaagctcactgaagaggcttgaccattatgagaaggttatcatgaaattgattgaggcaggccgggatgcggagcactttagtataggcggaaagcagctgtggtttgataaaacaagcaaatttatcaacgattatttgcagctttgcctgattagaaacactgataaaaaacagcttagaaaaaggatgaagctgtttgtcagtcaaatcgaaaaaaagaatacagatatgtataaatgtgtaaataagaattataaagtattttgtatgttgaataaaatgcatatgagcgataaggtttatcagaactattttatacgcctgttacatattgtgcgtcattagcaagctttttgttatcataatgatgaataatatgtttaaataatcggaaaatatgtgacaaatctcacttgaggcatatataagaaagtgataaaatatggtgctgtgagaataatataaaaattaagataaagaggacaaagaggacaaagatgaagaagaaaaatataaaactcctggtagttttggcctgtgtgcttatggcgttgggaatgtcaggctgtggaaagaaagcatataagacattccctgaaaagtacaagcttgcatcagttgatgtaggtggaatgactgctgacgaggcaaagaaagccataaagactgcagtaggcaagtataagatatcagtgaagcttgacgatgcatcatttgatatgacagcagaggatttagggcttaagtataatgacaaagcaaatcttcaggaactgataaatgcggccaataaggataaggagccggaaaagcaggtgaagctttttaaaatggataagtctgatgagctggagactgctcttgtagactcttatatcactgcaaaaacacagtcacagtctgatgcaacggcacagagtgatacggatgcagaggcaaaggatgacgaacaaaagacgactgagacagatacacagacctttgatatgaggtcaattttgccatatcgtgctacaatagcatacaatgcagaggcaggacagtttgagggtgttgatggtgtatcaggagatgcgcctgtgtatgacaatgcagctacaaatcttacaagtgctgtaaaggaactgaaggataaggtggagcttacatccacaacaggatatgttgatggagaaaaggctgcagacagcgagcaggtaaagaatgccttaaaagaagccaatgcatatcttgatgtgacggtgacatgtaatttcacaccggcaacaggtgaagctgctacagaggctgtaggaaaggatcagatagcccagtggcttatagtggacaatgacggattgtcagtttcgcttgatggcgagaatatggctacatattgtacagagctagccaaaaagcatgatgtgtcaaagaagaaaacaggacagtttaagacaacaggcggaagtataataaatgtgcctgtagcatcatcaggacagactgtagatggaaacaagctgtatgaggcgattgctgaggcaataaacaataaaaagtctgcaacagtggaagcagtttacagtgaggcaaaggaagaagaaacaggtgaatatgtcacatatggtggcaattactgtgaagtggatcttaccaaccagatggtatatgtatacaagaatggtgtacaggtagtatcaagtcaatgtgttacaggctgtatttcaaaggggcacggaaccccaacaggcgtatattctatcttttcgagggataaggacagatacttaaggggtgacggatacaagtcatgggttaatttctttattccgtttaatggcggaatcggattccatgatgcttcgtggagaagtaccttcggtggaaatatttatctgtacagtggcagccatggctgcataaatatgccttattcagctgcaaagaggctatatgagaatgttacattaggcgaaaaagttattgtatatggtggtgttgacaaggtggccggcaaagcacagagtcttggcggagctggctcttataatgtgacagagggcgacggagcattcaatctcggtgtgacagcagaggataatgcaaagctcacatactcaagtgataatgagggtgtagtgagagtggatgagaacggtaatgtgacgatagcaggtgtcggaactgcaacaatcactgtcaagtctgaggctactacaagctataaggccggcagcaagacgattacaatcactgtaaatgcaaagccacagccaaaccagaccccatccgtgacaataggatgcggtgataaaactgtaacagagggagatgcaccattttctctaggagcaagtgcttcaaacggagcagcgctttcttaccagtcaagtgatccttcgattgcgtcagtagatggcgccggaaatgtgaccatttacagggctggtagcgtacagattacagctatagcaggtgaaatggcaggctggaatagcgcaagcagttcaataaccgttacagtaaattcaaaaccacaaccacagccggtggcaccgactgaaccatcagaacagccacagcagaactagaacagcaacaatagaacaggaacaaataaaatatagcaaatgaaaatacaacaaagaaaagtgccggaaacggcacttttctattatattgcataattatttacaaaatatgacatattcttaatactttttttgtaacttctaaaaatagacaaaagaaatgaagtgtagtaatataacataggattaaaccgaaaaataatgttacaatttgtaaagggtaggaaaatggaaaacaacgaaccaataagagatcaggaaattgaaatcgatttagtagcgctgtttcacgaattagtgaagcactggaaggcacttgtggcatcaatggtgcttcttgcagcagtatttggattatactccaagattacttttgtaccggagtatgaggcatctgcagagatgtatgtactgaccaagtcaacatctatcaccagtcttgctgatattcaggtaggctcgagtctgacaaacgactatgagtacgttatcacaggcaggacagttttatcacaggtaatcgacaatctggatatggacgagacatacgagcagcttagcaagagggtttcaatagagaatccgacagatacacgtgtgctcaagattgtagttacagacactgatttggaagcttcaaagacagtggcagatgagattgcaaaggtttcatcacagtatatcgctgacaatatggatcagtcacagccaaagattatccagacagcatatgcttcaaagacaccggtgaataataatatccttaagaatacagttataggagctgtactcggactgtttcttgctgccggcatagttgtacttggatacatgcttgacgatacaatttccaatgcagatgatatggagaccagaacaggcctcaaggtgcttgcatcacttcctgttgatgagacagagtatgatggagccaagacaaagagaagaaaaaagaagaaaactcaatcatctaaatcagacgatagcaagagtaagaagagggcagtttaatggaaacaatagttattaatcagataaaagaccagagctatacaatgaaggagtctcttcgagctcttaaaacaagcatcagtttcagtggaaagggcgtgaagtccatcctctttaccagcagcgtgccaaatgaaggaaagacaaccgtagttatggatctggctcgttcgatggcggactctaagaagtcagtccttgtagtagataccgatatgcgtaagtcagtccttgtaggacgactcagagcgaaagtggagagcggtggaaagatatacggactctcacattatctctcaggtcaggtatctttggacaaagtagtatatgcgacaaacatcaaaggagtgtttattctctttgcaggacatgaggtaccaaatcctacagagcttcttgagacagaggagtttaaagagcttatcgagtttggagagaagaactttgactatgtgcttgtcgatactcctcctacaggagctgcgattgatgcggccgtagttggaaagaatgtagacggagcagtaatagttgctgcccagaatgttacaagcagccgtgcaatcattaatacaaagcgtacacttgaggactcgggagtcaagattcttggagctgtgctcaataagtgcaggtttgaggagtctaagtatggtcattactatggaaactattatggtaattactatggtaattactatggcagggacgatgacgaaaagtagcaggcgcagacacatatgaatgacggagaataagtgcagatgaaaaaaaagaaaaatataattattacggcagtaatgattgtacttattgctattatagcgataatacttgtaaaggttaacagcagtaatgttaagaataaagaagttaaaggcataaagccgggtacagaggcagttaagacaaaagctgatactcaggctgaggatgacaacactacagacaaatcaggtattgaggagtttgcgttatttggtgttgacagccgctcagatcagcttgataaaggaacacgttccgattccattatggtagtcagggttgatcatgatgctaagaaaatccgcatggtatctattttcagagactgtatgatgaatattgatggtcatggataccagaaggtgacacatgcacatgcgtttggcggaccggagcttgcagtggatacacttaacaaaaatctggacttagacataaagaattatgttacagtcaatttcaatacagtcggtgaaattatagatgaggtaggaggtatagtacaggatatcgatgcttctgaggcaaaggtgataaacggatatattgatgaggtcaataaggttcgtggaacaagctcatcccatattgattcagccggcacatatactcttgatggaactcaggcagttgcgtattccagaatacgttatacagcaggaggagactataagcgtgctgaaagacagagaacagtgctgttcaaggtttttgaatcagctaagaagatgaatacagcggcaaagattaagatggtatcagacctgattggacatgtcaatactaactataatactgatgagattctttcagtatttaaaaatcttgcagactatacagtagaggattctacagcatatccacaggtgttctatggtggaaaggttgatggcgcatgggttgaggtgcctactacacttgcagacatggctacaggagtgcatcagttccttgaaggtgatacaggctatactcctagtgcaactgtaaacgaatacagcagtgcattatcaggaaaagtaagcggacctaataacgatttaacaaatacaaattttggggattaaatatgaacttcagacaaaatggagataagtacctcatcacaatagaagtaattgcactgatagttgtgctggtatttggagcagtgcattttgtgatgccggggaataatgcgaataagagaataacagaaagccagcaggagacacagaatcctactcaggagacggatggaactcagcaggtacaagctgatggacagcaggcagcaccggcatttactccgtcagattctgtcaagacaaagctgtcttctatgacaacagaggaaaaggtagcccagctattcattacgagacctgaggagattacaggtgtatcacagttcactcaggccggtaacaagacaaaggcagctattggtacatatcctattggtggttttgttttcagacaggagaatttctcaggagaggctgcagttacaaagatgatgagcagtctgcagtcattttcgcaggagcgattgggcgtgaatctgtttcttgcaattgatgaagaaggtggagaaagacttcctcttgcttcagctaatggatatgaggcacagcaggcaccatcacagcttggagatgctgacgcagcgggcggcagtgcaggaaagataggctcatatatggctaccaatggccttaatatgaattttgggccgacagcggatatagcatatggtgataatgcagataacgatacatatgcatttggcagcgagtcagcgactgtaggtgactgtgttgcagcacaggtaagcagctataatggtgcaggaatcaattctgtagcaaagagctttcccggaaaaggaaaggctactacagattcggcgacaggaatgctctggatgacagataagctggaggatcttgaggcatctgattttgtgccatatcagaaggcaattgaagcaggtgttccggcagtcatgatgggaaatgtgatttgtcagagtgtgacaggagaggaaaccacgccatgctctacatcagcaggtgccgtaaactatatgagaactaccatgggttttaatggccttttgattacagatgatttatcagacgcatctcttaataaggtatgtacacaggatgaggcggctgtggcagctgttaaggcaggaatgagcatgctttatgtttcaacaggctttgagagcagttataatgcagtgttgtctgcagttaacagtggcgagataccggcagaaaaattagatgatgcagtgggaagaattctaacaacaaaaggaatttaatatatgcaaataaaagtaaatccgttatactatagagtatagcggatttatgttatatattttgtatatttaaaggagaattgttgatatgtcaaattgtttcaatccggcaaatattcttttgccaaacgattgtatagatatggaaaaatggtcagttattgcctgtgaccagttcacaagtcaggctgattattgggatgctgtggaaaagcatgtggctgatgcaccatcaacgcttaatgtggtatttcctgagatatatctgggaacaattacgaaacaggagaatgattgcaattcgtcaggggatggtgtcaaaaatgacaaagaaaccggcagaaaaacaaaatatgcttcaatgacggatgatgagagaatcaaatatattaataccactatggagacatatctcacagatggaaccttaaagcaagtggtggcagatggctatgtgcttgttgagcgtactacggagtcaggggtgcgtcttggaatagtaggacttattgatctggatgactatgatttcgacccgaaaaagaagactctcatcagagcaacagagggaacagtaatctcacgtatacctccgagagtgaaaataagagagaatgcagctattgagctgccacacgttatgctgcttgttgatgatcctatagacagacaaaagattgatggatgccagggtgctatacaggaagatgctgcaaatatagcagctgtaaagcatggaataatcgagtatgtgtatgccatcagggatactcttcgtaagctttacgatacagagctcatgcagggaggcggacatatccgcggctatgctatcgagggtgaggcagcaaagcaggtgacagaggcatttgcagcgaaacaggaaagctgtggaggctttttgtttgcagtaggtgatggaaaccattcccttgcaacagcgaagacatgctgggaaaatatcaaaaaatccggaaaattcacagaggagcagttgaaaactcatcctgcaaggcatgctcttgtggaaatctgtaatctgcacagtgaggcgcttgagtttaagcctattcacagactgcttacaaatgttgatgtaaaggatatgctgtcgtttttcgaagctgaaatcacaaaacaaggacttgagagcgctgagggtgatgagatagtatttgagtatgttgaatcaggcgctacctcaataaagaattccggaattaatatcacaaatagaggtgaccgcctcccggttgagatactccagggtattttagataagtatcttgagacacatggcaatgtggaaatagactatatccatggtgatgaggcacttcacggactggttaaggagactaagggatgtggaatttttcttcagtcgatagacaaaagcacattgttccctgcaataaatgcgggcggggtgctgcccagaaagacattctcaattggagaagcgaatgagaagagatattatatggagtgccataagatatctatgtagctttggtttatatacatatgttggttttattatatttataaacaattgattttatgaagtagaataatttaacaaataagcttattttactacacaaacacatttattaagtgtataatataagaaaaatttattcacaaggggacgacaatgggaaaatactttggaacagacggcttccgtggagaggctaatgtcaatttaacagcagaacacgcatatcagattggtagatttttaggctggtattatggagagcttaagaagcagaagcagctcgatgagccggcgaagatagtaataggaaaggatacaagacgttcaagctacatgtttgagtattcacttgtatcaggacttacagcatcgggagcagatgcatatctattacacgttaccacaactccatcagtggcatatgtagcaagaaccgatgattttgactgtggtatcatgatttcggcaagccataatccatactatgacaatggaatcaagcttatcaacagcaatggagagaagatggatgaggagacaattctccttgtcgaggactatatagacggcaagctacgcctgtttggtcaggagtggaaggagttgccttatgcacataaggatgcaatcggatgtacagtggattatgtggcaggccgtaaccgttacatgggatacctcatatcgcttggtgtctactcattcaagggcatgaaggtaggtcttgactgtgccaacggaagctcatggaacatggcaaagtctatttttgaggcactcggagcaaagtgctatgtcatcaataatgagccaaacggtctaaacatcaacaataatgctggctctacacatattgagggcttacagaagtacgtggtggacaatggccttgatgtaggcttcgcatacgatggagatgcagacagatgtctctgtgtagatgaactgggcaatgtaatcactggagaccatatcctctacatctatggaaagtacatgaaagagagaggaaagctcgataacaatactgttgtcacaacagttatgtcaaactttggactctataaggcccttgatgagcttggaatcggctatgcaaagactgcagtaggtgacaaatatgtatatgagtacatgcagcagaacggctgccgcatcggcggagagcagtcaggacatatcatcttctctaagtatgcatcaacaggtgatggtatccttaccagccttaagatgatggaggtcatgatggctaggaaacagaagatgagccagctctgtgaggggcttaatatctatccacaggtgcttcaaaatgtgcgcgtagctgacaaggcggaggcacttgccaatcctgaggttcaggcggctgtcgatcaggttactgcagagcttggcgatacaggacgtatacttgtgcgtgagtcgggtacagagcctgttatccgtgtcatggttgaggcagagagcgaggaaatctgtcagaaatatgtggatatggtcgttgcaaaattaaaataaaggttaatgccaaagataatacacgtaatatacaaaagctgtgtgagaatatcatgcagcttttgctgttatgagggttcataaatgagtgaattaagataaattaagtggatataatttaatctgtagagagaatagtaattaaattctgccggaggaaatagtctatgcctgaaatcttaattatttttatattatgtgccggtattattgtaattggcataatattgtgtataattattaaagtgagtcatatgtctgatgacgaacagaaaaaggacgatgaacgacagctggagttcattcgtgcctacaaggagcataaaaaaggacattgagtttaaaggattatataataagagacatacaggaaaagttcaaatatcttccgtcagcggtatatttggctttaatctgcattgcgatgtatatttttgtgtgtctgctgcgatatcttttcacaatgagagaggtatcacaggcagatgagagaagaaaaaagatagtgggcaaaatctggcatatgctgttctgcggcacctttgtggcctatatgtatacgcttataatgatagtgtattattcaagggagccgggaagcagaaccggcgtcgccgatatggtgctgtggagcaattggggcatgacacttcagatgcacgcttattttatagaaaatatagtattgtttataccatttgggcttatatttccattggtttttaaaaattggatgagatggtttacaatacctgttggtgcttttataagcgcagcaattgagtacacgcagctggttaccggcaggggatattgtcagcttgatgattttgtgacaaatacggcaggagcagcaatcggattttttatttatttgatattatatgcagggtggctggtatggaaaaaaataagataagcattgtggtaccatgctttaacgagaaagaggctctgcctcttttttataataaaataactcaggtgtttgatcagatgagtcaagagagtgagacagcgggattgtactatgaactgattatagtggatgatggctccatggacgggacgctcgatgtcgcgaaagagcttgccgcaaatgattccggtgtaaaatacatatctttttcacgcaattttggcaaggaggcagccatgtatgcaggcttgcagcatgcggtgggggaatatgtggcaataatggatgcagatcttcaggatcccccggaaatgcttccgaagatgtatcaggtccttaataaagagggttatgatgctgtcggtacaagacgagtgacacgcaaaggtgaaccagcgattagatctttttttgccagaaaattttacaggcttatgagcagaatatcaaaggcaaatatggttgatggggcacgtgactacaggctgatgaacaggaaatacgtggatgcactgctttcgcttaaggaatacaacaggttttcaaagggattgtttggctgggtaggctttaaggtgaagtggcttgagtttgagaatgtaaacagagtggcaggtgagacaaagtggtcattctggcagctctttttgtatagccttgacggaatagtggcattttccaacgcgccgctatacatggcttcaatagccggagtgttcagctttattgtcgcaataattgcaatgctctttatcattatcaggagacttgtattcggagatccggtagccggctgggcttcgaccgttgttatcatactttttataggtgggatacaactgcttagcataggcattttgggactttatctgtcgaagctatatctcgaggcaaaggacagaccgatatatttaataggagaatcaaatatagaaaaacctacagaaaaaaattaaggctttcttaagatttcttaattcgatagcatatgacatttttttcgaatgttatgtgctataattttttcggcaacgtttattaatgcatgaaagaggactaagatgaaaaacgtactggagtggcttgaggccacagtagaaaaataccctgacaagcctgcattttcggatactgaatgcagcattacgtttgcgcaggtgtatgatatagcaagaaatacaggagcatatctggtagaacagcttggagtggacagaacccctgttgcagtatttgccggaagaaaaatggtgacaccggcatacttcctgggtgtggtatatgcaggcagaccgtatgcaccgattgatgcatcgcttcctgacaagagaattgaaaaaattcttgaaaatctgtgtccaggggctattgttgcggacagggaaagccttgagcatgtggagagcatagtggatgagctggcaaaggcagaaggcttcgatagaccgcaaatatttattgctgaggatatatcgcgcttcgagcaggtggcgtgtgctgatagtaattgtaaaatcagtgaatcagcaggagacgctgtgacggatagtgagaacgatacagatggtggtgttgtggcaggctgtgcaggaaaaacagatgacagctcacgggatatgctcgctgtagtccgcaggcagatgtccatgacagacccactgtatatcatctacacgtcaggctccaccggcaatccaaagggagtcatgacatcgcatctgtcacttatgacatacatcaatgcatattgtgatgtgatgcatatagaggaaagtgatgtgctgggcaatcagtcgccgcttgactatattgcggcaatcagggacatttatctgccgctaaagaccggctgcagcacagcgattattccaaaagagtattttatggagccaaatgccctgtttgattacatgaatgataagaaggtcagcagtgttggctggagtgtttcggcatttaccatcctcacatcgcttggggcatttgaggaagtagggcttaagagtcttagaaaaatctgcttctcaggctcagtaatgccatgcagggtgctcagaaaatggcaggaaaatctgccggaagcgcattttgtgaaccagtatgggccgacagaggcaactgcttcgtgcacgtattatagtgtggatcatctggtggaagaggacgaggtgcttcctataggaaaagcctatgacaattacagagttttcctgatagatgagcatggaaatgagccggctgtcggagaacagggcgagatatgcgtatgtggaccaatcctggcgttgggctattataatgattcggagaggacagctgcggcatttacactcaatccactcaacagggcttatcctgagcggatgtaccgcaccggggattacggaaggctcgatgaagccggcatacttcatttctgtggacgtatggaccgccagataaagcacatgggacaccgtgtggagcttgatgaggtggagcatgccgccaatgtggtcgatggagtcgcagaaagctgcgttatatataataaagcaaaagaggtgctgatacttttctacacaggtgactgtgacaggagaagccttgcgctggcactgagggacgaactcccgggctttatggtgccaaggaaaatcaagaaactggagcagcttcctaagcttccaaacggaaaatatgatatgaaaaaactggaggaaatgtaaaatgagagacacaattttagagattttagaggaattaagaccggatgtggattttgagaaggagacaaagctcatcgatgacaaaattcttgagtcatttgatatagtttcactcgtatcggagctgactgatgagtttgacatcacaatcagaccaaaggatctggttcctgagaatttcaactcagttgatgcaatcgagaagcttgtgaaagagcttgtggaggaataaagcatatgagacagacaccgtactatgtatttgatacggacgagttttcaaaaagagcagccatgataagggctgctcttgattgtaaaggaggacgtaggataccactttgtttttcaataaaggcaaatccgtttctgcttcacaggctgccggagggcttagaccatgtggaggtgtgcagcccgggagagcttgagatatgtatagcacttggcgtgaagccggagagcatcatctactcaggcgtgatgaaggaaaaatgcgatatagagcgagctgtttcatacggcgccgggatactgacatgtgagagcataagacatgcgacactgatatcggaagtgatgcttgaatgtatacaggaaggtgcgtatgaagccgagtttgccgaaacgaaagcacatgtcatactgcgcctgacaagtggcaaccagtttggcatgtcgcttgatgatattgaatacatcatttcgcatccggatgagtttaagggcatcacggtaataggcattcactactattccggcacacagaagagcctgcgcaaaataaataaggacttggaaaaaataaagtctgcacttgtcatgttaaaggacaaatacagctttgagccacagcttgtagagtatggccctgggctttgtgtggagtattttgaggaagactggcaggaaaaggaaaaacaatcacttgatgaggcagcagaggtgcttagagaatttgccgaggaatatccgcttggcattgagatgggacgcttcctagcagcctcatgcggtaaatattacacacaggtaaaggacttaaaatcgacaggcgatgccaactatgcgattctggatggaggaatccaccacctgaattacttcgggcagaggatggcaatgcaggtgccaccgattagtatatatagagctgccggtgtggaattcacagaactgccggacacagactatacactctgcggaagcctctgtacagtggcagatgtgctggtacgcgaggtgaagcttaagaagcttgagcttggtgatgttcttgagtttgggcactgtggtgcgtactctgtgacagaagcaccggcgctctttctgtcaagacagcttccggctatatatgcatattcgaagggatgtgggtatgagtgcctgagggagcatattcctgcagctgaaataaatctggccggaaaaaattgtaatttgtaactaaaaaagcgcccatggcaatttgtcacgggcgcttttgatatgaaataaacaaagccttttgtgggaatcctaattatcagcctagctccttttcacatatatcaagtacagaggcgatggtagtatccatatcatagtacttgtactcgccgagacgaccaccgaatataacaccggtctccttgtcggcaagctccttgtacttggcatagagctgtccgtttttctcatcgtttacagggtagtaaggctcatcgccggccttccactcagaagagtactcacggctgataatagtctttggcaggtcattgccatcctcatccttgccgaactcgaaccacttgtgctcgatgatacgtgtccatggagtctcgcggtctgtatagttgacagcggcattgccctggaagttaggaatatcgagggtctcattctcaaagcgcactgagcggtactctaaagtacctagcttaaagccaaagtatgcgtcaatcggacctgtatatacaaccttgtcagcaagagcatcaagctcagccttgtgctcaagatagtcggtattcaatctgacctcaatgccgtcgagcagattttcaaccatctttgtgtatccaccgattggaataccctgataaagagcgttgaagtaattgttgtcaaaggtaagtctaacaggaagtcgcttgatgatgaaagctggaagctccttacagtcacgaccccactgcttttcagtatagcccttcacgagcttctcatagatatcacggccaacgagtgagatagcctgctcctcgagattttttggctcaccggtgatttcctttttctgctcctcaatctttgcagcagcctcctccggtgtcaccacaccccacatcttgttgaaggtgtacatgttaaatggcatagagtaaagctcacccttgtagtttgccacagggctgtttgtgaaacggttgaactcagcaaactgtgtgatgtagttccagaccctcttgtcattggtgtggaatatgtgggctccgtacatgtgtacatttatgccctcctgcttttcggtgtaaacatttcctgctatgttaggacgcttgtccacaacaagcactgatttgcccttggactttgcctcatgggcgaagatggatccgtagagaccggaacctactattaaataatcgtatttcattgtgttctcctacttaatttgcgttatataaattattataagtgttgattaaaaaaaagcaagagataaaacatttttacgtacaaataaatacatattgtatttattttggtgatataatgtgttatagtgaataaaaaggaggatacaaagatgaagaatatgtatttggttaaatattcggttaaaggaataaaatcgttggataagctggtgtcattggctttttacaaaaaaacaattacaaaagacatggatacgcaagggtttaatataaaaggaatatacggaatgaatggttcgggaaaatcaggaatcatgtcatcaattcagattttaaaaaatatcttaacagattctaactatttaaataatccaataagccagaaaacgctggattcacttgtgaataagaaattatctgagttgtttattgaagtggaatatgtagtaagaacaaaggaaaaattgtggttatttcgatataatgtagcattagcaaaaaaagaatcggaaacatatattataaaaagtgaagagctttcatttaaaaatgcaacaacaagaaaagaaaatatgagtgttttgtacaaagtaaatgatggagcattggatttaaaatattttgatacaagtgataagacaaatagtatgttagcagaaaaaacaataaatctattagataaatcatcattttgctcaattgctgtaaaaaaaattatagataaaaaaatatttgataaaaaggttcaaatggttgttccggctttggttattttatataattttggaacaaagctacatgtatatcttgacaatgaggatactcatataccatttataattgcacatatgatgaagtacggagatataacatatgaaggcaatgaaatggtagatagcctgttgtatgaggcttcaaatatggatgcagagagtatgaatatgttagctgcggggaaaaattttgttaacagggatagttatgattattttgaaaatgaagttcatcagttgtacgagtttttacacatttttaagtcggatttggtggggattgaaatagaaaaaaaggaagatggagacatgtatgtctgtgagcttgtaatggtttacaatgaatatagggttaacgtggagtttgaaagtacaggcataaagaagctggtgaagctttatatgtatattagagagatgaaacgaggaggaatcgtatttatagatgaatttgatgccaatcttcatgatgtctatctgtgcgctttactggaatatttaatggagtatggcgaggggcaactgtgttttacgacacacaatataggaccgatggatattctcaaaagaaatagtaattcaattgattttatttcgggagaccataggatttattcgtggaaaaaatcagggaattattcaccggctaatctttataggaaagggatgatagagggatctccgttcaatgtggattctatagattttatagatgcatttggtatacaggagggggatgaataatgggaatgcagctaatatttgttttagagacaaataagaaatgtaaatcggattggatatatatcaaggatactattgaatatttttataatatagatgccaataatataaagtttacacaggtgtatatggattgtaaggggaatttcaagaataaacaaaaggaaattaataaaaatatagaccagtatgctaaaggtgcaagtaatggtaactccaaagttatttgttgcttggatagtgatgattatgatatcaacatggaggcaattaaattcttgaacgaggctttcaagttttgcaatgataataaatatgaattaatatggttttgtaaggatattgagcgtgtttatctaagaaagaaggttgtgaaagatgaaaagaaaaaggaggcagggaaatttaaagcaaataaaactattagaaatattgatgcaaaaaatttagttgctagcaagtataaggatggaacaagcaatatattgaacattcttgacaaatatttggagcgaaagtaatggaggtataaaagtgaaactacccggctactactcctcaggagaatttgcaaaaaaagcgcatattacaaaaaagaccgtcaggtactatgacgagcacaatattttaaaaccatcctacgtaaacgaaaacggagccagattctataatgatgatgactttgcacgtctacagcagatactgttcctcaaatatctgggcttttccctggatgatatcaaggagatgacactcagaaacacggacagcgatgtcatgtctgagtcgcttcacatgcagcttggtctcgtggaggagaggatagagcagatgaagcttatgaaatcagcactgcaggaggcttcagaggtaatagacgaggggcgaagcgtggactggagtcatatgctggagctggttaatataaacgagatggagcaaaagctaaagcagcagtacagggatgcttcaaatatatcagccagaatcaatctgcacagggatttctcgattaatccggtgagctggtttagctgggtatttgatgagtgcagcttttttgagggggaaaaggtgcttgaggtgggctgtggtgatgcctctctctggacacagaacatagacaggataccggcagatatgcagataaccttgactgatatatcgtatggcatggtaagggatgcgacgagaaatgtaggcgcagatgacaagcgcttcacatatgaggtgatggatgcccacaggctgtataagccggatgcatcgtatgactgcgtgatagcagaccatgtactgttctattgtgacaatctggatgccgtgtgcagtgaaatcctaagggtgctaaagccaggtggcgtgtttgtgtgcagtacatacagctcacggcatatgaaggaaataaacgacctggtgcaggagtttgatgaccgtatagagctgtcagcggaaaggctgtatgagcaatttggtaaagaaaatggtgaggcaatacttggaaaatactttggtgaggtaagctggcatggatacgaggatgagcttgtggtagaaaaagcagagcctgtgatagagtatgtgctttcgtgccacggcaaccagaacaggtatattgtggaccgctataaggaatttgcagcatttgtcagaaagaagacagagggagggttccatatcacaaaggatgcaggtgtatttattgcacgaaaatgattcaaaaacaggatattataagcatatattttgtgaaaaatgctaaaaatataaaaaagtacttgaaggtgcccttggggcaccttttataatgcagataaatgatgaatcaggtcagtgtattctacagaccgaaagcatcaagtgcagcacgtagtttcagtttaaaggagaacaacatgaaaggtattatattagcgggaggttcaggcacacgtctttacccactcacaatggttacatcaaagcagttacttccaatttatgacaagccaatgatctactatccaatgtcagtgcttatgaatgcaggcatcagagatatcctgatcatttcaacaccacaggatacaccaagattcaaggagctcttaggagacggacatcagtttggtgtcaacctcacctatgaggtacagcctagccctgacggactggcacaggcattcgttatcggtgagaaatttatcggtgatgatacagtagccatggttctcggagacaacatcttcgcaggacacggtctcaacaagagactcaaggccgcagttgaaaacgcagagagtggtaagggcgccacagtattcggatactatgtagatgaccctgagagattcggtatcgtagagttcgataaagagggaaaggctatttcaatcgaggaaaagccggagcatccaaagagtaattactgtgtcacaggtctttatttctacgacaacaacgtagtagagtacgcaaagaaccttaagccatcagccagaggagagcttgagataacagaccttaacagaatctatctcgagaaaaaggcactcaatgtagagcttttaggacagggcttcacatggcttgacacaggaacacatgagagtcttgtagatgccacaaactttgtcaagacagtcgagacacatcagcaccgcaagatagcatgtcttgaggaaatcgcttacttaaacggctggattacaaaggatgaagtattaaagacatatgagctcgtaaagaagaaccagtatggacagtacttaaaggatgtacttgatggaaaataccgcgagcaactgtactaattatagtaaaatcgacattgcgttagttagctagtagattaagttaatagaaataatttaaatctcgcttgcaaaaagcgggaatcaggaggaaatcaaaatgacaattatcgtaacaggtggagcaggatttatcggaagcaacttcgtatttcacatgcttaacaaatatccggattaccgtatcgtatgcttagactgtctcacatatgcaggaaatctctcaacacttgagcctgtaatggacaatccaaacttccgtttcgtaaaggagagcatcacagaccgtgacgccgtatacaaattatttgaggaagagcatcctgatatggttgtaaacttcgcagcagagtcacacgttgaccgttcaatcgagaatccacaggtattccttgatacaaatatcatcggaacatcagtgcttatggatgcatgccgcaagtatggtattaaaagatatcaccaggtatcaacagatgaggtatacggagatctgccacttgaccgccctgaccttttcttccatgaggatacaccaatccatacatcaagcccatattcatcatcaaaggcagcagcagacttactcgtgcttgcttaccaccgcacatatggacttcctgtaacaatcagccgttgctcaaacaactacggaccataccatttcccggagaagcttatcccacttatgattgcaaatgcacttaatgataagccactcccggtatacggaacaggcgagaacgtgcgtgactggctctatgtagaggatcactgcaaggcaatcgaccttatcatccacaacggacgtgtaggagaggtttacaacgtaggtggacacaatgagaagacaaaccttgaaatcgtaaagattatctgtaaggagctcaataagccggagagccttatcacatttgtaggagaccgtaagggccatgatatgcgttacgcaatcgacccaacaaaaatccacaatgagctcggatggcttccagagacaaagttcgaggacggcatcaagaagacaatcaaatggtaccttgacaaccgtgagtggtgggagacgatcatcagcggagagtaccagaactattacgagaagatgtacgcgaatagatagttattatcgtttgtctggtggttttgcgcatatatggtgatgttagtcacgataataattaagtataaaggagacccccaaaaaaaatgaaaatatttgttacaggagttgcaggtcagcttggacacgacgtaatgaacgacctggcagcacgcggttatgaaggaatcggaacagatatagcaccacagtacagcggagcagatgatggcacagcagttacaaagatgccatatgtctcactcgacatcacagaccgtgatgcagtggaaaaaacaatcacagagcttaagcctgacgtggtagtacactgtgcagcatggacagcagtagatctggctgaggatgatgataaaaaagcaaaggtgcatgcaatcaacgcagacggcactcagaatatcgctgatgcctgcaagaagatagatgccaagatggtatatatcagcacagactatgtatttgacggacagggcaccacaccatggcagcctgactgcaaggactatgcaccgctcaacgtatatggacagacaaagctcgacggagagcttgcagtggcaaatacccttgagaagtactttatcgtgcgtatagcatgggtatttggagtgaacggcaagaacttcatcaagacaatgctgaatgtcggcaagacacatgacaggctcacagtagtaagtgatcagattggtacaccgacatacacacttgacctttcaagactgctcgtagatatgatagagaccgataaatacggttactatcacgctacgaacgagggcggatatatcagctggtatgatttcacaaaagaaatctttaagcaggcagtggagcttggtcatacagagtattctgaggacaggctcacagtcgcacctgttaccacagcagagtatggtgtgtcaaaggcagcacgtccgtttaacagcagactggacaagagcaagctcgtggagaatggatttaagccgctccctacatggcaggatgcgctgcacagatatctgcaggagattaacttttagaaaggacatagaaatcatgggacagattaaagtacagaaaaacgtaggtggaatcgaaggactttgcatcatcgagcctacagtacacggagacaaccgtggatactttatggagacatacaattcaaaggacatgcaggaggcaggcattgacagagtattcgtacaggataatcagtcttgctccacaaagggagtgctccgcggactccatttccagaaggaatacccacaggcaaagcttgtgcgtgcagtaaaaggctcagtatttgatgtggctgtagacttaagaagcgattcaaagacgtacggcaagtggtttggagtagagctcacagaggagaacaagaagcagttccttataccggagggctttgcacacggatttttagtactctcagatgtagcagagttctgctacaaggtaacagatttctggcatcttggagacgagggcggtcttgcatggaatgatcctgcaatcggcatcgagtggccacagcttgtcggagagtatccgggaagcgccgacggaagcggatacacacttgaggatggcacaccaatcaatttaagtgataaggatcagaagtgggagacactggagaatacatttaagttctagaaataatgataataaataccccgtaagctttaaggaaagcttacggggtatttattttttatcgattaggccatgcttttaccccttttccatctgctcgtaaactgtaattccatgaggaaagagtgaggtttggattatagtaaggatctccacttttgagaatatggctccaatgagttttcatatagtcaatttcagagttaaatcttttgactttttcaggattgtcttcagtaccacgagattttgattcgtaatgatacatttcaacgtgtggattaaatacaatgagatatcctttttctcgaattcttaaacagaaatcaatatcgttgaaagcaacagataatgattcttcaaaaccattaacttcttcgtataaatcttgtttaatcattaggcaggcagctgtaactgcacttaaatccatttgaatagaggctttatgaaaatatccgcttttgaatcgcggaaggccgagaaatgcatgtccagcaacaccacctattccgattatgacacctgcatgttgtatagtgttgtcaggataatatagttttgcaccaacaattccgacttccttgcgttgacaattgccaagcattttttcaatgaaatctggtgtaatcacttcgatatcattatttagtaaaagcaagtatttaccatgagcaaatttaacaccataattatttattgcagaataattgaaggttttatgtgggtatgttacaattgtaactcctttttgctcaagctttttgtatgtattgaaggttttttcttcacaactgttattttctacaacgattatttcgtaagaaggataagtactcttattgattattgaatcaatacattttattaatgaatcagattgatctcggttaggaattataattgaaactaagggagtatcagttaaaggatattctatgtcgtagaaaccataatcagaacgcatggttactttaccaattgtattcattcttttaaggtgagcttctaaagcatgtaatccagcttcgtatgcatatagtttacttgaaggattgtcagcagttgaagagttgtggatgcgccagtgatatagtattcgtggaatatgtgcgatttttcttgaagcttctgtacaacgtagaataaaatcgtaatcttgagcaccatcgtattcttcacacaatactcctacttgttcaataattgtttttcgtaccgcaaaaaaatggcaaatataattgttcgaacgcaataggtctaaattgaaatctggtttaaaatgtggttgaaaatatttgtttaaatcagtagtgactttatcttcatctgtatatataaaatcaatttttgaatcactctcaagttttaaaacaaattcaaataatgcgtcaggtgcaagaatatcgtcatgatccatgaaaccaataaattcaccggttgctgcggcaagggcaatatttgtattttgagctattccatggtttgatttaatgtttataacttttattctattatccaagcggatataatgatctaatactacactcatgttagagttttcagggctggcattaccaattatgagctcccaattggaataactttgttgtctgacagaatcaatcatttgctgtaaaaaaatattaggtgtattgtaagcgggaactacaatgctgattaaaatattgtctttgaatatgtgttttcgctgcttttttaagtcattttcactagcacaatagtttttataccataattcgtaagggtagtcctcgggttcaaaacgttcagaaagacggataaaaaagtcttttggaccataatgttttaaatatctaacccccttaataatgttatgaactgttagtttatttgtcaattttaaaaattgtttctgttgcacgatataatctccttgaattacttataaattataaaaattatacattattttcacagactatgcaaataatgaaatatgataaaatcttagttttttatgaatgagtggctattattaataaaatatgttaaaatatattcataaaatgtaattggagaaaaaaatgaaatcaaatagaagtattgtaaaatatatagagatttttttagatgttgtagccatgtttatatcatatttgttggcgaattatattaaatttgggtatttcaggactggattgataaataggactgagcattatcttacactttttttacttgaatttgcagcatatgtggttgtacgtattgcagtttttaaaaacgataatttaataaaccatagcttaggacaagaaatatattctgtattaaagatgtatgtttatattattgtaataacagcgggagtaatttactttggaaagatgggagaattatattcaagaattcaaattttaattacatttataattagtccgtgtttaacaataataataagaacagttttaaaaagaattattacaaaggagtatcacaggtcaggcgcgaacgaaaaaataatgctagttacaacatcaacacaggtatttgacataataaaaaagataaaatcaacacgaaattgggattttagaatatcaagtattgcattgatggactgtgataaggtggggacagtattagataaaattgaagttgttgcaggtaaagaaaatttgatagataccattgcggtatcggaaattgattctgtttttattcattttccaacagattttaaatgtgatgtaaatacattatccaaaaaacttcttgaaatgggaaagactgtgcatcttaatatagatgatttcgaaacaaagctgggagagagaagattagattttttaggaaaatatgctgttgtgacgttgaaaaatcattcatttaggattagagatatttttttgaaaagattatttgatctcataattagccttttgggaataattttattgattcctgtttcaattattatatgttttatagaattgatttcatgtgacaaaggaccacttataattcctgttgttcgagtgggaaaaaatggaagaaggttctattattacaaatttagaacaatgtatgctgattcaagaaatagatatgacagatgggttatggatggtaaatgtggaaatgatccaagatatacaagaattggaaaggtaataaaaaaaataaaattagagaatttgccatcaacattgaatgtcttttggggagacatgagcttagttggaaattattcaccatctttaccaggctttttgaaatattcaataatgtataggaaatgcttgagcgtaaaacctggtatttttggttattggcagcttaatcagtcagaaaaaagtattgttaatgaagatgaacgatgtgaaatggaattggaatatattgcaaactggaaattgggtttggatttgactattttgttgaaaataatgtgtccattttttaaaacattgaagaaatccgagtatgcaggcgatgttttagcaaatgatgagatgcaatatctgagtgattattatgaaagtaatgagcctctagattatgatgaatctaattatgattgtgagaaacataaaaaaactttatatgatttaattaagagagttactgatgtatgtgtttctcttttgggaatagttcttttactacctctttttgttgctataacaataatagtctggatggatgatggaggaaatcctttttatgaacatttgagaattggctatcgcggcagaaagatatctatatataagtttagaagtatgaaaatgaatgttggcgatttgaaaaaaatattaactcccgaacaaatggaacaatatattaaagaattcaagatagatgatgatccaagagttacaaacattggggcctttttaagaagaacaagtcttgatgaacttccacagcttttgaatgttttgaaaggtgatttgtcaattgtaggtccaagacctattgttgaaaaagaaacagaaatgtatggtgaacaaatagcaaaatttcttagtgtaaaacctgggttgactgggtattggcaggcatatggaaggagtaatatttcgtatgagaatggtgagcgacaaagaatggaaatgtactatatagaaaatagatctttatggcttgatataaaaataatatttagaacatttgtgtcggtgataagagaggatggagcaaaataacttgatgattggaattttttcaaaagtaagaaggaagttagttaagttcaatgaatatagtatatggcttagaaaaaatgagaaatataaaaataattatgaattagatgaaaatcaacgattttcaatcatagttataggaaataaaaagaatagatgtattgcatcaattagaaaacagaaatataagaattttgaattaactctttcgaaaacatggaatgagaaaaaaattcctttgggagaatggattcttgtagttgattctaatactgtacttgaagaaaacatattatttgaaattgtacaaataacacaaaaacagtcatgtgatattatttattttgatgaagacaatttggacattgtaacaggtaaaagaaaaagacctttttttaaaccgaattggtctccagatacgctaatgtcttttatgtattttgggcaagtatttgcagttaaaagaagtatttttactcagattgctaatgaagtggattgggacagagaagatgttatatatgatttagctttgagggcaactgaactaacacagaaggttgcccatgtttctaaaatattaatacataatataaatagaagacgaaaatataatgacgaaaatgtaaaagaaaaagccttaataagaagaggattgagtggatatttgcaatatataaaagaaatgaattgtaatagagtggtatatttgccggtaaataatcctttggttagcataattattttgtcaaaaaataattataatatgatggaaaagtgtataaattcaattttaaaatatactgcttatggtaattatgaaataattttagtagataacggaagtgagggacaacagtacgataaatataatgaatttactatagaaaaacatattaaatatatatatcgaaaaatggaatttaatttttcttttatgtgtaattgtggtggcaaagtgtctaaaggtgagtttgttttatttttaaatgatgacattgaaataccaagtaaagatccactttggttagaaaaaatgttgggacaagcacaattaagccatgttgcaatggttggagctaaattgttatatcctggaacagatataattcaacatgatggaataatcaacttaaaggaaggtccagcacacattttgtgtaaagcacatgatagcaaaaactactattatggaagaaatcgtgtagagtacaactattcatcggtgaccgcagcttgcatgatggttgagaaaaaaatatatactcaactggggggatttaataatgaattgcctgtggcgtataatgatgttgatatttgcttaaaggctgtggaaaagggctattataatgttgtgagaaatgatgtgtgtttatatcatcatgagtcggtttctcgcggattggatatagagcaggataaaaagaacaggttgatgaaagaaaaagaaaaactgtatatgtctcatactgctttatatgttaatgatccattctataatattaatttatcaaatcaagatggagatttttcgcttaatatatcataatactattattgtttaactatataaaatatcaaaagtagtaatttgtattgaaatttgatgttagaaatgatatgattgtttagttataggattaattctttagtgaaggagactatcatggtaaaaaaaagagtgttagtaacaggagcaaatggatatattggaagacatgttgtaaaagaattattagataataattttgaagtatatgcagccgattttaggtttgatgggttagattcgcgcgctcatcaagtgacgacggaaatatttagtggaagtgagactatatatgatgaattgggaagaccggatatatgtatacatttagcttggagaaacgggtttgtacataattcggagtcacatattgtggatttaccaaatcattatatttttttgaaacatatgattgagggtggacttccgcaacttattgtaatgggaagcatgcatgaggttggctattgggaaggtgcaatagatgagaatacaccaacaaaaccaatgtctctttatgctatagcaaagaattcactaagagagatgattgatatatttgttaaacaacataatacaatatttcagtggacgagaggattttacattattggagatgatctgaggagtaactctattttttctaaaattgttcaggctgaaaaagaaggaaaagataagtttccgtttacaacaggaaaaaatctttatgattttattacggtggatggtttggctaaacaaatagtagcagttgcaagccaaactgaagttgatggaattatcaattgctgcacgggaaatcctgtttcattggctgatgaagttgaaagttttattaaacagaatggatttaaaattaaactggaatatggggtgtatccagaacgagagtatgattcaccaggaatttggggggatcctactaagataaactgtatcatgaaaatgaatcaaaaggttgttgattgttaattagattgaggaaatcagatgtcgaaaaaaaagtttttagctattgtgataagttttgcagttgttgttatatgtaatatattgattatattggggcttccagcttattcgaaagaagatgtaaaaattcaaatttctttaaattccaatcagaaggatttgtatgaaatgctatatgataagaaaatggaatttagctccgcaaagagttctaaagccttagttcagacccctttttcggatgaaataatggagttctctataccggcaggaacaagatatgtgaaatttaattttggttctgaaggggtagaagcacaagttaaacaaattaagattgtatatggtgctaatgaaagaaaattggatatcggtatatttacaaaatatatcaaaaagaataatatcaagctcatcaatagtgatggaaagttaaatgtgtcttcaaacggaactaacccatatattgtatatgattgtagtggatgggatttaatagattttgttgaagagacgaatgcagttaagggaaatcttataaagtttataacatgtttttttcttgatattatatatattttggcaattcgaaagatgcggcagatagttgatattccgattgagatatatcaaaacagaaaattgatatttgatcttgcaaaaaatgattttaaaacacaatttgcaggctcgtatcttgggattatatgggcatttattcaaccgatagtaacagtcttggtgtattggtttgtttttgaaaaaggcttaaaaagcggtggggtaaatacaagtgcaggaattatggtgccttttgtgctatggctgattgcaggtattgtaccatggtttttctttcaagatgcattaaatggtggtacaaatgcattgacacagtatagttatcttgttaagaaggttgtgtttaagataagtattttaccaatagttaaggttatatcagcattgtttgtacacttattctttatagcatttacgctggcactatattcagcgtatggatatttcccggatttgtatacattacagattttctattataccttttgtatgatggtatttgtattgggattagtgtatgctacgtgtgcaattgtcggtttttttagagacttaacacaaataattaatattattctacaggttggaatctggatgacaccgattatgtggaatattgatacaatggatttaccgagttggttaataagtatatttaaacttaatccgatgtattatatagttgcgggatatagagattcgttgattaataaagtttggttttgggataatccgggattaacagtgtatttttggattgtgactattatggtatttggcgctggaaaccttattttccgaaaattgaaggttcattttgctgatgtcctttaaagaaaggtgaaggaatggataacgtagcaattaaagttaacaatgttagtaagatatataggttatatgataagccgacagatagactaaaagaagctttgggcttttcaaaaaagaaaagatataaagaacattatgcgttaaataatgtttcttttgatgtgaaaagaggagaaacagttggaattattggaactaatggttctggaaagtcgactattttaaaaataataacaggtgttttaaatccttcaatgggagatgtgaaaatagccggaagaatatcagctcttttggaattgggagctggcttcaatatggaatatactggtattgaaaatatatatcttaatgcaacaatgatgggatttacgagggaggaaaccgatgcaaaattacaatctatattagattttgcggatattggtgactttgtgtatcagccagtgaaaacttattcgagcggaatgtttgtaaggctcgcatttgctgtctcaataaatatagatcctgatattttgattgttgatgaagctttatcggtgggagatgttttttttcaagtaaaatgctatcataaatttgaagaatttaaaaaaatgggcaaaacaattttatttgtaagtcatgatttaggaagtattagtaaatattgtgatagagtaattttgcttaatcaaggagtgaaggtttcggagggggaacctaaaaagattgttgatgaatataaacaggttttagttcgtcaggatgaagatgtgtttgaaaatggtgagaagaaagctgcaatccttgaaagtgcaaaggataagaaaagatggatgaatgaattgaagattaatccagaagtgcttgattatggcgaaaaacaggctgaaataattgattttgccattgttgattcaaatggtgttataacatctaatatcgaaaaaaattcagaatttacacttaaaatgaaagtgcaatttaaagaggatattcaagatcctatttttgctttcacgattaaagatttacaagggactgaggtgaccggaacaaatacaatgtatgaaaatgtacaaattggtccggttaaggctggagatattaaagtaggagaatttgttcaaaaaatgacattacaaggaagaaattatttgatttcgtttggttgcgttggagtaagcaataacagatttaatgtttatcatagactatatgatgtgtgtaatataaatgttatatcagataaagatacagttggcttttttgatatgaattctatagttactgtaagtgacgaaaaataaggagaagagatgcttatcaacaatgatataaataacagatatgcaatatttgtcttttatgatagagacggtatagtagatgagtataattatgttttattacatgaaataaaaaaatatgtaaaaaaattattaattatatgcaatggagatgttaatgaaaatggaattagtgggttgaatcaatatgctgatgaagttatagttagacctaataagggatttgatattactgcttataagcttggcatttttaatgaaaaatatttggaactagttaaatatgatgaagtgataatttttaataatacattttttggaccattatatcctttttcagagatgtttgattatatgaatcaaaaagatatagatttctggggaatgacagagtttcatgaagttccgttcgatccgtttgggactatcaaatatggatatattccaaaacatatacaatcatactttatggtatttagaaagtctttagtttcaaacaaagaatttattaaatattggaagaacattccgaaaattaagaattatgaacaggccataggttatcatgaagcaatatttacaaagtatttttcggatttgggttttaagtgggatgtttatatgaatacggatgatttggaagattatacttatgaggctttaagagatttcccacgttatttgatagaaaaacgaagatgtcctataatgaaaagacgagcatattttcatgattatggggaagcattgtccagaagcggtggagaagctactagtgatgcaatggactatatagagagtaatttggattatgatgaaggattaatttatcaaaatatccttagactgtgcaatcaggcggatttaaaaaaacgattgcattggaattatgttctatctactaaagttaaaaatcagacagatatctctgatattaaaattgcaatggttcttcatatatactatactgaactggctgaattttgcaaaaaatatgtctattctatgcctagatttactgatatatatataactgtacctaatgaagaaaagaaaagtgtagttgaaatggttttttctgattgcgaagattataatattcaaatcagaattgttggcaatttaggaagagatgtggctccatttttggttgggtgtaaagacataataaataaatatgacttgatttgtaaagttcatgataaaaaagtgtatcaagttttgccaatgtcaataggtgcttcatggcagaaggagtgctttgataatttgttggaaaatgatattttagttcataatgttatttccttatttaaggaaaaaccatatttaggtttgcttacaccaccggttccgaagcatggagcatactatccaactactggaaaaggagaatggggggaaaactatagagtggcaaaggaattggcagacgttcttaaattgcatgttaatatggatgagactaaggaaccagttgctccacttggttcgatgttttgggtaagaacaaaagcacttaaaacattgtttgatcatgattggcaatatgatgagtttccaaaggaaccgatagctactgatgcgaccgttttgcatgctatcgagcgtatatatccatttgtcgttcaaaatgatggatattatccaggatggcttatgtcagataattttgcaacaatcgaattgacaaattggaattttatgaatagagaattagataaagcaataatggaaaaggttggatattgtaattatcgtgaaatgattagcagaactaaagagttgatatgaatttaggagtatacaatgaggcttaaagaaggttcaataaagcgttgtgcaatatttttgtattatgacaaacaaggaattgtagatgattatgttatttatctgttgaatgatcttaataagaatattgataaactattaattgtttgtaatggaacaataaatgaagaaagtgaaaagaaatttagaacagttacacaggatattctattgagagcaaatagtggatttgatgttggtgggtatcgtgagggattgtttcaaatagggttcgataatttacgaagatatgatgagattgttttattaaattataccttttttggaccactttatccgtttaaggaaatgtttgacgagatggcacagcgggatttggatttttggggaattaccaatcattttgaggttaatccggatccatttggaaaaaatagatatggtgtaatgcctgagcacttacaatctcattttttagtagtcagaaaaagtatgatattgagtgatgaatatagagagtttataattaatatgaagaatccagaatcatatgttgattctatttgtgattatgaatctatatttcaaaaacactttactgatttgggatttaaaggtgaggcatattgcgactctaaagaatatgaaggatatgtttataatcctgttatgtttagaacaaaagaaatgattgcagataaaagatgtcctataattaagagacggtctttttttacagactataacgattttttgttaaactcatgtggagaggttacagtagaagcgtataattatataaaggataatcttaaatatgatacaaacatgatatgggataatcttttacgcttggaaaatatgacagaaataagtagagcaatgcaactaagatatattcttccagaaaaaggagttatgcagagttattgcctatatgattcaattatattattgattaatgttgaaagtgtaaagcatctggatgattacacaaattatttgttttctttatcgaataaaataaaatttgttttttttattaatggtgaacactataaggcagtggaaaaaattattgatatacattctaacgcggaaattatacaaaaaaaaggatcaggtctaattagttttttatctgttttttttagaaacttagattctatatataaatatattggggtattaaatattagagattatgagattgcccctccatatagcaatatggtttcatgggaatactctgattggaaaaatatagttgcatctaatgattttgtgaaaaatatcatagcgactttcgaaaaaaataataggctgggattgttgattccaccgactccttattttgggaatatttatgaacagattgcagatggctggatgggtgcatttccgcaggtgaagaattggctagataagtatcatattaatgtcaatattaaagtggaagatgaaccattggtgccgtatggaggaagtttttggctgagaagagaggctcttaactgtattttagatttaaatatggacgataatgaaaagaaaattgaattaatgacattgccatttattgcgcaaaagagtgggttttatactggtatagtgtataatgaaaactatgtctctaatgttataactaacgaagattatatgatgagagaaacaaataaagcagtatttaaacaatttggtccatcatatcataaggttgtagttgaaagggttaaagagggaaaattaaaagagacactttcaagagtaacagtagttaaattaaaggcaaagaaaaagataaaaaaagtcttaccagcgaaaatgtatgaaaaaggaaaaaaaatatatagaaaattgcgacaagcataaaggtgagtataatgacagaaaatattgggaatgttacattgaactataatttttatgatggaacagatttatatagcgatggtgactttatcgaagaacatattttaaatattgtgaagaatgaagataattatgaatatgtgcataaagattatgtaaattgggcggtaatgtatcatttaagtcgtcaaagagaaaatatagtggctcctatggaaattaataatacggatgaggtacttgaaataggcgctggtatgggagctgtgacaggtgcgttggcgaaaaaagcaaaaaaagtagattgcattgaattatcaaaaagaagatcattggttaatgcatataggcataaggattttgataatatagaaattattgttggtaattttcagaatatcaaaattgaaaagaaatatgatgttataacattgataggtgtactagaatacgcttatcattatatagatagtgataagccatatgaggattttataaagaagatttcaaagtgtctaaaatctgatggaaaactatatattgcaattgaaaataaattaggaatgaaatactttgcgggttatcatgaagatcatattggtaagccttttgttggaatagaaggatataaaaaagaagacaaagtaaaaacatttagctactcgcaactaaagaatcttgttttagaaaatggatttaaaaagactagatttttttatccttttcctgattataaacttccgactgtaatatatagtgatgataatatatcatatgccgagatagattttgctaatcaatcgaattttgatatagatgtaaagcaatattttgatcctttgaaagcaattcaaagtttacatgggtcagatgaagttaagatttttgcaaattcatttttagttgaggcaataaaggagtaattatgaatattgagtatcaaaagtttagtgatgaacgacgaaaaaaatattgtatttccacaacaattataagagaaaatgatacaaagcatgttgtcaaggaggctatttttacagaaggaatggaacacttgaacaatatgttacgttattcaaaagaactggaaaaaacttatcctaatgtaaaaatatgtccggtagaaaaaaaggaggataggttatattttgaatttgttgatggtaaactgctttctgatgtatatgatgaagcagtaaagaaaaatgataaagcaaagtttatagaattattaaaaatgcataaaaatctcgtactaggaaaagaagacaacagtattaaatttactgaatctgaacaatcaaggttttggctgggggatctttcttcatatgagggaaagccagcattagcatgttcaaattttgatgcaattgctggaaatattattatacaaaacaatatccctgtctttatagattatgaatgggtatttgagtttccagtaccaacagacattgtggtgtatcattgcatattagatgcttatctacataatgcttcttttgaaaaacttattcctatttcagaggctatggacatattaggcgtaatttgtgatatggataaaatggaaaatgcctacaaaaatttcttcaagaatgttattgaagatgacgatggaaatagttttgcgcttatgaagaatttgtgtttaaaaaagattagttatgtcgataagaatgaaagaaagaatataaaagaattacaaaatgaaatcatagttttaaaacaacaaattagtgaattgaaagaagaacaggatagagttgtatattattggaaacaaagtaatgaagttaatagattatatgagaggcaaagtcggatatttaatgacattattaataagtatggaagtgtagaaaacattgacaaaataatatatgataaagatattcatattttaaactgtgaaaatattattaaggatttgaaacagaatcgaatgttgtacaaacgtctcattagaaaaataagaaagagaaaataatttgtgatgaaaaaagaaagacttttctatttggattttataagaacaatcgcaacaatatcaattttactaacgcattttaatgcaatatatattttctcatatcctgagcaatctgacaaagcagtcattacatcaagagtatttggattatatattggagattttggagtttcactcttttttataatatctggcgcagcactgatgtatatttatggagaaaaaatggatttaaagacattttactacaaaagattcaaatctatttttccaatgttttggttggcctatttttttgcttttttatattatttctttataaataaaagtattcctgcaggtattcctaaaaggaattttttgttaaccatttttggatttgatggttatttgtctagtttaggagtacatgtaccaaatttttatattttgggcgaatggtttttaggagctattatattattgtatttgatttttccactattaaggataggtgtaaaaaaatatccggtgttaagtgcgcttattgttggaattatatatatagtatgttcttctatatgcagtggtgggttaacgaaaagttgcattatttttaatcgtataccggaaatgatttttggaatgtattttatagaatattataataaagtaaatgttaaggttgctattattagtttattgatatgtattattaactcatttgttgatttcccatttaactcgactattcagactacgtatgtgggaatagcagcttttatgttattggtatatatatcaactcatttaaataattctatgctaattaaattttgcgaaaaaataagtaagtattcatatgctgtttttcttgtacatcatattttgattcaagaaataacaaaatcgtatgatatgagtacgatttcaagaactaacagttatgtgttatttatattatgttgtgtagtaataggattttttgctaaaatactgtttagtatagattattatataagtaaggagattacaaaatgacaaaaatgacaaaaagagcattttccctattgttgacactaacgttattaataacaatattgccatacaatgtttgggcggatgaacagcaaaaaagtgattcgagacaaaatgaaaataacgtaacattaagttacatggttgtagataaacctaaaattgaaaaaaacgatacacaaaatattgttgtgggctacacaattagtggcaatctacaaataaataatgcagtaatgtattatacaaataaagagtcaggcgaagaatatgaagttaatgcagtttatattgataacgaagttgcaaaatttacatatgatatagatgtaaataatagtggtgaatatagtgtatctaggttgatatttttttatggtgataacagtcaggaaattttgatgtcggatactggaattgatgcaaaatatgcggttaatatagatataaatacatcacctgatgcatatttaaccgaagaagaaactgttgatactgatattacatatgaagctatagacgaggagggggataaagttgagtgtaatagtattgaagatgctatcatagtcgcttcagataataaaaatgatatagaaacggcggattatgaccaaaatgaattgtgtcgtagcaatgggaatattgttgttgtattggatccgggacatggaggaaatgattcgggaacaatatcaaatgtttatggcgtgcaaatagttgagagagatattaatctcaaaattgcacagtattgtaaatcggaattagaaacatatgcaggtgtaactgtatacatgactagaaatgataatacaagtccaaatactgatagggagcagagagcaaagtttgcagccgaaaaaggtgcaaatgttttggtaagtatacatattaattcttatggaaagggatatacaagtgctcatggagctgaggtttattatcctaattctaattataactcaactgtaagtggtcaaggacagaatttgagtgcggttattttaaaacagttaactgcattggggttagcagatagaggaataaaaattagaaattcgaaagatggggaaacatatccagatggttctcttgccgattatttgggtataaacaaatatgctaagttgtatggttatccaggaatacttattgaacatgcttatgctaataatgtgtcggatgctgctaattatttgacgacagatgcgcaattgcagagattaggtgttgctgatgcaacaggcattgcacaatattttggtttacaaaagaagaaaaatgtgtctctatatggtatatgtaaacaggaaactgttgaaggaatttcagcagcactttcatattcttcggatgattcaaatataaaatttcgttggatggaatataacatagataaaggacaatggaaaattcttgatgactggagtagtaattcttcggtattttggaagccacaaaagggaaattattggttgagtgttgatacgttgactagtgatggtgtaaagcagaattttactttggtttatacatcaaatcatgactatacaggaaaacatggtgttactatttcaggattgtattgtgaagaaaaaaatgatggaattcatgctggtgcagttcatttgacaaatgatcctaatacaaaatatagatggttagtgtatgatttgtatagaaaaaactggagagtaatatctgattggaaatctagtgaatgggttacatggaaacctgaacagggaaattattggttaagagctgaagctgtgacaagtgatggcatagaagatgattatacattgacatataccgtaaagaaagattatactggaattaagttatatggaatatatgctcttagtggttctaaggatgtggcagcagcattgtcatattcaagctcaaatgaagatatagagtttagatggatgttgtatgatatgacgtctgggcagtggaagatacttaaagattggggacatgatacttctcttaaatttttaccaaaactaaggacatattggcttagtgtagatgtaagatcgaaagagggcgctgtaaagaattgtactattacatatacttcatcaattgattatacggttaattatattaacttaaatggaatatattgtacgtatagcaaatatggaatcagcgcaggtgctgtgcatcaaactaatgatgataatgttagatacagatggctttattacaatgtcgataatggcaactggtatatgcttacaaattggcagaagagcgagtggctaaactgggtaccagatgcaggtcactattggctgcgagtggaagcaagattaagtaatggaaaagaatacaatagtactattgcgtataatgttgataaatatgctattatgggaaattcagacacgtcgatttcccaaatggtaagatattttaatgctaaggctaagtatccgtcttattatagcaatactgatgcgcctacgatagagaagttctgtaagatttattttgaagaatgtaatactgagggtgttaaggctgaggtagctttttgccaatgcatgaaggaaacaaatttccttaaatttactggagatgtgaatatttcacaatttaactttgctggaattggagcaacaggcaatggaaagaagggaaattgttttgaaaatgtaagaaccggtataagagcacagattcagcatttgaaagcctatggttcaaaacaaaaactagtaaatgcttgtgttgatccaagatataatctaatgtcaaataaaggctgcgcagtgtatgtagaatggctgggaatgcatgagaatcctcaaggaattgggtgggcatcttcatatgattatggatatagtattcgaagagattatatgaatgtattgtttagatattaatataaaggatttagtttaatattttaacgcatagtcatatgactatgcgttaattaggagcaataataaagtataagtgcataaattataggtaaaaatatgaataagagaaaaataatcaacagtgtgatagatattatttttgtggtatgtattggaataatttattttgaatggtcatcacacctgatgcaaagctgggctcccgatgaaggaatgagagaggatgttgtctattggatagctaaaaatggacggttgcctataggtgatgagaaagaacttataaatccaatttgggggttttcatatgcgtttttaccatatcttccgtcgattataggagctttttatgtaaagataattagtatttttacaagtagtgaaattgctatatttttagcaccacgtatggtgagtgtttttgcggggatgataacaggtggatttgcattaaaaataggtaaacgattttttcataataggttatcagactatttatttgccagttttatttgtttattaccgcagtttgtttttatttgttcttattttaacaatgatagtttttctgtaatgacaacagtaattatgttgtatttttggatatgtggtatgcaggatggttggaataaaaaaaatacaattggacttggagtaggtataggaatgtgcgcgttgacatattataacgcatatggttatatattatgtagcattgtgttttatgttggcagttggatacataaagggaaaaaaattgaatggtctaaattttggaaattcggtcttattattgcaggtgttgctataatgtttgccggatggtactttattcgtaatggtataatttataatggtgattttcttggtattcaggcaacaagaaaatgtggagaaattaacgcaatggaacaatacaagccatccaatcggacaaatatgtataatcagggaaaaacaatttgggatatgttgacagatggctattgggtaaaaatgttgtatagtagctttattggctgttttagttttatgagtgttttaatatcggattggtatattcatagatattatgctatactactgttaggtggaattataggattgataattatgctggtgaataagaaaacaaggttactgtgtattacacttgtttttactatgataatacctatagtacttacaatatataattcgtattcagcagattatcaaccccagggaaggtatgttatgtctgctttgccgggacttggtttttgttcagcgtatggatatgacgtgatatcaaataaaatcccaaaatggcttggctatatattaattatattattgggattgacatggatacatttattgcatggagtatatagggattatattaatgtatattgttggtgtaatgatattaaacagattttaaaataaaaggagatattcatgattaattttaacgtaccaccgtttattggaacggaaatggattatatcaaaaaggcagttgaaaataaaaaaatttgtggagatggagagtttaccaaaaagtgcaatgcatggcttgagaaaaagactggaacagctaaagcacttctcacaacatcgtgtacacatgcaactgagatggctgcccttttatgtgatattaaagaaggcgatgaggtaattatgccatcatacacatttgtttctacagcggatgcgtttgtattaagaggtgcaacagtagtttttgtggatattgatccaaaaactatgaatatagatgctaatcttatagaggatgctattacagagaagacaaaagctatcgtaccggttcattatgcaggtgtgtcttgtgatatggacaggattatggaaattgcaaagcgtcataatcttatagtaattgaggatgcagctcagggaataatgagtacttatcatgggaagtctttaggaactataggcgattatggctgttatagttttcatgagacaaaaaattattctatgggtgaaggtggagccatcttaataaaggataaggataaggcagaagaagctgaaatccttagagaaaagggtacaaaccgaagtaaattctttagaggtcagatagataagtatacatgggtaaattatggttcatcatatttgcctagtgacatgaatgcagcatatttatatgcacagcttcagcaggcagatatgattaataattacagacttaatatatggaatacatattatgatggatttggtgagctggagaaatcaggaaagattgaacttccatatataccggaaggctgtactcataatgctcatatgttttatattaaagcaaaggatttgcaagagagaacagctttgattagcttcctaaaggaaaatggaattcaggctgtatttcactatatcccattacattcggccccggcaggaaaaaaatttggtagatttcatggggaagataaatatacgacaagagagagtgaaagacttatgagacttcctatgtattatggacttaaggatgaagaagtacagtacattataagcaaggtgaaggaattttataagtaaaataggtattattatgaagaaaatagttatatttggttcaacaggaaatattggggcatattttaccgattactgtaataatatgatagataaaaagcaatatgaagttattgctgtaggaagaaaacatacagattattacaggaaagcagggattgaatatataaatgtggatttatgtaattcatcggattttgaaagactgccaatagatgatttgtatgctgttgttaatcttgcaggacttttgccggcttatatgaaagaatatgatccgtttaaatatgtggagactaacatcaatggtgcacttcgtattttggaatatgccagaaaaaataatgcagatagggctttatatactcagacatgggcagagcaggctggatattggggaaaagaagaggtccttcgtccggaatatccaagaaaactgttgtttacgggtgatcatgcattttatgctattacaaaaagtatggttgtagatacaatggaacattacaagcaggaatatggtttgaaaaatttcgtgttcaggcttcctaatgtgtatttgtatcatcctgaaaagtattattatgtggattgtgtcaaaaaacctattggttataggtatatgattgataaagctgcagcaggtgatactattgagatgtggggggatccggatgcatttaaggatatcctctatataaaagatttgtgtcagatgatgtataaagctctgtttgcacaggttgatggtggaacttacaatgcaggaacaggaataagaactacattacgtgagcagattgaagggataatagatgtgttttcccctaaagagcatatgtcaaatattgttgagaaacctgaaaagagtagttttacaagttttgtgatggatattgaaaatgcaaaaaaagatttaggttataaaccggagttttcatatataagatatcttgaggattataagaaggaacagaaacttaatcgttttgccgagctttggaggaaataaaaagatgaagaaattagcaataattggagcttcatatttacaggaaccattaatagaaaaagcaaaatctatgggaatcgagacgcatgtgttcgcatgggcggcaggtgatgtgggagaaaagagtgcagattatttttatcctatcagtattgtagagaaggatgaaatcttgaaaaaatgtagagagattggtattgacggaatatgtacgatagcatcagatctggcagtaattaccgtaaattatgtggcaaataatatggggcttatagctaattccatggcatgtacagaaaaatctacaaataagcatttaatgagagaagcttttgaaaaaaacggtgatccatctcctaaaagtattttggtatctacgatagatgatttaaagaaaatagaactgaattatccgataattgttaaacctatagataggtccggaagtcgtggaataacgaagttgcatgatgtaaaagggctggcagaggcaattgacgaagctaaagctcagggatttgagaaagaagcattagtagaggagtttgctacaggccaagaatatagtattgagtgtgtttcatggaaaggagatcatcattttctggcaatgacacacaagtttacgacaggggcaccacattttatagagaccggacatatggaaccggcaccaatatcacaggaacaattgaaacaggtaaaaaaagttgtctttcatgctctggatagtttggaaatcacatatggagcgtcgcatacagagttaaagattgctaaggatggcacaattgcattgattgaaatcggtggcagaatgggtggcgattttatcggaagcaacctggtgcagctttcaacaggaattgattttgtgaaggcggttattgatatatcattaggagaagaaccagacttggcggtgggagaccatgcggcagcgggggttagatttgtatttgatcagaaagatgttgatatattagaaaaactcaaaaaagaacatcctgaatatatagttgatatggatattaaaccggtaggagatcatgaagtggttgatagctctacaagatatggttattgccttatgaaagcaaaagatttgggatatttatatccatacttaccggataacggagaggagtaataatgaacaagtcgaaacttaaggtactttttgcattgcatcttatgctgatggtttattctatgagtggaatatgtagtaaaatggcatcacaacagcattttcttagttttaaattctgtttattttatgctattattattttcctcctaggattttatgcgataggctggcagcagattatcaaacgacttccattaactacggcatttgctaacaaagcggtaaccgttgtctggggaatagtatggggagctgttttttttcatgagtcaattactgttggaaaagtaattggtgcagcattagtgattgttggtgtcgtaatttatgctagagctgatgaaggagaagtaaatgaataaaactgtattaatctattcctgtgtacttctggtaggtgtgtttgtcagcgcgatttcacaggttttactaaaaaaagcagcaatgaaacattatgagaatcatttgaaagagtatttgaatccaatggttattttcgcgtatgcaatgtttgttggaactacatttctttcaataattgcctatagagggattccgttatctatgggaccaatattagaggcaacaagttatatttatgtcacggtatttggtgtgaagatttttcatgagagacttaataaaaagaaaattatagcattgttttttatagtaggcggaataataatatactcagtatgcggataaataggtaatttgaaaggacaatatatggatatatcagtagtaataccaatttatggttgcagggcagcattggaagaattacatcgaagattaacagatacacttgttgcgatggataaagaatatgaaatcattcttgtaaatgataattgtccacagaattcgtgggaggtaatacagcagttatgcaaaaaagataagcatgttgttggaatagaactgtcacgtaatttcggacagattcaggcgataactgcaggattggattatagtaaaggtgattgggttgttgtgatggattgtgatttacaggacagacccgaggaaatcccaaatctttataaaaaagcaatagatgatcaattagatgcggtatttgcacgacgtgcagaacgaaaagattcttttatgaaagtattggtgtcaaaggctttctacaagatatattcatgggcctccgatggcaactatgacccagctttatgtaattttagtatcagtaagcgaatagtggtagataattattgtaagatgagagaacttcacagagcttttgttatttatgttaaatggatgggctttagaattggcacattagatgttcagcatgaagaaaggtatgagggaaaatcttcatataattttaagaagcgaatgaagatggctacatcgattcttacatcacaatcggacaagctgataaagctgacagttggtctaggatttgtggtctctctgtgttcagcactggtcattattggtttgattattcattattttactacaagtgtcgttacatccggctggtctagcattattgcaacaatttgcctgatgagtggacttttaatgatgtgcattggtattgttggaacttatgtgggaaatatttttatgcaagttaaggaaagaccattatatattgtaaggacagttttaaatgaaactgagaataaataagatgagaacaacgtttgagaatgaaaattgtttttcgagaaatgatacttatgttgtaaagggaattgcaatagtggctatggtattacatcatgtttatccgaatagcacaggaactccaatttatatgttggataataaagatgctattggattagttgcgtcatgtggaaagttatgtgtttctcttttgaccatattaagcggatttggattaacagaaagctataaaaaaagagaatgtgaagattttaggcaaaatataaaatttgtcctgtcacatttggtgtaattgtattctatgtattggagtgtacttctgatagcattaagcatcatgttttcagaaggaaatagtattagcacattatatggaaaaggtatagaggaaatgttatttttaaagcaaatttatgaaaatttgctttagtattgtttactagcatgggtctttctatgcttattgaaatgatgaaagcaggattaaatataagtaaatatgtaattagaataaggaaagaatttatataggaaaaagtggtctatttgtttgtatgacaatttaattgtgactatagggtggactgataggagaaagaaattgataaattgttttagaaatttttctgatgtaattaccaaatatattttgggaattgttttttctgtattttttatattggcacttgttgtcaaagcaatgtatagttttgatgattccccatatttcacgtttaataagtggtatgattttgtttttatagtattatgtggtactggtgtttttttgatgttaaaaaacagagaatttattcagaatcatataaattttaaagtgatgttctgtatttatatggtaattgctatatgttatatttatcttgttccactaacacctttttctgatatggagcatatgtataaagcagccgttgaaattgcaactggcaatgtcagaaacgtttatcaggatccatattggacaacatttggtggaaatatatatttggcttttttttatggaatcatattaattccattgcctaaaagtattatttctattaaagtagttaatgctttaatggtatatatattcatttatctgatatctgacatagcgaaggaatatggagttaaatataataaactactttttatttttttattgtttttctcaccattatttttatacattaatcatatatattttgatattccatttcttttttttgaaatattggcattatatatttacaagaaacagaagaatctgatatatatgtctattccattagtatttgcctgtttccttaggcttaatggttttattattcttttggctgttttattgtctatagttttcaaaaaagaaaaaataaaaaaagcaaagatgatggagatggtttttttgtgtattattgttttctttattccaactggtgtaaagaaaacaattgatatgttatatgtgccggatgtgctgccatcttatccggcattgaatcaagtatatataggacttaatgaaaaagaattcggatttatggataatgaccttagttacgaaagaaattgggatgatataattaatcgtgtagaagactatggaccaactaaattgactaaaattattggcaaaaaacctttttggttatggacacagggaacatatcaagctgagagatatgcatttggaagtgatgtatcaaatgagttagacaaatttgaatataagacagttgcaacaaaacatttgatgagtaatgatcagattgcacgaaaattgattaattcatttatgagagcgcaatacttgattttatttttgggcatggtaattaatatactattttctatgtataaaaaaagtgatatagagtctgaaagagaactatactatatcttaataggaacattattgattatgttaatatgggaactgaaatctagatacattataatgtgtattccaccgatggcaataatggctcagcttggttttgaacatgttttaaaattgaaagaacaaatttagtttatatgttttgattcaatgaaataatatattatgaaaaagaatatgacaatagatattatatgccctctatatgatgcagaaaattatatagaaaatttaaataaatcaattataaaacagaaaaaagtagagattaattcgataaaatatgttttgacaaaaggaaaagataatacagagagccttcttaaaaagttaaaatgcgaatacactattatttcgccttcagaattctctcattcatacaccagagaaatgatggcaaaaaagtgtacaggggatataatagtattcatttctcaggatattaagattttgaggaatgattggctttattatttaacaaaagatattgttgaaggaaattgtgaggctgcatactcaaggcaattagcggaaaagaataatatagaaaagtataccagagagaaaaattatcctgataagtcatttgttaagactaagaaagatataggaagtatgggattaaatactttctttttttcggatgcttcatcagcaattaagaggagcgtgttttgtaagcttggatattatgatgggaaaaaatttgcctcgaatgaggatcaatatatagcatataagcttattatgaacggatatagaattaagtattgtgctgagtctgaagtggttcattcacataaatttagttttaaatcgttatataagcgatatcatgatacaggagagttttatagagctgagccttatatgaatacttttggtacaaataaggccggtgccggtatggctaaatatattttaaagagaattgttgaggataggaatattgtagcagcgttggagtttatgccaaatatgctggctcgttttttaggaatgaaactgaaatgagagagaagatatcagtagcaatggctacatataatggtgaacaatatattgaagaacagttgaaatctgtactaaaacaattgaatgataatgacgagattataatatcggatgatggaagtacagatagtactatgaatataattgatggtatcggagattgtagaataaaagtttttaaaggaccaaaaaaaggagttaaaaagaattttgagaatgcaattagacaatgtaaaggaaaatatattttcctttgtgatcaggatgatgtatggcataacaataaagttgatacattgctaaatgtatttaaaacaaattctgattgtaaatgcatactgcatgattgtattgtttatgatgacaggtgtgaatgtattatctatgattctttttttgaatttcgagatagtaaacctggaatagttagaaactggtacaagaattcatatataggttgttgtatggctttcgattctagtctcaaggatgtgatattaccagttcccaataatattgagatgcatgatcagtggataggaattatttctgagattgtgggaaagagtatttttcttaatgaaaggcttataaagtatagaagacatgcaaataatgtatctggaatgtcacatcattcagtgggagatatggtaaaaaaaagaattcttttcgtagcaaatattattaaaattttaccacgattattaaggagaaaattatgtcattagtgtctatgcagttttttacatttatagttgttgctctaataggatattatcttatacccaagaggtttcaatggatatggcttttattatttagttatgtatattatatttcatatggagtaaaatatgttttttttatactatacactacatgtgttacgtatttttcggcattgcttatttattgtattggtaaaaaaattgatgataataataaaaaatctatagagcataagaaaaaaatggtcataataatagctttacttttggaatttggagtattagctgttttgaaatacacaaattttgttatagaaaatattaattctatttttaactcagacatatcaatgatgaaattaatattgcctataggtatttctttttacacctttcaatcggttggatatgttttggatgtgtattgggaaaggtgcagacctgaaaagaattttttaaaactggcattatttgtatcgtttttccctcaaataatgcagggaccgattggcagatacagtaatttagctcatcaactatatgattcacattcatttaatgtatataacattgaacgtggaatgcagagaattctatggggattatttaagaaacttgttattgctgataatgctgcattatttgttaatccaatttttgataattatagagattatgatggacttgcaattctaggagttcttgcctattcagcccaattgtatggggatttttcgggtgccatggatattgttataggtatagctcaaatgtttggaatcaaaatggatgaaaactttcaacgcccatatttttcgatttcaattactgatttttggcatcgttggcacattacgttaggaacttggatgaaggattatttattttatccgcttacattttcaggatggatgtctaagcttggaaagttctgtaaaaagagagttggaaaagtacatggcagagcaattccggtatgtattgcaaatataattgtctttcttgttgtaggaatatggcatggggcggcctggaaatatatagtgtatggtttatataatggcttgattattggaataagcggggtattagcatctgaatatagacgatggaaaaataagttgaatatagacgataaatctaataaatggagaattgttcagacaataaggacatttatattggttaatattagctggttttttgatagagcagataccattacgcaggcatttataatgatgaaaaatgcatttacaaaatggaaaccatcacaaattatgacaattgaaattagtacttctggtataaaatatactattatgtcacttgcaattgtatttatcgggtgtgcaatagtctttgcggtcagcttttgtcaagaaaaaggaatgcatgtgagagagagtatttctaaaagaccgatgatagttaggtggggattatatgtagtgatgattatttctttatcagctttgggagttacacctagattatctggaggttttatatatgcgcagttttaaaaaaataatttgtctgggaatggttgttgcaattatagtgggaataaatacaatattgaaccttgcatttcagccatataacaactttagaaatgatatgcataatttagatactcacaaatttgatactgtattcgtgggaacatcacacggaaaggcaggaattaatcctgatataattgatggtattactggctacaaaagcataaacatgtgtctaggaggacaatcaattgatgatagttattatatagttaaagaagcttgtagagtgaataaacccaaacggataatttatgagcttgatccttcatattgggttacagagatttcattgagtcctgagtatatggaattatataatgaacttccaatgtcgtatgtaaaggttgaatgttattttgataagatatggaatcaggattttagagctacattatttccttggtatgttaatagaaaaggtttagatggggctgttgatagattaaaaaatagactttttaataaaaggtataaatcatatgcaacagatttttatgattgcgatgtacaatcctatgaaaaaaatggtcagacaagaatccataggattgcgccgtttatagaggacagtcagccgacaatatggaatgaaggtagtataaataagaaagtgctcaatagtttttacaggcttgttaagctttgcaaaaatgaaaagatagatttaaaggttataataacacctatcccaagggagacattggacagatataaagaaagttatcttgactcagataaatatttttcaaagttgatgttaaaatacaatgtagattatttcaattataattatacagatattacaggatttgatcataatttgaccggttttcaagattatgaaggacacatgtatgaagatcaggctgatttttttagcagaaaactagcaaatgatatcagcagataatcttaaaatcattattgacttatttcattcataacgctattatagtaaaatcgcagattaacttagcttttacaagatgaaacggatatgacatgaaaaagagaaaagaagatttaaaggaacttatactttacaccatattcggtaatatgacatttatcataagcataggtgcttatgcagtatttaatgtagcacttggaataaatgaattgatagcaaatgcttttgcttgggtatttgcagtgcttttttcgtatattaccaacaaaaagtgggtatttcgtgtatcaacacctacaaaaacagcagcatttgtgcagatgtttgcatttttcagtggcagattttttaccctgattattgaggaaactattatttttgtttttataactatgctttcatacccgagcatgtgggtgaagctggctgctcaggtggtggttgtggtactcaattacataattagcaagctctttgtatttaaaaatcaataagagtaagaaaatattaaggaacaaaaacttttcaaatgcacgttaatgtggtaaaatcggtatagttaacattaataggcttattactagctgacataggaggttaatataaatggatttcagagcggagtacgagaaatggtgtacagacccatattttgatgaggctacaaaggcagagcttaaggatatcgcaggtgatgataaggagatagaggacagattctatcgcacacttgagtttggtacagcaggtcttcgtggtgtaataggagccggcaccaacaggatgaatatatacacagtccgtcaggctacacagggactggcgaattacatactttcacagggagaggacgcagtaaagagaggtgttgcaatcgcacatgactcacgtaatatgcatgatgagttcacagatgccacagcactctgtcttgcagctaacggaatcaagacatatgtattcccacagctcgcacctgttccagagctgtcatacgcagtaaggacactcggtacaatagccggtgttgttatcacagcaagccacaatcctcgtgagtacaatggatacaaggtatactgggaggatggtgcacaggttactccacctcatgatacaagcatcatggctgaggtggcaaaggttacatcatttgatcaggtaaagactatggacaaagctgctgctattgaggctggtctttacaatgtcatctctgatgagattgaggagggatatttcggagagctccgcaagctttctatccatccggagattatcaaggctatggcaaaggatatcaagattgtttacacaccactccacggcacaggtcttcgccctgtacagagagtgcttaaggatatgggctttgagaatgtatacattgagccaagccaggcagtacctgatggcaatttccctacatgtccttatccaaatcctgagaatcctgatgcatggaagcttgcacttgagcttgcaaaggaaaaagatgctgatatcgttttagcaactgaccctgatgccgacagactcggtgtatactgcaaggatacaaagacaggtgagtatgtgacatttacaggaaatatgtcagctatgcttatcggtgagtatattttaagccagaagagtgccaatggtaccctgcctgagaatcctgcatttgttgagtcaattgtttctacagatatgggtaaggcaattgcggcagcatatggcgtaaagcatatcgaggttttaacaggtttcaagtatatcggagagcagatgctcaaatttgaaaagaccggctgcaacaactatgtattcggtatggaggagagctacgggtgtctgccgggcacatatgcaagggacaaggatgctcctgcagcagtttgtatgctgtgtgaggtagctgccttctacaagtcacagggcaagactctctgggatggcatgattgacatgtacgagaagtatggctactacagagagggcatttccacaatgaccttaaagggcattgatggtgctgcacagataaatgagattatgacaaaggcacgtgccgctgagccaaagaaatttggtgattatcaggtgcttgctatccgtgattacaagaatgacacaagaaaagatatgacaacaggaaaggttgagccgacaggtcttccttcttctaatgtactttactacgaacttaacgataacgcttggtgctgtgtacgcccttctggtacagagcctaagattaaattctatttcggagttaaaggagtgtctcttgaagattcacaggctaagcttgatgctttgtcagctgaggttctcggacagtttgaataaggactatgatgaaaatatacatttgcccggattgtggctggatacggatggtttcaagaaggaaagaagttgaatgcttcaagtgtggcaggccgcagatgcgtctgacgaatctggagtttgggaagtataccaatatgtcagagaaggagcgtcaggactacgcagacgcgtggctttacattcataggaaaaaggaaaaataatatggcaaagaagagaaaaagaaaaaaaggtcgcaagaagataatcttatttgtttttgaaataatattattacttgtcgttttaggcgctcttgctctttacaatagtacaattggtaaaattgattttaaaaagcaacttactacaagtgaagctggtgtaaatgatgatatcaaagatgagactgttcaaacaatgcatggataccttaatgttgcactgtttggtcttgatacaagaaagtcaggggattattcaaaatctaattcagattgtataatgatagctagtttgaattatgatacgaatgaggtacaattaatatcagtttacagagatacctatttagctataggtaaaggcaaatatgcaaaggcaaatgctgcatacgcaaatggcggtgctgaaaattctgttaaaatgattaattccaatttagatcttgatattacaaaatatgtttgtgttgactggaaagcgcttatagaggtaatagacaagcttggtggaattgatttggatataacagatgctgaggttgtgcatattaataattatatgaaggaaacatctaagacaacggatgtgccttatgatgaagtgacagagagtggtcatgtgcacttgagtggtattcaggctgttgcatattgtagaataagatatacgacaggtgatgattttatgagaacatcacgtcaaaggattgtattgcaggaactgttgaagaaagcaaaagaagctgatattgctacattgacatctatgtgttcagtaatgatggatgatattagtacaaactttagtgtgccagaattagtttcattagctaagggtgtaacaaaatataatgtcaagtctactacaggttttccattttatcttacaacaaaggatttggcagtaggaagttctgttgtacctgtagattttgagaataatgttatacaattgcatcagtttttatttggtgatgaggcatatacaccgtctgaaactgtatcggcaattagctcaaatatcgagaagaagaccggagtattaaaagatgaagccacaattgacacatcaagatataatgagactgtaggagcagaaggatcacagggagttatggaacagaataaggataagaaaaaaataaaatcatctggttcggatagtgaagataattcatctaataatgatagttcaaagagtaaaaaaaattagtttttaatattaagaccaatcaattgattggtcctaattagtataataaggaaatacataataaaataatttttaatttgaatataatttagggaaaatttatgaaaacagaaatcaaagaaaaaatcacggcaacaaaccagaaatacttaaagaaattcttaacagaggaagctccggctaagcttgagagccagcttgagcacatggactggtcataccttgatatgattcacaacaacaagcagcagagaggtacattttcaccgcttgctgctatggagctttcagagatagaggcaaataaggacaaataccttgcaacaggtcttgatgctgtaaagaatggcaaggttggtgcaattcttcttgccggtggacagggtacacgtcttggctttgacaaggctaagggcatgttcaatattggaaagacaaaggaactctatatctttgagcagcttgtcgcaaacctcatgaaggttacaaatcagaccggtacatgggtgcctctgtatgttatgacaagtgagataaatgatggcatgacaagagagttctttgaagagcacgactattttggatacaacaaggactatgtgaagtttttcgtgcaggagatggttccggcagttgattttgacggcaatctgctcatgaaatctgaggattcacttgccatgtcaccaaacggaaacggtggatggttcaagtcactcatcaatgccggtcttgacaaggatttgaaggataagggtgttgagtggctcaatgtatttgctgtggacaatgtgcttcagcagattgcagatcctgtatttgtaggtgctacaatcgagtccggctgtgtcagcggctctaaggtggtcagaaaatgtgatccatatgagagagtcggtgctatgtgtcttgagaatggcaagccttcgattgttgagtattacgagcttactcctgagatggcagaggcaaagaacgagaatggttcattgcagtatggctttggtgttatcttaaactatttattccgcgtggacaagctcatggctatcgcagaaaagagccttccgctccatgtagtagagaagaaggtgccttacattgatgagaacggtacagagcacaagcctgagactccgaatgcatacaagttcgagacactcatcctcgatatggtatacatgatggacaatagccttccatttgaggtagacagagagaaggagtttgcacctgtaaagaatgcgacaggtacagattcagttgaaacagcgagagctcttcttgagaagaacggaattgaaatttaatatatgatttatggtaactgttcattggcagggatgtattgatattctgcaatttctatttatcgcagacttagaggtgcatctgtcgatgagcagttatttttattcggagaatagcacggggattacaatttatgaaaaaataaataatcccgtcacaaattaaacacagattgacagtatacttctaattgtaaacgaaaggagaaattattatggataacaattatagaaatatgaatgatacaaataatactaacagtacaaataacacaaataacaatacaaacaatgtaaatttcacaatgtcgggtaatccttacaatccggatgagtcacagagggctgcacagactaataatgcatcagctgaaagctattcacagagctacaatccatattcgcaggcttctgcagcaggacagccaaatgcaaatcagtcatatgcaaaccagccttattctaatcaggcatataattcaggcacaaataataatgcatatggtggcgcatcagccggttcgacagacaactcatatagccggatgaatatgaatggtcaggcataccagcaggctgcaaagcctaagaagcagagagcacctagaaaacctggtgcgtttggaccatttgcagcaaagacagtagcggcagctcttatcttcgggctcgtcggaggcggcgttttcacaggagtaagctatattggcacgagagctatttcaaattcttctactgcaagtgcaaagcttaccactacaacatccggtgggactaagcagacatcctcaggggatgcaaaggatctgacagatgtatcatctgttgtcgatgaggtcatgcctagcatcgttgctatcacaaatacaggaacagtcacctacaacagctttttcggaaagcagtcacagcagtctcagagctgcggctcaggtatcattgtgagtgaggatgatgattatctctacattgctacaaacaaccatgttgtggcagattcagaggagctcacagtacagtttgatgatgattcagtggtaaaggcagaaatcagaggaacagatccggatgacgatctagcagttgtacgtgtaaagaaagcagatcttggaaaagatacttactcaaatatcaagattgctacaatcggagattctgaaagtgtagctgttggaagtcctgcaattgctatcggtaatgcacttggatacggacagtctgtcacaacaggtatagtaagtgcgcttaacagaactgttactacacaggattcacagacaggtgagactgttaccaataacaagcttatccagacagatgcagcaataaacccgggaaacagtggtggagcactcttaaatgaaaatggcgaggtcatcggtataaactctgtaaaatattcttcaactgaggttgagggtatcggatatgcaattcctatgtcggttgcaaagcctattattgagagcctcatccaggatggaaagtatacaaacgagaatcaggcataccttggaataaagggtggcgatgtttcatctgagatggtagcctacggcttcccacagggtgtgtatgtttcatctgtttcagctggttcaggtgccgcaaatgccggcttacaggagggagatatcatcactgctgttgacagcacaaagatttcttctatgacagagctgcagtcagcgttaaagagctacaaggccggagataagg

SEQ ID NO: 124 - DNA, 24621 bp, unidentified
  source 1..24621: mol_type = unassigned DNA
  misc_difference 22035: note = a, c, g, or t
  misc_difference 22036: note = a, c, g, or t
  misc_difference 22037: note = a, c, g, or t
  misc_difference 22038: note = a, c, g, or t
  misc_difference 22039: note = a, c, g, or t
  misc_difference 22040: note = a, c, g, or t
  misc_difference 22041: note = a, c, g, or t
  misc_difference 22042: note = a, c, g, or t
  misc_difference 22043: note = a, c, g, or t
  misc_difference 22044: note = a, c, g, or t
  misc_difference 22045: note = a, c, g, or t
  misc_difference 22046: note = a, c, g, or t
  misc_difference 22047: note = a, c, g, or t
  misc_difference 22048: note = a, c, g, or t
  misc_difference 22049: note = a, c, g, or t
  misc_difference 22050: note = a, c, g, or t
  misc_difference 22051: note = a, c, g, or t
  misc_difference 22052: note = a, c, g, or t
  misc_difference 22053: note = a, c, g, or t
  misc_difference 22054: note = a, c, g, or t
  misc_difference 22055: note = a, c, g, or t
  misc_difference 22056: note = a, c, g, or t
  misc_difference 22057: note = a, c, g, or t
  misc_difference 22058: note = a, c, g, or t
  misc_difference 22059: note = a, c, g, or t
  misc_difference 22060: note = a, c, g, or t
  misc_difference 22061: note = a, c, g, or t
  misc_difference 22062: note = a, c, g, or t
  misc_difference 22063: note = a, c, g, or t
  misc_difference 22064: note = a, c, g, or t
  misc_difference 22065: note = a, c, g, or t
  misc_difference 22066: note = a, c, g, or t
  misc_difference 22067: note = a, c, g, or t
  misc_difference 22068: note = a, c, g, or t
  misc_difference 22069: note = a, c, g, or t
  misc_difference 22070: note = a, c, g, or t
  misc_difference 22071: note = a, c, g, or t
  misc_difference 22072: note = a, c, g, or t
  misc_difference 22073: note = a, c, g, or t
  misc_difference 22074: note = a, c, g, or t
  misc_difference 22075: note = a, c, g, or t
  misc_difference 22076: note = a, c, g, or t
  misc_difference 22077: note = a, c, g, or t
  misc_difference 22078: note = a, c, g, or t
  misc_difference 22079: note = a, c, g, or t
  misc_difference 22080: note = a, c, g, or t
  misc_difference 22081: note = a, c, g, or t
  misc_difference 22082: note = a, c, g, or t
  misc_difference 22083: note = a, c, g, or t
  misc_difference 22084: note = a, c, g, or t
  misc_difference 22085: note = a, c, g, or t
  misc_difference 22086: note = a, c, g, or t
  misc_difference 22087: note = a, c, g, or t
  misc_difference 22088: note = a, c, g, or t
  misc_difference 22089: note = a, c, g, or t
  misc_difference 22090: note = a, c, g, or t
  misc_difference 22091: note = a, c, g, or t
  misc_difference 22092: note = a, c, g, or t
  misc_difference 22093: note = a, c, g, or t
  misc_difference 22094: note = a, c, g, or t
  misc_difference 22095: note = a, c, g, or t
  misc_difference 22096: note = a, c, g, or t
  misc_difference 22097: note = a, c, g, or t
  misc_difference 22098: note = a, c, g, or t
  misc_difference 22099: note = a, c, g, or t
  misc_difference 22100: note = a, c, g, or t
  misc_difference 22101: note = a, c, g, or t
  misc_difference 22102: note = a, c, g, or t
  misc_difference 22103: note = a, c, g, or t
  misc_difference 22104: note = a, c, g, or t
  misc_difference 22105: note = a, c, g, or t
  misc_difference 22106: note = a, c, g, or t
  misc_difference 22107: note = a, c, g, or t
  misc_difference 22108: note = a, c, g, or t
  misc_difference 22109: note = a, c, g, or t
  misc_difference 22110: note = a, c, g, or t
  misc_difference 22111: note = a, c, g, or t
  misc_difference 22112: note = a, c, g, or t
  misc_difference 22113: note = a, c, g, or t
  misc_difference 22114: note = a, c, g, or t
  misc_difference 22115: note = a, c, g, or t
  misc_difference 22116: note = a, c, g, or t
  misc_difference 22117: note = a, c, g, or t
  misc_difference 22118: note = a, c, g, or t
  misc_difference 22119: note = a, c, g, or t
  misc_difference 22120: note = a, c, g, or t
  misc_difference 22121: note = a, c, g, or t
  misc_difference 22122: note = a, c, g, or t
  misc_difference 22123: note = a, c, g, or t
  misc_difference 22124: note = a, c, g, or t
  misc_difference 22125: note = a, c, g, or t
  misc_difference 22126: note = a, c, g, or t
  misc_difference 22127: note = a, c, g, or t
  misc_difference 22128: note = a, c, g, or t
  misc_difference 22129: note = a, c, g, or t
  misc_difference 22130: note = a, c, g, or t
  misc_difference 22131: note = a, c, g, or t
  misc_difference 22132: note = a, c, g, or t
  misc_difference 22133: note = a, c, g, or t
  misc_difference 22134: note = a, c, g, or t
cggtgcttgagatgggcatatctgattttggcgagatgcacaggctttctactatgtcttgcccggatgttatggtcatcaccaacatcggctactgccatctggagtttttgggcgacagggatggtgtgcttaaagcaaagacagagtgctttgagcatatgatgccggatgcggtcgcagtgctgaatgcagatgacgacaagctggccacagtgcagacggtaaatggaaagcctgccatatactatggcaaggaatcagcatcaggcgttcataaatcagtatataccacaaatattgaaaatctaggctttgacggcatgaaggctcattttgtcactccggagggtgagtttgatgcacacatccacatcccgggtgagcacaatgtatacaatgccatggcggcagcagctgtcggattgcagcttggtctcacaatagctgagataaagtcaggaatcgagaaagcagagacaatcgcaggccgtaccaattttatcaaaacgcacggcatgacagtgatagatgactgctacaatgcaaaccctgtatctatgaaatcctctatcgaggtgctttcgcatgcaaagggcaggacaatagcagtgcttggagacatgggcgagcttggaagcgatgagaaaaagctgcaccatgaggtaggcgaagcagttggagagaatcatatccatacactttttgccgcaggagagcttgcaaaggaatatgcagccggagccgcggagaaatcatccgatgtagacatccactatttcgaggatagggagactatgacacaggagcttctttcatatgtgaaggagggcgacaccatactggtgaaggcatcacacttcatggagtttccgaaggtagtcgaggctctgagtgagtaaaatcaggtaagatcaatcgggtagaaattaatttgatatttaataattgcgaggaatggatattctccaagcctcataatattataaaagaaagagagaaaaataatggcacagaatccaatcgtaacaatcacaatggaaaacggcgatgtgatcaaggcggagctttatccggaaatcgcaccaaacacagtaaacaactttatcagcttaatcaatcacaacttctatgacggagtatgcttccaccgtgtaatcaagggcttcatgctccagggcggagatccggacggaaacggtacaggcggcccgggctatgaaatcaagggcgagttcacacacaacggcttcaaaaatgatttaaagcacacagccggtgtactttcaatggcacgtaccatgatacctgattcagcaggcagccagttcttcatcatgcatcaggatgcaccacatctcgacggcgagtatgcggcatttggcaaggtaatcgagggcatggatgtggtaaacaagatcgcagaggtacgcacagactacatggacaaaccacttgaggctcaggtcatgaagacagttacagttgagaccttcggagtggactatccggagccggagacagtttaatgataataattatcgatgaggcaagcgcaaaacttgcctctttttactatcatggcgagatattcaagctgcagtggagaagtgtggcaggcaaggcatctatgtcagaagagctgcaagaaaaactgtatggtgcactaccgggaaagttgctggatgagttgcagaagaaactgctagatgagctgcaagatgaatttcaggaaaaactgcaagaaaaactacctgatgagctgcgggaaaaactgtatgttgcgctcttagcagctgaatcaattaatgacttcacaaaaacaacgatacaagaatatgcagataacaccgcgaaagctaatacgggaaatctaataataccgaaagctcccgccaactacatctggatagtatcaaacaggcagcagaagcaaatagctgactcactcggcatagcatcagtaggagaaccgcagtgcggcacgcgctatgcagtcgagagccttgcagagcttgatattgagtatctggagcgggtgcgcaggcggtataatcacatcccgtgggacatcggcgagacagacaggtgtctgatacgtgagctgtccctgtcagaccttcctgcgctctatgagctctatgacaagcccggtatgacagactttgtggaaccgctttacgactacgagacagagcttgaataccagaaagcatacatagagaacatgtatggcttttacgagtatggcatgtggcttgtattttccagggaaacaggtaagctgataggacgggcagggcttgagcacgatgaaatgggttatatgatagcaccggaatttcagaaccaaggctatgccacggaggtgtgccgcttcataatagactacgcgcgcgaaaacacagactttgaagagctttactgccggatagatgagagaaatgaagcatcggttcgccttgccaaaaagcttggatttacaaatagcgggcatatggatgatgatatacatgcctctatatatagaaaaaatataaaaaacataaaaaacaatgaaaaacattgaaaaatatgcaattaggcaataaaatataaacatagtttaacgatttggaggacgaaaaaatgaaacaatacgcatatggagtagatataggtggaacaactgtaaagataggcttttttgagaccacaggaaagcttgtcgatacatgggagattcctacacgcacagagaattcaggcgagctcatcctgcctgatatcgcagcatccatcaaggaaaataacgagaagcacggcatcgagatgggtgacatcgagggcgtaggcatgggagtgccgggacctataaaggatgacggaacagtattgaagtgtgtcaacctcggctggggcgtgttcaacgtggcacagtcactctcagtgctgtgcggcggcatcaaggtaaaggccggaaacgatgccaacgtagctgcactcggtgagatgtggcagggtggcggaaagggtcatcaggatgtagtcatgatcacactcggcacaggcgtaggcggaggaatcatccgcgagggcagaatcgtagccggagtaaacggagcaggcggagagataggacatatgcctatggtagatgatgagtcagagtgctgtggctgcggcaagaagggctgcttagagcagtatgcatcagcaaacggtctcgtaagagtggcagagagatacattgcagcacacagggatgtggcaacaaagcttgatttaaatgcaggcttcacagccaaggatgtatgcgatgcggcaaaggcaggagatgcagcgggcattgcggcagtagagcagtctatgaagcttctcggcaaggcaatggcagcagtagcatgcgttatggaccctgaggtatttgttgtcggcggtggcctttcaaaggcaggcagcatcatcatcgatacagcagcaaagtactataaagagtatgctttccatgcaagccgtgagacagagatcaagcttgccacactcggcaactcagcaggcatgtatggcggagtaaagatggttatcggctaacaacatgagattgcaatttttaaagaaataaaatataatggctactaaagatacactacaatcgaggtgagactattggcagattactcaacagaagaattagaaaaaatagcggacaaatttcgctcagataccagcggtataaggggaacaaaggattttacgagcccagaggagctttacgatgagcttaaaaaggaaatcaaaaagtaccatccgtcggatgatacgagccttgtggacaaagcctacagggtagcttatgatgctcataagggtcaggcacgtaagtcaggagagccttatatcatacatccgctttgtgttgccataatactcgccgagctcgagctggataaggaaaccattgcagcaggactgctccatgatgtgctggaggacaccatcatgaccatggatgagatgcgtgcggagtttggagacgatgtcgcacatttggtggatggtgtcacgaagttaaagcacctgcacctgacagacagcaccaaggatccgaaggacaagaatgcggacaggcttgagatgcaggctgagaatctgcgcaagatgtttctcgccatggcaaaggatatcagagtcatcctcataaagctggcagacagactgcacaatatgcgtacactcaagtaccagtccaaggaagcacagcagcgtatcgccagagagacacaggatatctactgtcctatcgcgcagcgacttggtatcagcaagataaagatagagctcgaggacctttgtatgaagtacctctatccggatgcctactacgatctggtagagaaggtagccctcagaaagacagagcgcgacacctacatccagggcctggtaaacgatgtcaagaagtatgtttcagatgccggtatcaaggcagagatatacggcagggcaaagcatttcttcagtatatataagaagatggtcaatcaggacaagacgatagaccagatatatgacctctttgccatcaggattctggtggataccataccggattgctacgcagtgcttggtatcatacatgagaagtataagcctataccgggccgtttcaaggactatattgccatgccgaagcagaacatgtaccagtcgcttcatacgacactcataggcccgagcggacagccgtttgagatacagatacgtacctatgagatgcatcgtactgctgagtacggtatcgcagcgcactggaagtacaaggaaacaaacaacggcaatgccactaccaccactgtcacagaggaggagaagctcagctggttgcgccagatactcgagtggcagcaggacatgtcggataataaggaatttatgactttattaaagagtgatttaaatttattctccgacaatgtatttgcattcacgccgtccggcgatgtaaagaacctgccaaagggctccacacctatagactttgcctacagcatacactctgcggttggcaacaagatggtcggtgccaaggtaaacggcaagctggtgccgatagactatgtcatcaaaaacggtgaccagatagagataatcacctcacagaactccaagggaccaagccgtgactggctcaaggtcgtaaagagcacacaggccaagaacaagatcaaccagtggttcagaagtgagctcaaggaggagaatatacagcacggcaaggatctgatagcagcctatgccaaagcaaagggtatcaattttgctgagataaacaagcctgagtatcaggagaaaatacgccgcaaatacggcttccacgactggaactcatgccttgcaaccgtcggccacggcggactcaaggagagccagatagtcaacaggatgtacgatgagtacaagaaggatcatgtggtgccggtgacagatgcagatgtgcttggcagcatcgcagaaaagcagcaggcggcagcaggcacacagcccgagcacaagtcaaagagcggtattgtggtacacggactctatgacgtggctgtgcacttctcgaagtgctgcaatcctgttccgggagatgaaatcgtgggctttgtcacaagaggccgaggcatctccatccacaggacagactgcgtgaatatcatcaatctgtccaagatagaaaaggacaggctcatagaagcagagtggcaggatacagccctcatggacaacggtgccgagtatcaggcagacttaaagatattctgtcatgacaggccgggactgctcgtagatatcacaaagatatttaccgagaaggaaatcaatatcagtggtatacagtccaagaccagcaagcagggtatcgctacaatcgaggtattttttaatatcaaaggcagggaccagataaaggttctagtggagaagctcagacagatagaaagtgtaatagacgtagagaggaccaccggctaaatcccggtggttcttgcgtgaagcataacatataacagacaaggagtacactcatatggtaaatatgaagatagaccacttcgtagtgggaccggtgcagaccaactgctactttgtcaccaatataaagacaaaggaaatgataataatagacccgggcgcgtgtgctaaacagctcgccaaaaaagtggacgaatcaggcgcaaagcctgtagcaatactgctcacacacggacactttgaccacgccacggatgcaaagccgctcgcagaccgctacggcatcaagatatatatccatgaggcagacaaagccacactcgatgacccgcagctcaatgtcagctacatgatggggcagtcaaagacattttatgcagatgtatttttgaaggataagcaggaacttgacatcgcaggctttcacatagtagtgcttcacacaccggggcatacaccgggcggctgctgttattatttcccgtatgaggacgtgatatttacaggcgattcactgttttgcggctcaatcggacgtacggacttcaagggcggcagtatgtcagaccttgtgcgcacagtaaaggaaaaaatcatgacactgcctgagcatacagaggtgtacccgggccacaacgacacaacaaccatagaaaacgagaggatgtataacccttacttatgatagtagtagtatttaataaaccggattttgaatatgatgtgcactccctgctcaaggagttcttcccacaggaggacgtgcagatgtactatagctgcccacctgatgaggtggagggaaaaaacttagcctgcacgcaccatgagatgacagatgccggcgtaaaggaatttgcggatgcctcacaggtatttaagatagactatgtgggggaagagattgcggtggagtggacggtaaataaggttagcggaaataattccatgacaggtgatatgcagcaggctgatgaaggtgacactaaaacagccggaaaaagtatctgcacaaaaatatccgcaggcagcgcagaccgcaaggaaaccaaaaaccgcctcaagcttgccctatattccatgatagaaaagggaaccggaaggagccttccgtggggcacactctcaggcatcagaccgaccaagatagccatgaagtgcatagaggacggcatgagcgataaggaaacctacgactatctgaaggaaacttacctcgcaagtgatgagaaaatcgacctctcaataggcatagcaaagcgtgagaaggcgctgctcgacaaggtggactatgacaatggctacagcctgtacataggcataccattctgcccgagcacctgtgcatactgctcgtttacctcatacccactcggcgtgtggaaaaaccgcgtagacgattacctcgacgcactcgagaaggagatagactacacagcacagaaattctaccacaagaagctaaactccatctacataggaggcggcacaccgaccacactaagccctgcgcagcttgacaggcttatcagaaaaatcaaatgcagctttgatttaaaggactgcctggaatttaccgtggaggcaggcagaccggactccatcacgaaagaaaagcttatggcactaaagaaaaacggcatcagccgtatatcggtcaatccgcagaccatgaagcagcagacacttgatataataggaagacaccacacggtagacgatacgatacaaagcttcaagctcgcgcgtgagctgggctttgacaacataaacatggacctcatcatggggcttccggaggagacaatcgatgatgtaaggcacacaatggagctcgtgaaggaactggcacctgacaatgtcaccatccactcactcgcagtaaaacgagctgcaaggctcaccatcttcaaggaccgttacagcgatatgcagatggtcaacactcaggagcatatggatctctgcgcagcctactgtaagcagatggggcttgagccatactacctctacaggcagaagggtatggctggcaatatggagaatgtgggctatgcggcaaagggcaaggccggtgtgtacaacatactgattatggaggaaaagcaaacgattgtggcgtgcggagccggagcttccaccaagagagtctggccaacaccaaatccggacggcacccatcgtatcgacagatgtgagaatgtcaaggatgtaggacagtatatcgcaaggattgatgagatgattgagaggaagataaagctctttgaggaaaaataagcagtatgccgtagatataatgtataattatggaactgataatactatacagattagcgaatttgtcaaaaattataaagaaaacctaatattcattgacaatgaataaaaaaagagtgaaaatagattattgaaaagcccgattagatacaaaaaaagatacgctaatccgaataaacatacaaaaaataaaacaggctaaaaatattcgggggggggtacaaaggtacctcccctagagtgagtataaagggaaataaaagataccataaggagaatttagaaagaatgtacagaaagaaaggcagaggatggacaaagcatatagactttatgcttatagatatcgcatgcattgttatagcattttttatttcatatgtgatacgcttcggctttaataacccgtacgtggacaaggactaccgtatactgggggtagcatttcttctgatagatttctttgtggagataatggcagactcattcaagaatgtcctaaagagaggatatctggatgaacttatatcgacctgcaagcacgcaatgcttgtatttctggtgacagcgctatttctgttcactacacagatggctgatatatactcgcgattatcattttatatcatgtttccaatctatgtgacaatatcatatgtagcaagaattgcactcaagagctttcttaagaaaaagggcttcggaacatctaagaaatcactgcttgtcatagcaccggatgccatgcttcgtgagacactgcgcacagtggagaaaagctgcataggctatacaaggatagtagcagcttcgctggatacagacatgaagggcaagactatatgcagcataccgatagttgcaaaccacgatggcatagtggactatgcgtgtgatgagtgggtggatgaggtgctcataccgccgtgcagcgaggatgaatatccggagaagatggcagatatattcctggagatgggaatagcagtacatacaggaatagccaaaaacggcacagcccagggcggctacaagcagatagaaaaaataggcgactacacagtagtcacatcaagcgtgaactatgccaataccagtgcacttctggtaaagaggggcatggatatagtcggaggattggtgggctgcctgttcacacttatcataatgatatttgtgggtcctatgatatacatagcatcgccggggccgatattcttcgcacaggagagaatcggtaggaacggcagaaagttcaagatgtacaaatttcgcagcatgtatatggatgccgaggagcgaaagaaggagcttgcggcgcagaataaagtgggcgacggaatgatgttcaagatggacttcgacccgagaataataggcaataaggtgctgccaaacggaaaaaagaaaaccggaattggccagtttatcaggaaaacaagcttggatgaattcccacaatttttcaatatactagtaggagatatgagcctggtaggcaccagaccaccgacaattgatgagtgggagaagtatgagccacaccacagagccagaatgtcattcaggccgggattgaccgggctgtggcaggtgagtggaaggagcaatatcacggactttgaggaagtggtgaagttggatactcagtatattggggagtggagtgttaagggggatgtaagtattcttcttaagacagttttaggtgtgttaaaaaatgaaggagcagtatagaaatatggcaattaggatattgcatgtagcacaagcagctggtggcgttgatcgctatattcgaatgcttctcaagtatttggataaagataagtttgaaaacatactggtatgttcacaagattttaaaaaagaagattatgaaggattagttgatgcctttgagcaaattgaaatgaacagagcaattggagtaaaggatctaaagttaatatggaaagttagaaaacttataaagaaatacaatcctgatattgtttatgcacattctagtaaagctggtgctattgctcgtgtggcggatattgcattaaagaatcattgtgtgtataatccccacggttgggctttcaatatgaggtgttctaaaaagaagaaaattctatatacagcgattgaaaaaatagccgcaccattttgtgatatgattatatgcatttctgaggctgagaggcaatcagcattgaaaaaaagaatatgtggtgaagctaaattacaggtgatttttaatggtgtagatatagaatcttatgagaatgaaatacatgggaaattaaaaaaggcagacatgaacataccagataatgcgtttgttgtcggtatggttggaagattatctcctcagaaagctccagatgtatttgtagagatggcaaaacttgtaaaagaacggattccaaacagtcattttattatagttggtaatggagaacaggaaaatgaaattaaaaagtatgctgagaataatggtttgggcgacagtttacatattacaggatgggttaatgatcctatgagatatgttgaactttttgatgttgcatgcttgtttagcagatgggagggatttggtctagctttgccagaatatatgatggctggaaaaccaattgtggcaactcgagctgatgcaattcttaatatcattaaagatggggaaaatggtctacttgttgacatagatgatgccttgagcgcaagtgaagccgtaattgcatattatagtgatttgttgttaaaaaaacacattatcgaatcagaaagagaatgtgtttacaaatattataatgtcaaacgtgtggctgaagaacataaaaagcttttaaataaaatggtgtaaaaatacaattaggacagggggattagaaactgtctaaattatgaatatgagttatgtagggcgaatacgaaaatgaagaaaattaaggtaatgcattttgtctctggattagtatctggaggtgtagagcaaatgttatgtaattattgcgaggaactaagtaattctgaaaattatgaatttatagtcgtatatcaacatgaagcagtcaatagttgtaaagaaaaaattgaagatgcaggttgtagagttaaacgtataacggctagaagcgagagttttattaaaaatatagttgaaagttatttgataataaaagaagaaaagccggatgtagttcatgcacatatgaatctgatgaatttttgtgccttgtatgcagcaaaatgcgctggaataaagattagaatatcacattcgcatattgctgaaaaaaataagaatttaggatttaaaattatggctttgctatgtaaaaaactttgtatttgttctgctacaatgcttttagcttgtggaaaagaggctggagagtatttatatggtgagaaacgaatgaagtcgggaagagtaaaagtagtagaaaatgctattgatattagaaaatactcgatagatagagaagaaaagctaagaatcagaaaaaataaagactgcaataacgagtttatagtagggcatgtaggaagattctcatatcaaaaaaatcatgaaagattagttgctattttttatgagttaaaaaaaatcaaaccaaatgcaaaactattattaattggaacaggggagttggaaaatcaagtgaggcaacaagttaagagatatgggattgagaaaagtgtgatttttgcaggaacaacgaaaacaatgagagatatgtatgctttgatggatgtgtttgttcttccctctaggtatgagggatttccagtagtttcagtagaaatacaagcagcacagattccttcgctctttagtgatacaatagctcaaacgtgtagattaacagattatattgatttttattcattaaatgagtcagatgaaaaatgggcaaaaaaaatattagagtgtgtcgaaaaagagcgttgtagtgatcttgagaatttgtattccaagtatgatattaaggaaaaggctaagagcttagataagatatataaacggagcttagatttatgacaaatatgcatataaaaataaaagtgaatagtatatatttccttgtttttacagtaattatcgctctgataggatactgtatggaacagccaatggtgtgcttactgattgctatgtttcaattaattgttattgtgcatgctgctaaaatatcaatttttagcattcttgctgtgttaattaatttttgcttagtacagcagtatgcagcatttataggagtagaggtatatggtcttttaggaataaaaagtgtaccaatttatttttatgaattatttttatgcgtttatttttttaatgctgttttgcatttatttataacacattcaaattgtttaagaaacgagtcggaattatttaaagaaaaacttgatattggatatggcttttctatagtccttgcagttttagcagttgttattactgtcctaatatttccgacaatgccttctttgttaacattctctacagtacagcgttttgatggtggaattttatcattttcaggatggtcgtgtataccattcttctttttggccattgcaattataaatagaaaaggatataaatatgtggttcctatggcagtatttgtatcgatttggtatgtatttcatggagaaagagtggattgtattggatttttagcattatttgctattggatactataacgaacatagagaaaaatctaccattataaagatttgcataagtggattagttattataataacattagttggagttggttttcttcgaggaggaacagatagtattaattatggagatttattacatggggtattcatacaatcgacagcatgtgatgtgacatatgtatttaattgtgcagttgatttgactaagaatagtttatcttatcatggaattacttacttgagttatctgattaattgtattcctttattggaagatccgtattcatttcaatcatatatacataatgattatgtcacagcaggaggagggcttttctttgcagagcctatagccaatttcggagtcggatttgcttgtgttttctcggctttttatattttatttcttgtttcggtcataagaaaaaggacaagatatcgttatatggtttatgcagctatatgtataacaattttcagaagtgcttggtatggacttaattatccgataattacgattttatattttgctcctgcacttttagttgcatataatctgttaacaagaaaaaaggagagttaatgatgaatgacttaattagtgttattgtgccagtttacaatgttcaatcatacttaaaaaggtgtttacaaagtatacaaaaacaaacgtatcaattgttggaaattattattatcgatgatggatctaccgatgaatcaggaaaaatagcagatgaattttcccaaaaagagtcaagagcgtttgttgttcacaaagaaaacggtggactatcagatgcaaggaatgtaggaatagattatgcaaatggaaaatatataacttttattgatagtgatgattatatagaagaagattatattgagtatctttacgaattaataagagaatatggtgttgaaatggcaacatctttttataggatggtttcaaatgaagagtgtgtaaatacatataaagataattcagataaagggtgcattatagcagaagaagctattaaaagaatgttatatagagatggaatgacacatattgcatgtggaaaaatgtatcttaaagaaatgtttgaaagaaagcctacaattgatttctataagtatattctagataaacagtgcctaaattgtattccagtgtatgataacaaatatagatttccaagaggacttcttaatgaagatttagcattggtttattatcttataatagaatctggaagaatagcatatggaacaaagaaaacatattattatgtttctaatccaacatcgattaccaaagcaaaggtaaggaaacaagattttcaagtatttatattatacaaattggtaagagatattattttagattattatccgatgctgtttgatcccgtattagaatttcaagagactatatatgtgaaattattaaagagacttatgatgaataagcaagatgagtttgctgttgaaataaattatattagaaaacagttgaaaaaaacatgtataaaggctattaaatctgatattagatgtgttactaaaattcgtgtatttatagcatcaagctcgaaacttttatttgtattattgtgtaaagttgaaaatgtgttgggtgccaagagctaagaaaaagtagcacaaattgaatataatattgaggttggaacaaatgcggtagttattgccttttttgctaaaggtttttgtcgcataagtatgagatattgatgagaatttataagagtatattatgaaaaaaattttttatttaagaacatattatcaaataatttttgctttgcaaatggtaaatacgatatgtaaagatgatgaagttgtctttttgatttcggatgattcaaatggatcgaagagagttgcggagaaaattcaaagtattggcattgttaaaaaggttatatggattaagacaaaacgtcttacatatgaaaaaaacttattcgaaaaaattagtgattctataagtatagctcttcttgaaacaaaccggtatgaaaatgtattaaggccgattttgaacattgggtttgatgaattcattttttttaatttcggagtagacaccattgcgttttataatttgtttgttaagagaaatccagatattaaggtttcaagaattgaagaaggaatactttcatatggaatagaaattggttatggacaagggaaaattgttgatttatcatattatgtccgtaagctattacatagaaaaaatataatcgataatttctataatttttattgctattatccggttatctataagggaaatttacaatcagtacaaatccctagaattagtgtgaattcaaaaaccgcaaggatactggggaaaatttttagacctgatacttcaggttatactcaaaagtatatattttttacatcagtatatgattttgaaggtggagagcctattggagaatatgaacttgtgcttaaagtggctaatttagtaggaaaagataatttgcttataaaaattcatccgcgtgatttgcgaaccatatatagtgacaatggtttcaatgtggataagaattcgttaataccatgggaagcaatacaattatctagtgattttagcgataaagtctttttaacaataaattcaggaagcgtgttgtcaggaagtacaatgtcagaaaaaccggttaaaactttttatatgtataaactgtgtaatattaaagagaataggagttgtcaaaaaaatgctcaagatatagaagcattactttgcaaaagttctatgaaagaagtttttagaaacgtaaaaattgcagagaaaattgaggacattttatgagtaaatccagctatttgataaagaacatgggaattttaactataagtaatttctcatcaaagattttagtctttttattagttccgttatatactagtgttttatctacaaaggaatatggaacatatgatttggcagtatctacagcaacgttactatatccaattcttactttgaatattgttgatgctgtaatgagatttttaatggataaagaaagtgataaaaaagcaattgcatctattggctttaaatatgtatctataagttcggttttatttggttttattatgctgtttttttatataacaggtatttggtcagatattaatggactagagggatatattttttcatattatatatcgtatgtgattaatcaattctttattcaatttgctaaaggcttagaaaaagtaaagaatatgggggttgcaggtgtattaagtacagtagtaacaataattgctaatttattttttttattggtaattagatggggactaattggttttttattagcaaatattttggcgcaaattgtgtctgcaatttatcttttttttaaaaccgaaatatataactatatagtaataaaaagacaacctattgcacttcaaagagaaatgcttatttattcagtaccattaattgcaactgttgttggttggtgggtgaatagttgtgcagataagtatattgtaacttttattttgggtatttcggcaaatggattactttcagtttcatataaaataccgcaaattataaatactattcaaggtatttttactcaagcatggcagatttcggcaataaaagaatatggtagtagtgatacggcagacttttatgggaaaacttttacagttataaatattatgatgtgtgttgtatgttcgtttctgatttttatgacgagaccattagcatatgttctttatgctaaagatttttatgaggcatggaagtatgttccatttttattggtatctagtgtgttaaattgtgcttcagggttgttaggaccaattttatctgcaaaaaaaaattctaaagcaatgatgtggtcagcaatagtaggtgctgtcgcaaatattattatgaatattgtatttgtaaatcttataggaatccaaggagctacattcgctacgttagttagttcatatattatttatataattagaaagtatgcagtaggagaagatatatatatcaataaatattatgtgattattgtaacgtggcttattttagtagtgcaaggtattatagaaagtaattttatgaattattatttggaaatagtatgcgtagcagttattattattatcaataaaaattcggtgtggcaagtacttaatttggtaaaaaacatatgtaaaaatatcaagagaaagaggaagaatgatgaaaacagtagctttaattccaattaaattaggttctaaaagggtaccaggaaaaaatataaaacctttttttgatggtacacctttaatgcattttattcagaaagcttgcttagaagcaaaaaatattgatgaagtgtatatatattgctctgatgatgcagtgaaagattatattttaccaggagtgaaatatttgaagagaccggagtatttagacggcgataatattaatgccaatgatttcataaaggaatttatgaattctgttgacgcagatatttatgtaaatgcacatactacatctccatttgcaaaagtatcaactattgaggaatgcgttgaaaaagtagcaagtggagaatatgattctgcattttgtgcagaggcaataagaacatttatgtgggaagataataaaccgattaattttgatccggatcattttccaaggacacaggatcttccgttgatatatggagaaacctctattgcatatgtttttacaaaagaatcatttattaaacataatagaagattgggagttcatccatatataaaggaagtcgataagattgaggctatggatattgattatccagaggattttgaaatttgcaatgcgatttataaggagatattaaaaaatgagtgttcaaataactgattgtacaattagagatggtggctatctatttaataagaattctgctcctgaatttgtgaaaggtataatgaagggattggcagaagctggtatagattatgtcgaaactggtttccttcagaaaaatgtaacaggggagagtcttgtgtacaaggattcgggtgatgttattaaatatttaccagataatagaagaaacacacagtttttgggattttgtgataatagcaggtattcattggaaaatttggatgattataatgggaaatcttttaaatggctgcgaatttcttttgcacaacatgaaattgatgaatctctggaattttgcaaaggtgcgaaaaataaggggtatttggttcaattcaatccgatggattcaataagttatacagatgaggcgcgtgaaaaattaatccaaaaagtgaatgttgtaaaacctgcctctttttcaattgtggatacatttggggcaatggatatgatagatctggttcatatctttaagcaagtagataaattactggataaagatattaaaattggactgcattcgcatgataatttagggttatcatgtgcgctggcagagagaatgatagaattatcggaagaaactggaagagatattattgtcgatggttctttatatggtatgggacgtggcgctggaaatgcaaagacagaattgctggcatattatgtaaacaagcattgtaatggaaaatatgatattcagaaattacttgaaactattgatagatatataacaccggaattaaagaatcttaactgggggtatgatctgcctatgtatgtttgtggtacaaaacatgcacatgttgataatgtttatcacttgaaaaaggcatatacgtgtacagctaatgaaatgtacgatattgttgaaacgttatcgccacaacaaaggacaagatatggaacaggatattctaaaacagatttttcagttttagatagggcgtatgaaaattataaggaaggaaataaataatgaagtgttcagaatacttagttgattttcttataaaaaaaggcattacagatgtttttggatattcaggtggatatattgttccatttatggatgctctatatgcaaggaaaaatgaaattaaagtgcatgtttgttacaatgagcagggctgtgcttatgctgctgatggttttgccagatcaagcggaaaacttggagtgtattttacaacttccggaccgggggcggttaatgcattcggaggattggcagatgcgtggtttgacggaataccgcttttaggaatttgtggaaatgttccaataaatgaacaaagagggtattccggagttagacaaaatggttttcaggaaatggaaattgtttctatgacaaagcatataactaaatattctgtgtcgccaaatagtgcagagtcgtttccggatatagtttcaagagcatataatttggctacaactggaagaaagggaggtgttgtgattgattttccatatgacatccaaaaaacctgtattaattgtaggtaacggagccagagcagcgggtgcttcagatttaatttatgagtttataaagaaaacacatattccggttttaacaacgatgaatactgttgatatgattcaggatgaatatagatttggatttatcggtacatatggtaataggatttctaacatgatgctgaatgaagcagatcttgtaatttctgttggggcacgtttgggattgagacaaataggacatatgaaagaactatttgctccaaaagcaaaattaatacgctgtgacgttgatcagtatgaattggcacggcaaataaagtctgatgaagaaaaatataacctggatgcaaagtactttatggaacaattgttagcagaagaaatatctgattattcaggttggtggaataattgtatgaaagctaaaaaacttctggatggatatgatgatacagagggtaatagactgatgaataagatatcagaattgcttccggttgatcctgttgttacagttgatattggacaaactgtctgctgggctgcacaatccttatgtttaagaggcacaaaaggcagaatcattattggtggaagttatggtgcaatgggagttggattgccatatgctataggaacatcaataagtaatgaaaatggtatcacttattgtattaccggtgatggtggtttgcaaatgaatattcaggaacttgagacagttcgtagggaaaatttgcctataaaaataatagttgttaataatcaggaacttggaaaaataagtgagattcagcatggatcatatgatgataggtattttattacaactgaaaatagtggttatacggtgcctgatttcgttaaagttgcaaatgcttatggaattaaggcagcaaaagttgagaattataaaaaacttgatgattataaggattggttaatagataatgagccatgcttgttaaatgttatgctttcctctggaactttattgatacctaagattaaatgggaaacatgtaaaattatgcctgaacttgaagaaaaaaaagctagagaagttcaaaaattaattgctgagtaaattaggataccattattggaggctgtgatgattaaatatttaataatggatgttgatggaacgttgacagatgggaaaatatatatgggaccaaatggggaagctatgaaggctttttcgattaaggatggttatgttgtgaattatatattgaaaccagctggtattaagcctgttattataactgccaggacaagctcaattgttcaaaataggtgcaaagagttgggaataacagaagtttatcagggaaaaatagataaactgatgactcttatggaaattgtcggagataataacctatcacattgtgcatactttggtgatgatattatagatattaattgtatgcaacctattaaggacgcaggcggtatagttggttgtccggccgatgcggtcagggaagtaaagcaattatcggattatgtatgtatcaataaagcaggagaaggtgctttacgagagtttacagaatggttgattacagaaaaacgagatgttcgtgatataaaaagacgtgtagatgctgctgttaattatttacagtcaattgatgtgtctttaaaagatataggaaagaaagttagggttaatgatgatttttattataatattcaatattatgatactaaatcaccagatttatgtgattttgaatcacatagaaaatatattgatatacagtttatggtgtctggaaaggaatgtttggaaattagcgatacttcaagattatctgtcaaacagccatataatgaaaatcttgatgttatgttttggaacgttccagaaaatataagtaagactgttttatcagaaggtgattacattgttttatatccggaaatggctcacagaggggcggtgatttgtcaaaagagtgaaaaagtattaaaaatagttggtaaagtgagaatctaatttagtattaaaattgggaaagtaggtagtaaaatgaaaaaaacagcaggtatattaaaattattattgctggtttcattgttaattggaggcataggttctgatgttgtattagcctatagttatgaaacagattcaataaatgcagttggagctaaagcttctaatcaaatcgaagtaggaacagtaggtgctgacggaaagaacgtggcagcaacaaacagggccagaacagtgggtatatacaagacatcagagaaggcattcagcgtggatgttagcaaggcaacaggaagcagatattcagtgctgggatttgatgcaggcggaaagaagatagtggattcaggctggcagacaggaaaaacatatgcacttggaaaagatgtggtaagctacagactgttattctcatacagcgataacagaaatttaagcagtgcagacacacttaaattcgagaactgccttacattaagcacagtacagaatagtagcagtgtaatagaagtaggaacagtaggtgcagacggaaagaacgtggcagcaacaaacagggccagaacagtgggtatatacaagannnnnnnnnnnnnnnnnnnnnnnnnnnnnnnnnnnnnnnnnnnnnnnnnnnnnnnnnnnnnnnnnnnnnnnnnnnnnnnnnnnnnnnnnnnnnnnnnnnntaagctacagactgttattctcatacagcgataacagaaatttaagcagtgcagatacactagcatttgagaagtgtttatctattataccagcaagtgctcgtgatgactgggaattgccaataatgtaattgtttaaccttaatatcatagtaatctggcactattaattatttagaatgtgaatgagttcttaatattattaatcagctataagatttgttattgaaaatagattacataaacaaataataagctgacttgaaaaagtaaattccatctgcttttaaaattttgctgattttgcaggagattttttaacaaaatctcctgctttctgttataattaagctagcttatcgaaattttgttgtttttatggcatcaaaaacaggctactggaattcggtgtgtcagactaaattctacatgcccagtatatatgagaatcgtatttttatagatttttttgcataactgtcatataatgaatttagtagaacataatgattaggaatatattcattatgtttattttagatgaaagtgaaatatattatatgtctgatattagaaaattattggaacaagatcggcttgaatttgaggctgatcaaaaaataaaaaatttagataacatagtacaggcattaagaaatggtagattaagtatttttgcaggagcaggtttatctgcatcatcaggttatgtgaattggaaacagttgataaagcctatgagtgattatcttggtttgaatataaatactgatcttacaatgattgcacagtactatgagaatgaatgtaccagagaagggttaaatcgagctatacttagtgaattttcaaaggttccaaccaaaaatgataatatggaaatattagctagtcttcctatagatacatattggacaacaaattatgattcaattatagaggatactcttcgtgagaaaggaaagactgttgatgtaatatatgaacagattcaatacaaaaattatactccagggagagatgctgttgtatataagatgcacggtgataaaaattttccggatagagcagttatatctaaaactgattatgaattatatgatgtatatcgatcagtgttttcaaaaggtctggtcatggaattgataacaaaaacggttttatttattggttttggatttgcagatcctaatctggatcgttttataagtatagtacgtcatacattcgagaaatattcaccaccaacacattattgttttatgagaagtgtaagttatgaagattatcttgacgagaaaggaaatcttacaaggcagaaaagaattgagtttgaacaggacaaaaagttgcaggatttgaaaattagaagtatgaaaggttatggaattcatacaattctggttgatgacttcacgcagattacagcaatgcttaactatataagagataagtatactttgaataaagtgttcatatcaggtgcattggatccaaatgattcgcacaattatggttgtcattttgataagccgtataatattaatttcaaaaatggagaatggtttattatgcagctttctaagagaatcattgatgatggatatgatattgtgaatggctttggtgttggcataggcaactatgttgtttctggggcatatatgggtggagtgcaaagagggggatctgactatgtttctaagcacttaacaattcagccgctgatatcggtcgaacaacaggagagtgataaaaaggatgaggttcgaagaaagctgatccgggattgtggaacagttatttttctatttggaaagacattatatgaggataataatagtaaaaaggatgaattagataaagacggtacatatcgtgaatatgagatagcagtaaaagaagtcaagaacgtcattcctgtaggtgctacaggattaacatcaagatacatttataatgaagtatatagcgaaaatcaaaataccccttttattgataggctaaatgcagtggatgagaatatcaattgcatgcaattgattgatgatattatggcgatgattgagagtgaaaaacgtaaaaaggaagaaaatattaaacaaacattgatgaaggatgccttttcaaatgatgatatgtcatatgataatttaccagatcaaataaatgttttcgttagttttcatttcgctggagcaaatctgcagtcaagattaatcttatcggtattggatgatgaaccgggaataaatccggttaaggagtccggcaagatagaggataagcgtaagatcaaacaatggattgacagaaaaataaaaagtacttccgtaactatactgatcttgagtaaggggatgacaaaaagtatatgggttggcagagaaatacaaaagagcatagaggaaaacaataaatttgttttggtagatatttcgtctggacaatatgataaggatttcttatcgcaatataagataggct

SEQ ID NO: 125 - DNA, 32962 bp, unidentified
  source 1..32962: mol_type = unassigned DNA
aaatctatcggacaacttcaatcggaacagaaaaccaacaaataaaaatcaatgaaatatgaaaatcagatacattttattcttattgaccgtggctttcctgctgggatcatgtgccacgccgaaagtcgcttatttcacggacctgaaacgggggaccgcagaacaagtcttgaacccgctggaaatccgggtgcgtcccgaagacaagatctcaatactagtcaacagcaaggaccccttgttgatgaaccttttcaaccttccgatcatatccagacagatcggtacggcatcgggaacatccaatagccaggggatatcaggatatacgatcaacaaggatggagatatcgattttccagtgttggggcatatccatgtggcgggaatgacacgcgaggaaatcgcctcgtatataaaagaggaactggtttcgaagaatctcgtgaaagaccctgtcgttacagttgagttcatgaacctgaccgtttccgtgttgggtgaggttgctagccccggacgcttcaatatcgataaggacaagctgacgcttttggatgctttaagcatggctggagaccttaccgtctacgggaaacgggagaatgtgctggtacaacgggaggaaaacggtaaacagaccttgtatcaggttaacctgaattcaggatacgacctttatgcctctcccgtgtattatttacagcagaacgatatagtttatgtggaacctaactcaatgaaagcacggcaggcgactgtcaacggcaataacgtccgttctgcttctttctggatgtcgttggcctcgctgctgactaccattaccgtgttaattgtgaaataaatataaaatcagatatggccataaatcaaaagaatataaaaccgggacagcaggatgatttcctgcggatacaggatctgttgtatctgtgtctcgcaaggtggaagtggttcgtcttgtctttagtggtaacgatcggtgtcgctaccgtctatctgttgcgtactcctgctgtatatacacgcaccgcttcggtattgatcaaggaggattccaaaggcaagtcggtttcctcggatttggaatccttctcggagttcgggctgttccaatccggtacaaatgtgaataacgaacttatcacctttcagtcaccgtctttaatgaccgaggtggttaaacggttgcgtttggatatgaattacttcgttccgggaaaattccaccgtcaggtggtctatgggctgacattaccagtggatgtaacgataaatgacttgcctgaaaatgaatcagccggttttacgttggaagtgcagccggatggcacattattcctgtctgactttatacgtaacgggacggatcttgacgaaaaggatataaagggaagcttgttcgactccattcctacaccattgggaaaaatcattatcaatacaacacccaattacgtgaaaggcaaggcatatacattatatgtagccaaatccaatttgtataacgctgtaaactcctgctcatccaatctgtccgtttcattgaataacgagaaagcgtcggttatagacttgtcattcaaggataactccacacagcgggcggaagatgtattgagcatgttgatttccgtttataacgagaactgggtgaaggacaagaaccagatcgctgtcagtacctcaatgttcatcaatgagcgtctgggcgtaatcgaacaggagttgggaaacgtggacgaggatatttcctcctacaagtcagaacacctgttacccgacgtgcaggcggcatcgagcatgtacatggcgcagagtagtcagaccaacgcacagatcctgaccttgaacaaccagctttacatgacccgttacatccggaactatttagccaacgatgccaaccgtacccaactgcttccggccaattccggtatagagagtgccaacatcgaatcgcagattgccgaatacaacaaacaactgttgcagcgtaacagcctggttgcgaacagcagcgcagaaaatccgctggtcatggatatggatcaggctctggcatccatgcgtggggcgataatcaggtctatcgacaatcagatagtaaccttgaattcgcagataaaaagtttgcggcagacggagcaacagacaacatcacgtatagcggccaaccctacacaggccaaatacctgctttcggtggaacgccagcagaaggtaaaggaggctctttacctgttcctgctgcaaaaacgcgaggagaacgaactctcgcaagcatttacggcctataatacccgcattgtcactccaccgcacggcagtatgttgccgacatctcctgtacgcaaaaacatctttatagtcgcatttgctctggggctgctcattccggtagtcatcatcttcatgcgcgagaacatgaatacccgtgtacggggaaggaaagacctggagagtgtgaccgtgccgttcatcggtgagattccgctgtttacaagaaagaagaaagggatattcggaaagaaaccacaggaagtcaaggccgttgtcgtcaaggagggtagccgtgacatcatcaacgaggcattccgcgtattgcgtaccaacctggagtttatgaccggcaaggacaagacatcgaatgtcattatcgtgacctcgttcaatccgggcagcggcaaatcgttcctgaccatgaacatcgccgtgagctttgccatcaaagggaagaaagtgctggtaatcgacggtgacctgcgccacggctctgcgtcatcctatatcgactctccagccaagggattgagcgactatctcggtggcagaattaataacctcaatgaaataatcgtcaccgcccccaagcaggaacatctggacatccttcctgtaggcaccatacctcccaaccccaccgaactattgttcgacgaccggctgaaacaagtgattgataccgtaaaggaacaatacgactatgtgctgattgactgtccacctatcgaactggtagccgacacgcagattatcgagaaacaggcagaccgaaccatcttcgtggttcgcacagggttactcgaacggagtatgctcgccgaactggagaaaatctacgaagagaagaaatacaagaacatgtccctgatcctgaacggaaccgagggaagcggtggtcgctacggataccgttacggctaccgctatggttatcactacggttacggctcgggataccattatggctccgataaaacccgtggtgtacgtgggggggggggggtaaataattggctttcagacaattaacaagtaattatatttcaaataaaataactagcatcattgtgtggcctctcaaaaaacgcatctcgctgaaagagagcggtatattcgaggattttaccgactgtcactcgcatatcctgccgggtgtggatgatggtgttcagacgatggaagaagcgttggaaatactgcgcctgtatgaagagttgggcataaaatccgtatggcttacaccgcatattatggaagatatgcccaacaccacaacgcacctccgggaacgttacgctgaacttcaagccgcctatagcggccctataaaactacatcttgcctccgagaacatgctcgacaacctcttcgaggaacggttggaaaaaaatgacctgttacccttggggaaaaagggagaccatttgctggtagaaacctcctatttcaatccgccgatggagctgagcaacatcctactgcgtatcaagtttaaaggttatgttccagtattggcacacccagaacggtatatgtatatggaggaaagtgactacatccaattaaaaggaatagggatgaaattccaactcaacattttttcattgacaggcgcatacggtgcggtggcaaggaagaaagctgaatggatattgaagaacagtctttatgacttaatggggagcgatatacatcatctgccatattggaagaggtatattgaggaaaaacgatatttccaatatatcttttcaaaattaaaagacaaatccgctaaatactaaaaaatatcaatttaaaaactaactacttatggctgtattggatcgttttgttactattttttgtaattctatagaagcacgagcaaaagctataattcactctatagcgatagaaaatgctttaattgctttttcaatggcacaaataccggcagcagatcaagttgtgcttgctggaaatgaaggaacaatggtctatcgtttagcaaaattacataatgtaagaattgatagggcaacagctgttggacttgttgaagccgtagttgcaagtttgggagggccaattattgcatctgctgcggctaatcagatagttaaatattttcccggatatggaaatacaagtaatgcagctgttgcatataccttaacagagcttataggatggacctgtcacagatggtttcgtgatggtagctggtttcaaaaagtaaataaatgaaatcgtttacactgggtatcttagatttacgctcaaaaaacttgcaaagaattgtacttgtaagtgaaaactaagagttttctttaattattataaattattcattatgccaattatatcattatcaatcctttccatgataaagggagctatctttttatctaaaacaacagcgattaaaactcttgctgttaaacatggtgcatacattgtggggaaactaggtattgatggtacgcttgcagcagcagctacagcatccactatagcaggtacggcaattgcgatagcctcaataccccaaaacaccaaggttggattcgacaaaataatatctggagtggcaaacagaagtgctgcagacttttttgatgggctatataaagtatccacagcttattctacagcaacaggtttccttgatgattttaacagttatgtggattcttttgatgcaactcctgaaacaaaaatagaaatcaaaaatacggtcaatgaaatgagatcgcttttcgtttccgaaatagaaaaaaaatcagcagttcttctaaaagaatttgaggattccctaaaacaaaagaaccttaccaaagaccaatatatttcagaaatagataatgtttatcgaaaacatacagagaatcttttcgatgactataacttgatattgggacgtggcggcagaatctatgctgatatttgcgctatcaataaaaagtattacctaaccgatacttcaatctatgatcactacttggtttattgcattgcaggttggattttggaacatattaaaaatctcgattgcttgataggaatatcacaaagaaaacttgcccacgatataacagacaacattctctattatttaaaaagtattggaagaaattaatgctttaaagtaaattatggatactctatttcaatatatgagttttgaaaaatgtttttcaattctcagaaacaaagctctttccttacgcaatttcatgagttataacgatccttttgaatgccttccagagttctcaagttatgctgatgttttacctgtatattctgcaagagatgaaaggctacgtaaggaaattatcaatagccaaattgatgctcttggtaaaaaatataagtttactacagaatttatagccggacttaaaaaaggactcacagcaaccagtattttggcatttgctcctctatctttgataacagcttatgcaataggtgcttcagtctcatctttgtttaaaaactccaaacaatcaaatgatgaaaacgagattgcagttaagatggaactctttttttataaattcataccatgcttgatgaatttatacacttcgtgctttacaactaagaaggacaatatcctgatgtggagtcactatgctaaatctcacaaaggggtagttatggaatttagaccgtcttataagccttttaccaaaggcgttctgaaggaagtaaattatgactcaaaacgatttgacttttcgattaaagattattcgtccaatctagatatggaaaaattagttttttcacttcttgcgacaaaaggagtagattggaaatatgaagaagaatatcgtttaatatacgatataaaagaaaatagagatgaacagatttggcgtgacacatttaataatccttgtgtaaaactcgattatgagagtattaaaagtatttatatcggacgaagagccagtgaggaagacatacaagctctaaagagcatattaattgaatataatctggattccaagatagatgtgcacaatgtaagattatcccataaaggatataaaattgaaattctttagatactagaatttatataggcaataggttttggttatcactgcctaaatcttatttgacacaaaaggaatatatgaaaacttataaaattgcagtagccggtacaggctatgtgggattgagcatcgccacgctgctgagccagcatcaccacgtgacggcggtggatgtcatcccagaaaaggttgaacttatcaaccaacgtaaatcacccatacaggatgaatatatagagaaatacttgactgaaaaggatttggacttgacggcaaccctcgacggagtagccgcctacaaggatgccaacttcgtggtgattgccgcgccaaccaactacgacccaataaagaactatttcgacaccagtcatgtggaagaggtcatcgaattggtaaagagcgtgaaccctcatgctatcatggtcatcaaaagtaccattccagttggctacaccgaaaacatacgcaagaaactgcacacagagaatgtgattttttcgccggagtttctgcgtgaaagcaaagctttgtatgacaacctctatcccagccgtatcatcgtaggcagaccggaaggagataaacgcttggatgaagcagcacgtacctttgccgctttgttgcaggaaggagcaatcaaggaaaacatcgacaccctcttcatggggcttaccgaagcggaagcagtaaagctgtttgccaatacctatttggcattgcgtgtcagctatttcaacgaattggatacatacgctgaaatgaaagggttagatacacaggccatcattaacggagtaagccttgacccacgcatcggcacacattataataacccctcgttcggttatggcggttattgtctgccaaaggataccaaacaattgctcgccaattatgcggatgtgcctgaaaatctgatacaagccattgtggagagcaaccgtacccgtaaagatttcattgccgacagggtattgaataaagccggatattacgattattacaatcgtggagatttcaatcccaatgaagaaagaaaatgcgtaatcggtgtctatcgtctgaccatgaaatcaaacagcgataacttccgccaatcttccattcaaggtgtaatgaaacgcattaaggcaaaaggtgcggagattattatttatgaaccaacattagagaatggtagtactttctttggtagcaaaatagtaaatgatttgactatattcaagtcacaaagtcaagccattatagctaaccgctacgatacctgcctagacgatgtacaaaagaaagtatatacccgtgatatattccgttgcgactaatactattccaatagcagcacattgatatatagacactacaacaatacatttaagttctctgcctatatcgtataccgaaaatacgtcaagggaaatattaaataataaatgaaaaatatctctgaactcaaaaacaaaggattgaaaagtagtgcatggaatttcttaaatctattgactaatcaattaaggaacttcattgtcacactcatattggctcgcttgcttactcctgccgacttcggccttgtgagcatggcgatggtactgaatgccattttagatttctttgttgatttcgggttcagcagcgctattatccgaaaagaaaagattacagaagtagaaacctccactgtgttttggctcaatattggtattggaggtatctgcacattgctaacgtttttatgcgcccctgtttttgcttggttttacgagatgcctcagttggagaacgtggtactcgtaacatcttggtcattcttcataagttctttcggaactttacaaactgcattgtttcaacgaacattgaatttccgtgctccgtttaaagctcgactaatttcaagtatagcatcaggcattttgggaataatccttgctatatgtggatttggtgtttgggcattggtattttccaatcttttaggatggctgctttattcaatttccatttggatgatgtccacatggagaccacaatttgtttttaagctcagggatgtgagtgaaatggtttctttcggttggaaaataacactttcaactcttataaatagagttttcaagcagatggatacgctcattatcggtaaaatatactctgctgcatctctaggccttttcaaccgcgcacaatcacttaaccttcttgttattgattactccttttcatctatacgcagcgtgatgctacctactcttagcaaattacagaacgatgaagaagccctgagatacagtgtacttaagttgcttaatgtgatatctttcctgacattcctcttttccggattggtgtatgtgtgtgctgatgacctgattttattgctttatggaagccagtgggaaggagcaatagagatattccgaattctaggtctattttccatatcgttgtgtctgcctgttgtctttgactctgtgatgactgtagcaaataggatgaatatgtatctatggagcagtgtcttgcgtagcagtatgcttatctttgccatcccattcggtatttactatggtttaacggcatacgtttgggcaatttcaattattggaataattaaactcatacctacattatttaccacaagaagttgtattggattacctattaggtctcaacttacagctattatgcgatatgccctacctttcttaattcctcttgttatatggcatttcattatgctccaaacaaaataccatatagtaaatatcctagtaaaaagcctctttttcacggtcatttatataatgctcaattttatcatgcgcaatgaaggatatgcaacctgcaaagggttaattattcaagttatcaataaaaagtttaaacgaaacgaaaagatatgataaggctattaaaacgtattatctacaaaataaaggaaactaactggaagtataaattgcaaggttcagatgtgagaatacaaggagaaataatcacccccaataatcatataactatcaaaaaatcaacaatttacgtagactataattcaacaattatcctgcacgaaggggtacgattagagggtatcgggctgtgggtgacaaatggcggtagggtagaaattggggcacatagcttccttgaacgcagcagcaatgccacgaagccagaatatatcgttaatagtggtgtgttacgagtggcagaccacactaagttagcttgccagcgattatggatacgcttcggtggcagtattgaggtagggcaatacaccaacgtgaaccctggcagtgaaattcgcgctgacgagaaagtcatcatcggcagttactgtcaacttagttacaatctacgtatctgggataccaacactcactgtatttactcccctgaaaaacgcaatcggctgacacgtgactatttcccgcgttttggttatgaatacgagcgaccacgcacagctccagtggtgataggcgatggcacatggataggcgagcgagcgtcaatactaaagggcacaacacttgacgagaatgtgatagtgggttacaacaccactgttgcaggtaagcatattcctcgccagaaaactgttgtgcaaggaatagaactgaaaatcatttaattccataaaattaatgaaaacaactccaaaagtatcgatacttatcccatgctacaattcagagcggttcattgccgaaaccctcgatagttgcatcgaacagacgtacaacaacatcgagattattgtagtagacgatggatcgaccgaccactcccttgctatcgttcgtgactataagagtaaagacggacgagtaaaagtcatcagtcagcccaatgcaggagcttgcaaagcgagaaacagcgcactcgaacattcaacaggagaatacataatgtttctcgatgcagataatgtgatttctactaacaaaatagaaatacaattaatcaggcttatggaagcatccgataaaatggctgttgcaacgtgcgtgtgggatagattctacaacgacataaatgaggttactttccccaaacaaatggtctatagggattataacactggttttgatatgctgcttgacctatggaattgttctgagatgtatgaaacagcatgctatctattaagccgcacacttgctttgaaagcagggaaatggaatgaaagtttgcgtaaaaatcaagacggagaatatttctcgcgggtgctgatgtttgccactaaagttctcttttgccctgaggcaaaattgtactatcgcactggagaatatgacagcgtgagcaagggcaattccaaagcaaaaatagagtcatacctcaaaagtttgatgctctataaaaagaatgctttggtgcatgaaaattccgatcgagtgaaaaatgctttagcacataattttagtttgttcatgtatttatattatgatcaatattccgatttgtgtcaaaaagccaaacatgaattgtcagatatgaatatgcatgtattaccatcaggcacaaaacgagctaaaattatatctcgtcttatcggtacagagaactttctaaagctaaggaaattaatattaaataggtaaatagatacagacatggaacgtaagttgcacattttgtcaattggtggattttcaggattaggtgaaagtaacacatgtctacaacgtaaccgtattttacaaacatttggagaagttgaccaagttgacaccacagctgtcccattcaatttgtggtatcgtagttgtaacaaattgttccaatggggattacctatatcattaccagacctatgtggagcaaacaaacagataaaagaaaagattcacagaaataaatatgacattatctggattgacaaaggcatcataataaacgaagacagtttcattgctataaaaaaatatgcgcctcaagccaaattaatagggtattcacccgactatatgtgtgccagacataaccaaacaaaagcgtttcttgcttctctaaaattctatgatgtatatgttactacaaaatcttactcagttgatgagttaaagatacttggttgcaaagatgtgtattttgttggcaattcttatcaagaaggatttcataggccatatgtgctcacagctgacgaacagaaaaaatatggttgtgctgtcggtttcataggtgcatgggaaaaagaacgcagtgattctatcatttatcttgcagaaaatgggattaaggtgagaatctggggaagtaaagaatgggaagatatttgtacatgtcacgaaaacatagagtttaggggtaaagaattacttgatgagacttattgtaaggccatctgtggttgtaaaatttcactgtgttttttgcgtaaaataaaccttgatttacaaaccaccagaagcgttgaaattcctgcgtgcggaagtttcatgttagcagaacggacaaaagaacatcttgccatgtttgaagaaggaaaagaagcagcttatttctcctctgacaaagaactgttagaaaaatgtcgctattatttgacacatgaagaggagcgtaaacaaatagctgcagcagggcatgaacgttgtacaaattcgggatattccaattacgacagaattagggcaatcattgattatgcacttaacaaaaaataatccacttatcacgataatcattccggtatataatgccgaaaagttaattgctggatgcatcgaatctattatacaacagaatgttgaatattggaacttaatattagtaaatgatggttcttctgataaatcgggggaaatatgtcaagaatatgctcaaaaagactgtcgcatcactgtaatataccaatccaatggtggtcccggaaaagctcgtaacacaggcataaatgcttgcaaaacaccgtggtttacattcgtcgatgccgatgataaattattgcctacttatttggcaaattttcacgtagaaaattgtaaaaatgaaactatactaagttgtcaaggcttgaaacgcgtagatcttcaagggcaccagctcggggaggaatatagttttaacgattcagtttatgccgatgaaaattttttagaaaaggctttctgtaaagaaggtttatacagttatggacaatctgtcggaaagctatacaacaaatcagtctgtgacaaacataacattagattaaatacagatattaggtggagcgaagatcatttattctatttacaatatttactatgggtaaaagaaatacacacccatgcgggttgtctatacctatatcagtttactcttggacaaaatacgctcacacacagacaccttccttacaccgaagcattaaatatatttaaatatttgtatccagcggcaaatgcagtagtgcaaaaatttgggctagaaaattctccagtcatatcgcaaataaactaccattcagtgactgcctgtttctcaaatatattgcaaaatttatatagagaagaaactaatagatacatacgtatatcggtacttgaaaagctacgttccgacatgaagctattacaaaaaaaatataaacccaatgggatctcaggtaaactactgaagccaatgttactatattctcctttatcattattagatattgtactttcaaaaatcatctgtaaaaaatgagaattttgtatatttatcgcgaaaaagaaaaaaatgaacatagcatcgaagctgtctttgatacagttgctgaaacattgaaagatttcggtcactatgtccataaatggtataagcccgtatcttggcgacagacatttcgagaaatatggcaactccgcaaggaaggatatgacatttaccatatcacaggtgatataaattatctatggctgttcttcccatggaaaaaaacaactatgacctgccatgacataggtatgtataaaaataaccctaaatcaattattcgtatattatatgtttttataagttttatttcttctgctatcttcctcaaaaaaataaccgcagtcagcgaactcaccaaaagtgatttaacaaatatcctccatatcaatccacaaaatatatgtgtaatacccaatcctctatctctacctgtaaaaaagtgtcctaagccatttaataaagattgccctgttattcttcaaatcggaagtggttggcacaaaaacttgcagggtcttatagagagtgcacaaggaataaaatgtcacctcgatatcatagggcaacctgaagaagctgacattacacgcatgaatgattatagaataagttatacaatttcacatcacattccggcagaagaggtcgtgcaaaagtatgaaaaatgtgatattttgtattttgtttcacgctctgaaggttttggtatgccaattattgaagcacaaactgtaggacgtgtggttctaacaaacaaaacagaaccgactaaaagtgttgccggcggagctgctttgttatttggctcagaagactatcaagctatacacaagggaatcttacaaataatcaatgatgatgctttacgtgaaaaaatgattgaggatggatataaaaattcagcgaattaccagcctatcaaaataggcaaactgtatgaacaattttataaacatatttttaatcttgactaatggtaatatctgaaaaaagaataaatatgggaatgaatatcatattatcaattatgatatccattatttatttacttatgcatagcacaggatattatgattttagcctacgttttatggttgccatcggtttaatacctgttgctagtgttgccattttactgttacaaacggcagaaatccgcattgctgttatcacattggtcttatatcagacatggaatatgtttttagaaccatacacatgggacttacctgtaaaatcaatttatcgtatatttagtagtgacgattttccaatgatggcattatgcagtacattatcaatctggatgttatattttggctttctatatggaatgcacaagataaaatcaaaatctttatttactgaaaattatctaaatatcaggcagatagaaaaattgctcgtatatatgattattggtggcttggtcttacaactaacgcaaatgattatttccgcattgagaatacctttcggttttttaggacttattgaaaccatgttaccatccacagtcggtgctgttgcagtactctactggttgagagggggacgaaaaattatatatttaattctgacaatagtctatgtggcttattacttcgtatattatgttgggggaactttgttcatatattcgatttttttaatagctgcacccactgtaatatatatcgtggagaggaaaaaaataccatatatgactgtttttacagtagcgatattattactaccgatttatctttctcggcatacatatcgaaatgagggactatattccagtggtaccgaacgtctactcataggttggaaaatcttagaaacagaatatgcaaatgccaatatattacattggcaagaacttattgataaagaccatcagaactataatgttgacaaccgcactgaaggagtcacttacttggctactatcattaaccgcataaacaatggtacgtctcagtatgcgtatggggaaactattgcttggttaccgacaatgtttatccctcgttttttaattccattccgaccaagtcaaaatatgggggataaatgggctatatattacggggtgaaagatgcttcatggagagccagtattaatttccctatgctttgtgaattttatgccaactttggatatttaggaatgataatcttgtcatttttcaatggtatttttattatatggatgatgggcaaattcaataacggaataggggataccaatcttatgttactcatttttgtagtcactaaaattatcgtgatagaggcaaatgttactttagcatacggtgctatcctgcaagttattacaatttgttggttgataaaaagatttattcccaagacagtttaaaactatatataatgaatatatccacaaaacaaagtaataagattaaaatcctgtcattttgctcaattatattcgtcgtatggatgcacgcctattacttagaaagcgaaagatggcctatcatatattttgcacaaaagtttgtggcattgtttgccgactttgccgtaccgttgtttttcatcatatctggcttcttgttctttactaattttaataaagttggcggtacggcaaatttattcatttctaaaatcaagaaaaggatgcgtacacttatcttgccatacgtaatatggtgtacattgtttatcgcagaaatattcattattggatcatttattgatttaaacacagactattttgcatattgcagacagggaagttggtggaattttctattgtatgtctattttaaacctgcagcatttcacctttggtttgtcagggatttgtttatagtcatcctgtgcagccctattatatatttgtttataaggtatttgcctatatatgtacaagttattggactactgctactgggtatgttccaatttgttccaatggtgtcatggggactcttttggttcacgataggagcgatgttttctataaaccaaagagaaattttttattttataaagcctaaattggcgattttgtgcctgatagcgttttgtgtggttgttgccagctttgtcatatttgacatatcacttgcaagcaatcaatattatgcagcaccagttatcttgttgggggttatagggatatggaaaggaagcgactgtgtgtgtacattcacatctatcaaatccatatcgcactacacattctttatttattgctcacatattcccttgctgaatatcgtaaaaacaataatatatccacgatttttagaatcatctattggctgtacattaggcttttttttgtcgcccataattacaatctcaatatgcctaatggtaggaaagctattactatcgatagctccctcgatttatcgtattctatctggaggtaggtaatatgattcgcaagcccgaatttgacattatgaaaggaatattgatagtactggtagttataggccacacctcaatacgcctcccatacattgacctgttttggttccacatgcctacattctttatgattacaggatatttatcccaaagatgggtatcattcaacgacactgcatatctgcgccacaaggcttttcaattgcttgttccgtacctcagctacagcattttattattcctattcattggatactcccctttatggaaatatatgctcaaagtattccttggcggaacattaaatataacacctttcagttaccctttttggtatgtaaatactcttctcgtggcattggttgcattcgggctaattaaacagttaacgcaaagcctccaattgctgctaatagcctcactatacatcattgttcacctgatgacctattgggattttcacccacgagttccatggggtattgacaatgcaatgggggcattagtcttcatctacattggtgataaattcaaggtttataaaacacagaaatggcactactctctcctgtgtgcgcccgttttatttacatttattaacaaatgggggggggtaaattatagaattaatatggcaagcatagaatataaccatctaatacttgacctcttggtgccatgtatatttgcatttgccatatatttattatgtatgtacttaaaaaagtggaagtatattacctacttcttttcagtattaggacatagtagtttgacaatatactttacccatgcggccttgttgtatgtattagctcctctcatagggcagcccattgctgtcacgtgctgcttaattgcaggagcattgtttcagcatatattcacaaggttcaatattacaagaacattgtttctagggaatatgaaataaataaaaactatatacaggtttgatatgaaattaattataaatgccgatgactgtggtaagaacaaagaagtgaatgctgccattagtcactttatcgaaactggaaaaattaccagcactacagtcatggctaatatggatgacttggagggagcctcccgactttttgacgaatatcaggatagtatttctttcgggatacatctcaatctgacagaaggacatcctttgcgatatagtcaggagttacttgacagaggttactataaggaaacggctaatgttgctggagaaaaaggtaatatttacctaaatattaatcaattacgaaacaaaataattagcacaagtatacagaaagaattggaaaaagaactttgcgcccagatagaaaaggtcttagattatggaatacggatttcacatattgatagccatcatcacatacacaccagtttgctgatgctacgaatgatgccaaaattagcgaaacgatacggcatacataaaatgaggcgtatgagaaattatgtaccctctgcttcatggacaaatatggctctacgcgacctgtggaaacagttaataaagttacagaatcaccgaatagttatgactgactatttcggaatttatgaagaatggtatgacaacggcaaacaaattcttcatgaaaatacagtactagaacttatgtgccacccaggaggggcttattctgaagaggagtgtaaactgctagaaactgatttcactcaattggcgaatgtagaactagttaattataatatgattggataatggacgtaacatataagtttttaactgcggaggaatttcactcaccggaatatgtaaaattacagaacaagatacatggtaaaaatgggcatgcatcccgattgaaacgtatggagcactatgcagccatgggagatctccgtgtgatagtggcaatcattgatgggaaaatggtgggacaagcttctgcatatagagtcaaggctatcattgagggaaaagaacaaccattctattggagttgcgatactttcttgttgcccgaatcgagggggtatggtatgggaaaacacttgcaaaacgaactccataaggtgtgccccaatttttcatctgcatggtattctccgattaatgggattatcaaaagaaaatgcggaggatcagatttgatagatttgaaatttacctattaccctgtatccaatttttgtgggcttatgtggcaactagcgagtaccaaattgtttaagaaacagttaactaccaacgcacatatcccgttcttgtattacaatctgaataagttattccacaaaaacaagttaaagaagtatgaagtggtagaaatccattattccgatttggatgaggaaatagctgagtttatggaaaactctttgaaaggttatgatttccacattaagaggaatctggactttctaaaatggacctatgggtggaagaaagggcgatatcacatgttagcaattaaacgtgatggaagaatcgatgctgttgttgccttctccaatgttcacaacgccacacatgtaatagctcgtttcaaaggggtgtcgatattagaccttgttatcagcccagactcgcaattgacaaccaaagacgtactcctatatgtaatccagtaccacaaggaacgaaaggaaaaaatagagggtgtaattacttttgaacaaatgaattacttcccgaaattcatttaccctataccatctgtgcccctattatcaacatacggaaagaaactacaaaaagggtatatttcattcatagatcaggatatggaccaattataagcattgaaataaacaagtctcattaatatgaaactagtgttttactcgctgatattgaacaaccatcaagcgaatgtggctgatgagttgtggaaactgactaggcatagttactgctttgtggagcttgccaacttacaagccgagcatcggaaaggagactcacacgactatagcgaccggccttacttattacgggcttggcagtcggaagaggcttattctcaggctatggaactggtccatacggccgaatgctgtgtcttttcgggaatacaagctttgactttccaaaaagaaaggatgagattaggattactgtcgttcgacatgagcgagcgatggttgaaaagaggtattttgaacttgttctcaccagccatcttaaaaatgttcctctcctatcatttcggaggttggagcaagaaaccattgtacaaactttgctgcagtgcatttgcatcagaagaccaacataaattgttcacctatcgtggacgctgttacaaatgggggtatttcacccgagtggaaaaaattgatgttgaaacattcccggatgtttccacatcaaatatcacaccacttatgtggtgttcaagatatttgatgttgaaacatccggaactaccgatattaatggctcgtcaactcaaaaacaaaggatatcgtttcatgcttgacatgtacgggagcggagaatatgaaattcagacacgacaacttgccaaagagttggatgtggaagatgtcatctgtttcatgggtgttaaacccaataacgaactgctgaacgacatgcgaagacacagtatattcctattcacaagtgataaaaacgaaggctggggtgctgtggccaacgaaagcatgaccaacgggtgcgtgttagtagcaagtgatggcataggtagttccccgtacttggtcaaaaacaagcaaacggggctgttgttcaccagtccccagacatcaagtagtttcggtcatcccgatattgcagcgttggattctttgtgtgacaaagtggagttcctactcgataatccctgtgagtgcaaaaaaattcgacaacattctattgctctgatgcaggaactatggaatccccgtattgctgccgaaaggctgttgactcttattgaccatctgcaaaaagggaaagacactccttttgttgaaggtccttgctcaaaagcataaatataaatttactatatatgaaggttttgcaaaccatcgctgggtttggtgctttgtatggcggaattgccacttgcacgtacgacctgattagggcgatgtacaatattgggtttcctcttgacttactgactttagaagtaagaaatcctatggataaattgatgggcaaaggcgaagattggatcaaagccttgccgaatgatgcaattactccctatgaatattctaagagtattgctctatatctcaagaataaagaatatgacttatatcatacaaatgggctatggatgtattgtaaccatgctacctgttcgatagcaagacgcaagcataaaccttatattatcacaccgcatggaatgctttaccccgatgcacttctccgttcttattggaaaaaatggccgctaatacagctttgttttcgtaaagatattaatcatgccgattgcttgcatgtcacttgtaagcctgaaatggaacatgtgcgccaatttggataccgtaatgctatcgcaattatccccaacccggccaatctgccgggttatctaaatgagattgcagctaaaaagccgtcctttctggggtgtaaccgattgaggaagtttggcttcctcggtcggttacaccccataaagaaggttgaaaaccttctttatggggtagcaaagctacctcattcacgagattgcgaattaatcataatgggtaagggagataatatttatgaacaatttctgcgcaatgagacgaaaagactcggattagagaattgcgttaaattttgtggttttgtcaacggtagagataaatatgagcaattggctcagttatcatgtcttttcgtgccgagtgacttcgagaatttcggcatgattgtaaccgaggcattatcagtaggcactcctgtaatggcaagccttggtactccgtgggaagagttgaacactataggctgtggatggtggattgaccgtactcccgaaaacatcgcccaagtaatgcaacaagtgatagaaatgcctatcctggaactgctcgctatgggcgaaaagggacagcagcttgtgcaaaaaaaatattctgcacctatggtagcaaagcagatgcagcaactgtataaatggctattaggtgaatgttctaaacccgatttcatatatgagtaaagtcgatttgtctaaatataataattcatggtttagtataggtgccggaaaaatgaaagtgattatctggtatttagtgaatatatgttttttgaattgcagttggaatccttcttcaggttttagaatatggttgctacgtttttttggtgcccaaataggccaaggagttgtaataaaaccttcagtcaatatcaaatatccttggaatctgttaataggagattatacttggattggtgaaaatgtatggatagataatctatcacaagttaccatcggctcaaatgtctgtattagtcaaggagcaatgttattgtgtggaaatcataattacaaacgtccgacatttgacctcatagtaaaaccgattacaatagaagatggtgcatgggtcggtgctcaatccaccgtctgtcccggagtaacgatgcattcgcacagtgttctcgctgttggttccatagcctctaaagacttaatgccatattcgatatatcgtgggaatcctgcggtaaaagtcgcagaacgggtaatgtttgaatcgtaatcaaactctttacccaaaatcaatttaattaaatctgatgaaaatatcaataatcaccgctacatggaatagcggtgcaactttgcgttacacaatgcggagcgtgttgtcgcaatcctatcccaatatagagcatattatcgtggatggcggttcaacagatagcacaatggaaatcgtacatgaattagaacctgaatatcaaggcaaattacgttatatcagcggaaaagacaaaggaatatacgatgccatgaataaaggtatcgcaatggcgacaggcgatattgtaggaatacttaatagtgatgatttttataccagcgatattgtgctttcaacagtggcatccgcatttgaagacggtaacatagatgctgtttacggcgatatacattatgtacaagactacgacttgcaaaaatgtacccgttattactcttcaaaactttttcatcgccgttggatgcgtctcggctttatgcccgcccatccgagtttttattgccacaaagaaatatatgaaagatacggcggattcaatttgtcatataaaattgccgccgattttgaatgtctgttgcgattcatattcgtccataaaatacggctccgatacatcccaatggattttgtaacaatgcgtacagggggagcatcgaccagcggattgtccagccataaacaaattttacgagatcaccaacgggcattcaaggataatggagtttacagtaatgttttgcttgaatcgttgagatacatttacaaaatatatgagatcttcgaaactaaagtttcacgaaaataatacatcacaaatttgatatttatatgaagacagctttaattaccggtatcaccggacaggacggctcatatcttgctgaattgcttttagaaaaaggatatgacgtgcatggtactatacgtcgttcatcggtagacttccgtgagcgtatcgcacatttggaagggcatcctaacttccacctccactatgccgacctgggcgactcgatgagcatcttacaagtggtgaaaaaagtaaagccaaacgaaatatacaacctcgccgcacaaagccatgtacaggtgtcgtttgactccccagagtttaccgctgatgtcgatgccaccggcgtactacgcattttggaagctgtgcgccaatgtgatctgactgatacctgccgtatctatcaggcttccacgtcagagctatacggcaaggtagaagaagtaccccagaatgagaatactcctttccatccctattctccctatgccgtagcgaaacagtatgggttctggattactaaagaataccgcgaagcgtacaacatgttctgctgttcaggtattctgttcaaccacgagtcggaacgccgcggagaaacgttcgttacccgcaagataacccttgccgctgcacgtattgcccaaggcaagcaggataaattgtatttaggtaacttgtcatcgctccgtgactggggctatgccaaggattacgtggagtgcatgtggctgatcctccaaaacgataagccggaagattttgtcattgccaccggcgagcagcattcggtacgtgagttctgccaattggctttccgatataccggaatcgaactgcgtttcgagggtgaaggtgaaaacgaaaaaggcatcgactgcaagagcggtaaagtacttgtcgaggtttctcccgacttctaccgcccaaccgatgtggtaaatcttttgggagacccgtcgaaagcgaagtgtgaactgggttggaatccgcagaagacatcgtttgagcaacttgtaaaaatcatggtggatgccgatatggcaaaagtagccgtggagcgtgcatcgcaacaggtaagaaccaaccttgccgaatatctcgaaaaaggaatcgtaaaataatcgagaaaacaatggagaagaacgcaaaaatctatgtagcaggacaccgtggaatggtaggctctgccattgtacgggaactgcaacgccagggatatacgaatatcatcacacgcacgcacaaagaattggacttgactcgccaggaagccgtggaacgcttcttcgccgaagaaaagcccgaatatgtattcctcgctgcagcaaaggtgggcggtatcatcgccaaccaatcggcattggcggacttcatgtacgagaacatgatactggagatgaatgtcatccactcggcatggcgcaatggttgcaggaagctggagtttctcggttcatcgtgcatatacccgcgtatggcaccccagccgatgcctgaaagctgcctgctaacctccgaactggaaaagaccaacgaggcatacgcattggcaaaaatctccggattaaaatactgcgagtttctcaaccgccagtacggcacggactatatcagcgtgatgcccaccaatctctatgggccgaatgacaactaccaccccgagcacagccacgtgttaccggcgcttatccgccgctttcatgaggcgaaggaagcaggcttgaaagaggtgacctgctggggtgacggtagcccgttgcgagagtttctctatgtggatgatttggccaatctctgcgtgttcttgatgaacaactattcgggatacgagacagtaaacgccggaacaggaaaggaactgaccataaaggcactgacggagcttgtcgccaaggttgtggactataagggtgaaatcaaatgggacacaagccgtcccaacggcacgccgcgcaaactgcttgatgtatcgaaagccgaagccttggggtggagatataagaccgagttggaggacggaatacggttagcatacgaggattttttgaataatccaatgcgggcagagagataaaaaataacataaagtggtgactatagcggtagggaatacacctcttcccattccgaacagagaagtgaagactacttgcgccgatggtactacatttagtggaagagtaggtaatcgccaaagagagataattcttttttattaatagtaaagtatctgaaatatgaaaaatatttttagtaattagggcagcctctcacgttggaggacgaggctgtcagaatggatggtagcaatacttcttacccttgctactgtatagatgtcttatgatgtctattagtcctatgtcgcataggatgaaacagagcggttcgctgcacagttgaatgtatatggattatacgataacttaaaaagcaagcgagaacaggatgagctacttgaggtttggaaaatctaatcttccaatgggtttgaaggatcccgccaaaaaaatccttcatttttcatttacagatatagccttcaaagatctatatgcaaatcatactgttatccggcggctcgggcaaacgcctgtggccgctttccaataatacacggtcaaagcaattcattaaactgctgactgcgcccgatggctcgaaagagtcgatggtgcagcgggtggtacggcaattacgggaagccggtatctgcgattcaataaccgtagcgacgagccagttgcagcgggatgtcatcatcaaccagcttggagaagagattcctgtagttacggaaccggagcgtcgcgatacattcccagctatcgctctcgcaagctcgtatttggcctacgaacgaaaatgttccaccgatgagattgtaatcatcatgccttgcgacccttatactgaagctggttattttgatacgattcgcaggatagcggatgcagtgaaaaacaatgtagccgaactggtattgatgggaattaaacccacatatccgtcagcaaaatacggatatgtagtgccagccaatgatgtacaaaacaaaggaacatttcaagtatcacgctttacggaaaaaccagatatgatgactgctgagaaacttatttcggagggtgctttctggaacggaggcgtattcgctttccggttggggtatatgatagacattgtagcccgatacatccaaaccgacatttttgcggaaatccgttctcgctatgtggaatttccgaaaatcagttttgactacgaagtcgctgaaaaagcgcagtcggtagccgtcgtaccttttaccggagagtggaaagaccttggtacatggaatacgttgactgatgaactatcggaacacaccatgggcaatgttatcatggatgaagaatccgagaatacccacgtcatcaacgaacttggactgccaatcatgtgtatcggcacacggaatctggtcattgcggcatcgaatgacggaatcctgatttcggacaagaataaaagcgagaacatcaagacctacgccgaccttctgcaatatcggccgatgttcgaggaacgtcgttggggtgaatacaaagtagtcaataccgccgagttttccgacggttacaaatcccttaccaagcaactgaaaatcaaatccggtaagggtatcagctatcagttacaccgccatcgcaatgaagtctggacgtttatcgacggcgaaggagaactggtactcgatgatatcaggtcggttgttagcagaggcgatacggttacgatcaagaaaggtgttaaacatgcagtcagggctatctccgacttgacgttcatcgagatgcagtctggagatctgcttgtcgaagaggatatcgaacggtttgactataaatggtaaaatcatttattaaaacaatacagattatctggaattccaatttgctttttggaacttataaatttcaaaatattttaattggacaaaatttctatgtaatatggtactctatcttttcatatttagaatattagatttactaaataccatattggtgatatgccgttgttccgtgttatgccttattacatgttttttcaattatacggcactttatctattgcctcttgccataatagtagattggggaatttttcaattttccattcaatctgtattcaaaaaccaactattggatttgaataaggcggtagaagagttcaaagaacagggtatcgatttggaaataattgaagatgacattattaaagaaatcgacacagaaatgcgaaaataccaattattccagtggggcaacaggcaaggagataagcgaacaattgttatccgggcaaacaaattgttcggacaattcaaaagttttgcgttttataatgcatcttctttcatattcgttcccaagacattttatccgcaatccatgaaagacagaatcttgttggcacatgaatttgcacattgtgtatcccatgatttgatgctggcattcaagaggcaattttattgttcggctattattctgcctctatttgttttggtatcggacattcctgcctggatgaaaatttctgcgattctactcgcttccgtattggcattactacagttctggcctatagcatataatgaaattattgccaataatcatgcgctagaagtggtgaatacgctatacggagcgaagtctatgtccgaatcggcgaaatatcttttgaaagtacgaactgaaacattacgtaaaaacattaaggataaaagatacgggttggcatacgcaatagaagaattacaaatagaacatttacaaagaagcgtatctgaaaatgccttgatacaacagagttcaccaatgaacgtatggttgtcaatcatccactatagcttgttcgcgttagcggtatatgcttgctactctttcgtaaaagagatgaatgtatcatggtatatgctgattatggctctaatcgcttttatattgatttatgttttatctaaaattaatgtaacgaaaatatggataataaagaatttaatttacgaaaagattgggattcaatagaaactgtagcaagtgatatttggccggaagaatggtctcaactcaatccattggagataaaggctcttgaagaaatcattgaaaaaaagaaatcactgaacacggaaattgtggacgtacctggtggtatgggctgcgatttttccgtggacctagagaatgtatattacctgcttgccattctatggtatctgaaaaatctgacgggaataacaaatgaggacataagacgaaaaatggaatcatttattaaagcctctgataaaagaatgaagttggtttacaagacagttatcgaacctcaattagataacctaatatccatattgaaaaagaaatgataatctatagcattgattattatggacaataccaagattgtactcaatgtggaaggcattcggaatgaatttgctggtggaatgttcaaaaaccacttattcatatggtaagcaagtatatataccggactataaatctcgcgaaaggagcttcgtttccggattctaaatagtagaaacagcattacgcaaaaattgacgggttggaaaaacttatcatagatactggtaatgaatccgtccattgatttttttcatgaaaaagaccgtccttgaatacacaaccaatacctatcaggaagatatccccaaacagttccttcaagaggccaaaatacgtctgaattcttttttctcagaacaggaatgtgtacagaagaaagggattcaatttatattcaaatatgcattctactcagtagagaatccccggaaggtcacgaaacaacatctaataaaagaatatgcaaggttacctttggaaaaaagaagtgtgcaaccggaacaaatacctgatatgaaacaatacaatgatataatactatatggcgataacaactctcccgaaacacagaaactgctagcagaatacctccaacggcatgattcattaaaagtccagttatctttttttgacaagaaaaatgactcaacctacaaagatgaacaaaccatcgcatacgcagagctgcaaaaggcattattcttttgcaaaagaaagaaaataccacttctattcgtttccataaaagacatgataaacgatatccgttttttcaatttactagaggagagccatatcgatttcagatgtattgatttcccgtggttctacaaggagaatctgcctctgataaaggcggttgtgctatatgaaaagttggaaataagaataaatgtataagatatcaagcttacagattggccttcaatgttgcagcattgagatttatgagaaacaattctaaatatatttctgtttggcgaaatcttattctaaaaggaactctaaataaaagaatccaccttcagatatctttcttcacttatcctcaaagtatataatccaaacataaatatcagacctattttccctataactgagtaataaaaagattattcccctacaccgtaaacaaagaaataacagaagcactttaaaagggtgtatctaactcactttttaaggataatatccctgttacagttatctgtagcaggtgatcctttcaaattgggcattagatgcacccttttccttattccaacaaatgcgcctcttgtaacctcaccaattcccaatacatcttcaaaaacacctccagatacaccttcagactcggggaaatagacgatagacttccggcaaaagaaaggcacgtgaatggccgttcattcggagccaccatttccggatagcgtttctttgtccatccaaaataatctctatcgggacagaacaataaacaaaagcataaatatcaggcaaaattgtcccgataaaagaattataacatgactattgaagatgaaatcctccaatacctgcactatcatcctctatcaaacagggttgagataacgcttgggataaccaatcctcccagtggcaggattgtaaaaagactactggccgatgccgtaaccaaaggaatgatagaagtactctaacaatagtagtgccactatattataagcagcactgcaattgttccttaccccagcaaatgcacctcctgtaacctcaccaatcccaaatacatcttcaagaacacctcctgatacaccttcagatccgggaaatagacgaaagacttccgggaaaaagagagacatgtgaatggccgttcatttggaacctccatttccggatagcgtttcttcgcctggtcaaccgccatcttgttcagtgaagccacgaagttggcctggcgtatcggattccatttcggggtttcaagaatcaccatcccatctttccgctcaggaataaccaaatattcattctgcacgttacgggcgtaataacacacaaaagacaaggcttcatagacattatcccctacatgaatgccgataacccgttcttcaaccggtgtaccggcaaagcattccgcaatctgcttcatggcatacccatgcaacaaggcagcatcagaagccaacagataagccggtgcggtacgctctcctcccttatcgatggcagcaaagagagaaggactccaacagagatgaataagctttcctttctctttctcacgtaggaaagcgacacataaccggttgtcaaagaccaaacgggcttctttcgtttccggatggaactggaacacgttccgtaccttgtccggcttatggatatccatcatcagatagccttgccaaccggacacgtgctttgtcttcaagacggtttcgctttcctccacatcgaagagataagacaagagcttttctcgcttacaacatacggagagagaaagctcgtcctgttctttcatctgctgcatatccaatgaaagcacaaaagccaattgccaaggagtaagctcggaaaagccatgtaattcaatacaagacaacacatccttcttcggtgagtaaatgacatacccccggccacctatttcatatctcaacatgaaatccccctgttcagagggatgataattttgtaaaacggtctgataattcataaagcaaatgtattaagttagtattcataaagagaaatcaggtccactcttccgtttccgtttctttttggacggcatgaaatcatcctcttgcgacttctttccgctaccagtaatgtcaagatccggaattgccgtaactcccccattctgcatatagaaagcctcacgatccacccgctcacggaactcccctaccctatcaatatagggtgagagaccgacagccacaccatcgaaatgcctctggatactctgataggtgagcttgcgggaaagttccgaacccttaaagatatgaggatcctccacattttccacatagaaagaaatcccgtatgcgcctttactgtttacatgctccgtcacccgaatcgattcttccgccaagttcttcttgaaatcctcatatccggaagaagagttcaaagccttaaacacgtggtcatagagataatgcttctgttcatcggcactcatgccatgaccatcaaaacggatattaccgaagcgatatttctgaggaagcgaaacgtccttcagataaaatccagaatccttaatgccatagacataataggatttgtcattcctggtgacaaggcgcatatatcccccttcttgttccaggtttcttcggaaatcggatgtactttcagaaaaagaataaatacggtcaagcagctgtaacagttcgtccttgaacaagggtttgaaaaagcctcctttttccagcaatgcgaaaaggttgtcatagctttcatcacccaacaggacacgccattcttcattggccaattttatttcttgcaagggtttatccaaagaccagtatgtatcggattgttccaggacagccgataccttatccttataattataactacgcatggcttttttcaaggccgcatcaaaataatagttacggtattgcgactctcccaatgtggttctcttgacaccttccttttccaaaggcaataacccatacttctgctccagttcccttgagatcttttcggaacggctgtaattattcccggaaggaatgcttttgccttcttcatcaatcgtggtcagcagcacatgcacatggctgtgtgccttgtcggtattcaggacaacggcataacaggactttccgtaccccatcctctcgatatattccccggcaagagaaagccactgttcatcggaaaggctttctcctggatagaggctcagaataaattccgcataaggtagtttcacccggtcattcaactgggagataagtttcatgtaggctggcatggcggccagttcgtcaccggtggaggtgcaaagcacttttccgtttccttccttgaccttggaaagctggtattcgattttccggctcatggacaggtgggatgagaaagaaggctgtatctcggctatcataacaatttccggttaatggtttctacatccgaaaggtattggttaatccgatccaatgaatacaatatattttcatcggacggaagcgtattgatatgtttggcaagctggttgatattggctcctattttacgaagttcatatatcatttgcacatcggttttcgatatgcttctgcctttcaaggcagactctctgataaaggaagaaagggatttcccctcttcctttgaacgttgaagaagctgttctttctcggcttccgtcaagcggatctttatacttatatctcgattctctttcatatatacagagtatgtgagtgtaacgaacattggtcggcagctcggctgtcgcaagggtttttgtacccacaaaaacataccttgcattagcaaagatatgcaataatactcagctatgaaacaaaatcagacaaaagtcttgatttcttaatccagattaaccg

SEQ ID NO: 126 - DNA, 13849 bp, unidentified
  source 1..13849: mol_type = unassigned DNA
  misc_difference 7798: note = a, c, g, or t
  misc_difference 7799: note = a, c, g, or t
  misc_difference 7800: note = a, c, g, or t
  misc_difference 7801: note = a, c, g, or t
  misc_difference 7802: note = a, c, g, or t
  misc_difference 7803: note = a, c, g, or t
  misc_difference 7804: note = a, c, g, or t
  misc_difference 7805: note = a, c, g, or t
  misc_difference 7806: note = a, c, g, or t
  misc_difference 7807: note = a, c, g, or t
  misc_difference 9192: note = a, c, g, or t
  misc_difference 9193: note = a, c, g, or t
  misc_difference 9194: note = a, c, g, or t
  misc_difference 9195: note = a, c, g, or t
  misc_difference 9196: note = a, c, g, or t
  misc_difference 9197: note = a, c, g, or t
  misc_difference 9198: note = a, c, g, or t
  misc_difference 9199: note = a, c, g, or t
  misc_difference 9200: note = a, c, g, or t
  misc_difference 9201: note = a, c, g, or t
  misc_difference 10152: note = a, c, g, or t
  misc_difference 10153: note = a, c, g, or t
  misc_difference 10154: note = a, c, g, or t
  misc_difference 10155: note = a, c, g, or t
  misc_difference 10156: note = a, c, g, or t
  misc_difference 10157: note = a, c, g, or t
  misc_difference 10158: note = a, c, g, or t
  misc_difference 10159: note = a, c, g, or t
  misc_difference 10160: note = a, c, g, or t
  misc_difference 10161: note = a, c, g, or t
  misc_difference 10484: note = a, c, g, or t
  misc_difference 10485: note = a, c, g, or t
  misc_difference 10486: note = a, c, g, or t
  misc_difference 10487: note = a, c, g, or t
  misc_difference 10488: note = a, c, g, or t
  misc_difference 10489: note = a, c, g, or t
  misc_difference 10490: note = a, c, g, or t
  misc_difference 10491: note = a, c, g, or t
  misc_difference 10492: note = a, c, g, or t
  misc_difference 10493: note = a, c, g, or t
atgaaagttgtaattcttgccggcggctatggcacgcgcatttcggaagaaagcaagttcaagccgaaaccgatgatcgaaatcggcggtatgcctattttgtggcatatcatgaaagagtattcttactatggcttcaatgattttgtgatctgcgccgggtacaagcagcatatgatcaaggagtggtttgcggattatttcctgcataccagcgatgtgacctttgacttcacccagggcaacgagataatcgtgcatgaccagcacgccgagccgtggcgcgtgacggtggtggataccggcctgaacacgatgacgggcggccgcatcaagcgggtgcagaaatatatcggcaacgaaacctttatgatgacctatggtgatggcgtctgcgatgtgaacattgccgaactggtcaagttccataagcagcatggcaagctggcaactctgaccgccgtggtgcaggaacagcagaaaggcgtgctggatatcggccaagataacactgtacaggcgttccgtgaaaaaagcgtcaacgatggggctatcatcaacgcgggctatatggtgctggaaccggaagtgtttgataccatcagcggtgatgataccatttttgagcaggccccgctgcgcgagctggcagccaaaggccagctgatgagctatgtgcaccgcggattctggcagtgcatggataccgagcgcgaaaaaagtatgctggaaaaaatgtgggcgtccggctgtgcgccctgggaagtgtggaaccaacaatgaacttggaattttaccgcggcaaacgcgtgtttgtaaccgggcataccggttttaagggcagctggctctgccgcatgctggtgggggtcggtgcggtggtaacgggttacagcctggaaccgcccacaacccccaacctcttctctctggcagggctggaaggcaaaatgaccagcgtgatcggtgatatccgcaattttgccgccctgaaagcggcctttgatgccgcccagccggaaattgtgctgcacctggcggcccagcccattgtgcgggacagctacaaggacccgcgctatacctatgaaaccaatgtaatgggcaccgtgaacctgttggaatgtgtgcgcgccgcccaaaccccaccgcgctctgtgctgaacgtgacgacagataaggtgtaccagaataatgaatggtgctggggctaccgcgaaaacgaaccgttggacggcttcgacccctactccaacagcaaaagctgctcggagctggtgacccacagctataaaaacagcttttttgcggatggcagtgtggccatctccactgcccgcgcaggtaatgtgattggcggcggcgattttgccaatgaccgcatcatcccggactgcgtgcgcgcgatggcaaaaggggagagcatcggtgtgcgcaacccgtattccacccgcccataccagcatgtgctggaaccgctggcggcgtacctgctgatcgcccagcgccagtatgaggataaccggtacgccggctattataacgtcggcccggatgactgcgactgtgtgacgaccggcaccctggtagacctgttctgccaggcgtggggcgatggtgctgcatgggaaaaccgcgctgaggcaaacgccccgcatgaagcaaactttttgaagctggattgcagcaaattgaaatccaccttcggctggaaaccgcgctggcatatggcggaatgtatgcaaaagaccgttgcgttcagcaaggtatggctttccggcggggatatcccggcggagatggacaaagagatcaaggaatttttgagtgagtaagggagcagacgatggcaaattggagcaatgaggccgaagcccgcgagcagatcaaggcgctggtggcagaatattaccatgactttaaggagaaaaaggcggatttcaagcccggcgaccgcgttacttatgcatcccgcgtgtttgatgaaaaagaaatgtgcgccctgaccgatgcaacgctggatttctggctgaccaccggccgctttgcggatgaatttgaaaaagagtttgccaagtggatcggcgtaaagttcgccaacctggtcaactccggctcctccgccaacctgattgcctttatggcgctcaccgccccggaactgggcgaccgccagatcaaaaagggcgatgaggtcatcactgtggcatgcgggttccccaccactgtcaccccggcgctgcagtatggcgctgtgccggtgtttgtggatgtaaccgtgccgcagtacaacattgatgtgaccaagctggaagccgctctttcccccaagaccaaggcagtcatgatcgcccataccctgggcaacccgtttgacctgtccgccgtcaaagccttctgcgatgcccataacctctggctggtggaggataactgcgatgccctgggtacccagtacaccatcaacggcgaaacccgctttaccggaacctggggcgatatcggcacctccagcttctacccgccgcaccacatgacgatgggcgagggcggctgcgtgtatacaaacagcccgctgctgaaccgcctgatcaagagctaccgcgactggggccgcgactgcatctgcccgtccggccatgataacttctgcggccaccgctttgacggtcagtatggcgaactgcccgcaggctatgaccacaagtacgtttacagccactttggctataacctgaaagtgaccgatatgcaggccgccatcggctgcgaacagctgaaaaagttccccagctttatcgagcgccgccgccataactgggaccgcctgcgcgcagccctggaaccggccgccgataagctgatcctgccggaaccggccgccaacagccgcccgtcctggttcggcttcctgatttcggtcaagccggaatccggcctggaccgcaacgccgtgacccgctatattgaggaccacaatgtccagacccgcctgttgttcagcggtaacctgatcaagcacccctgctttgaccagatccgcggcaccgacgcctaccgcgtggcaggggagctgaccaacaccgactttatcatgaacaacaccttctgggtcggcgtgtaccccggcatgaccgatgagatgatcgactatatggcgaagatcattattgaagcggtgaaccagtaaaaagcgctgataagatgaatcaataagaaaaagcaaagccgtgctgataagaaaaaatggctgctgcactgcggtaaattatcaatacaggctttgctttttgattgcttataaagaataataaaggaacgggatccatgcagaaattgttggcactgttgggagcaaaaagcaaagaggaatttgttgcgctgcttgcacagtttatcaagtttggccttgttggcgtaagcaacacggcggtatcaatggcggtgtattatatctttttgtggatcagcccagacctgtatatggtaggcagcgttctgggaacaattctgagcattgccaatgcctttttttggaacgataagtttgtgtttaccgggaatgcaaacgattggcgcagtaaactgaaacgccttggaaaaacatatgtcagctacggcggcacgtcgatcctttctaatgttttgctttggatagaggttacgttcttcagcgtaagcaaaacgattgcgccgattgtaaatttgctggtcacgattccgctgaattttatcatcaacaagttgtggacatttaaggaaagataaacgacaaaatgtttcccgtcaacgatgtggagcttatccggcacggaaaagtgcggtatcgggatccctaaccatcatccgactcaacgaggttggttggcggtgctttattgttgaaaataagactgcaaaatatatcggtaaaaaatatgggaaaccagggaatatctgatacataaccgggaacagaaatagggcaaggctgtgtatggacaacatgacaacaaataacgagaataaatctggtatcagcactggattagatcagctgttgccggaagataacaaatcggtgcagctgggactgaattatggccagaatgaatgcaacagccagcgcgtgctgaaagagaataacacgaaatggggaaaaggcctttttggtaaaaaaggaagagggagtaatccgttctggaaaaaaacggccaagctgtactgtgtactcagcgcagtgtgtgccattgtggttatggtaacgctgtatgttacccatggtgattttctttcgtactttttataccatgatacactggatgccggcatggattttttccatagcattgaatatgttcgtggacgccagccgtatgcggtgtttgacacactgtatccgcccttggcaaatttgttcttttatgccctgtttttactggtgcctgcttcggtatctgataactggacctatgactttgaggcgtcagttgccatgcgcggcacagaaactgatttacgcacaacacagtcgtgctttttgctatacgtcttttttgtggtgctggcggttcttttgctggcggttttgctccgtgacgtgatgcaaaatgcccagtgggccagggccagtacgttttttgccttgttcagctttggtgtgcttaatgcggtagaccgcggtaatattattttgctggcggcggggctttcgctttttttcgtcatgtatcaccgttcaaagcgcgcatgggtgcgggaactggcattggttgcactggcagtagcagccggacttaaaatttatcccgcattcttaggtgttatgcttttaagaaaccgggatttcaaagcagcaatccgcacggtgttttatggcattgcagcgttggtgctcccggtgtttgccttccaggagggcgtgtacggcttgcagctttggctgaagattttgttctcttttggaagtaaaagtaaaacaccttgggcaggcaatggcatcaacagcatgttcgcacatggggcgcatctggtggacctgattgccggaaccagcaatgcaacggtatctttttttgcagcagcctttgctgtggcggcggtactggttgtgtgtgctctgctctgccgccaggaatggcaggcgttgctgctgattaccgtggctatgatgtaccaaagccagggcaactatatttactgcatggcgctgattccgctggcgtattttcttgcacaggaaaaggtgatgacacgtcaaaatatattgccttttgtggttttgatggtatttaatctgccgcttccaatctttgaagagcgtaactcttatattcgcaacaccattgtacagttggcaatactgacagctatcatctggggcgttgtacaggcagtaaattgtgtgttggcagcgctgaaaaccaaaaagcctgaacaatcaaaactagataaaaaagctgcacgcagcacgctggttactttcggcgcttcactgggggcattggcagtttcccttgccgttttctatggcgtgtgggtgctgtataatgcgccgtctattaccatgcagctgggggatggcatttataacacagaatattatactcctgaaaactccaacaaagagctaccgttttactggtgcaagaaaagtgcggagatcaaactggtaaacccgcagctgaatacggaaaggtacacctttacctttacagttggggattatttctttgatatttctgaccgccccagcattaccattaccttcggtgacagtagccagacctttgtggtcagccaggaaaacatgaaaatccgctataccgtggatgttccttttggtgaaagtgcaatcgatattagctacagcggcaagcgggttgatgccccgcaggattccagaactttgtattttgtaatggttcagccgcagcttgaacggattaaataaaaggaggacactctcaatgaaacagcgtctggccgattatgtggccgattttcttgcggcgcacggcgttacggatgtgttcagcgtggtgggcggcggcgccatgcatctgaatgatgcactgggccaccacccggcgctgcatgttacctataaccatcacgagcaggcaagtgccattgcggcggaagcatacgcccgcattgataacaaaattgccgccctgtgcgttaccaccggccccggcggcaccaacgccctgaccggtgtggtgggcggctggctggattctatccctatgtttgtaatctccggccaggttcggtacgataccacggcccgctatgccgcgcagtttaccgatggcctgcccctgcgcgcggtgggcgaccaggaatacgatatcaccaaatctgttgcccacatgaccaaatacgccaccatgctggaagacccgaaccagatccgctatgtgctggaaaaagcctggcacctggcaaccaccggccgccccggcccggtgtggatcgatatcccggtcaactatcagggcggctacattgaaaccgacagcctgcccggctatgactcggcgcaggacgatgcccggctgccgcccccggtggacgatgccaccgtgcagatggtgctggaaaagatccgccacgccaagcgcccggtgttccacgccgggtacggcatccggctttccggcgggtacgcagcgttccgcgccgtggcggaaaagctgaacatccccattgtgacctactggaacgccgtggacctgatcgaggacgaaaacccgctttactgcggtcgtgccggcaatatgggcgaccgtcccggcaactgggccatccagaacgcagacctgattctggctgtgggcacccgcatttccatccgccaggtgggctataactggaaaacctgggcccgcgcggcggaagtcatcatggtggatattgaccgcgccgagatgaaaaagcacaccctgcatgtggagcaccccgtgtgggcggatgccaaggactttctgcaaaagctggatgccgccgcagcgccgctgacccctgtcagccaggcagcggactggctggcaacctgccagagatggaaaaaagattaccccgccgtgctgccgcgccagtgggaagaaaacggcaccaccgccaatgtgtacgcctttgtgcgctacctcagttcccgcctgccggaaaacagcctgaccgcagtttccaacggcgcctgctgcgtggtgggcaatcaggcgtatgtcatccaaaaaggcagccgcatggccaacaacagcgccattgccagcatgggttacggcctgcccgccgccattggcacttgcattgcaggcgtaccaccatctgcctggaaggcgatggctctatcatgatgaacctgcaggaattgcagaccatcctgacaaataagctgccgatcaagattttcctcatcaacaataacggctaccactccatccgcctgacccagaacaacctgttcaaagaccattgcaagatcggcattgggccggagagcggggatctgtccttcccggagttccgcaaaattgccgaagcgttcggctacccgtattcctgcgcacattccaacgctgagatgaaacaggtggtggatgccgcccttgccgcagaaggcccgactttctgcgagatctttaccgatacccagcaggtctgggagccgaagagcgccaccaagcgcctgccggacggcacagtgcttcgcatcagcgttctgcgccagacgctggcggtcctgcttctgggcatgctccagccgattctggttgttgcgcttgccgccgtaattctaagcgcgcttctnnnnnnnnnnggacggcacactggtcagcccgccgctggaggacctggcaccgttcctgccgcgggaagagctggaaaagcagatgtttatccccctggtgccggaagggtaagaaaataaaaaatgaaaaaagcgcggaatggcaatattgaattgctgcggtttgtattttgcgtgggggtggtattgttccatgcgtggtacgtgcgcaggggatatatcggcgttgaattcttttttatcgtaacagggtattttcttgccgaaaagatatgccggttaaacgcaagagaaacaacctgcccttcgctagaaaatgccatgaaagaagcgacatgggatgtgctcaagcgttatcgtttgatatttccatactttcttgtggcaaccgttttggggtttatagtgcgtgcctatgcacaacagtgggacagcgctacaattctgttgaatttacagctgattccggcagatttcctgtatttacagaactttgggttttctgtagcctccacaacaggggtgctatggtatctttccgcaatgacttttgcggtctgggtgctgtatccgctgctgcgcaggcattatggcttgactgtgcaggcgaccccggcagcaatcctgctgatactgggcgtgatcctgcagaactgtggttcactggatgccccatgtacacttctgtttggctgggttaataccggaatgctgcgtgcctttgcaggaattctgggaggggtagtagcaaacagggttgcatcaactctgaaaaaaattgatgtagggaaaaagatggccgcgatgatgacagccgtggaattggctgggtatgcgtgggtactttaccatatatggtcaatgaatgagacacgtgctatgctggatggcattgtggttttggcgttgggtgcggcatttaccattacggcaagcggaaaatcgcttttctacggaaaatttgacaacggctttgtcagatttctggggaaagcaaccatgccagttttcttgagtcatttgtattgcgtacaatttttgccgaatatactggcaatgtacagcgtagaagtgaccgaactgcaaaggcttgttctttcttttgcctgctgtgcaatagcggcaggaattgtctattatgtagggaaaattatagacaggcaaatgaaaaaaagctggcatgctttttgcacagagatcattgcgaaaaacaaataaggtgttgaaaatggaaaaaatcgaaaggcagatacaaaccgcaatcgtaaccggccccaccggggccgtgggcacagcattgtgcagccggctgctgcaggccgggtgtaccgtggtggcggtctgccgccccggcagcccgcgggccgtagcgctgcccaaggatgcaaacctgnnnnnnnnnntgtatgtagttgcctgcgatgccgccaacctggcggatttgccgcagtgcatggccgcagccgggctgcccgtgcaggcggatgcctttttccacctggcgtgggcgcacaccattggcgcgggccgcaatgatatgccggctcagattgagaatatccgctataccattgatgccgtgcgcaccgcggcggcaatgggctgccgtgtgtttattggtaccggcagccaggcagagtatggccgtgtggacggtgttctgcgggccgatacccccacaaaccccgaaaacgggtacggcatggccaagctgtgtgcaggccagatgagccgtaccgaggccgccgccctgggtatggaccatgtgtgggcgcgtatcctttcggtttacggcccgcatgacggccccaacacgatgatctccgccaccatccaaaaactgctggccgggcagtgcccggacctgacggcaggggagcagaagtgggattatctttactccgccgatgctgcggatgcactgtaccgcatggcctgccatggccgcagcggtgccgtgtacccggtgggcagcggcaccgcccgccctctgcgggaatatattgagaccctgcgtgatgccatcgacctggccctgccgcttggcctgggcaaaatcccttacgggccgcagcaggtcatgtttttgcaggcggatatcacccagcttgcggcggataccggctttacgccgcgcaccgcctttgccgatggcatccgcgccaccattgcgtgggcaaaaacgcaaaagcaaaccaattaagccaataaggaataatcccgtccgtgcgggcaggacccgcatggacgaacaggagccagacagtatttatgcagttgacctaccaaaagttaaagccgtttgccttatcctatctcaccgcgccgctggcggggttttttgcggggtatcnnnnnnnnnnccgcgcgccgtttgccgttgcgggcctggccgtgctggcctttgcctggtggtatgccgtgtgcaaaacgccgcaggttaagcaaatggggcaagaagagcagggcattacgctttcggtgccaaagctggtgctgctgtttgccctgatgctgttgtggggctacctgggcggtcagacgggctttttttaccagaactcggactggggttaccgcaacgccatttaccgggatctgatcacaaacagctggccggtgtattacccgcaaaaggatacggcgctggtgtattatatcgggcactggctggtcccggcggcgnnnnnnnnnnccaaaccggtatacgccctgtttgggctggatgccgcctggatgttcgcccgtatggccctttgggggtggacggcgctgggcacctatctggtggcgctgaatttgttggtctacctgcgtgccgataccggcaaaaagcaggggatcggcctgctgtttttgattttcttcagcggcatggatattctgggcgcgctgtacagcagccgactgccggacctgctggcctatgacgctatgcacctggaatggtggacgaatgatttccagttcagctccctgacgacctgcctgttctgggtgttcaaccagacagtgggggcatggctggcaaccgtctgctttttgcaggagaaagactgccgcaactacctgctgctgggcacggcctgcctgatgtgcggccccttcccatttgtggggctggttatttttatggtggtgcgcggcattgttctgctggcacagcgtcaaaaaggcgtgctgcaatcggcgttctccccggccaatgtgctggtgctggttgtggtgctcagcattacggccagttattttttggccaataacgcctttggctacagcgttctgggcgaaactgtcgccgggaaccaggcagcgcagcagacttttggccaaaacgttctgaccagcctgcaaaaaggcatgctggtattttacctgctggatgccggcatctatctgctgttgctctggcggcagaaccgccgcagctggctgttttatacctgcgccgtgtcgctcttcatcattccgttctttaaggtgggacaggggtgcgatttctgcatgcgggtgtccatcccggctatctttatcctgatgaccctctgtgcccggtactttatcgccttggtgggcaccaaatggcgggacggtacgcttgcacagcatgccgtgaccattctgctggcggcaacgctgctgatcggtgtctgcaccccggccatggaaatttaccgcggcatctgccacattgccaaagaggggacgttctgcctggaaaacgaggagccctacaccctggcggaccgccctgtaagcctgaactttgaaacgcaaaactgcgaaaataaattgttctttacctattttgcaaaatagtgtatagtgataagggtctgcccggctattgcggcagtgggccaaagactaaacttaaaggaatgaaacctgcatgagcgagaagaaaaaagtcatctctgttatgatccctacctataacgaggaggagaacgcccgccccatctatgaggcggtgcgggatgagattcggaaggactgcccggattatgactatgagatcctttttattgataataaaagccaggatcgtacccgccggatcattacggacatctgcgcgcaggaccccaaggtcaaagccatttttaacagcaagaactttggtcagttcaacagcccctattacggtatgatccataccacaggggactgtaccattaccatctgcgcggacttccaggacccggtggagatgattccaaagtttgtggctgaatgggaaaaaggctacaaaattgtaatcggcaaaaagaccaccagccaggaaaaccctgtcatgtactttttgcgggattgttactacaaaaccatcaaaaagatgagcaatgtggaaatgatcgagcagtttaccgggtttggcctgtacgataaaagctttatccagaccctgcgtgatttgcacgaccccaccccgtttttgcgcgggattgtggcggagcttggccccgagcgcaaggagattgaatacacccagcccaagcgccgggcaggcaagacccacaacaactggtacagcctgtttgatgccgccatgctcagctttaccagctacaccaagattgggatgcggatggcggagttcttcggctttttctgcgcggcggtcagctttatcctggggcttgtgttcctggtggcaaagctgatccactggaatacctttgctgcgggttatgccccgatgatcattgccgtgttttttgtgggtggtgtgcagctgacctttctgggatttttgggcgagtacatcatggcaatgaacgcccgtattatggaccgccccctggtggtggaagaaaagcggctgaattttgaatccgaaacgccggaaagtgatactacccgcgccaagtaagaccgagtggttataatagattgcgagttgacagtaaaacaatgattccttttaatattcccccgcaggttggtacagagctggactatatgcgccaggccatggcaaacaataagatctgcggcgatggcccttttacccgccgctgtgatgaatggatggaacagcggttccatgcgggaaaggtgctgctgaccaccagcggtaccaccgcgctggaaatggctgccctgctgtgcggcatccagcccggcgacgaggtgatcctgcccagctacacattttcttccacggcaacggcctttgttttagctggggccaagctggtgtttgtggatatccgcccggacaccatgaacattgacgaagcaaaaattgaacccgccattactgaaaaaaccaaagtcatctgcgtgatgcactatgccggtgtggcctgcgatatggataccatcatgcagattgcgcgccgccataacctgaaggtggtggaagatgccgcccagggcgtgatggccagctataagggcagggcactgggcaccatcggtgattttggctgctactctttccatgagacgaagaacttctcaatgggggaggggggcgcactggtcatcaatgaccccgaaaccgtgaccaaggctgaaatcctgcgggaaaagggtaccaaccgcgccagttttctgcgcggccaggtagataaatatacctgggtttcttatggatccagctacctgcccagtgatctgaatgccgcttacctgtgggcacagctggaacaggccgataccatcaatacagaccgtaccaacagctgggattattacgcacaggagctggcaccgctggctgaagcaggcctattggagctgcccaccgtgccggaaggctgtgtgcataacgggcatttgttctatgtcaagctgcgggacctggaacagcgcaccgcgttcattgcttatttgaaagcccacggtgtggcatcgtctttccattatgtgccgctgcacagcgccccggcgggcatccaatacggccgctttgccggggtgggtgaatacaccccaaaggaaagcaaccgcctgacccgcctgccgctgtactatggtctgaccgaagccgaccgcgcagccgtggtgcaggtggtcaaagacttttttgcacagaaataa

SEQ ID NO: 127 - DNA, 12145 bp, unidentified
  source 1..12145: mol_type = unassigned DNA
tgaccagcttctggatggtgggcagagccgcattgatgcggttctcgttggtgatcacgccgtccttcatcgggacattgaaatcgcagcggacaaggaccttcttgccgcagtaattctgatcgtcgatcgttttcttacctaaacccatggtaacaaactcctctcaaattcttttcgttcggaatcgaattttgctcttcatcgggggccgcgcactgcgaacttccccgtacatccctattataaacaaaaagcgtgtgtattgcaaggacgggagatggataatttattaacaaacatttgttgcagaagcaaagaaatgtggtgattttgccggaacgcaccaaaaaacgccgttttttctgaaaaagacccgctgcagggagtgttcgcccccacagcgggtcctgtccattcaggatgttttccggaacttctgcttcgctttttccagatattccagcaccagcggatttttcatacccagcaggatgactgcgtatgcagccactgagcccagcaccgccgccagaatgcagatgagattgggcagagccagtgccttgaccccggtacagacaagaacgatgcccacacagccgcagagcaccgagccaacggtgcgccggtcagctgagaccgtgaccagacccctggagcagcggatacagagcatcatggagcacagctctgccagcagggtggtaaaggccgccgcattctcccggaaccgcgggatgagcaggatgttcagccccacgttcagcagaccgctgaccagcgtgatccagaacagttccttttctcttccgcagggcaggagcgcacaggaattgtacagccagccaaacagacagacgatcagggcaaggctcaggatctgcaggggcatcaccgcatccagatagcttttcccggaaataaagaggacgacctcccggctgagggcaaacagtcccaccacagccggagccaccaccacgatgagcgcgttgaagatactgttgaacagcttgttgaagtttgccttgtcccccacgcccgcataatgggacagccgcgggatagacaccaccagcaccgccgaaagcagattctttacaatgccatagatcttacccgccaccgagtaaatacctacattgtaatctgttcccagaatgcccaaaatcgtggtatccgagctgacataaagggtcgttgccagcgtggatgcaaagatgatgaggatgggcttgaggtgctttttccagtcgatctttcttgtcagccggatggtgcagtaccgccgggcccggaaaaagttgagcacattggcacctaccgccgcaaacaccgtgatgcctgcatagatgcagtagtcatcccgggtcttgacgaaggcaaacagcatgaaaatggacagcacctgaaacagcagacctcggatggtgatataggtatactcctcaaagatcgtgaacacccattcggtgccgatggtcgtaaagaagatttgtaaactcagcaccagcatcaggtcggtataggcatggagctttgtccagaaaagcatcgtcaccgccaatgccgcataggtcagggccgtggagatcatattgatggagaacatctccgatgcaaaagccgacagtttttcccggtcgtttacatagcgggaaccctcacgcaccgcataggaggagatgccaaggcctgcaaacagcagaaaatacccgcagacggagcttgcaaagttcactttgcccaggttttccacctgaagaacactggaagcgtaggggaatgtgatgagcgggaagataatattcatcagtgtcttaaatgcgctcattgctgcattcagactgagggattttttcattcagatctccacttcgtaagtttttctggcctgtttctttttcagccagctgttccagagcagatacgaatacaacgtttttataaaataccgatactgccctgcacgaagccagcctgccagaagggggccggcatttctcttaaactcccgttccgcttcggcacacgcctgctccataaaagcatcatccttgcagtatttcaccacaatttctctgcaccggagcgcatatccggcccgtgcagaccgatacacgaacggttcatctgcaaacacttcacagatacgccgccatgccttcagctctgtcagttttcctgccgaataatgtccgctcgtcaccgagtcatcattgacatagtaatagtaaagtgccttgtcgatgcaggcaattttttctgcctttcggatacattttgcgagaaacagcgtatcctcaccaatttttaaatcagtatcgaacacaacgtcttgtgtgaccgcacggcggtaaagcgcaccccagcacactgtatgtgccttccggctgttccagtcatatcgtctgaccggcataacactaactttctccgtctcatcgctcttcgtctgcgttcgtccggtcgtgcccagaagatccagaccgtagcaataagcaatctccgcaccggtctcatccagcactcttttgagccgttctatgcactcggcgtggagtgaatcatccggatcagcaaaagaaatcagcgtgcctgtacttttttccaatcccaagtttcgcgcagaagaaacaccaccgtttggcttgtggtatatcttgatccgcagatctttttccgcgtagcgctgacagatggaaagagagttgtctgttgacccatcatccaccagaatgatctccagatcccgataggtctgaccaaggatgctgtccagacatttttccagatacttttctttgttatagatcggcacaatgatactgacggtatcgttcagcacaaattatcctcccttattttgccgccgggccattcttcagcaggaacagttttgcatacagcctccggctgcatctgagcagctgatacttccgctggctgctggtgcagagcagctttgccgccgccgggtcgcactcctgcagaaaggcctccatttttgcgcagcgcaccgtgtcctgcatcagatacggatagcagtgctccaccacgctcagcatcgcggcatcattttccggcattcccgggtacgcttcccggatggcccgatatttctgatagcccatatccagcttatcctcgtagaacttcatgttcctgcggtgaaggatgctgtccgggcgctgatagtaataatacagcggcaccgggcggtacgcgaccttgctgcacagctgaaaaatgcggtatgtcgtgccctgatcttccatcatccgccccagcggatagcggacatcccggaacagctcccgcttgtagagcttgttccaggcaaaatcccccagctcatccgagacaagggtgctgcggatggcttcccggcctgtcatacactgcaccggtacggtgagttctgctggggcaagctcttcctcccgttcaaacatccggaagcccaccacagccacgtccgcatccttttcctgcaggtcacggcaaagcgtttccagcatccggctgtccagaaagtcatcactgtccacaaagcagagatacgttccctgtgcccgttcgagccccgcgttgcgcgctgcagagagtcccccgtttttctggtggactgctgttacacgttcttcctgtgcggcatattcgtcgcagatggctccgctggcatcggtggaaccatcatccaccagcaggacctcaagattccgataggtctggtgcaagatgctgtccacgcagcggcgaagatatcgctccacattgtagaccggaacaatgacactgatcagttctgtctccatgttcagtcccctcagaagaatgtttctctgccgatgtggaggatctccgaggtgtacgggcaaatggcattgttgccctgaatatacgcctgatagatccagatgatgaccagcattccccacatggcagccttcagcagcttgcgcagacgctcatcctccacgcacttgaccacacggccaatggcgagataacagaagaacgcaaaatacaggcagatgcggtagagcggcacattgatgttgcgcagctgagccgttgccatctcgatcaggatcatcacgatccagaaatcagcatccgagcgggtaaagcggcggcggccctccccttcctcttttgcgtaccagcggtacagcacaatgggcaggatcaggaacggcagacgcacaatgatgggattcagcgtgaaaccgcccgcattggcatcataataatatccgtaaagccgatcaatgaagtccacattcagggccagcctgaccacagccttgctgaagaaggcaaggtagaccgaaaatgccgccaggccacccttgacccaccagttgtcgaaatgctgaagcaggatatagatcagcagcgcaccaaacgagataaaggtggcattgtggaacaggcaggagaccgccagcagtagaaccgcccagtgatactttttcttccacgcaaagctgaacgccaaaaatgccacacccagcgccacagactgccgctcggcattgtaggtatcgccataatacaggcagaggtaagccagccagccatagggcacggagacatactccttatactgcaccagcccgatcataaacaggccgcaggccagcaggtccaccataaagtagagccaatggacatcaccaaaaacatgggccgccagatagaccagcgtcataaacagcggctctgttttgtgccgctgccggatgcaggccagcaggccatcctgcagctttgcatccgccacccattcctcatacaccacgctgtccgtgccaatggacgggtcccgcaagcctgccaataccgccatcaccagcaccgccagcgccaggcagagataaaagcccttctcgttgtttttcttcgtccgcaggtgctcgccataggcagcaatgcccacagaaaccgcaaaagcccccagataaatcagcataacttctccattttatttttcgactgtgtgtttatttttccattctcccagcccatagacggcataaaacagccgcttgctgatcagaagtgtttccaccttgatccggtctgctcttttggcccagggccgccgggcaagcgcccggtgttcctgcacaaagcggcagatccgtgcctgagcctccggatagctggcaaaatcgccatccagaatgcctttcagtgtcttcaggtatgtaaccagctgcaggtattccgcttctgctttcagcacagggaccgtttccgcaataaagcgggtcacgtcttcgcccacatccagaatgaccagattcttctcggcaatgccgctcttcatggtcgaaccggtatggatgcggtaatcgtacatcggttccggaaacacttccacttttgcacagcgggcaatggcccgatacatcaccgcatagtcctcgtacaggatgccaacggggaactgcagatctccccaaacctcccgccggaagaaaacgccgcctgccccatgcccgatgccctgatgcagcagcatccggcgcatggtctcttcccggttcagcagctctgggatctggtgcggattttccgtccgtccctccggctgctctgtcgagaacatctccagcggggtcagggctgcatcagcaccatctgcctcacagcgctccacgaactgggcaagggccgtggagcggatcaggtcatcgctgtccagcaggtaaaaatattttccctgcgtctgttgcaacccaacgttccgggcatcagactgccccccattgggcttatggaacacccggatgcggccatcctccacagccagttcatcacaaagcttcccgctgccatcggtggagccatcgtctaccaaaagcagctcccagttctggtaactctgcgcctgcacgctcttcacacagtcccgcagataagaataaacattatagaccggcacaatgaccgatacaagcggttctctttcctccaaccggatccctccactttacttttttccacgccactgcgttttttcatagacccgtcgggtcatggcatagccgctgtaggaaagcgccgccgccagccgggcctttttgcgggcctgcggatccagcagaacgttccggcggtattttttcacttcctgccagagagccttctctattttttcatgctgcctgtcccggatctggaacaggatattgcagacattgctcagatagcggcattctgccgcacggctcaactgggggaaatcacgctttacgttttccatcagcgcgtgacagtgccgcacactgtccagctttctggggttgaaggccatattttggatactgctgccccgctggaaataatagtaatcccggtttgcgatatgtgccaccttatgggcacgctttgtcacctcgtaggcgaccgggatatcctcatagagcttgcccaccgggtagcgcacaccctcaaacagtgcacgcttatagagcttggtgggggtggtcacctccatgccctcctgatacaggatgcggcacaggcattcctcccggctcaggatctcgaatgcttccagacgctctgtgggcacggactgcaccggctggccctcgaacacctcttcaaaacagctggctgaaaaatccgctcccgcctgctccagtgcccggtacaggttctcgatgtaataaggtgacacccagtcatcgccatccacaaaagagagatattccccctttgctgcgtccacaccagcgttgcgggcatcggacagaccgccatttttcttgtggagcacccgtacccgggcatcctgcgtagcatattcatcacagagggcctcgctgccatcggtggagccgtcgtccaccagcagcagctccatgttctgatagctctgccccaatagactgtccacacagcggttcagatatggcttcacattataaacaggaacgatgatgcttaccaaagggtccatcttatctcctcatttcagcaggtcgaagtaaaacttttccagcttcttcgcctcggtgacgatatcaaagccgcctgcccgcatctcagcagaggtatcccgccgccgggcattttctgcagcccggatcgccgcatccgcccagactgccgggctttcccgcaagctcaggtattgcatctcgggcaggacctgagcctcctgcggcacctctgtggaacagatgaccggcaatgccgccgcttgtgcttcgatcagcacgatcccaagcccctcataccgcgagggcagaacaaaggcatccatggtctgataaaactttgcaggatcgctctggcggcccagaaagcggacattcctttgcagccccagcgcctccgctttccggcgggcagcggcctcgttttccccttctccgatcagcagtaaaacggcatccggccgttgcttgcagacctccgccattacatccagcagaaattcgtgatttttggcatagcagaaccgcccgacatggcccagcaccagttcatcccccaggccaagctcctgccggacggctttccgtttggcggcatcataagtaaagcggtcgagctcaatggcattgttgaacacccggaaaggcttttcaccataaagccagctgcctgccgttctggagcaggcacagagccgggtgggatacactgtggcaaagggacggagcaggtacttcatcacattttttgccccttctcccctgcccaccgtagaatggttatgcgcgatccggttgggcacccctgcacgctttgccccccagagggaaagcacgctcagggtgttcatgtgggagtgaacgatctggtatccgttctgacggaacagccgcccgatctcccgttcatactgcggcaggtgggtatattttggcaccacatacacccggccgcccagccgttcgatctcttcccgctggggcagagtcgagccttccagcgcgaaaaaatcaaactgaactctggaacggtccatgtggcggtagtagttcatcaccaccatctccacaccgccgtagttcatatccgtcatcatctgggccacacggatgggctgtgcattctgctccatggtcataccagctccttgcggtcacaatcctcgaaccagtcccggaagctctcctccagcgtatagtggaacttgtaatcagtggcggccagcttcctgccgcagacattggtggataccatcagcttccggacacgggcgggatggatgcccacctttttgcccccgatgggtcccagaatgcccgccgcaaacagtagcagtccggcgggcaccaacggcacatggcggtgcaggccagtcgccttctgcattgcatcgcaaatttcttcaatggtataggccggctcgtaggtacagttatagatctctgctccggggaaagaatgatccagcatccggtacttgaagaagcgcaccagttccttgacatagatgcacgccttgatggtgtccttccggccggcataaaaaaagtagcccttcttctgccccctgtacaggcgggtcatgttgccgtgctcccctttgccataaacgatgcctggccgcacgatggtcagctcccgggccggatcacgggcctgccagatctggtggatcttttctgccaccagcttgctgattccatacggcgtgttgggagttggcagagtctcctccgtcttaaggtcctcagacgcgccatagggtgcaatggagctggtgaataggatcttccggatgccgtatttttccgcaaatgcggtcacattttccgcgccccggatatttgtttcaaaataggcttcttccgggtggccgggggtgcggtggaccgctgccagatcaaaaatcacgtcctccggggtcggaacaaactcaaaatcgatgggcttgcgcacatccagccggatatactgcaccccatcgttcttttccacaacgcccggcaccacgccctcttccccgggcatcacaagatccaggtcgtagatcacgtcgccgggtctgacgcactccttcagcagcaaatgaatgagatgggttccgataaaaccagatccaccaaaaagaatataattcattttgcccctttccggtcaaacacaacacccaccgtcctgaacagcaggtagatatccatccagatggaccagttgtcgatgtactggacatccagcttgaccacttcttcaaaatcatcaatatcgctgcggccgcttacctgccacaggccggtaatccccggcttcatggaaaggcggcgcttgtgatggctctcgtactgccgatactcatccagcgtgggcgggcgggtacccaccaggctcatggagccccgcacaacgtcaaaaaactgcggcagctcatcgatgctggtgcgacggatgaagcggcccacccgggtgatccgggggtcatcttccatcttgaacatcaggccgttcatttcgttctgggccatcagctcctttttgcgtgcctccgcgtccacatacatgctgcgcagcttgtggatgtagaacacacgtccattccgacccacccggcgctgcttgaagatcagcgggccggggctttccagtttgagcgggatggccaccaacgcaatgatggggatgctgatgatgcaccccacgatgccgcccacgatatccatggtccgtttcagcacctgatcccgcagcttgagttccaccgtgcccatcgtcacaacattgccgcccgcacagcggctcagttcccggctgatgcgcactgcactggtctcatcacagcaggctttttcgatccggtccagcaccggcaggcggaaatggaccgtcagccccatgctctccatctcctcgagatagggcagcatgttctcctcactctcctgcgccacatccagatacacttcatccagcgctgcctgccgcagccagtccatgaaattatcgaagtttgcctcgatcttcaccccatcgatctcagtgtgaagctgctccggggcagcttccagaatggcaagaccggtcacacgcttggaccagtcctttttcagctcttccagaacagggcttgcgttctcctgcgtggtcaccactcccacaaggctctgaatccccttggtatagcgggagcgtaccagcatctttttgaggacagcatgagcgcccgtcatcacaaagacatcgatgacgggcacaaacaccagaaaatagcgggagtgcagcatgggagccttggtcagcgccagacaggccgcatcaatgagagtcagcaaaaaattgaaccgcaccgcaatttcaacttcacgaatcggagtgcggttcacgatattttcactctgatcaaatgtaaaaaaggtcaggatataggccagcagcaataagaaacaggcttctaccagatcgtccagctggaagtcccccattttgtgcagaacacctgcggtcagcccccacgccagcccaatgctgagaaccagagagagcagatcaatcagaaacaggtatccatactgcagtttttcacgtttcgtaatcatactgtttcgttgtctccatttatttttaccattttatcatatcgggagaagggttgcaatagatggagatcgaatgcgtgctgcttttgtcggatcaccacaaatgtgttgtgccattttacaaaagcgccttatcgcgcccaaaatggtcagcaaaaagcgccctttctctcgcatcacacaagagaaagggcgcagtcaagctttattcagctcaggagaaactccaatcagcagttctcagcgaagtacttaatggtgcggaccatctgagaagtgtaggagttctcgttgtcgtaccaggacacgacctgaacctgatatgtgtcatcgtagctgcgctaatttttgcgcttttccaagtagttcttcacagtttcgtaacaacagttacagtaccagaacataccgttgtcgtaccaaaaccggtttgttcgtaccaaaattatatcacgtttcagcgtcatttgcaaggatttgattcgtttcgcttctgacctgcatttttcagatttcagcgtatatttttacgacattccacggttcaaacgccttgggtctagggcttccgccggggcagcagctctcccaagcactctcctcagaagctctatgacagctagattgcaaacatgttcctgctgattaactgaaatttctccggacgtgattttgagccatggtgcgggaaatatagtcatttatgttcgatatagaataattctattcattccgagtcacaccaattactatttatataagtataagaaaaccgcgtgaactgccagagctataactctacgctccgactgatccacacggctctaaaatatttatttcagcttttcgagaatctcatctgccgtcataccggatgccagcagctttttcagcacagcttcggcttcggctttctttgcggattccgctgctttggtttcagctttgacctttttagcttcaattctggcgatttctttgtcgatagttttcatctcggctttcttggttttcaggtctgctttcagagtgtcaatattcgcagcgatcgatgcaatttcggcggcagcggcctcctttgcagactgcttttcagtgatctgtgcggcaaagtcaacggttgcttttacggtcttgggcttgttcttgctacctttgggacggggcataggggacacctccattcagtatttataacataagtatagcattacaaatattggatggcaagaaatatatatcggcataacttgcgttagacggcgtaacccttgcccttgatggcctccacgacctgagagacatacttctgacaggtaacatggtcaggggcttccaccatcacgcgcaccagaggctccgtaccagactcgcgcaccagaatacgaccagtgttaccaagtgcttcagcacagccttgactgctgcctgcactgcctcatcatcctgtgcggctttcttatcggtcactcgaacattttccagaacttgcgggtagatcttcagcggggcggccagcacactcagaggcttcttcttggccagcatgacctccatcatcttcaggctggtcaggatgccgtcaccggtgctgg

SEQ ID NO: 128 - DNA, 10189 bp, unidentified
  source 1..10189: mol_type = unassigned DNA
tgctttctgccgctcaaaagaagcggcatgacacttacgaaaaaatcaaaagttctggctatgatattcatacaactgcgccgtggctccagaatttttatatccaaaagcataatgagggattaaagaaagaatgaaagttggaattttaacgcattataatgtgtccagtcatggtgcactgcttcaaatgtatgggttaaaaaaagcacttgaggagtttggacatgaagtttttatactaacatacacaagaaatcttgactttattgatgaggcaacaaaaaaacgattcagtgcaagtattaagaatataccatactatctatcttcctatatgggagaagatggacttggatgtctcttttaccagtttaagaagcagcaggtgctcaaaaagttccgtgaggacaatttcaagatgctgccctatacagaatcagcacagttggactgtgtaattgtaggcgcagatgaggtgttttcgctggaaaatggcgttaattttgtgatgtttggccatggcatcacgtcgcctaggcttgtggcatatgcgcccagtgctggacaaacagaccttgcccgcgtggagaaatttggctgcaaggagcttctggcttccggttttggaaaattcacggcactttctgcgcgtgatgtaggaacacagcagttgctccacgagcttaccggcaaggatgctccgattgtatgcgacccggctctgctgtatccttttccacatcctgttaaggagaagaagaagtacatcgttgtttattcctaccagtccaatttcaaggataaggcgaggaatcgtgcaatccgggcatacgcaaagaaaaatggatgtgagatttggtctgttggcgtttactacaaatggtgcgataagaagatcaactgtgacccgcttgagatgatccgcatttttgcaaatgcacaggcggtgattacagacacgttccatggcactatcacatcctacattgcacatacgccgatggctgtttttgtgcgcagcaacaacagtgttaaactggagcatctgctacagatgattggcattgaaaacagaaaggtgacgaccagtgaaatgttggaagccgttctcaatacgccggtggattttgatagactggacaggaatgtagaagttttgcgtagcaacggaataaagtatcttgagcagtctcttatggagcgggaaggaaacagatgaaactattatatattgcattcaaggatttttcaaacctccactttggagcaaacgccaaagtgctgtctcagtgcagagcatttgaggagtatggctatgaagtggaattggtcgggagaaaaggggtggacactgtagtaatcagccccagcggggaatcttcggttatttttcgcggtgatagcatactaaaaaatccaaagttgaggaatctacgggcaaaacacaaccagatgaaagcagtgtgcaggcatatcgcagaaaaacaatatgatgcttgctacattcgttatgatttttctgatgctgcattcatcaaaatgctgcgatgcatcgatcagcactgcggaaaagtggcattggaacttccaacatatccctatgaggcagaaaacagtatcggggtgttgaataagatcaaaatgcagatcgacctttactatcgcaaagagctgaagaagtatattgattttatcgtcacattctacgaagggcataaggagctgtttggtattccggtcgaggtgatcccaaacgggtttgacttttccacgatggaaatggttcacaccaagctgcctgaggacgcaatccacatcattgcagtttcgtctatgcgtgaatggcatggatatgagcgtatgattgagggtttgcataactactacgaaaaaaacggaagcgaaaactttattctacatttggtcggtaatggccgtgaatacggaaaatacaaagagcttgccgaaaagtacgggctccagtctcatgtggtcatggaaggcgcaatgcacggcgaaaagctggatgctctgtatgaaaagtgtgcgctgggtgtcgattcgctggcgcggcatcgcagcggtattagcgtccttagctctttgaaaagtcgggaatatggggccaagggaatccctattattaactcctgtaaaattgatattatagacaatggctttccgtatcttttgcaggttccagcagacgaaagcccaatcgacatggagaaggtgtcagagttttttaaagcatgctacaaaacaggaaaaacacgcgaagaagttgccagtaatatccgtgattacatttcacataagagcagtatgaaggcaacgctgtattctgtggtgaataaattggaatgcagggaaaaataaattattcagatagaggggaaacaatgaaacttataaaacataattttatctttctttgtgttgagatacttctccttatctctgtactttatgttccaactcaaattatgccgcaggcgtgtattatcgttgcagatgtttttgttgtgctgacaatgttcaagattatcagggatggcttcaaggatattccggtattcttttttaacatcacatactggatctttgtgctgagcggatgtacgacatcgataattaaaacaggcaaagtgtcaaattatatttcggtctccttgacagaagggcaattgaatttagcctgcggaatagcgttatttggaatagcctgtttggacattgtctattttttagtcagtgataataattttgcccctttggtagcggagaaaaagactgccgtcccttccaagttgcaaaaacaagttgtggtagtcatctttgcagtagcagcggtgtgtaaatgcgcaatggcatttgagtcgatgacatattcgactgtgtacggatatgtttctttgtatacacgtgaatcctctaatctcccgagtgttatccgatattttggtgcatttttttacttttcccttatgttgttgctgtcctgtgatttttccaagagatcgacttacgctgcctttggaataacagcattgattgaaggaatgatcttaaattcgggcgacagaggcgaagcagtctgcggaattcttatccttataatctatactattttcaggtgcaggagagatccgaattttttgattcataaaaaattagcggttgttgggatttgctgttcacttccttttgcggcatttgttctacagattatcaagtatacgcgcgttggaaatgctgcagatatcagtttttgggacggtttttttgaattctttgagtcgcagggcgtttcaatcaacatcatttcaaatgaaataaagtaccgtaatgagatttcccaaattggcaggcatgcgtttgttatcaagcagattgtctcttacttgcagcagaatgtcttgttccgtactctttttgggttcaaaaaaatagtcggcaatacggttgaaatggcgatgagcggatcgtctcttggttcgacaataatgtatatcattttgccgagcagttaccttcgaggaattggatgtggcacttgttatttagcggagctttatcaagacgcatcttggatagggctcattttgggcagcgttgctatagcactcctcttgaactggatcaaaaaagttgatcgagtgggttggattatgtctgcaatgatgatgaattgtatgcgcattgttcttgtgttgcccagaggagcttttttcaaatggttgaccgaaattctgtcggttccgaatttaatgctgcttttgctgctactctttttggggtatgtatctgaaagaaaggagattgtggtatgaagcgggcaatgattctatttgcgaaaggatttccgtataatgttagtgagccgtttttggaaaaggaataccccaaatatggaacatattttgatcatgtattggtggtaactggctgcaaaaaaggagaaaaaccgacaagacaggtcgaagatgatacactggaatttatcaatgactacacattgagcggggatgtgtgttcgatacttcaggctgttcctctgatgttgagcgaccggatgttctaccatgagattgctcagctcgtcagggaaaaacggtttacctttggtcgactccgacagctattttcggtttccctgtgcggaaaccatagagcacttcaggcacggaagtggatgcgctgccacccggaatatcaagtggatgtgatatacagctattggctccagatcacagcatatgcggcagtccgcctgaagcagctcgaaaaactggatgatgcattttccatttcgagaacacatagatttgacctgtatgcggagcgaatcaagtcgaactatctgccttttcaggggcagttagtcgaacggcttgacgaaatagcatctatttcgctggatggcaaacagtatctcgaaagcaagtatggtacaaaccataatatctccatctgtcatctgggagcacaggacaggggaataaccaatccggcatctgcccggaacacgctgcgcatcgtgtcatgcgcacgagcagtccctatcaagagacttgacaggatcgcggaagccctaaagaagatcaaggatattcccatcgagtggacacatatcggaggaggagagtgcctcgattctatccgggaggctgcctgcgggctgccggataatatccatgtaaagtttacaggaactgtttcaaacgatgaagtctatcagatctactcggtcgagccgttccatgtgttcataaatgtcagcaagtcggagggtgttcccgtctctattatggaagccatgagcttttccattcctgtgattgcaacagcagttggaggaacagcagagttggtcgatgaagggaaaaacgggttcctgctggatgagaattttcgtacggaagaactcgttgctttgctctacagattttataaaatgccggaagaagagtatgtaaggtacagaatggatgccagaagcaagttcaaggctcagtatgatgcagaacataattatgccgagtttgtcaaagggctggcagaaaagacgggaaaaaagatatgattaaaatagccaccatcacaacacaaggcgcactgaattatggtgcagtcttgcaggcgtatgcgctgagtacatatttgaacggggcggggtatcactgcgagatactggattatcgtccgaactatgtgaaagagtcttaccgactcataaaagcaccgcacagtccttcgggggtgctgctggcgggtttccaggcactgcattatcaggaaagaaaaatgcggaagcagcgttttgagcagttccaaaaagaatatctgcgcactacatacgaaaaagcgacccagcgagaagaacttactgctctggcaaacgagttcgatctgctgatttgcggaagtgaccagatctggaacccgaagttgcatcatttcgatgaggcttatttcttatcatatcccgaaataaccgtaaagcggatggcgtatgcggcaagctttggacaggattctctggatgatgacagtaaaaaagagatcgcaagaaggattgccaggatcgagcgctttggctgccgggagttcagcgcaaaaaaaatcgtggaagaactgagcggcagagatgcagaaatggtgcttgaccccgtttttctcctttcggcagaaacatggcgcagcgttaagaaagcgtttgatcacaaggacgaaaactatatcttgggttatttcttgtcaaacccagggcattccatcaaagcagcatgcagttatgcgcacagcgcaggtcgtaagctgtattctatcggcttttctccgcgggatgtcggcaatgatgcagtcaattgctacgacctcggcccgcaggaatttttgtctgcggtcgatgatgctgaaatggtcgtgacaaattccttccacgccaccgcattttccattatttttcataagcagttctttacccgcataagcagtggtgcggactctcgaaatgaccggatgctgtctctgttgaagcagcttggtctggaagaccggatcttcacggatgaaactgcggaaataattgactttacccgccaaattgactatgaagaagtagaaaaaaaattaaatgaattgattgctcactcggaagcgttcctgaacagttctatcgaagagataacggttcagggtgaaaaaaaatctcgcatcacgcacgctccctgcacagcatgtggtgcctgtgcgtccagttgtcccgtcggctgcattgagatccggaaaaacagcgagggctattatatgccttttgttgatgaagcacgatgcatcgactgcggtgcctgctcgcgcgtgtgtccggcaacccaacatctcccaggaaaggactggaaagagggaacctactacgcaatgtgggctaaaaaccctgcagagaggcagacgggttcctctggagggattttcggactgctggcagatgagatgctgaagcaaaacggtgtcgtattcggtaccgcgttttcagacgactataagtcggtttatgtaacaagtacggaacaggtctcgctggaagctctgaaaaaatcaaagtatgttgaaggaaagaccggaaccgtattcaaagacgtaaaaagatgtctggaacaggggaaacatgtcctgtattgtggaacgtcctgccaaatcgacggattgaagaactatcttaaaaagccttacccgaaccttgtgacctgtgattttctgtgtcacggtgtctcagcagccggactctacgagaaatatatttctgaccttgagcgggcgtatggaaagataagaggactgtctttccgttccaagtattacggctggaagtcctattgcatcgttgcggagattgaaaatggcagacagtatgtcaggacaagatttcaggatccgtatctgcggatgttctttgaaaatgtcggtctgagagagaactgctttacctgccacagactggagcacagcaatgctgatattacgatcggtgactattggggcgtcaaaaactctccggagataccggataccaacgagggtatctctttgatcggggtgcacacagagatcgggcaggaaatggtgtcgtctatccggaaaaactgcgaagcgttcccgcttgaacagagcaagtacgaatacgcctataagcggcacccatactccatgacaaatcaaaagacccgactgaggaaactttatcagaccgaaagtctgttcgcgctccccgtgacaaaaaaggtcgctttgaaaggtatgatatacaggctgcgtgcccagatgcaaagggctaagatcaaacagaacagaggaaaacgataatgggcaaaacaaggggaagtcaatccttcatcaagaacttttttgtgctgggatttggctcttttatctatctggtcattggcctgattggaacaccggtcataacaagactggtagaccccgcagaatatggctatatgtccatgttcacggtgtatagcaatatcgggctgatgttctgcgggcttggactcgatcagacgttggttcgctatttttaccacagagatgatctggactataagcgtatgatactgtttgaatgcatgagtgcgcctatgatcctgtgtgccgtcttaggtctgttgatccttccggctgccctttttaccaatacgatgggctggacgagccaaccaatctcagagctggtgctgttggagatcaatgtttttgttctggtggtacatcgctacgctatccttttgctgcgtctccggtatcatacaaaacagtattcaacgatcaatatcatccagaaagcgacctatcttatcattgcagttgctctggtcgtgtggttgagggactattacttttacatccttgcggtctccacgatcctgagcaccttgatcgcaacagtatgcgctttgctgttggaaaaggaagtgtgggacttccgcgctctgtccagggaaaactggatcccgcaaaaggaactgctgtcctatagcatccccattatgttttcaagcggtatcacgatgattttcaacgccttggacaagctgttcctgaaccatttctgcaccttgacggatgtgggcgtgtacaccagtgcaatgaatctgatggctgtttttacgattgtaagaacaacgttcaatgccctgtggatgccaactgcagtagaacattacgagaagaaaccggatgataaagcgttttatcaaagaggaaatgcctttattgtcgtgttgatgatctcgtttggtgccggggtgatcctttgcaaggacttatttgtaatgctgctgggaaataagtatcaggaagcggcgcagatcattccgtttttgatgtttgagccgatcatgtacacgatatcggagacaacagccacaggcatcgttgttcaaaagaaatcgaaatatcagatgttgatcgcaggcgtttcctgcatcacaaacttcttcggcaactggcttctgactccacttatgggagcgcgtggagcagcattgtccacgggtgtttcttatatcgtgtttttcgctatgcgaacggtgcttgcaaataaggtgttttatgttgactaccatctgaaaaactttatgctggtctcactcacattgctcttattcgcatattacggaagcacgcactttttctctctgatccaggttctgatgtgcgcgggcgtacttttggtcacactgttttgctaccgtcagtatctgtctgatgcagtaagttatgctggaagtatgctgaaagtcattcaaaataaaagaaaataaccgttggaggaaaagaatatgaaaattgcagtcgcaggtaccggttacgtcggcctgtccattgccacgctgctgtcgcagcatcatgaggtcatggcagtggatattatccaagaaaaggttgacctcattaaccagaggaagtctccgatccaggacgagtacattgagaagtatctggcagagaaggacttgaacctgacagcaacacttgatgctgaagctgcctacaaggatgcggactttgtggtcatcgcagcacctaccaactatgacagcaagaagaacttttttgacacttctgcagtggaagccgtaatcaagctggtcatccagtataatcctgatgcaatcatggttataaagtccacgattccggtgggcttcacggcatctgtgcgtgaaaagtaccactgcgacaacatcattttcagcccggagttcctgcgggaatccaaggctctgtacgacaacctctaccccagccgcatcattgtgggcaccgatgtggacaatgctcgcttggtaaaagcagccaacacctttgcaggcctgttgcaggaaggcgccatcaaggaaaacatcgacactctgatcatgggcttcacggaagccgaggctgttaagctgtttgctaacacttatctggctctgcgtgtgtcttacttcaacgaactggatacttacgctgaaatgaagggtctgaacacccagcagattatcgaaggtgtctgcctggatccccgcattggcagccattacaataatcccagcttcggctatggcggctactgcctgccgaaagatacgaagcagcttcttgccaactatgctgacgttccggaaaatctgattgaagctattgtcgagtccaaccgtacccgcaaggacttcattgctgaccgtgtgcttcaaatggcaggatactatgggtatggcgaggacaacgagtatgataaggcacaggagaagccttgtgtaattggtgtataccgcctgaccatgaaatctaactctgataactttcgccagagttctattcagggcgttatgaagcgtatcaaggctaaaggcgcgacagtcattatttacgagccgactctggagaatggttctaccttcttcggcagcgaagttgtgaatgaccttgaagaattcaaaaaccgcagccaagccatcattgccaaccgctatgatagctgtttggatgatgtgcaggataaggtctacacccgcgacttgttccgcagagactaatactcattgcagccatgtgttcagccacatggctgtgctactcaagtgtgctacctctccgtggtgagcagcaggcaacggataattatccggctaaaggc

SEQ ID NO: 129 - DNA, 5994 bp, unidentified
  source 1..5994: mol_type = unassigned DNA
  misc_difference 1582: note = a, c, g, or t
  misc_difference 1583: note = a, c, g, or t
  misc_difference 1584: note = a, c, g, or t
  misc_difference 1585: note = a, c, g, or t
  misc_difference 1586: note = a, c, g, or t
  misc_difference 1587: note = a, c, g, or t
  misc_difference 1588: note = a, c, g, or t
  misc_difference 1589: note = a, c, g, or t
  misc_difference 1590: note = a, c, g, or t
  misc_difference 1591: note = a, c, g, or t
  misc_difference 1592: note = a, c, g, or t
  misc_difference 1593: note = a, c, g, or t
  misc_difference 1594: note = a, c, g, or t
  misc_difference 1595: note = a, c, g, or t
  misc_difference 1596: note = a, c, g, or t
  misc_difference 1597: note = a, c, g, or t
  misc_difference 1598: note = a, c, g, or t
  misc_difference 1599: note = a, c, g, or t
  misc_difference 1600: note = a, c, g, or t
  misc_difference 1601: note = a, c, g, or t
  misc_difference 1602: note = a, c, g, or t
  misc_difference 1603: note = a, c, g, or t
  misc_difference 1604: note = a, c, g, or t
  misc_difference 1605: note = a, c, g, or t
  misc_difference 1606: note = a, c, g, or t
  misc_difference 1607: note = a, c, g, or t
  misc_difference 1608: note = a, c, g, or t
  misc_difference 1609: note = a, c, g, or t
  misc_difference 1610: note = a, c, g, or t
  misc_difference 1611: note = a, c, g, or t
  misc_difference 1612: note = a, c, g, or t
  misc_difference 1613: note = a, c, g, or t
  misc_difference 1614: note = a, c, g, or t
  misc_difference 1615: note = a, c, g, or t
  misc_difference 1616: note = a, c, g, or t
  misc_difference 1617: note = a, c, g, or t
  misc_difference 1618: note = a, c, g, or t
  misc_difference 1619: note = a, c, g, or t
  misc_difference 1620: note = a, c, g, or t
  misc_difference 1621: note = a, c, g, or t
  misc_difference 1622: note = a, c, g, or t
  misc_difference 1623: note = a, c, g, or t
  misc_difference 1624: note = a, c, g, or t
  misc_difference 1625: note = a, c, g, or t
  misc_difference 1626: note = a, c, g, or t
  misc_difference 1627: note = a, c, g, or t
  misc_difference 1628: note = a, c, g, or t
  misc_difference 1629: note = a, c, g, or t
  misc_difference 1630: note = a, c, g, or t
  misc_difference 1631: note = a, c, g, or t
  misc_difference 1632: note = a, c, g, or t
  misc_difference 1633: note = a, c, g, or t
  misc_difference 1634: note = a, c, g, or t
  misc_difference 1635: note = a, c, g, or t
  misc_difference 1636: note = a, c, g, or t
  misc_difference 1637: note = a, c, g, or t
  misc_difference 1638: note = a, c, g, or t
  misc_difference 1639: note = a, c, g, or t
  misc_difference 1640: note = a, c, g, or t
  misc_difference 1641: note = a, c, g, or t
  misc_difference 1642: note = a, c, g, or t
  misc_difference 1643: note = a, c, g, or t
  misc_difference 1644: note = a, c, g, or t
  misc_difference 1645: note = a, c, g, or t
  misc_difference 1646: note = a, c, g, or t
  misc_difference 1647: note = a, c, g, or t
  misc_difference 1648: note = a, c, g, or t
  misc_difference 1649: note = a, c, g, or t
  misc_difference 1650: note = a, c, g, or t
  misc_difference 1651: note = a, c, g, or t
  misc_difference 1652: note = a, c, g, or t
  misc_difference 1653: note = a, c, g, or t
  misc_difference 1654: note = a, c, g, or t
  misc_difference 1655: note = a, c, g, or t
  misc_difference 1656: note = a, c, g, or t
  misc_difference 1657: note = a, c, g, or t
  misc_difference 1658: note = a, c, g, or t
  misc_difference 1659: note = a, c, g, or t
  misc_difference 1660: note = a, c, g, or t
  misc_difference 1661: note = a, c, g, or t
  misc_difference 1662: note = a, c, g, or t
  misc_difference 1663: note = a, c, g, or t
  misc_difference 1664: note = a, c, g, or t
  misc_difference 1665: note = a, c, g, or t
  misc_difference 1666: note = a, c, g, or t
  misc_difference 1667: note = a, c, g, or t
  misc_difference 1668: note = a, c, g, or t
  misc_difference 1669: note = a, c, g, or t
  misc_difference 1670: note = a, c, g, or t
  misc_difference 1671: note = a, c, g, or t
  misc_difference 1672: note = a, c, g, or t
  misc_difference 1673: note = a, c, g, or t
  misc_difference 1674: note = a, c, g, or t
  misc_difference 1675: note = a, c, g, or t
  misc_difference 1676: note = a, c, g, or t
  misc_difference 1677: note = a, c, g, or t
  misc_difference 1678: note = a, c, g, or t
  misc_difference 1679: note = a, c, g, or t
  misc_difference 1680: note = a, c, g, or t
  misc_difference 1681: note = a, c, g, or t
gtgtcgacttatattgaccagcgtgtacgggtaagtgcatttaaggccgaacaaactctaaccaaagatacggttccggtaaatgtggatgcagtcgtatattggaccgtctgggacgtggaaaaagctgcattggaagtacaggagtaccaaaaagcgatcgaacatatcacacagactggtctaagagataccatcggtaagcacgaactgtcggatctcttgcaggaacgcgataagatagctgaggatttgcaacaggtcttagacagaaatacgaatccgtggggcatcacatgccagactgtcggtatcaaagatatcgctattccgcaagacctggccgaagcaatgagcaaagaggcccaagccgaacgtgaaagaagagctcgtgtcatcttgggaacggcagaaacggaaatcgcagaaaagttcgaacaagccagtaaaaaatataccgataatcctgtggcattacatctcagagggatgaatatgctgttcgaaggcttaaaagaaaaaggatcaatggttatcgtaccgagttcggcactcgacaccatgaacttaggggctatgggaggcttggtttcattggctaagaacaacgagacaccgaaataaactattttctaataacaaaaaattaccatttatgaaaatacacaaacaagggattacttttgttctccttctattagtcttcacaagttgttcacgaaaaccatcgctgcaatggattcccttcagttgggaaggtgatacaatttcggggatatacattgaaaaagcttttctaaatgttccggtaaaaatagagaatttaccctacgaattcacaatgcagtttgatttaggaacatataattctgtcttttacgggaatacttttgctccttatctcaaagaagccccatctttaatgaacaaaaaagattcaaccgggatgtataagaatgtcaacctgcaaatagggacagtggagtttagcaatgccaatatcggattcatgcagaatttcggaaatgaaatccctaaagattcacttcattcaaatacacccaagcatattggaacgatcgcatccgacatggtgcaagataaagtcttaatcattaattacaaatcaaacaagcttgcaatcacagactttttaccggctgaatacgaaaatctgccggctgaagaatttgaatcagaatatggggtaataaaattgcctttacggattaatggaaaaacatgtaaagtattgttcgatacaggttcaagccctttccagttaataacgacacaagaaagagcttggagcgtatcagaccttactattgtcgactctctaagcggtcctttatggtggggacaagaaataacattttatggctttaatgtaaccaaaccgatcgagttcggcggaaaagccttgaacaattcgaaagtctactacgccaaagacggcctttgggatagtatttatagttccctcgatgtctggggaataaccggaaatgcttatttctttgaaaacaccgtgattatcgattacaaaaacaaactattcaggataaaataaaaattcgannnnnnnnnnnnnnnnnnnnnnnnnnnnnnnnnnnnnnnnnnnnnnnnnnnnnnnnnnnnnnnnnnnnnnnnnnnnnnnnnnnnnnnnnnnnnnnnnnnncgacaacgtcgaaaacaacttacacttgcatcaaaacaaaaacacattgccatcttacatcaaacctttgccagagcttggtctaggtcatcaatgatatcatcgatatattcagtacctatactcaggcgcacaatggaaggcgtgatatgctgtccggccagctcttccggagtcatttgagaatgggtagtcgtatacggatggatcaccaggctcttcacatcagccacattggcaagaagggagaatatttcgagcgaatcgataaacttccaggctgctacctgtccgccttcaatctcgaaagtgaaaatacttccggcacctttcgggaaatactttttataaagttcatggtctggatggtctggaagagccggatggttcactttggttactttcgggtgtttggataaatactcgacgactttcagagcattggcaacatgacgctccacgcggagagacaatgtttccagaccttgcagcaagataaaagcattgaaaggcgagatcgtagctcctgtatcacgcagaatgacagcccggatgcgggtgacgaaagctgccgaacctgccacgtcggcaaagaccgctccatgataacttgggtccggtgtgcccaaggtcgggaacttatcggaatttgctttccaatcgaaattgccactgtccacaatcactcctcccaagctcgatccatgtccgccgataaatttggtggcggaatgaacaacaatatcggccccgtgctcgatcggacggatcaggtacggtgtaccgaacgtattatccactatcaacggaatattatgacgatgggccacctccgccacagcatcgatattggtaacatcagaattgggattaccgaacgtttcgacatacaccgctttcgtattctcccgaatagccgcctccaacgcctgcaagtcattgacatttacaatcgtgtgggtaatgccctgagccgctaacgtatgcgtaatcaggttgaaggaaccgccatagagattatcggcagccacaatatggtcgcccactccaagtatattctgcaaggcatatgtcacggccgccgcaccggaagccaccgccagaccagccactcccccttcgagagcagcgacacgcgcttcgaaaactccctgtgtcgaattggtcagacgaccataaatattcccagcatcacgaaggccgaaacggtctgccgcatgttgtgaatcatgaaatacataagatgttgtctgataaatagggacggcacgagcatctgttgcgggatcggcctgttcttgccctacatgaacctgtaatgtctcgaaatgtaatttctttgttgccatagtcgtattattttaaattgttcttcttgctcattttccagcaaaactatagcagacagagatatcagacaagatatatggaaaatacagaaaataacgctatttttacggtcgtcaacagaacgcataaactgtatcaggatcgaaaaaaggattctgatagaattttattcttatgaacacacttgagaaattagacaaagtagacttgcagatcctccgtaccctgcaatcgaatgcccggctcaccacaaaagagctcgccgcgagtgtcagcctctcgtcgacacccgtattcgaacgcctgaaacgcctcgaaaacggaggatatataaagaagtacattgccgtgctggacgccgaaaagctaaaccagggcttcgtggtcttttgcagtgtcaagttgaggagactgaacaaagagattgcggcagagttcacaagaatcatacaggaaattccgcaagtcacagaatgctacaatatatcgggaagttacgactacctgctgaagatccatgcaccgaatatgaagtattaccaggagtttatcttgaacgtgttaggcacgatcgacagcctcggatcgctcgaaagcacctttgtgatggacgaggtaaagcatgaatacggaatccatatttaaacgccgccccgtccctatcttacatttattacttcaatgcataaatccgctggatgatgtccacaaccttcatgccttccaatacgttggtcgtaatacattccgaacttgcaccagaaaggacacggaccacattgcggatcacgaaattatggttctgggcggaacctttataagggccgtagtcatttcccggattcgtcggcgccagttccggcatttcataatctttgatatggcagtattcgacttcgttcatatactgtccgccgattttcacgcttccgttctccgcaacaatcagcatactgctttccatgttcctgttccagacagaagtggaatagctcaggctccccatcccgccgttcacgaagttgaaattcacaaagcccgaatcttcaaaagccgtaagtccggcatggttgaaatcggcaaagcgagcctggatattgcagatatccccgaaaagccagtacataatgtcgatgaaatgggagaactgggtaaaaagcgtccctccgtccaaaacggcatcgccatgccagccaccgggtttataatagcgctcgtcacggttccaataacaattcaactggaccatatagattttgcctaacctacccgaatccaccatctccttgatccagacggaaggaggagaataacggttttgcatgacgcagaacacctgtttacggtatttcagcgaagcatagaccaccttctcggcatcggcaagcgtcagtgccatcggcttctcgatcacgacgttgcaaccggtttcgacagcctgaatggccattgctgcatgcaagccgttcggggtacaaacatttacgacatctatggaaattccgctctgcaatagctccgtcagggaagagaaaaacgggacatcgtatgcctcaatacccaattcctcacgaggacgaatatcacaaagggccaccaattcggctcccggatcgcgtgtcaccatctcggcatgacgtttgccgatatggccacaaccgataactgcaaattttatctttttatccataagcattcgatgggggtgtgtcaaaatctccttgtccccgcgcttgacgcggagccgcaaaaggacagaccttatcaatcagatttttatagggtcggttttaatgctatcccgcgtcaagtgcgggaacaggatagtttcgacacacccccttttttagagtttctgttatatattgctgttgtccgagggacatttccgtatgaataggcagggaaaggacggattcgcacaaacgggtggagacgtccaaattaccagatacacgggagatatgccggtaagcttcctgatgatgcactggtacaggataatagatcatggaagggattccctgttctttcaacaggcattgaaggacattccgcctgccatcttttacctggaccgtatattggtgatagacatgagtcgaaaatatcgatctcgcagggagaaccaacgaatcgcaggaggacaaagcttcatcgtaccgagaggcaacttgccgacgggtttccgtgaactcctccagatgcttcaacttcacatccagcacagcagcttgcaacgtgtccagacgggagttgcatccgatccgcctatggtggtatttgcattcctggccatgattggcaatcatgcggatacgggtagccaacgcctcgtcggaagtcatcaacgcccccccatcgccatagcaggctaacggcttggatggaaaaaaagatgtcgtcccgatatgtccgatcgtcccggcctttcgtacccgcccgtcggaaaagatataatcggcaccaacggattgggcgttatcttccactacatacagatgatagacatctgccaaagtcataatcggctccatatcgcaggcttgtccgaacaggtggacggccacgaccgcctttgtccgttccgaaacagccgcttctattttccggggatcgatattaaaggtacagggatcgacatccaccaacacgggcgtcaaccctaacaaagcgacaacctcggctgccgctatataagtaaatgccggtagaatcacctcatcgccaggctgaagctccaatgccatcagagcaatctgcaaagcgtccgtcccgttagcacaaggaatcacgtatggaacctgaagataatcagccaaatgcccggcaaaggttttcacctgcggaccattgataaaagcacaactgtcgatcaccacctgcatggcctcatcaatctcctctttgaaccggagatattgtccatgcaagtcgaccatctgtatctgttcttccaacat

SEQ ID NO: 130 - DNA, 6211 bp, unidentified
  source 1..6211: mol_type = unassigned DNA
ctactcatcctcatgctcttcccagaaagaaggatcttcctttaaagaaaccctgttctgttccaccgcttctaaatagagcgacagccgcacatactgctcccggatgtcacgctctgccccatagtccaccgcctccgcaaactgctttaacaataccctgatattttcgcggacaactccgctgctctcctcaaacagacgctttgcgcgctccacaagcagccggtttctctccctgcccgccggataaagcgctgtctgattcattttttcaatgcacttgtctaattcttcccctgacatccggatattcttattgagtatgacctttcgaacctcattcgtggcacttttaatatggatatccaaaatcccgttgatatcatataaaaaagtcaccaaaaccccagtctctctcgccggagcttccggcaggtccgtaatatcaagttccccaagcaaaagattctcttttgcgttcaaatgttctccctgataaattttaaaatgcattgtcgtctggttgtccgctgtcgtcacataataacgcgatctgctgcacgggagcgaatcattccgttcaatgatcgtcgaaaatgttccatcatagatttctgttcccaaagaaaacggacagatatcggcaaggatcatgtctttccattccacagaccgctccttgatcgccacagtcagacctaccccgatggcaacacattcatccggcctgtcatccatcacaacttctgtttcagaaatactttccacataacgcctgacgaccggcatcttagaggatccacccgcaagaatgatgcggtcaatatcctcccattgcataccggcatcatccatcaccctctttaacgggacagacatcctctgaaacaatcctgccgctatcctgatcagcttctgattgtcaagccgcatcacatattctttttctccgagcagaacggttctttctgccgtatcctcttttgagagctgcttctttaaaagttctgcctcccgcaaaacgatcccgtgttccttttcgcccagagaagacggatcaatcccacagtttttcagaaaatcctccgctatgacctcattaaaatccttaccgcccagatggttatcgcccgcaaccgcccggatctcgaccatattgtcaaacgcttccaccaaagacacgtctaatgttccacctccaaaatcaaagataatgaaagtctccatctccttttcccgcacctgatggcgcagggcaaccgcagacggctcattgacgatccgttccacataaagtcctgccagttttccggcatttttcgttgcgtaacgcctgtcgtcatcaaaatatgctgggacactgatgaccgcctcggtaaccggctcaccgagaaacttctccgcatcctcttttaattttttcaggacaaacgcagacagttcctctgcccggtactcctgcccgcatgcccgaaaaatccgatccgtccccatatcgcgcttgaactccgcaaaagtctgctttggtcttgtgatctgcatttcctttgcgatctttccgacatagacctccccctgatctccaaaactcacaacggacggcgtcaggtaatcaccgttcggatttggcaccagttcgatctttccgtccctgcataccgcacagagactgttggtcgtgccaagatcaatccctatcactgccatctgctatctcctttcgccgctttttaccgctgtctgattccgctttatcatcacatggtcaagatacatctgtaaaaaactctcatatccggcatactgcttacttaccgcaaacagtttctttccctttttcccataaaatgtgactctctcaaaaaattctttttttgacacgacctcatcccacgtaaagatcctgcacctgcccagtgttcccgtttttgttccaattttgtgcgcgcctgccgccacctcggtcagtgtacttttccgcacccagcacaaaaataaaataagcgccagcgtcataacaagcaccggaagatcttttatgatctcctgcatccctgccttatgataatccgaaacacacaatacaatatcacagaccagcatgacaccgacgatcccgtacaaaaacatcatcatctgcgccagaaacgggtttggttcaacgatacagaaaatatcttccccaagccttgctttccatttttttatttttttgtagattttgtttttcatcccaattccctccccctgcgttccattgtagcatatcatatttgtaaaagatacctgtttttgacaataaaaaaattgccaatataccatctgacatactgacaacttccgggttgggctgtttatctctttcgaaataacagtgagtagctcgtaggggaatcgaacccctgtttccgccgtgagagggcggcgtcttaaccgcttgaccaacgggccataagtatttgttcatctctgttataaaaacagagtagctcgtaggggaatcgaacccctgtttccgccgtgagagggcggcgtcttaaccgcttgaccaacgggccataagtatttgttcatctctgttataaaaacagagtagctcgtaggggaatcgaacccctgtttccgccgtgagagggcggcgtcttaaccgcttgaccaacgagccgaactgatacttattatagcattcttttttttatttgcaagcctttttttgaagtttttttatttttttaaaaatatgaacaatttacacaatttcattctgcttttcccaccattttcatggcatttttacctctttttcatacatcagatcctctattacttcacgcaccgtcgaaatccgatctatttttccaacattcgaaccgcaaaatacaagtccgttttcaacgtctccatgcacagcacggatcaacgcctgtgtgatgcagtacggaatctgcgccggtttacagtttttaatgcagtgataacagcgttccacgctctccggcgcccgttctgtcttttggataaaagcattgtttaacgcacgccccggcatgccgaccggacttttgatgatttttacatcagtttcttttgcattcacatatgcttttttatatcctgaggaagcatcacactcttttgtcgcaacaaatcttgtcgctgcctgaactccgtctgctccgagtgcttcgatccgctttgcatcggatgcatcccagatcccgcctgctgcaaaaacaggtatctgctttccatacttctcctcgtactttttcttttcctccatgatccccgtaagctcttcctcaaaacggatctttgaaatatcatctaactgctccctcgaaaatccaagatgtccgcccgcctccggcccctctgtgacaataaagtctgctgtcctgccgtattttttatcccaggtttttaaaagcagcgccgccgcgcgccttgacgatacgatcggtgcaatctttgcttttcctgcttctaccagctccggcagatccactggaagcccggctccgcagattaccgcatccgccccggcacgcaccgcctctttaacatgctccctgtattgctgtaatgccaccatgacgttgactgctatcattccttttccagatgccagttcttttgcacgcacgatatgctttcggatactgcgcagattgcacgcttcttcatttcccacaaaatccggttcctcaaatccgatctgtgccgtggagatcacgcccatgcctccctccgatgcaaccgcgccagccaggccgcttaaactcacaccaactcccatgccgccctggatcagcggcagactcagattccatccttcaaaacgattcattgaaaaaattttcttcattgcattctcctctattatatatagtttttattactacatataatggtatcattcaatatataatatgtcaacaataaccatattattatttgtaaagaaaaacgactgtaaattttttacgtttacagtcgtttttcgtgtttttatcatttataaattatttattcctgcgcaaagacatcgacctcttctatcgtaagtcctacaccgtctgcaatctcttcctttgacaactttctctgtttcagctatgcagatcaatcgtcatatccgttcggattgttcttctgccatctccaggaatcttcgcacatctctttgataccatactgtgccttccagccaagctcacgctctgccttcgaaggatcacagtaacaggttgcaatatcacctgcacgtctcggtttgatggaataaggaatcttcacgccggttgcagcttcgaagtttttgacaatgtcaagcacactgtaaccatgacctgttccaaggttatagattgcaagtccgcatttctcatcgatcttctttaatgcttttacatgaccgagcgcaaggtcaactacatgaatgtaatctctgacacctgttccgtccggcgtgtcataatcgtcaccaaatacgccaagttcttttaatttgccgactgccacctgtgtaatgtatggcatcaggttgttcgggataccgttcggattctctcccatggttccactcttatgagcaccgatcgggttaaagtaacggagtaagatcacgttccactccggatctgctttctggatatccatcagtacctgctctaacatggattttgtccatccataaggattggtgcactgacccttcgggcagttctctgtgatcgggatttctgccggatcaccgtatacggttgctgaagatgagaaaataatgttcttgcagttatgctgacgcattacatccaccagagtcaatgttcctgaaatattgttgttgtaatattcccaaggtttctgcacagactcaccaacagcctttaatcctgcgaaatggatacagctatcaattttttctttttcaaaaatctcatttaaaattgtgcggtctaagatatcgcctttataaaaagtcacttcttttcctgtgattgcttttacacgctctaatgatttttcagatgcgtttaccagattgtcaagtacaacaacctcataacccgcatttaacagttctacgcatgtgtgacttccaatgaatccggcaccgccggtaactaaaattgccatagttttttccacctttccataacaaatctttttgttttccttcaacgttatgggtacatcttaccccattctttggaaaatgtatagcaaaaaatgtgtatattatatgtaaaaatgttgcatgttgactgagtggccggtataattatttagtgcagagccgtggggttgtggccgtcaggccgtgtgaagccgctggcagtggattaccagagaataatggaggattaccatgtacgaaaaatataaaaattcttacaaagtaacagagaaagaactggtttcactttccgtctataacgtgggatttcagagatgtgactcgctttatcagtggggaccgggaatccgggatcattatctgatccattatattatttcggggaaaggtttttacaagattggaaaaagaacttatgaattacaggctggggattcttttttggtgtatccaaatacagaggttgtctattacgctgcagagactgacccgtgggagtatgcatgggtgggttttacgggcagtgacgcttccatgatcttaaaggcaacggatttttcgccggaaaaaccgatcatacgggagacaccgcacggaagtgatatccaccgccagatactccatatttacgatgccagaggaaatgaatttgagcatgccgtggaaatgaccggacggctctatacgatgcttgccatgtttttacacggcgcctcccatacgacggagcaaaattccgccaacagttatgtgcagaaaggcatcgagtatatctcttccaattattcttatgcaattactgtggaggatatcgcagactatgtcggcgtcagccgcagccacctgttccgttcttttgaatcggtgcttggtcagtcgccaaaggaatatctgactgattttcgcatgaaacaggcgtgttatctgttagaacattccagcctgtccatcaccgcgattgcaaattcactgggttttgacaacagcttatatttttccaaaacgtttcacaaacaaaaacaaatgtccccaaaagaataccggacacattcccgtacttcttaa

SEQ ID NO: 131 - DNA, 26669 bp, unidentified
  source 1..26669: mol_type = unassigned DNA
atgaaactctttatttatgaactgaaaaagatacttaataaaaaaatattttttgtttttttattgctctgccttgcaatcaacggctttttattatattcatcgcaaaataccgaagaaaacagcattagaatcacttattccaatgagtatgctaaaatgctcaatagttattcttcaatgtctttgaatgacgctgaaaagcagattgacaatgaactgcttgcatatgaaatttttagcagacttgaaaatcttgcacagactgataacgaggaacttattgaaaattacacatatgaacttgatgagtatcgaaagagtaatccggatgcgtatcaaaaggctgttgaaatgagtgaaaaaggcggagataacttttggaaaaacagttttctctatgatatttcgcagcagattgagtatataaattcctatccggattttattgacaaaatgtatgacagggcaaaggcgcagtcgtcctcttcaatttttggcgataaaaattctttttcatataaaaatctttacaaaacatccaacgattattcagggttaaaaaacaccaagctaagccttgtaaattctgatgcttttattgcaacaacagaatacagcttaaccgatatttttataatcgccattgtgtttttgctttgcgtttatctttttcaatatgagcgtgaaaaaggactgtattcgttggtacgatgtacaaaattcggcagattcaaaactataatttcaaaattcatgttgctttttgtactgtcagctgttgtatcaatattattcattttttgcaattttatcataaacactttcctgtatggcagtaccgatttaagcgtaaatattcaatcaatttccgagtttcgcaactgtacccttacagttacagcaggtcaatttttgattttgtttgcatttgcaaaaataatggggacttttgttatttcatcgtttttggctcttgtatttattatcttttcaagttctgcaacgatgtatcttacagggctcgtaataattggtgcagagtatttgctctataccttgattggacagaactcttttttgaaccttttaaagtacattaatattttctatattcttgacggcggggaattttttggaagttatctgaatcttaatattttttcaaatgcagtaacttcgattccgattgcatttgccgtttttggtacagtatttcttttgtgtacggtgttttcctgcatattattttgcaaacgcaatcaacagaagactgccggcattttttcaagactgcttgaaaagtttaaatcaagattttttacattaaacggcagtaccggcgtttttaaaggcgaagtttttaaatttactattcaaaataaaatggctgttatgattgttttgtttgtgctttttgcaattatttcatcgttcggaacggttcgttacccttattcagaaaattcggatgctgactacaaagcgtatatggaatatcttgagggtgacataacttcggaaaaggaaaactatattttgaaacagcaaaattattttaacaacttgcaacaacgcatgggcgaaattgctgaaaatagtgagctttccgaaaatgcaaaacaggctatgtccaagtcgattgaaaatattttaaacagcaaagggattgcatttgaaagagtaatcgaacaatacaatcgactccttgaactagataaaaagggcatagatgcaaaatttattgatgaaaacatctataaaagttttgtttcaagtaaaacaagggaatggaacgattttgctttgctttgccttgttcttgtgataggtgttccttatgtattttcacccgagtataaaaatggtatgatcaaccttattcgtactactgaaaacggtaaaacaaaactgttttttggaaaaatagtagtggagtgtatatatttgttaatagcatttacagctctgtatgtgccgtattttgtaagatttataaatacatacggtgcgaacagtttgaatacgcccttagtatgtatttttgaagatgttcaagaaacatcttttagtgtgataaatgcggtagttgtcaatctcatttgttactttttgcttgcaacagcagtaacatttgttattacagcagtttcaatttttacccgtagcagtatgtttacaatggtggtttcaactgttttagttatattaccattgcttgctttgtattcgattgaaaatgtaagaataggttattgggttgtaaattcccatattatagctatcgttatgacttgcttgctgagtatcttaattgcaattgtcacacttgaaatttctaaattaaaatttaccgaaacaagaatatggaggcgaataaatgccaaagcttgaggttaaaggtattacaaaagtctataaaaaaggagcggtaaaagcacttgatgattttaccgttacgcttactccgggtgtgtatggacttcttggtcctaacggtgcaggtaaatcaacacttatgaatatcattaccgataatctgaattcagataaaggtgaagtgttgtatgacggagaaaatattaaaaaattaggtaaaaattatcggagcgttctcggttatatgccgcagcaacaaggtctgtatgatgattttactcttaaccgatttttgtggtatatggcggcattaaagggattaaaaaagaaggaggctaaggaaaaaataacctcacttcttgaaacggttaatctgacagatgccgcacataaaaagttaggctcgttttcgggcggtatgaagcagagagccttgattgctcaggcacttttgaatgacccgaaaattttgattcttgatgaaccgactgcgggccttgacccaaaagagagaattcgtatccgcaattttataagtgaaattgcagaagataaaatcgtgctcatttctactcatgttgtgtccgatatcgagttcattgctaaagagattatacttctaaagcagggaaaacttgtgtcacacgatacctgccaaaatcttgtaaatgaaattgcaaataaggtagttgagacggaaatcgaaaaagaagaattaaaatattttcaggataattaccgagtttcaaatctctgtcataatgatgataaaatcgtagtaagattagtaacagataatccccctgaaaatcataaaataacaattgcaaacccaacccttgaagatttgtacctctatatttttgaacaaggaatgtgatattaaaattattaccgacaagtaatggtgttctatgctaatacttgtcggtatttttatgccctttttacatgaaattgtaaggataaaacggaatatagatacaaaataatcagttaacgcataaaatagcaatatataatattgtgttaaaattatgcgaaaaggagggtgacagctctatggagcaatatatgccgatagtgtggataggctttgcaatatttatgttgctttgcgaaggctttacaacacagcttgtatcaatatggtttgttctcggctcggtttatgtttacggatttaagcaatattgatgaaacagctcaggcaaaggtcggtgccgaaatatggacagtaaagtccgacaaagcaccgcattcaaaaggaacaaaaagcaaggcaactgtacttacataactttctctcagaaaagcctttatgtgtttatagtgataattactaatttcttgatatctgagtgtacaataataaattagtcacacaaactttgtcaatagtggaaaaaaataaaatattgttgttgaaataaattggatattggattataataataatcaataatgcaaaaaacgaatgaatatgtaaaacggaggtagtcctatggaagaaaaggatgaaattgttatttcattgtcagatgtatggaatattattaagaaaaatgcagcttttattatcgtagttacgcttatttgtgctatcggaagcttttttataacaagatattttattccaaagtcatacacgtcttcaattcagttatatgttgatacgtcaaatgatgatgaaaataaaaacaacctcaatatactttctgagcaaacctatgcacagaatcttgttgctacatatattaaaatgctgaacacaaatactttttacacagagctttccgagcgtataaacaacaaatatactgctaaacagcttagcaaaatggtttctttcagcagtgatgaaaagacggagatatttgatgctaaggttactacttcttctccaaatgattcaaagcttatagctgatgcggttggaaaggttgcacctgaggctatttcaagacttaaatccaaagcaacgctaaagatagttgattatgctcaactgcctactactccttcatctccgaatgaaataaagaacgtaataattgcaatgatagtaggacttgttatatctgtcggaatttcattgctcagagcgttccttgataagaagatgagatacaacgaggaaatgactatgattggagatattccgattcttgcagctattccaaaatttgacgcagtaaataaatctaacaaaaaaaaagataagagggagtcagtatgaaaaaatatccaaaaagaggcccttttcaagatgtaaaactcaatgcagaagctgtcggatttcagattaaagagtcttataaaaaagcaagaacaaatattgcttattcaattgtaaaaaaaggctgtaaaatggtgtctattacaagctcttcaaaatccgaaggaaagactattactgcagttaatatagctattgcacttgcacagcaggttgataccagggtactgattattgattgtgatttgagaagacctcgaattcaatcggtgcttgaaatacctgttgacaagggaattacaaattacctcaattttgaatgtgaggtatctgatatagtttacacttctaaattggacaatcttgacgctatctgttgcggcactattcctccgaacccgtcggagcttttatcaagtgacaatatgaaagaattaatcaaagagctttcaaaacaatatgattatattatatttgatactccgccaattggcgtagtaattgacgctttacctataataaagcaaactgacggtgttgttgttatagtcagagataatgttaccgacatcagggactacaaaaaaacaattgatattctcaaacgctccgaagctaatattatcggtgttatatttaatgatgttgagcctgtcggtaaacgcaaatacggcggaggatacaaatacggttactacggcgaatacggctattaatttttttgctagaggggtgtagttttggcgaaaagaatatatgcaaatgaaagaaaaaacaatattttcgaaaaaaaggttatgcctgaaaataatatttattatgcaaccttaaaaacaagacacggttaccggtggctaagaagatttcaggatattttattctctctgatagctattattgttctttctccggttatgctgattacagttatttctatcattattgatgatcccaaaggaggtcctgttttttcgcagataagagtgggaaaaaacggtaaagagtttaaaatgtataaatttcgctcaatggttgttgatgcggaagacaggcttaaggaactgctggaagaaaatgaaatggatggacctgtttttaaaattgccgatgatccgagaattacaagagtcggaaaatttataagaaaaacaagtattgatgagcttccacagctttttaatattctaaaaggagatatgagcattgtgggacctcgtcctgctttgcccagagaggttgagcaatattctgcttatcaagcccagcgattgtttattacaccgggtcttacgtgttactggcaaattcagccaaacagaaatgacatttcttttgatgaatgggtcgagatggatatacagtatatccgtgaacgcagttttcttgtggattggaaaatcatatttaaaacaattatcgcagttcttactaaacaaggaagatgatttgggaggtacatatgaaaggcataattttagcaggcgggtcgggtacccgactttatccgccatgtggcaggtaagccgacaaagtgatattaccgattttgaagaagttgtaaaaccggcttgaatgatatatacagttttaacatgattcatacactgacagtcttcgattcaacaatccaacacttagaaaaaacatcatcgcagggtatacgtggttcgactgtataaaacagcacttcggttattgaggaatagatacgagtgtacttaactgatattttatggagtagaaaacaagggcaatatgattgtcggggtaattggatacgacagcataagaaaacacttagccgtgtgaacggtaagaggaattagagagaaagaccatccatatggatgtgtacatagcaaattagaggatatgcccgatgagggtcggaggagttaaataacatgaagaattacaaaatcgccgttgcgggcactggttatgtgggtttgtcaattgccacactgctttctcagcatcatcaggtaactgcagttgatattgttccagagaaggttgagatgatcaacaatcacaagtccccaattcaagatgattatattgaaaagtaccttgcagagaagaaactgaatttgaccgcaacacttgatgcaaaggctgcatactctgatgctgactttgttgtaattgcgacccctacaaactacgatagccacactcagcactttgacacatctgcagttgaagttgtgatcaagctggttatgaaatataatccgaacgccatcatggtcatcaaatctactattcctgtgggatataccgcaagtgtgcgtgagaagtttaacagcaagaacatcatcttcagcccggagttcttgcgtgagtccaaggctctatatgacaacctgtatccgagccgtatcattgttggcactgatctgaacgatgagcgattggtagaggcggcacacgagttcgctggtctgctgcaagaaggtgctatcagggagaacatcgacactctgttcatgggcttcaccgaggcagaggctgttaaactgttcgccaatacatatctggccctgcgcgtggcttacttcaacgagctggacacctatgcagagagcaaggggctgaatacccagcagattatcgatggtgtctgccttgatccgcgtatcggtagccattacaataacccgtcctttggttatggcggctactgcctgcccaaggacaccaagcagctactggctaactatgctgatgttccagagaacctgattgaagcaatcgttgagagtaatagaacaagaaaagacttcattgcagaccgtgttctgaaactggctggctactacggctatgatgcagaaaatgagtttgatgaagacaaggagaaaaatgtcactattggtgtttaccgtctgaccatgaagagtaacagcgataattttcgccagagctctattcagggtgtcatgaagcgcatcaaggcaaagggtgccacggttgtgatttatgagccgacactgaaagacggtgaaactttctttggatcagtagtggttaatgatctggctaagttcaaggaaatgagccacgccatcatcgcaaaccgctatgacaagtgcctagatgatgtgaaggataaggtttacaccagagatatttttcagagagattaacaaggtgggaaaaactatgattattacacaaacacctttccgtatgtccttttttggtggcggaacagatatggaaagcttttttagagaaaatggtggctctgttttgtctaccacatttgataagtattgttatgtgaatgtaagacacctgcctcgtttttttgattactctactgagttgtcttactcaaagactgagcgtgtgacaagtattgatgacattcagcatccagcaattcgtaatgcgatgaagatgctggatatgcacgaaattcgtcttacatatgaagctgatcttcctgcacgttctgggttaggaacatcaagttcttttgcagtaggaatgctgaatgccttttatgcgctaaaaggaaaatatgctgataagaaaaaattggcagatgaagcaatttatctggagcgaaatttgtgtcaggaagcaggtggctggcaggatcagattgcagcatcatttggtggatttaatcgtatcaactttaatgcggatggatatgaagtcctacctgtgatcatttcacctgagagaaagaagcagctaaatcaaaatttaatgatgttttttactggttttactcggttttcttctgaggttcagaaagcgaatgcagcagataaggttgataaaacagcacagttaagagaaatgctgtcattggttgatgatgcagagaaagttttaacggataaggaaaagaatcttgacgattttggtagactgttggatcacacatggaaacttaagcgtcagacgggatctgctgtttctacaaatagcattgatgaactttacgcaaaaggtattgctgccggcgcgttgggcggaaaacttctcggcgctggtggtggtgggttccttgtattttatgtacagccagaacatcaagatgcagttcgtttggcaatgcgcgacctactctatattccgttcaaatttgaagatggtggaacacgtgtaatccattatacaccggaagactatacaccgaaggattgaaaacatgaaagtagtgattatggcaggcgggaaaggcactcgtatttcctctgtagcgagtgatattcctaagccgatgataaaaattgaaggcattccggtgttggaacgagaaatcaaatgtctgaaagatcagggatttgatgacattattatgacggtaagtcacctgggaaatatcattatggattactttggtgatggttctgaaaactctccagcaacaggaaagccgtttggcgtacatattgagtactattttgaaaaagagccactcggcaatgccggtgcgctgtttaaaattaaggataagctgacatctgattttttgcttttaaatgcagatgcgatgtttgatgtggactttaatcgatttgttgcttttcaccggaagcgtgacggattggttacactttttacgcatccgaatagtcatccctacgatagcggactaattgttgcggataaaaatggcgcagttgaaaagtggttggccaaggaggatgcacggccacagtactacagaaatcgtgtgaatgcaggtttacatgttattaatcctaaagtactggagatttccggtattgatgccgattcggtagggaagattggcgaggatggtaagcctgtaaaagttgatttggatcgtcagttgttaaaaccgttagcaggaacaggaaagatgttctgctatgacagtccagagtatgtcaaagatatgggtactccagaacgatattattccgtttgttcggattataaagagggcagagtctctggaaagaatctaagaaacaaacaaaaggcattattccttgaccgggatggaaccattaacaaatatgttgggtttcttagaaatatagatgattttgaattgattgatggtgttgcaccggcaatccagaagattaatgaatctggttatctagctattgtcgtgacaaatcagccagttattgcccgtggagaagtgtcttttgatgaacttgaagaaattcataataagatggaaacactccttggaaaagaaggcgcatatttggatgctatttattattgcccgcatcaccctcataagggatatgaaggggagcgtccggaactgaaaattgaatgtaagtgtcgtaaaccaaagccaggaatgctgttgaaagcggcagaagagtttaacatagatttgtcacagtcatggatgatcggtgatggtgaaaacgatgttatagctggtatcaatgctggatgcaagacggtgcttttgagtgatgatgataaaaactatggtcagacagaaacgatgaagtctctggatgaattcacaaaatctttgttttgaggagaaaacatagatgaataaattatggaggattggaaatcacctttcaaaaatggggtgggtgccacgaaaaatatcaaggattcttgaattaataaatcatctgatttgtgcctgttcagtatctattgatgccgaaataggtaatcggacaattttttaccatagagggattggttgtgtggtacatccaaaagccgttataggtgaagattgtaaaatatttcagggtgtaacaatcggaagcaaatggtctaaagcaagttgcttgggtgaagcacctcgcattggaaataatgtaatgataggtgcgggtgccgtaattctaggaaatatcacaattggggatgattctattattggtgcaaacgctgttgttacacatagtatacctaaaaattcacttgcggtaggtgttccagcaataattaagaagttgtgagggaagaatgaaaacagaaatttataaacacattgaagtgcttgttaatagatacccagtattaaactctgtcaaagatgaaattgtagaagcatattttttgcttgtcgagtcatataagaatgaaggcaaattattgattgctggaaacggtggatcagctgcggatgcagaacatattgttggagagttgatgaaaggttttaaactccctagaaaactaaatgaaaatttcacagataagcttattagtgaaaatgaagagcttgggactgttctggcagaaagcttgcaaggcgcgctgcctgctattgcattagatggacatcctgcattgtctactgcgtacatgaatgattgtgaaccgcttctgtgttttgcacagcaagtaaatggctatggtaaagcgggagatgtgtttttaggcatttctacgagtggtaacagtaaaaatatattgtatgctgctactactgcacatgcgaaaggcatgaaagtaataggtttgaccggtgcaaaagatagtaagttgacgcagatgagcgatgtatgtattaaggttccgcagactgaaacgtatatgattcaggaattgcatttgccagtttaccattgcttgtgtttgatgctagaagatgaattttttggggagaactgatgtgatgaaaaaacaggctctgcttaatacatatataaataatgtaacaatgacggaaacgattgcggatattgagcagatgattaaaggtaataaaaaatcgtatgtggtcgcaattaacgtcgatgttgtgatgaaaatagaagacgattcatatctgaaaaaagttgtggatgatgcagatatggttttagttgatggtaaacctttagtttggatttcaaaattacatggtaaaccactgaaagaaaaaatctctggttctgatttagtccccttgctttgtgaagtggctgctgaaaaaggatataagatttttattattggtggtaaggatggtattgcagaacaggccaaacagaaacttgaagttaaacatcccaatattagaattgttggaacctatgcaccaccatttgagtttgaaaaaaacgatggcgaattaaataaaatcaatcagatgatttcagagatgcatccagatctgctgattgcttgttttggttgccctaaacaggaaaaatggatatatgagaacatcgaaaaatatgatgccaaggtatcaatttgtgccggtgctacagttgactttcttgcgggtaatgtaaaacgtgcacctcgttggatgagtgagcatgggttggaatggttttaccgttttttgcaggaaccaaagagaatgtttaaacgatattttgtggatgacattaagattgtgaaattgatttttaagtatgcaaaaaaaggagaagaatgaatggatagcgaaaacaacattaagattcttcactttttgcctcgctgggacaatggaggcatggagcatgcagcgttagatattgtcactcattttgagggaacctgtacttatgagatttgtacggcatttcttgaatctgaatttgcagttgatgatttgaaaaaaagaggaataaaattcactacactctatcagaacagagaatacagttttaaagactgtgtaaaaggactgcacaactatttgaaggaaaataaatatgatattgtacattgtcatgtgaacaatgcgatagggttgatttttgcggctgtctcgaagcgtgcaggggtgaaaagagtagttatacacacacacaataattcttttggagcaggaaatctggcactgaaaaagctgctgaggattatatcaataggggtgtttgggagcataccagatctttatttggcgtgttcagaggaagcgggaaagtggacgtttggtacaggtatagaaagaaaggaaaattatcatgtgatctataatggaatagatcaacgcaagtttctttataatatggagaaacgaaataaattaagaaaatactattcattagcagataaatttattgtagggcatatcggacactttaattaccaaaaaaatcaggcttttttgttgcagaccattcaagatgtgtgcagaaagattccaaatgtctgctatttctttgtgggaacgggagaaacaaaaaatgattttttgaaggaagtgaaggataaacatcttgaaccctttgtcacggtgattgatgcagtaaataatacacaggattattattccatgtttgatgtttttgcatttccgtcacattttgaagggtttgggattgtaatgatagaggcgcagatgagtggccttccagttgtgtgctcagaaaatgtcccaaaggaaacagcgataacacagaatgttgaatatttgtcgattgatactaaggaaagtgtacagctttgggcgaaggcaatcgtgaattgcaaaaataaaatgcaggaagtaaaccgtactgagtcaatgctatgcgcaaaatacgatataacagagatttcaaagaaaattgaaggatattatgagaatttgatggagagataatgatatgaaagttggaatcattacctggtggagaaataattatgggtcgattctacaggcacttgcattgcaacaaaaattaaaccagtataatgatttacagtatgaaatcatttgccaatttgggaaaaaggctacgtcggtggacaatgtttttgacaagataaaaagtgttggattggcagaaacatgcaagagagttttttggaaagttgcattcaaaggactgcgtttaagaaataaaaaaatgcaacaatttgtggacgaaaacctaaaagtatcaaatctgcaatataatgaacacgatattgcggatagtaataaatactatgatacctatatttgtgggagcgatcagatttggaatccggatttagttccaacggatagtatgtattggcttccatttgtggaaaagggtaaaaataaaattgcgtatgcgcctagttttggagccagtactgtctcagaaaagcaaaaagagcaaatcaaagcaaatttaagcacattcaaagccgtgtcttgtcgtgagaactctggagcaagaacaattaacctaattattgatgaaaaaaaatgtgaagctgttcttgatccaacaatgcttattgaaagaggcttttgggatacaatctctgaaaacaaaatctataatgaaaaatatatttttgcctatatgttaagaggaacagccacgcagagaaaatatatagaaaatatcgcaagagaaaagaacctgaaaattgtatcgatcccatttttggattatgaaaaaatagatctgtatgatttaaaatttggagattataaactctgggatgcagatccagcagaatttattagtgcgattcgacacgcagaatatgttttttgcgattcgtttcattgtattgtttttagtattctgtaccatcggccgttttttgtttttccgaaagttggtgcgaatgggaaagtgaaagaaagccagatcagtcgaatgacggatttgttggaacttgcggaaataaagaatcgaattctttttgataacgaagaagcggatttggatgctgagattgattggaacaattcagataagaaaattcaaaaagcgcgatgtgattcagagcgatatttagagcaggcgctatttatgtaaagaggaatgaaagaatggaaaatgatgtaaagacggtttgtgcaaagaatcaatgcgtgggatgcatggcgtgctttgatatgtgcccgaaaagtgcaattacgattgtagatacaaggcaggcttataatgctgtaatagatgaagaaaaatgtattcattgcggtatttgtacaaatgtctgccaaaataataaagagactacattaaaacacccagaaacatggtatcagggatggattgaagatgaaaaattgcggagaaaatcatcttctggtggcgctgcaaaagcaatttctaggcaatttatttcggagggcggcgtggttgtcagttgctgcttcaaaaacggagtatttggttttgaatgtgcggcgagttttgaagagcttgaaaaatttacaggatcaaaatatgtaaagagcaatccgagtggaacatataaaaaagtgcaggagcttttaaaggaaaagaaaaaggttttgtttattggcttgccgtgtcaggtaggagcattgaaaacggttattaaagaaaacgataatttgtatacagtggatcttatttgtcatggaacgccatccccaaaacttctgcgagattaccttgaactgcataatgtgaatttggaagaagtaagcagtatttcttttcgctataaggatgtgtttggccttgcacaggatcgaactccactttcacaaccggggtcgtgtgataattatttacttgcattcttgtgtgggctggattatacagataattgctatgaatgcaaatatgcaggaatcaatcggggaagtgacatcacgattggtgattcatgggaaagcgacctagccgaagatgaacagcgacgtggaatttcaattatgctgtgccaaacagaaaaaggcgagcagctgctaaaaaagtcggatgtgaaactgttcccagtaaatttggaacatgtggtagctgtcaacgatcagctaagggagccttctcttaaaacgaaaaaacacgatttgttttttgagaagtaccccagcaaaagttttaactatgcaacattttgttgcttgccatcaaagtgtatgaaacaaagaataaaagctatcctgctgaagatgaaaattcttcggggggggatgaattataatatttcgattacaaaataaaacgaataagatggcgtagaggaatttagatgagagtacttattgtaaatacattttattatcctaatatgcaaggtggcgcagagcaaagtgtaaaactacttgcagaaaatcttctgaggcatggcaacactgtggccatttactgtgccgatgcgaaggagggacaaaagacagtcgaagaaatcaatggcattacagtttatcgctgcacaaccgggaagtttgatctctataaatatagttataagaaaaatagtgttagtgcactcgaaaaagtgacacaaaaattgaggtgctactgtaatccggattgtgtgaaagattttgaagaaatctgtaatcggttcaaaccggatgttattcataccaatacgctttatggaataccttgctccgtatggaaagctgcccatagaaaggaaattgcggtggttcatacaattcgtgatacggcgattctttctcctgtacagcacggacataaagtaagcccacttgtggtaaaagcacatcaaaaatatatgtgcagtgtatctaaatatgtggatgcggtaacagcaccatcggagtatacccttagaacttctttggctacgggggcttttgataaatcaaaggtcaaggaatgtgttttcaatagcgtacagattgactacgatctgcttcagcgcatggtggaagaacggaaagctagaacatcacaatgtataaaatttatgtacgcgggtagattgatttatctgaagggcatccgtcagatgctggaagcgttttctagaatagagaatgaaaactgtgaattacatatttgcggaacaggcgatatggcggattatgtaaaggaacaggcacaaaaagactccagaattatctatcacggaaaactgaatagtgaagaacttgcaaaacagtatcaggattgtgacgttctcctgttcccgtctgtatggccggagccgtttggccgcgtttttattgagggcaatatgtatggaatgccggtgattgcgggcgactgcggtggaattcccgaaattcatgcagtgacgcatggcggcgatttgtgcgattgtgataagatagaagagttgacgaaacgaatgaagctgtatttaaaccgagattatatcaatcacttctatgaaagtattgtaaacaatattgaggtgtttgatattgagaagcaaatagagctttttgagaaaatatatctagaagtgactgtacaagaaagaaagaaattatgaaggttcaaataaaaaaatgtacattttatagtgcttggataatatatataataaattatgtgctttttgagcagagccagtttaaaaacatacttggtagtggtacttttacaagagggataaaagcttttgttgttatattattactgatttgtatttttctacggagaagcgtttctataagattcattaaacttggaagcctagttggcgcaatttttttgatggcgtattttactgcagactcgtggacggttttgttttggggcttgttttcattagccgctgttgacaatattgaatatcgtgaattcttgagaattgatataccggcaagaactcttttatatctgtttgttttagtctgtgcatttacaggtgtcttgaaaaatgattcgattgttgtctatggtaatgaaaaggttacactaggatatattcattacaatatgtttggaatgaatatgggtgttttagttacggagattattgcatggtttagagatgataagaagaatacacgaagaatgtatcttttagtaatagcaatttgtgcagttcaggttctcgttggtgttggaaggactggattatatgcgagcacagtcataatagttttatctatcatacttgaaaatagaaaaataaaggcatttgttgaagatcattgctcatttttttcagtcagttctgttatatttgctataggatcctatggaatatctttcgcgtatgacagcggaaataagattatgcaggtgttaaatctcatttcttctacacgcatagctttttcgaatttatatctatcacgctatgatttgtctatatttggacaacaattatatattaataatgatgcagcaaagggtcagtatagtgcacttgatatgggatatatacgagtcggactagaatatggacttctaatacttttccttatggtgcttatgttttatattatacaaaaagaatcactgaagacaaacaatgtaggcttatatttagcatcattgtatttttgtatgacattgcttgttgctaccagtgttatgaatgttgcaaatgactggatattgatatttacaattcagatattagttagaagagatacattctttgaacaaaagataagtggaggaagtaattttgaaagtaggcttatgcacaccatataaagttgataattatggtacgaagttacaggcgtacgctgtgcaggtaaaaataaaaagtcttgggtatgaagttgaaatcgttaattttgaccgcaggagtgatcatcgctttgtaaagcttttgaagcgctacgcaaacaaagaatatcttcagggaaaactgagaaaaaagaccgatgctcgtaagaacagcgcattgatgcgggtaaatcttatagttcgaaaagatgcgatcaacagttttgataagtcgcattataaattgactccgttaatcaagggataccatgaactttgtcactgtgcagaacagtatgatgcagtgatttgcggaagcgatcagatttggttgccgggcagcatcaataatccgacaaccactctggagtttgcgcctaagaactgcaagcgcattgcgtttgcaccgagctttggaataagcaatgtgcccgataatcgaaaaaaagaatatgcaaaattcttaaaagagtttgatgctctgtcggttcgagaggttcaaggtgcggagattgtgaaagaacttactggtatggatgtgccggttgttctggatcctacattatctgtagagccatccgtttggagtaaactggctgatgaggggcgtagtcgtgttcaagaaccatacatgttttgctactttttagggagaacggaacagcaccgtacggaagctagaaaaattgcggatcgtcttggcctgaaactcgtgattatgccgcatttcaaggaatatgttccggcggatgaagcttgtgcggacgtatgcttgtatgacgtgacaccgagtgattttgtaagaatgattcgtgatgcaagttatgtgtgcacggattcttttcacgcaacggtgttttcaattttaaaccacaagcgatttatgacgtttgaacgatttaaatcaacgtcggtcaattcggcaaattcaagaatctactctctcttgggacagttgaatttgctggaacatatttggtcagaaaaaacgactgcaatacaggaagatacattgcctaactattcagaggtagagcggattcttttggatttgagaaaaaagacaacagagtatctgcaaaatgctctgaaagatgtaccaaaggaagagcaagtacaggttgcattgcataagaaaaagcaggcggattgttgtggatgcggagcatgtgcatctgtctgtcagaaaaaatgcattgaaatgcagccagaagagggaactggcttttactatccgcggcttgtgaggccagaagcatgtattcactgcaatcaatgtaatgcagtttgcccgaatgaacagccgcgtaatgtgtgtcattccgtagcagagtcttactgcgtggtgaatagggatccggagattttgtctgaaagttcttccggtggagttttctatccgttggccatgcagacgcttggggcaggcggatatgtatgtgccgctatttacaatgaaaagtttgaagtttgccatacgattatacatacggaagcggaactgaaacctcttgtaggttctaagtatgctgaaagcaatttgggagattgctttgagagaatacagcagctcctaaaagctgatcagaaagtgcttttttgtgggacaccttgtcaggcacatggtttgtgttcctatttgaaaaaggattatcaaaatctttttgtagttgaccttttgtgctatggaatacagtcaccgaaggcgtgggaaaaatacaaagaattcattgtaccagaaggaaagaaaatctgtgcagtcaatatgcgcgataaaagcgatagctggcaaaactattcgataaagatcgactttggcgatagcacaagctatgtagcggacaagcaaacagatctgtacgcaaaaacatatagcaagggatatttcattcgtccggcatgttatagctgcgatttgaaagcgtttccacgaaaaagtgatgtaacgatcggtgatttctgggatattgacaagattatgccggaaaagaacgatggacacggaacagggatcctttttccgcagacagaaaagggaatggaagcaattcgagttctggaacaagagggtacgattgaatgtctcaaaattgatgcggatacattacggcaagttcatccattgttctgcctgaatgcgaagaaaaaccgtaagagtgaaaagtttatgagtatgctcaaagaggataacacgtcctttgatactattgtagaagcatgcaaacagggacgaacggaaattatccttagaagcatatatcgtaaaatcaagagacgataatttccgtggaggaaaaaatgacaaaaatcaaacagtttataaaaaaatatgaaaaaatgccagtcgtagcacgtgcatcgctatggtttgtaatctgtggcttcatgacgcgtggtgtttcgctacttacaacgccaatttttacacggctgttgacaacagaacagtatggcgtttacagcgtatttaattcatggctggaaatcgttacaatttttgcatcgttgaagcttggttatggtgtttatatccaaggacttgtaaagttcaacgatgatcaggatagattttcatcttcgcttttgggattggcaacaacttggtgcggcggagtttttctgatttacttactgttccataaaacattcaacagtctgctgggattggaaactcctatgatggtctgtatgtttattatggtgatttcaacggtagcgttggatttttggtcggcaagaaagcgaaatgaattcaaatacgcaacactggtaaaagtgacaatgttcattgttgttatgaagccagtgctcggaatcattgcagttctactgacaaatgatgcctacaaagtggaagcgcgtattgcgaccttggcattggttgaactggcggttggagttattctatatattcaaatcatgtcccgtgggcatgaatactataataaaaagtactggaagtatgcgttgttgattaatcttccgctggttccgcactttttatcacaggtgattttgaatcattcagacagaatcatgattcaaaaaatggttggagagagtgcagcgggcgtttatagtcttgcttacagtatggcaatgattttgtccatgataaacacgtcgattctgcaagctatacgcccatgggtattccaaaggatcaaagccggtgaaaaagaaaaaattcaaccggtagttgtaagtgcaattttggtagtagcattttgcaatattatgttgatttcgtttgcaccagaacttgtggcaatttttgccccggggtcgtattccggtgcaattgatttgatgccgccgattacattagctgttctctttgcctttctgtataatctttttgttgatattgagatgtactttgaaaaaacaaagtctgtgatgaacattgctattgtgtgcgctgcaatcaatctgattacaaactattttggaataatgtggttcggctatgccgcggtagcttatacaacactggcatgttatattttgatggcaatacttcattactgttctatggaaagaatgctccgaaaaaataacatcaagggtaaaatttatgatgcaaaaataatagttgctatatcattggcttatgtcctcattggaacagttatgggcgttcttagcggtcatttgtttctgagattgattgtaatggctatcttggccgtagtgctttatcttaatagaagtagatttacgcaaatttttgtgcttataaaaaacaagcgacactgatagataataattgagaacaacttaaccgaagctagaaaatagaatggtagaacaactatctttcaatatggatggtttgactctcgaaagaacaaaaagagttttctaaacaatctataagtaaaattgggatgggtatgatgaatacaacattacttatcatggcggccggaataggcagccgatttggaacaggaataaaacagttggagccggtcgatgatgcaaaccatatcatcattgactactcaattcacgatgcgattgaggctggtttcaatcatgtggtatttattatccgtaaggatatagagaaggagttcaaagatgtcatcggagatcgcattgcctcaatctgcaagtcccacaatgtaactgtggactacgctttccaggatatcagcgatattccgggagaacttccggaaggccgtacaaagccgtggggaaccggacaggctgtgcttgctgctaaaaatgtgattgataccccgtttatcgttatcaacgcagatgattactatggcaaagaaggtttcaaggctgtccatgagtatctggtgaatggcggcaagtcctgcatggctggtttcgttctgaagaacacgctgtctgataatggcggtgtgacccgtggcatctgcaagatggatgatcagaacaatttgactgaggttgtggaaaccaagaacatcgtaaaaactgcagatggagcagaggcagacggtgtggttgttgatgtgaattctctggtttccatgaatatgtggggcttgactcctgattttctggatgtgctggaaaatggtttcaagaagttttttgagaaagaagtaccgagcaatcctcagaaagccgagtatctgatcccaatcttcatcggtgagctgctggagcagggcaagatgtccgtaaaggttctgaagaccaacgacacttggtacggcatgacctaccatgaagatgtcgcagcagtaaaggatagcttccggaagatgctggagaacggtgtatacaaggctgacttatttagtgatctgtaaacgatgatgaaagaaacgattgatttactcggaaagatcctcacaaacatcctgactgctctttatgaaccttttggattctcactgcttctctcgttctttgcaatgtttttctacctgtatgcgtatgagccaatacatgccggcaaagggtggaagagtgccatagtaacatggtatcagaaattcaaagagagtgtgttttttcggaagttgtttttcttattttttgtgacctcacttattctgttccgaaccctgttaaaccggagcctatggatgaatcctttatctgatgttatgggcggctggggcatctgggagacagtgaacggcgaacagaagctgacaacggagtgtattgagaacgtaatcatgttggtgccgttctcagcagtagtgatgtggacattcggagagaagataggaaacggctggaagaaaatactgtggcaaagcggtaagatagcgttcatcttctcgataagcattgagatgttgcagttattgcttcgtctgggaacattccagctatcagacatcttctataatacagtaggcggaatgattggcggcttgatatattgtgcagtgatgaaggcaagaaagcgtctgtaaagctggatgaaattgtgatatactgtgagcggtagttcccatgttgctctgataatcacacacctctccgctttgaactgcaaaccgtaccaatgtagattgtaaaataaagtgtgtaagttaaaaaatagcttgcacactttttcaattttgggaaagtgtgctacaatgaaaggaagggcgtaaccttcaatacggctacggatttgacggttatcaatcaagtatccatagctgtatggagtttcaaaagctccttaatatttacgaccttcagctcagttatatcacgaatgttggtgcaggacaggggggttctcaaggttagcagctctcttgttccgtttgtcaataaattcccacgcaataccgagctttacaagctgatgacgagcaatgtaaaatgctgaaattgcggtgttcgcgttgtattgtgagaggttggcgaaaataatcgtcttgattagtgcgaaaattcaaggaaatttcattgattattacacgaatatctgctataatgcggatatagtaagtgtacctgatagtattgggataaatataaaaaaacatcgaaatcaatgcgataaatggttatttaataaattgaatgagcatgaattttgggagaaggatgactctggaaataaattaggggttggtgtttgtagtgaatcgttcatatattggttgaatgaatttgttttaaaagattctaaagagaaagcatacattgtgcgaaaaagtattaataattatgatgaaagtttgcctaccatatattattgatgaacagagcatattgacaacttatgtgaactatttattcttttgtacaaaaactaatctgttgtaatttaatgcacgagtcccaatgaaaagcaaacaataaaaaatttaaaaatgtaataaaaaagataccttattttggcaaaaagatcctttcaaaaattaaattcaaaaaatttgaaaatatgatagcaggagcgacgaactcagcgatagtaaataaatttttaaattatataattgaaaatgtcgatatagtgttatcagtaggcggagcaattaacagctaaagaatacatttcatataccgataactatattcatccgctgtggggattttcttccgattccggcattctagattatatatttgataaaagtataaataatgttatatgggaatttaaattatggtgataaaaatatcatgtaaatacataaaagataatgcttttgatattacagttgggcaggagacacacacaattacccacgaaaacaatcaggctgtttttaagttgagcgaatcaaaaaattacaatattaaaatttgcaaaaagtcttgcaaaagcaatcattcttttagcaatcttttaattttctttttcactatgatattgcaaggcattttcaatattctattgatgaacaccgattcaaagtggtataataagttaagtccttatattattaaaactaactttaatattttcatagataaagataccgatttggaatttatttacaacgaaggatatttttattatgacaggaaaactaaaaagttacccacgataagttggatagattgcgataatatagttcttgttaaaacggaatataccatagataaggttaatttgaccaatgcatattgtaaatatgttaagaagtttatttcttgtgcatcagtctgtgagctgatattcttattgctaatactacttgctgtttcttacaataattttacagcagctatcatttgctgcatactttttgttttggtaataattattcaaattattgtttttaaaaaagagtttatgagattaaagaaaataggtgatgtgctttaattttaaccccaaaatactttatgtattcctgtatttctgtatcttagtgtagctttttgttattttctattttaacttgctatgtaaagaaatattggctcatatgatgggagcagaacaacacaggttagaactgttcgcagtgacggcaagctcgtatttgatacagactatgagtacgcagacggtaaggctgaaaattcaacaactaaccttgtcagcaagttaagccagtcatatggcggtgaaagcgttttatcacacgattattcttatgatacaaacggtaatattaccgagattaagcaaaacggtaagcttacaaacaagtatgtttatgacagccttaacgagcttaaagaagaatatgattatataaataaattttacattaactattcctatggcggagttaagaccaactattactatgacagcaacaaaaaccttattactcttgtaaagggtaatgacactctgttgttctactatgacagtgacgggagtgcaacctcattctcatataacggtacaatgtacttttatgtgaagaatctgcagtggcggttggaaagatcctgatgtatgaaaaattgtgaaagatatggctaaacacggtagtgcttggatacttttaaataaatcagggaaaagaatagctactttgtgggaagatggtagagtgagaggtaaataaaatgaaaacaatagaaatattatctgaaatgaatatacattttgatgaagcaacggatagcttgtttgactatattttagaatgtaaaaaaattactactttagatatgtttcccaaagttattcataatagtagaaaatatcaatctgttgaagtgttttatcaaagagtattagatcgtaatatgaaaaagcaggagtttattaatatagaaaaacgttttattgattttgttatgagtttatggctttataatgaaacatatgttgatatttgttcttctgaatttaacagtagttattattacaaaaagaataaaaaacttttaaaaaaatacagcaagttttttactaaatctgctggaaatgatgagtttttgttaattgaaaataaagatatactgcattcttttgctattcttgctactcgagatatttctcctgttattttctacttcaggaattcgaaaattatgcttttgttgaatggatgtataggcttaatttattatggattacccaaagaggatttactcacaaaacaaatagctgataattgttctttgtatttatattaagctaggatgagaacgcagaaaaccgttgacggagttaagaccaactattactacgacagcaacaaaaatttaattgctcttgtaaagggtaatgatactctgttgttctactatgacagtgacggaagtgcaacctcattctcatataacggtacaatgtacttttatgtgaagaacttgcatggtgatgtaatcagaattattgacctcgcaggtacagaagttgcaagctatgtttatgacgcttg

SEQ ID NO: 132 - DNA, 52159 bp, unidentified
  source 1..52159: mol_type = unassigned DNA
caggtagtgccggtgataacattctttacggcgatatggctgctagtgttctttctgtttaaggcgggaaagctggtcaactacatatcgactccggtaatgggaggcttcatatctggaatatgcgccacgatcatattaatgcagatcccgaagctttacggtgccgggtctggaacaggagagctgttcgaactgatggagcatatagcggcaacggtgaaggatgcaaatgtgccatcaatagtcatgggggtgatagccctagttatacttctcgtgtcaagacggcttataccaaagttcccgatggcaatctgcgtcatggcagcgggggcggtgatgtccagctttatagatatggatgagtacgggatagtatgtctgtcagaggtgagcagaggacttccgtcattcatagtgccacaggtggacggcagaatgcttccagatattctcacggtgagtttgtcagtggcggtggttatcatggcggagacacttctggcagagaacaattttgcgcagaagaatagatataagatagatgacaatcaggagctcctggcatttggcgcggcaaaccttgctgcagcatttacgggatgctgtccgataaacggatcagtgtcgaggacgaccatgaacgaacagtacggaggacgaacccagctcacagggataaccgcgggtgtagtgatgatagtcatactattgtgcggaacaggattcataggatatcttcctgtccctgtgctcacggcgatcgtcatatcggcactctacagtgccatggaatttgatcttgcggccagattgtggaaggtaagcaaagtagaattctatatattttgtggcgcatttctgggagtgctgctgctcgggaccatcaatggcgttctcataggaatgatactctcatttgtggctgtgatcaaaaaggcagcggatccacctagaaatttcctgggactggtaccgggacacggagaatttcttgcccttgagaaattcaaacacgcatatccgatacagcatgtggtcatatacagattcagcagcaatctgttctttgcaaatatagcaacatttcaaaaagatataatggatgcggttgacgaggagaccagagcagtcatagtggatgcatctgctataggaagtgtggatgtcacggcggcgaagacacttcgcataatgtatgataccctggcagatatgggtattaagctatacataacggagcatatcgggcagctgaatgtccagctgagaaagctgggactcggtgacctgatagaaaatggcagcgtgagacagactatagagagggcattggcggactgtggtttatcaagcccgtacccattggtcggagtacataacagctatcatgatataaggagaaagcggaccgacaccatggttcaggagcttgtctgggcatttggcgatgacgcagaggatgtgatagagcggcatatacaggagtctataagaagcatgaaaaatggtgcggatatggaacagatcatgtcgggattctggagccagatggatatccaggatgaggatgagtggcttgaacacatggagtctcatattgaagagatagtcagagtgaccggagaggatgaaaataagattgctgaacacatagagagaagaagaaaacagctctatgagagacttgagaaggaacatccggaatttgtggaaagatataaggcaagacgcacacgtatggatgaacgtctcagaaaacacaaccctgccgcgtatgaggtcgtcatgaaactccgtgaaaaagagtgattgctgtgttctgtggtaacttgctgtcagataagatattctattaaataaaaaatacagatccctgcacttttatgacggtgcagggatctcttttgttcggaggtgttgaatcacgctgactgccgacaagatgctgtcgtaacttgcgaagttctacatattcccaaggaaagattgaatatatataataaaacaagtgaataacagcaaggcgaaaggagtacgacatgggtcatgttaaagttttgatggtgaaacatgacaaaagagaaagtgagcagctgaagaacataataagtaatctcaaggactatgaatatgcgggatgctgtgaaaagggagaaaatgtaataaaacagataatggagaacaaacctgatatcgtgatagtagacgaagtagtggcgggaacagatattccagagatggttgacagtgcgataaaaaacaagaatcttaagaatgtgaagtttgtcatctgttcatcgagaaaacacaggaattatcttgaatttttattttccatggtcggagagaaagctgtactcagggtcctcgaacagccatatgatgagcagaaagtaaaggaagtgttagatgaggcgacaaagggacgcggcaacaatacggaggttttattcaaaaaagatgaaccagacaatgaacttcttgagacgactgtcacaaatataattcacgagataggcgtgccagcgcatataaagggatatcagtatctaagaagcgcgataataatcgcggtgggagatatggacatactgaattccattacaaagcagctttatccgaccatagcggagatgtatggaacaacagcatcgagggttgaacgagccataagacatgcgatagaggtcgcctggaatagaggaagagttgagaccataaatgatctgtttggatacaccgtgagcgcgggaaaaggcaagccgaccaactcggaatttgtcgctttaattgcagataagataaggcttgattccaaaatgcgaaatgtcgggtaatgtgtccgaaaatgatgtttgaatacatgatattaaaaacgatatcaaaaatacttgacaaactaaatagtttttaatattattttatccgaagacaggagtagcgctaatgactgaataatcttatacataacaagggagatattatgggaaacaaagggtttaatattgtaattgctgatggcgacagcacacagatagcaaaacagatcgccacatatgcatcaagagacgagatgagagtagtggatatggtcagtacaggagatgaggcgatagaatccatcaagataaataaacctgatatagtgattctggatatatgtctgacaggcatcgacgggctgggtgtcatggagcatataagtgaacttcctgagtacaaggatacgacatttgtcgtactcacatcggtatcatcacagagactcataagatgtgcttttgagatgggagccacatactatatattgaaaccgtataatccggttcagcttgtggcaaggctcagacagatgtatatcaagaagcaggagagcagtgcagagattacggacaaccttacgtgtcttacagagaagaatctgaaccacaggatagacaacactatagagagcgatgttacagacatcataagagatataggaatcccggcaaatatcaaaggttatcagtatatcagagagggaatcatcatggcagtgcatgatgtgaacatgctcaactatataactaagctgctttacccgacgatcgcgaaaaagtacaagacgacatcgtcaagtgttgagagagcgataagacatgccattgaggtggcgtggagcagaggccagatcgatactataaatgacctgttcggatacacggtaaatgccggaaagggtaaaccgacaaactcagagttcatagcactgatagcggacaagctgaggatagagtacaaaaagagagcataaaacactggtagacagcagctttggatagattgaatacagagtggcagatgtatggacaaatatagaggtgaggcattttgatggaacagtcagggttgaagaactgaccctggtaatgtataataatataggtacaatgaagagcaggatacgcacaggtaccctgctctttatatttgtgcggaattgacgcgcaggtgtacggaatatagcagacgataacggtataatgggtggtaatatatgatagagacagttgtttcagcaaatatgctgatcggagaagttatgagggtgaagaagaatcaccttgcgcctgatttcccaacgggaaaggaaaagagactgtgtattgtttcgggtatacacggtgatgaggttgccggacagtacatttgttatgaacttataagaaggatcaagaaggatttcgataaactgacagggatagtggatgtgtatccatttgtcaatccgatggggctcgaggcccagtacagggatgtgccggtatttgacatcgacatgaatacactgtttcccggatcaaaggacggaactgtgggggagtatactgcggcgaaggtcatgaaggatatagagggcgcagacatatgtgttgatgtacattccagcagtgtatatatcaaagagataccacaggtgagagtgaactccgatgtggcatccgatgtagctccatatgcggcatgtatgaacgtcgatgtggtgtggatccatccatcgtccacagtcatggagggaagccttgcccacgcactgaatgagataggtgtcaagagtatggtcgtggagtccggagttgccctcaagatagactatgattattcaaatcagatagtggatggtctgttctcactcatgaagaagatggggatatggcagggggatgtggaggttcagcacaagcctaaatttgcgaaggataaggatgtggaatttgtcaatgcggagagcagtggtatattccttccggttgcaaagcactcagaatatatccagcagggtgagataataggcaggatagtgaacgttctaacaggagctgtcgaggagacaatcagatctccgagaaatggaatcgtgttctcactcagagaatatccggtcatagaagagggctcgcttgttgcccgtatattcggaggtgcgcatgaataaagagatcatatattcgatgaatacagcctacagaggcgaatatgagatacagggcttctcatatggaagcggtgagaagactgcatgtatagttggcgcgatgcgaggaaatgaatttcagcagctctacataagttctctccttgcaaagaagctcagtgagcttgaggccaggggagccatagtgtcaggcaagcagatactgctcatcccatccctcaactacagttcattcaatgtaggtaagaaatactggataacagataattcagatataaacagatcattcccgggcaacccagagggtccggcgacaagccgtattgcggctgcggtcatggagaaggtcactggttatgcatacggaatacagtttgcaagcttttatatggacggtgagttcatcccgcacgtccgcatgatcgagaccggaagacagagcaacagtctggcaaaccagtttggtatgccatacgttctcacagcggagccacgatcatatgacagggcgacgttgaattacaactggcagatgcgcggaacagatgcattctcggtatattcgggcgtaacagataccatcaacggagagagtgcaagccaggcggtgtcatcagtgctcagatttcttacgcgtatgggcgtgataaggtataactgtcatgccggctatatatcgacgatacttgatgaggaggatctgctcagcatcagatcggagcatgcggcaggatttttcaaaaaactcgttcagccaggggatgaggtggtgagaggtgacatcatagccaacatcatcaacccgatgacaggtgagaacaccacagacatatatgcgccgacggacggaatcatattctactgccagaactcgccgatgatataccagaattcggtgatatttaagatgataagaaggctacataactaagataggataggtatgataagtttacagaaggatacatattgtatttctttataaagctttaataaaataataaatttatattgaaaagaacagaataattggtgtattatacaaaaatttgtaaactgatacaaaaacactacaaaaaaatcaagataaatgctattataaaataattgagataaaagggcggaaaatattttcgcctgcatgaaaaacgcttttactatggaggtatgacatgagtaaggtcaagagagtgtatgttgagaaaaagcctgactatgcggtcaaggcaaaggaacttcacgaagagattaagaactacctgggaatcaaagctgagtatgtaagagtccttgtcagatatgacattgagaatatatcggatgagacctacagcaaggcgcttgagacagtatttgcagagccaccagtagatgttatctacgagggcgagccagagcttgcagctacagacaaggtattctcagtagaggcacttcctggtcagttcgatcagagggcggattcagcagagcagtgtgtaaagcttcttgcagaggatgaggagcctgtcatcaagactgccacaacatatgtactctcaggcgacgtgacagacgagcagctgaaggctgtcatggattactgtgtaaaccctgttgattcaagaatatgtggcatggagatccctgagactcttgtaactgagttcccggagccagccgatgttcatatatttgacggatttaaggatatggctgaggcagatctgaaggagctttatgactcacttggacttgccatgacattcaaggatttccttcacatccagaactacttcaagggcgaggagaagagagatccatccatgactgagatcagagtgctcgatacatactggtcagatcactgccgtcatacaacattctcaacagagctcacagatgtagagtttgatgaaggagattacaaggatcttcttgagaagacatttgacgcgtacagagcagagatgaaggagatgtacaaggacagagatgacaagtttgtatgtctcatggatatagctctgatgggtatgaagcagctcaaggcagcaggcaagctcgatgacatggaagtgtcagacgagatcaatgcatgttctatagttgttcctgtagtagtagacggagtagaggaagagtggcttgtattcttcaagaacgagactcacaaccatcctacagagatagagccattcggtggcgctgcaacatgtctgggcggagctatcagagacccactttcaggaagaggttatgtataccaggctatgagagttacaggtgcagctgatcctacaaagtcccttaaggatactatggagggcaagcttccacagcgtaagatcgtcacaacagctgctcgtggatacagctcatatggtaaccagatcggtcttgcaacaggtcttgtaaatgagatatatcatcctgattatgttgcaaagagaatggagatcggagcagtcatgggtgcagctccaagacgtgcagtaaagcgtctcacatctgatccgggagatgtcatcatccttctcggtggacgtacaggccgtgatggctgtggcggagctacaggttcatccaaggcccacacatcacactcacttgagacatgtggtgcagaggttcagaagggtaacccacctacagagagaaagatacagagactcttcagaagagaagaggtttcatctattataaagaagtgtaacgacttcggtgccggcggtgtgtcggtagccatcggtgagctggcagacggacttgtggtagaccttgacaaggtgccaaagaagtacgcaggacttgacggtacagagcttgcaatatcagagtcccaggagcgtatggctatagtggttgatcctaaggatgttgatactatgctcggatacgcagaggaggagaaccttgaggctgtagtagttgcaaaggttacagaggagcctagactggtactcaattggagaggcaaggacattgtaaatatctcacgtgcattcctgaataccaatggtgctcatcaggaaacagaggttaaggttgaggtgccaagcaaggcagacaattactttgactcagttaaggagccacaggatatcaagaaagcatggcttgatacactgtcagatctcaatgtatgttcacagaagggacttgttgagatgttcgacagctctatcggagccggaacagtaactatgccatacggcggtaagtatcagctgacacctacccagaccatgatagcaaagcttcctgtactcaagggtaagacagacactatcaccatgatgagctacggatttgatccatatctctcaagctggagcccatatcacggttcagtatatgcggtagttacatcggcagccaagatcgctgcagcaggtggagatgtgagcaagatcagactcacattccaggagtacttcaagagacttggtacagacccatacagatggggacagccattggcagcgctcctcggtgcatatgatgtacagataggacttggacttccatctatcggcggtaaggacagtatgtcaggtacattcaacgatatagacgtacctccaacacttgtatcatttgcagttgatgtggcaagttacatggatgttgtgacacctgagctcaagaaggctggaaatgtacttgtggagatggatatagataaggatgagaacgatatacctgtatatgagaatgttctctacatgtatgatctcctcaacaagaagataaaagagggcaagattcagtctgcatatgcagtaggatttggcggtatcatagaggctgtcagcaagatggcatttggaaataagctcggcgttgagcttgaggatacagttagcaagagagacttggtagccaagaattacggctccatcatccttgaggtcaaggcatctgatcttgatcagctcggcattcctgttaagaagatcggtaaggtcacaaaggagcctgtatttacatacaaggatgtcaccatcactatggatgaggctcttgcagcatggacaaagactcttgagaaggtattcccgacagagtccaatgtaccacagacagagattaagacagggctttttgatgctaagacagtttacacatcaaggaacaaggttgcaaagccaaaggtattcataccggtattccctggtacaaactgtgagtacgactcagcaaaggcatttgagagagctggcgcagacgtacagacgatagtattcaggaatatgacagcacagggaatcagagattcagttgacgcatttgcaaaggcgatcagcgattcacagatcatcatgttcccaggtggattttcagcaggtgatgagcctgacggatctggtaagttcatcgcaactgcattccgtaatgccaagatctcagaggaagtcatgaagctcctgaacgagagagacggacttgcactcggtatctgcaacggattccaggcactcatcaagcttggacttgtgccttacggcgagatcagaccacagacagatgactcacctacactgacaatgaacagtatcggccgtcatcagtccaagatggtatacacaaaggttgttactaacaagagcccatggctgaagaaggcagagctcggcggagtatacacaattcctatctcacacggtgagggacgtttcgttgcaagcaaggaatggtgcgagaagctcttcgcaaatggacaggttgcaacacagtatgtcgacatgaacggcaatccaaccatggatgagtactacaatgtcaacggttcatactacgcaatcgagggtattacaagccctgatggacgtgtccttggtaagatgggtcactcagagcgtatcggacaggctgtagctgtgaacgtatacggcgatcagaaccagaagatattcgagagtggtgtggagtacttcaagtaagatatagaaataaatattataattatgtcagagacggggacaggtgagatgatgaacctgttcccgttaattatatgaataggagaagagtatggtacgaaatacagatcatacatttgccgtatgtgcatatagagagtctccatatttggatgaatgtgtcagatcacttgtggagcagactgtgaaaacaaatatagcgatatatacatcaactccaaacaactatatacgtggaatcgctgacaaatacgatattccattatatgtcaatgaagaaggtgggcagggaatccaggcggactggaactttgcatacaacaatgcaaagactagatatgttactgttgcacatcaggacgatatatatgaaaaaaactatgttaaagcgctgcttaggtgtgcagagcgctatgatgactggagtattttttatgtggattatacgccgataaagaatggtgattgcagtaaaagagatgtgaacagccgtataagaagattcctgagatggccggtgaagaacaaagacaaggctgataggaagtggagaaagaaattaagcctttgccttggcaatacgatagtatgtccgctggtaacatataacaaaggaagactgggggacaacgtatttacatctgagtacgactttaatctggactgggatacattttataaacttgcatgccagcctggaagatttctgtatgtcgataaggtacttggacactatagaattcatgatggtgcgaccagcaaagattttatagtggatcacagacgagagaaagaggataggagtatgtttgagaagttctggccaagatggattgcaaggctgataatggtattttataaatttgcgtataggacgtatgggtaggaagggataactagagtgaaaagcagaaagaaaaatttgaaatattatcttattgtatttttcataccggtaatatgtatgatcgtacatatggctctaaaaaaatgttatccatttggggataataccatacttattggagatgctgacttccaatattatgtgtttatggattctctgttcgacaagataaaagatgggggatctctgttttatagctgggattttggaatgggatatgattattattcaaacttcttttattatcttgccagtccttttaatgtattggcactttttatcggaatttgggatatggagataggtgttgttacggtcatgatagtgcagacagcagtgtgtggcgtaacgatgttatattacctaaatcatacaagaagagttgagcaaaggggttatacgtggtataaggaaatgctgaatgttgtccttgctttagcatattcaatgagtggttatatgctggcatatctgtataattacatatggcttataagtcttcttatggctccgttagttatgctgggagtggagagagtggcaatgggggagggaaagaaattatatttcttttcgttgattgttgtatttttaacaaatttttatttcgcatggtttatctgtatattatcgttattatggtttattgatcaggagaagaaagataagagaactgtcataaaaagctttttacagttctgcgccctctcagtcggagcagctatggtatctgcagtggttcttgtgccgtgttatcttgcggtactaaatagaaacgatgtatggggcggaatagattcaaatgcagcaggaatgtttggcaacatagggaattttatccagagcatgttctgggatcattatgtagataaaaatacaaaagttgttcagttttatcctgaattaggatattgtggtgtgtttaccattatattgtgtctgctttattgtactaacgtcaagatacgcagaaaaattagaataaagagaacgatagaaatattggcaatggcaatatgcctgaacttttattggactgtgtatgtttttcatggatttaccattcctcatctgctgtttggcaggtttgaatttatatttgtgatattactgatagttacagctcatgatatgttatgtaattggtataggataaaagtatcgcagataatatacctgattgtgatctcaggagtgttaattatgattgcggtgatgttaaataataatactcagaatctgctgtgttatctggggactatattgatcacaacatacataatattttgtctgtttttttattgtagaggaagtattaagaagaaaagtcttatgataaatctcgtattggtagcgatgttggaacttgtatcaaatttcttacttgccaatacaaattcgtacagtgttaaaagggagagaatcatagcagctgataagtgggcggatatatatgatgaccttgaacttgatgctggagagagaaagacagcatatatacagtctcagtcatacataaaatactcgcagacagatttttttgcatcgtccataaatatggattttcttttttctgtaggacgacttggattagcgtatcaaaataatggaagttcttatgcttatagaggaactactccattgacagcggcaatgttcaatgtgcggtatgtattgtcagatagatccgtatactggggaggttatgataagtgcagtgagagcactgtatataatgattacttgaggaaaaatcagaattgtgttgtatatgaagagaatagcctgcttggtataggatattggatgcctgaagatattgagaacatagaaataggtgataaaagtccgttcgagctacagaatgatatagctcagtctgtatctggagaacaaatatttacacctgcggtatggcagtctgcgagtgtagaatatgaaggttgtgatatatacgacatggatggttttgtatgtaaatatcaaaatgtcgataatgatacaaataataagccttggatagaatacacatgcattgtcggtgaagatgcagacctgtatatctatgtatcagaccagaattcactctcgtgtgaagtttgggtagatgatgatgagataaatggtcagtcgtcttattcaagtccgggtgaaatgctgcatatagggaatgtgacatgtgggcaaactgtaaaaataaaggtaaacaattactcttcatatggagaaattggaaatacagagttggctgcatacagattgaatcaaaagaatcttggaatctgtctgaactgcatgaaaattaagaaaatcaaaatcaataatatgtatggcaatatatttgagtgtaatgcagatgttgaaaaagcaggaatattatgtctggcaataccgtattcaaaaggatttactgcttatgttgatggtgaaaagaatgatatagttgcagtagctggtggactgtgtggacttaaagttgataaaggcagtcatatagtgagattagaatatgttccgtatggattttgggctggactaatgattacagttataggtatattggggagcgttggacattatttgtacttaaattatggtcgaaaagaaaaaatatgagggaatattagaaagatgaacaagagaagactaaaaatcattggaataattgtgttttgtatatgctttgtaatgttattttttctgaaaatgaaatccgcagagttgataatagatgatttggattttcgtgaaaatgcaggagatagcatatggaagaatatatcgtattcttttcattatgggaacggcagactgcttggaaatactctgagcgcggtgtatgcaaatcatagattgttctatgcaatatcgggagcagggatgctgttattgcttgtattattgccggtgtatatttttgacatatcatatgtatatatccctgtgatcggtacgttattgatactgtgcaatgagtgtttctggggggaactttatttgtggtcaagcgctttagcaaattatattcctccaataataattacggaattatgtatcattatgtttgaacacctgaatgaaaggaaaaatatatcatattttagcttgatattgcttgtaatgctatcatttatgggacagttatatgttgaacatatgacggtaataacaataacacttgcggttgccttatgcatttgtggagataaaataacaatcagatatatttacagaatctgttatttaatctctacagtgtttggtggaataattatgatgattataccaaaagtgttttctcataatgattcacagcaaaattatagagctgtgataatgtcggatatggatagcaatatagatgagatgatacttagtatatatgaaaaattaagtatagttcttgtgttcactttgataatggcttttattatcatttttaagcgggaacgaaaatgtgtgcattctcatgtgacaaaatcggggttcgtaaagaaaatcgccacatatgcgctggttttgatgtttattggatttctgattcgggagggatgtgttcgtgtattattgttgttagtttatttggggatagttgtaatatctacagaaagtataaagtatgttgatgataagaaatttagagttgctatgtatactttaacagcattagcaaatgtggtattggtatgttcattgccggttgcgttgccgggtgcaagattgatatatatatcatattattgctttgttatagagagtgtactatatctgcagtatatatcagaacatgtgaagaaaggcgtagtaggaagagaaaatggttataaaaggaaagagattttttaagtacattattgttttttttgtgccgactgtgttgctgataactcatatgtttatggctggatgttatccgtttggagataaaaccatactaatgggggatgcaaacagtcagtatatttcgttcatgaaattgctaattgataaagtgaaaaatggtgattccatattatttggctggcatataggtatgggatcagaattttttcagatattttgttattatctggctagtccttttaatatcatagcgatactgataggaatgtgggatcttgagcttggtgttgtagttacaatgcttgttcagattggaatgtgtgctgtgactatgatgtattatttgtcgcacactgaaagaaacatagaaaaaagtgaaaaattaaattgttgggtgtgtatcttattttctctggcgtacgcgctctgtgattatatacttgcatatcaatataattatatatggcttatgtcattagttatggcaccgattgttatgctcggagttgaaaaattagtttggcagaataagatttcattgtatggaatgtcaatgataatagtgtttataaccaacttctactttgcgtggtttatctgtatattatcgtttgtatggcttatagatacgttacatggcagtaaaaaagagatgtttaattctgtaaagaattatttaattgtatcgtttctttcagcgatgtcagcatgttttgtattgctgccatgttattttgctattaagggaagaccaattaattccgtaaacatagatgatggttttgcagacaaatttggaagtataggaaattatttaaaaggttttttgtggggggatatcatagacataaatggaaaagtggtatttactaataataattatgtaggtataactacatttatacttgcactgttgtatatgttcattccgaatataaaattatcaagacggttgaagagatgttttattatattgttgttttcatttttccagaactgggcagttggtgtatatatatttcacggatttacatttccaaaccagattttcagcaggaatatgtttatattgatattgatattgattgtaacagcctttgaaactgttgttaatattaaaaatatcacagttgagagaaccgcattggcagcgacaattttagctttatttatttgtatttcattgtttggaagctctacagataagagtgcaatcagttatattggaagtatatttatttgtgtttatataattatgtgtattgtcatgtatgcaagaaatagtattgttaaaagagcattgattttaaatttggtcattgtaggaatattggaacttgtcatcaatgcatggattgtgagcaaggaaataagtgaatacagtaaggactataatgcatcagtaaatatatggagagatgattatgatgaaatagaaatgaccaatggagagagaaagacatcctgggtatgttctcagaatacaatgtcttattcagatacaaatatatactcgtcaatcatgtgtcgtgatattctggggtggaatagtaaattaggattagcatttcagtctaatggaggttcatatgcttacaagggaagtactccagttactgcgatgctgtcgaatgtcagatatgtgcttactgaccagccaacatattttggcggatatgatggagacggcaagaaggatttttatagtgagtatgtacaacaggaaaaagcatatggcgtatataaaagcagttatctggtcggactgggatttatgttcccggaaagtatagctgattgggatatgacaggaaatccatttgaggtacaaaaccagatttcgaatgagatacttggaattggagatgttttcagtgaagtagaagattatgattttcaagtgcagtcaaatggttgtgatatattatccgagaacaggggatgtgtaaattatagaaataccatgtcggagacaggcagatatcccaacatagtatattcatatatggttccggaagatatggatatgtatgtgtgtgcaaatgattctaaacaggttctaagttatgtatatctggactctgttccgcttgaagatgatggaacatatcttacacaaacagagacgctgcatgttggtgaagttaagaaaggtcagatagtgacattgctcataagtaataatacatcatataatgaagagagcggtaccaatatatacgtatacaaatataatgattcagttatggataaagtggatgagacacttcggagatcaacgttgaatgtggagaaaattacagatacacatgtatacggaaatatcaccacagataaagacggtatattatatacgtcaataccatattataggggatttaatgtgtatattgatggggaaaaatctgatataacaaaaataggaaatacgatgtgtggggttcgactgacagaaggaagacatgaggttgagttcaggtatattccatatggattgagatgtgggattatgttgagcgtattggggctggttacaatgcttgtatatataaaaaagagaagatagaaaaatacggctgtaggatggaatcctatagctgtatttttctatggatgggaattgattaattgactttgtatacctttaggtgaaagccgttcatatagtcatcgccgacatattcaagattattgacaaatgataactgagtacagtcaaaatatgtggatttaaacgtataatttttttctaccacagtgattgaatctgtagcgttggaaagtacattccctacactggctgttgatgaatcatcgtcatagtaatcgaaaatggatgaatcgattattatgtaagtgtcgccacttaaattatgattctctatagtatctttgtaatcatctagttcgtagtatgtggtgaagaagacatcattacatccaaacaattttgcagcatactgtaccagtagccatttatttgtagataccacaataaaattggaatccttagcaatgtcctcaagatgcatggtgttaggatatttgaagaagtatggacattctcttatgtttgaactaatgcagcagagtgcaagcgcaatcaccgttgatatagtggcgatattttgcctgttgataaagatgatagagaacaatcttctccaaaataatacaaaaattatcatcgctgcagggaaacataccatcaggtaacggtcaccatattctttagcctcatatagattggtggcatatgcaacagaaagacatgtgacaattatgccaaaaagcagtgcgatggtgacaatgctaaagtttgccataaataatgaatttactttttttatatggttgtttaaattttgcttcaggttgatgaaccattcttcacgtctaaacaggaatgcaagcagtaatacgaaaatgatcacaaatgctaatatggttagtgtatatatgatccaccagttcgtattaggagaaatcagttttattccaactaattctttatttatgtgagataatgccagtttaaattggtaatatattgatttgacgcgagggtttggggtggttatcggctgtgctccgctagtcgatgtatttatgccaaaggccttatatatggttttgggatatataacaaatgccaggattattgctaggattacgcttaagctgaatttcagtagtaccttgaaattcttcttaattaaccagtataagaacatgacagcacagataccgaatgcatatgggagaaagaaattgtcagttagggctccaaacaaagctgttattcctacaactatatagctggagattttccatcttttttcttccatataatatagcctagctatatagaatgtaaaaatgatggcaattgttgccacaagcatatacatacggacaaacatagtcatgcagagcatggcgagggtaaatgtactgaataaagtaccaatcagtcctgtaaatctggattttgtcataagcaggagcagacggtatatgtacaatgacataaatacaaacgctatcatgtttatgataaatcccagagcaaaaatatactgatcagggaagagagagcataaaaaattaagtatgaaaaaataaagtggcgggtgcaaatcacaggactggttatagtacactgatccaaaagaaaaacgttcccctttttgtactgtgagatatttggtgaagacatcaccgttgatccatgtatttagattcttatatgcagttgtatcatcgttgtattgaatgtatggttcgtaataggagttggcaagaccaaatgaccatgcttcatcagaatgaaaagtgtttttctgcacaaagaagccatagctgaaacggcatataccaagtagaatgattactgataatagtatggatgtgatttttcgtgaagagtttattttgtttattgtgttcattattttccccctgattatatctatttataagtaaaagtgcttatagagattcatagtggttgataattaatatatatttgatataattttatttatatatgtaattagatcactatcatagaaatataacatgaaaattgtatttgtgtaaatacgaaatatatacagaactcatagtaataagaatggagataatacggatgtcgaaaaccgagagaattaatagatggataaaatatataattgctttttgtattcctgcggtatgtatatttgtacatatgatagctaataaatgttatccatttggagacaatacaattcttgttggagatgcgaattctcagtactatgtgtttacaaggatgctattaaataaaatagaagatggaagttcgatactgtttgactggcatgctggcatggggtatgagttttaccagaacttcttttattatcttgctagtccttttaatataattgcagtggttataggtcactggaatcttgaacttggtgttgttctcaccatgatttttcaggttggaatgtgttcactgactatgatgtattatctttgtcacacagcaagaaataaaagagagaataaaagtatcaatacatggatatgcctattgatagcagtatcatatgctatgtgtgactatatggtcgcttaccaatatacatatatatggcttatcagtctaatattggttccgattgtcatgctgggagtagagaagatattcagaggtgagggtggaaaaatttatatagtagccatgacattggttttcataacaaatttttattttgcgtggtttgtttgtctgctgtcggtgatatgggcagtggattgtcttgatacaaggggaaaacgatggtggcgatgtggagcagaatatattgggtattcaattttatcagctgcaatatccgcatttgttttgattccatgttatatctcagtagtgaacaataaatatacaatgagtgtcgatgttaatccttttaagactgttggaaatattgcaaattttatacagggatttttatggggatcatccatagatacgttgggaagttctatatacacaaataataactatatggggattatcattcttggatgtgtgatactgtttgctgttgaccgtaatataaagttaaaaaacaggctaaaaaggatagtaggtatagcggtgatgattatagccagcaactggcttgctggaatatatgtctttcatgggtttacttaccctaacatgttttgtaacagacaagcatttatcatatctgtattgatattaatatctgcgtttgagtttttggttgatattccagaattacggataaaagatatgatcatctttatatctgtttatgcaattatgattgcatatgcattatttgaaaatacagagatggaaagtgttgtagtatatcttgtaacgatatgcatagttctttatttcttagtatatgtttggctgtatgttactcgtagaattaagaagagcacgttgatagtgaattttattgtgataggatttattgaacttatatcaaattactattttgtgagcggtgacagttatgatgtgagcatggacaggaaggcagatactaaaaaatggcaggaaatttataatgatataaaatttgagaaaggtgagagaaagacatcctggattgcctcacagaacaatatggcatactcagatacgaatatattttcatcaatcctaaacaggggtgtatggaacatttatgaggcactgggacttgtatatcagggaaatggcagaacatttgtttatagaggaacgacacctgtaacatcgatgctgtttaatgttagaaatgtactcacagatagcgcaatttattatgggggatacaaagctgttgaaaataatcagatacataattcatatatggaaaatgatattgagttgcagctttgtgaaaatcaatatctttctggtttgggatttatggttgatgattctatttgcaattggaatgttgagtcagacaatccttttgaagtacagaattatttcacatcaaatgtaatggatgtgggtgatgcttttgaagatgtgggaataacagaatgggatgtagctggagatggctgcgagatagctgcgaaagataagaaaactcttagttacacaaatgtgttgcagtcagataattattattcccgaattgcgtattactatacagttccggatgatatggatatgtatgtacatataaaagataaacatcagacaataacttctgtttatgttgatggaaatgctgtgttggatgatagtacatataagagcccagcggaaatgatacatataggaaatgtaaaaaagggacagaggataatccttttgatggacaacaatacttctccgggtgagagcagcatgaccaatatttatgtatataagtataatgatgctgtaatgcagcaggttctggccaaggttggagatctttattatgatgtgacaaagtttgatgggacaactgtacagggaaacataaatgcatcaaaagacgggattatgtatacatcaattccttactataaaggctggaaagcatacgttgacggtgaacaggcggatataataaagattggaaacgctttatgcggagtgaagctatccagtggatcacatacagtagaattcaaatattttccatatggattgaaattagggctgataataagtatgatcggtatatttgtagcaggtgtaatagaattttataataaaagaaaaggcttaggggtacgggaaggataaatatggcagaaatattatacattgttgtaccgtgttataacgaagatgaagttttagatgagacaacaaagagattggtagataaactcaatagaatgatgcagcttgggaaagttgatgctaagagccgtatattatatgtagatgatggatcttcagacaatacatggcagcatatagggatgctgcatgagagagagcctttggttatggggattaagttgtctagaaataagggacatcagaatgcactgcttgcagggctgtttgaggcagcggagcatgcagatatgatagtttcgatggatgcggatcttcaggacgatattgaagtactcgacaaatttgtggatgagtattataaaggcagccagatcgtatatggtgttagaaaatcaagaaagaatgattctgttttcaagaaaaccacggctgttttgttctataagatgatgaaagctatgggtgttgagttggtgtacaaccatgcggattacagacttatgagtaagagagcagttcaggaactgatgaattataaagaggtgaatctgttccttaggggaattataccacttataggatttaaaagttcagttgtagagtatgacagaggctctagatttgcaggaaagagcaaatatccattgagaaagatgatctattttgctatagatgggctcacatcgacaagtgtaagacctataaggatgattaccatgtttggattactttcggttgttatcagtattgtctatgcaatatatgtacttattggacattttaatggagcaactataccaggctggactacatctgtattgttgatatgtttttttgggggggcacaggttatgtgtactggaatagttggagaatacgtcggtaagatatatctggaaactaaaagtagaccaagatatataattgaagaaaaaaaagaacattaagtatagattatatgtgaggtttaagtgtatggcgggattattgagtgtaatagtaccagtgtataatgctgaaaaatatttgcctaaatgtttagatagtattagaaatcagacatatgaggatatagaggtgatactaataaatgatggatctacggataatagtgaaaatatatgtgagcattatgtaaaaaatgatagaagattcatactgtataatattacaaattcaggtcctgcgtgtgcaagaaatatggggttagaagttgctagaggagattatatttcgtttgtggattcggacgattatatagaacctgatatatatgaaaaacttatctattcaatagaacacgatatggtgcaaatggcaatttgtaattggtatatatatatgaatgcaaaaaaaaagtctgatataggcgaaaaaggtataataaaaagcaaaaaattgacatatattatagtttctgatgatgaaaagggtggggggggatatctttggaataaagtaatttgcaagaaaacaatatataataattcggggcagttaataaagtttaatacggaagtagatgtatatgaagataagatatggctgttaaaggtattgaaaaatgttcatgaaataatgcttatggattatgtgggctataattatattgtgcatgaaaaaagcttgacgaataggagatattcggatcgaatagataattttataaaggcgtggaaattaattgagcgtgagcttgatgataaattaacaaaatcaatatatgaatttagaacgctgtggtttttaacatatttttggaatgtatttaaagaacgcaggagtgatctaatacaggattactggtatgataataagtcaacagtgcgtttagggttaaaagggattagggaatatggtgcgtatatattgattgaattgatttacaagatgatgaggataaaatgatttatattataacacataaaaagtataaacaaatagtagatgatggtttatataaaaatattttagttggggctaggaatagagaagtaaatggaaattggttaaaagatgatgaaggaatcaatatttctgaaaaaaacagcaactattgtgaattaacaggtatatactggatatggaaaaatacaagtgataatgttgttggggtatgccattatagacgttatttttgtgagaaatgtttacacgcaaaaacaacattattgtcgagaaaaagcgtagacaattatctctgtgaatgtgatattattatgccgcgaaaggtatggtttcatgggaaaacagcattagatttttataagaagtatcatgatataaatgcatggaatctaatggttgacacgattataaaaaaatacccgaattataaatgtgatatagagtggtttgaagggcaaaaaaaagggtattgctataacatgtttataacaaataaaatggtgtttgataaatattgtgaatggctatttgatatattatttgaactcgaaaaacatataaatgtagagaaatatggagtatataataaacgagtgtatggatttttggctgaaagaatgataaatatttggattcaccataataagctatgtgttgtggaattgccggtgtataattctgaattatttagtatgttgttgaacaaaacaaaaaagtatatcaataggaagatacataggattacagattactagaagggatagcaattgttgtggataagaaaaaaatagcggcaatagtggttacatataatagatgtgacttgcttgttgaatgtttagaggcattgttaaaatttgctccagaggtagatgttattgtaataaataatgcgagcacggatgaaacagaatctgttttgcagaaatatataaaagaaagcaatattatatattataatactgaaaaaaatattggcggagcaggtgggtttaatttgggaattaaaaaggcttatttgcttggctataaatatttttggttgatggatgatgatactatagtacaggaaaattcattacgagaattgttggtatgtgtgaaagaacttcacggtaaattcggctttgtttcaagtgaggcagtgtgggtcgatggaacagagtgtaaaatgaatagacataaaatggcaaaaaataaaggtgaaaagtatatagttagtgagaatgcattgccgataaaaacagcgacatttgtatcttttttcactaccagtaaagttattgaagatgttgggttgccaataaaagattactttatatggggggatgatactgaatattctttacgaatatctagaaaatatccatgctattatgccgtaaatagtaaagtgattcacaaaatgaaagagaataagtctacggctaagttttatcaattagatgatttgaccaggatagatagaatttcatattcagtgagaaatgatgtgtgcacatataaaagaagaaatatactagaattttttgaagttactatgtatttggtttataatttgttgttggttataattaaagacaatccatacaagaggtataagataagaaaaattatgggcgcgtacataaaaggattattttcgttttcaccatcaatagagtatgtttgtaagcgaaaatagttgcagtatgcagaagtttatcggaaaagggaacttggtagaatgaagaaatttgcattttttttaccccagttttatgaaatagaagataataatagatggtgggggaagggatttacagagtggacgaatatacgaaattctaaaagcttatataaaggacatagaattcaaaaaccattagataacagtaagtattataatttgttagacaaaaaaacaatgcagtggcaaacggaacttatgtataagtatggtatagaagggatgatatattatcattattattttggaaaagaaaaaatgattatggagaaaccagctgaaaatttattgaaatggaatgatataaaacagcctttctttttttgttgggcaaatcattcattttcaaaagtaggatggttgaaaagagaaatattagtagaacaaatatatggagatgttgatgaatgggaaaaacattttaattatctattgccattttttaaagatgatagatatgtgaaagatgataacaaacctattctgatgctgtttaaatcagaattttcagaaaaaaatagcatgtgtgaatattttgataaaaggtgtaaggatgtggggtttgatggaatctgcattatagaaacctattttggaataggatggccggagacttatgaaaaaataagaaatgatagatcgatatgtactaaatatatatatataagagaacctaatttcgagacatgtatgtatgaatattcgcttggcaaattaaaatataaattgaaaatgtttcggagattattgtctaggataaaattcacaataaaacctgaaatattagatggtgaaacactagttaaagagaaaaacaaatatgaaccgtttggcgacgatattatacatggtttttcttttcaatgggatagtacaccaagacatgggagaagagggtatgttataaaacctgtggcaaaagaaacttttgataactatatgaaaagggtagaaaatgaaaagtatttttttataaatgcgtggaatgagtggtcggaaggaatgattctagaacctacggatataaacggatataaatatctagaatgggtaaaagattgggatgtataatgttaaaagattatttaaaaatgttatatcatacggcgaagtggaaaaatagaaataaacataattcaactaaacctgggaatttgtttgatattgatagtgttagagtaggtaattatacatatggagacttaacagttctaactttcagtaaagaatcaagattagaaattggaaatttttgttctattgcaggaggtgttgtgtttgtgttaaatgccgatcatgccgttaataggatttcaacatttccgtataaagtaatgtgtttgtatacagaacgaacagaggctgtttcaaaaggtaatattatagtaaatgatgatgtatggatagggcaaaatgcggttatcttgtcgggggttacaatagggcaaggagcagtggttgctgcaggtgcaattgtgactaaagatgtccccccgtatgccattgtggcaggggttccggcaaaagtgattaagtataggttttcgccggagttgattgctgaattaatgaaaataaattatagtaaattaacagaagatatggttagaaaacatataaatgaattgtatacagatttgaatattgttaagcaattggaatggcttccaaagaggtaaatgtataatagagactcttctgataattgtatagaaaatactgagaacgcgtttactttaaaaataacttgacacgataaaaaggggaataaaatctatggcagacagactaaagcaaattatattaataattacattattaattactattgtaggggggggatttgcagtctataagtttgttgtacatgaaaaaacgcaggaagctagattaacgaaacttgaaaatgatgtttcgttgttgaaagctgaaacaaatactgagtcaaaacaatggaaagatggtaactttaattatttggcaatcggaaatagcattacattacattctaaatctgactattggtggaacgaatgtggcatggcagcaagtaaaacagaaaatgattatgtacatcagctcaaaaatctaattgaaaaaggaacagagcaggttgatgaatatgcatataatttttcgacatgggagatgcaaaaaaatgatcgagcagaaactttgaatctattggatggtttgcttagtgataggcttaatataattactattcagttaggtgaaaatgtcatagatacaaacacatttgaaacagattttagggaattgattgattatgtaatcgaaaaaagccataatgctcagattattattataggtgatttttgggagaatggagaaagagacaatataaaaagcaaagtcgcgagagagctaaattgtgattacgtagatttaagtaaaataaaggataatgaacaatattttgtgggattgggtacaacggtttatggaaatgatggcgttgctcatgaaataaatcatgatggtgttgcaaaacacccaggagatgatgctatgaaatatatagctgaggagatatatataagagttaaggataagtaatatgaacaaaccattattaagtatatgtattcctacatataacagagcggaatatttaaaaaaaagtatagagtcagtgatatgccaagaagagtttggtttgggaaatgttgagattgtaatttcggataatttatctacagatgatactgaaatagtaggacgagagtattctgatcgatatccgaatatcatatatcacaggaatgataagaatattaataatgataattttccacttgtattaagtttgggaaatggtacattgagaagactttgtaatgataccttatgttttgaaaaaggttctctaaaatatatatgtaatattatcaggaagttttcagaaaaaaaaccttttttatgttggtgtggattaaacaaaaagtccgaaatagaagaattatcatttgaagagggtgttaaagaaattagctactggataacgtctatagcatgttttagcatatgggacaccgagtgcaatgatcttgagaacgatacatatggagcagaactattattatggcaagtgcggaaatctcttgaattagcaagtaagaagggttcaatggttttaattaataaacatcttacatattctcaggaagttaaaggcaagaatgtaagctatggattatataaagtgttctatcagaactattttactttatatgatccatattttgaatctggcaggctttcagtagaagataagaattttcttgaagaagatttactattaagattctttccagcatggtgtgtcaaatggaaaatgcaggatagttctttacgatattccaagactgaggatttgcgtgatgcaatatataaacaatatcacgacaagccatattggggaagatataaaagaatttataataaaatatatataacaacaaagatcaagaatgtactaaaaaggataattaaatatgacagaaactagtgtgaaaaaaaataccatttttaatgcaataaagtcggtttttggtattatttatccgttaatcacttttccgtatatttctcgtgtacttatgacagagaatgttggcaaaattaattttagcaattctgtagttagttattattccttaatagcgtcattaggagttactacctatgcagtaagggaatgctcaagatatagagatgataaggaaaaacttgaagaaacggctggacagatattgtctattaatcttttgtcgacaattgtggcttacattgcgctagctataacacttgtgtgtgcaagaaaattggataattatagaacattaattattattcagagtactacaattttatttacaactcttggtgctgattggataaatacagcaatggaagattttaagttcattgcgataagaaccataggaatgcaggcgttttctcttgtgataatgtttatttttatccataagccagaagattatattttatatgcagctataagtgtagtggcaactagtggagcaaatatagccaatattttttataggcgaagatattgtaaaacaaaacttacggtacatattcattttaagaagtattttccgccaatattgttgcttttttccttaatattgtctcagacaatttatacaagttctgatacaactatattaggacttattaagggggattatgaggttggactatatagtacatcggttaaaatatataatattgtcaatacagttgttgcctctgttgcctgggttgtaatgccacagttgtcgagtgcttttccaagaaagcaatatacgaaaatcaatgaattgcttaagtactcattaaattttattgttgtgctaggaatgccatgtcttgtgggattaaatgtggttaccaatgaaataattctattaatagcaggaaaaagctatttgggtgcagcgctttcgctaagaatcttaacaatatcattggctttttcatttgttagtggctggattggaaatatgatgatgctaccggcaggaaaagaaaaaatatgcttatattcttcaataatgtcagccgtaattaatatttttttaaatttaattttgataccaatatggggattaaatgcagccgcaatgaccactgcaatatctgagtttgttggcattataatgaaaattccatttatagataagagtataagaatatatgggttaagacaagtatttattgcaccaataattggatgtgttggaattataggtgtaagtggtttggtgaggcgtgtggttgattcatcatacttgattgcaatttttacaattgctgtcagtgctattgtttatgttttgatattaattattttaaaaaatgagtttgcaatgaattttatcaggcctattatcagaagattaaaaaggagctaagtaaaggatgaaagttgtattattagcgggtggatttggaactaggatatcagaagaatcacaatttaagccaaaacctatggccgatattgggggacagcctatattatggcatattatgaaagaatatgcttattatggtcatactgattttataatatgtgctggatataaacagcaagtcattaaaaagtggtttgcagattatttccttcgaaatagtgacgtgacatttgattatcaaaatggcaggaatgaaatgtatattaacgagagtcatctagaaccttggaaggtaactattgttgatactgggttaaatacaatgacaggaggacgaataaaacgtgtacagaagtatgttggcaatgaagatttcctgatgacatatggagatggtgtatgcgatgtagatataaataagttgattgattttcataatgaacaaggtaaactggctacgttaacagctgtattgcaagatcaatccaaaggtgttttggatattgggggggataatgctgttaagtctttccgtgagaagaatttgtcagatggagcacccattaatgcaggatatatggtgttaagtccaaaggtgtttgattatattgagggtgatgatacagtgtttgaaaaagagccgctggagcggctggcaaatgaggggcagttgatgtcatatatgcataaaggattttggcagtgcatggataatatccgtgaaaaagaaatgcttgaaaaactaatagaaaataaaaaggcaccatggatgaaatgggagaagtaaaatgttagagttatcgttttttaaaggtaagaaagtccttgttacaggccatacaggttttaagggtacatggctttgcagaattttagtcaatgcgggggcagatgtaacaggatatagccttcagccatctacaaatccaaatttgtattcgttatctgatttggatgataaaatgaatagcataattggagatattcgagattttggacatttgaaaagtgtatttgaagaatttcaaccggaaatcgttatgcatttagccgcacagccgattgtcagggatagttacaaagatcctagatatacatacgaaacaaatgttatgggaacagtgaatattatggagtgcgtgagattatgcccatgcgtgagatcgtttttaaatgtaacaacagataaagtttatcataataacgaatggtgttggggatatcgtgaagatgagccactggatggatatgatccttattcaaattcgaaatcatgttctgaacttgtaacacattcatataaaaatagtttttttacagatgaacgagtggcagtatcgactgcgcgagcaggaaatgtaattggtggtggtgactttgcgaaagatcgcattattcctgattgtgttcgtgcaatgaaggatggaagagtgatcggagtaagaaatccatattcgatcagaccgtatcagcatgtgttggagccgttagcagtttatctggaaattgttgaaaaacagtataaagatatcagatatgcggattattataatgttggacctgacgattgcgactgtgttactacgggagagttggtggatctgttttgcaaatattggggtgaagatgcaaagtgggaaaatcagagagagaagaacgcgccacacgaggcaaattttttgaaattagattgtagtaaaatcaagaaagtgtttggttggtcacctaggtggcatatggatgaatgtatggatatggtatgtcgattcagcaaagtgtggttatcaaatgaaaatgtaccagaagagatggataaagaaatatatgaattttttaaatagtagacaagaaggatagagggcaaaaaaatggctaattggacaaatgaagcagaagcgcggaatcatattaaagcattagttgctgaatattatcatgatttcagggaaccagctgattcaaaagagaattttaaaccaggggaccgaataagttatgcgtctcgtgtatacgatgagaaggagatgcagagccttacagatgcaatgctggatttttggttaacaactggacgattttcagatcagttcgagaagaaatttgctgaatggattggagtgaaatatgcgcatcttgtgaatagtggttcttctgcaaatctgattgcgttttcggttttgacagcaccggaacttggtgagcgccagatcaaacgtggagatgaagttataactgttgcatgtggattcccaacaacggttactccaatacttcaatatggagcagtacctgtatttgtggatgtaacagtgccacaatataatattgatgtaacacaattggaggaggcattgtcagaaaaaacaaaggcggttatgatagcgcatacgcttggaaacccgtttgacatcaaggttgttaaagctttttgcgataaacataacttgtggttggttgaggataattgtgatgcattaggaacacagtatgtaatagatggaaaaacaaagttttctggaacttggggtgatctgggaacaagtagtttctatccaccgcatcatatgactatgggtgaaggtggttgtgtgtatacagataatccgttattgcatagactgattctttcgtacagagattggggacgagattgtatttgcccatcaggtcatgataatttttgtggccatcgttatgatggacagtttggtgagcttccaaatggatatgatcacaagtatgtatatagccatttggggtataatttgaaagttacagatttgcaggcagcagtaggtgttgagcagttaaagaaattcccttcatttattgaacgaagaatacataattgggatagattgcgtaaggcattagagccaattgctgataaaattattcttcctgaacctgcagaagggagcagaccttcatggtttggattcctaatttcagtaaaagaaaaaacaggtatagatagaaataaggtaacaaaatatattgaggaacataatgtgcagactagattactttttagtggtaacttgatcaagcatccttgctttgatcagatccgtggtacggctgcatatcgtgtagttggtgaattgacaaatactgaatttattatgaatcatactttctgggtaggagtgtatccgggtatgacagataagatgattgattacatggctaaggttattattgaggctgtggagcagtaattagatgtgaacaattacatacgagggagatattcaatgaaagttagattagctgattatgtagcagattttttagttaaacacggagtaacagatgttttttcggttgttggcggaggcgcaatgcatttgaatgatgcacttggacacatccagggattgaaagttacatataatcatcatgaacaagcgtgtgcaatcgcagcggaagcatatgcgcgattagataatagaatagcagcagtttgcgtaacaacaggtccaggggggacaaatgctttaactggtgttgtaggaggctggcttgattcgattccgatgtttattataagtggccaggtaaaatatactacaacagttagatatgcattgaagtatacagagacaccccttcgtgcttgtggtgatcaggaatatgatatagttaagtctgttgaacctatgacaaagtatgcaacgatgatagaagatcctaagcagattcggtatgcattggaaaaggcttggcacttagcaacgacgggaaggccgggaccagtatggatcgatattccggttaactatcaaggtggatatattgaaacagatgatttggatgggtatgatcctgaagaagacgattccttgttaccatctaaagttactgatgcgacaatcagaactgtcttagaaaaaattaaaaaggccaagagacctgtgtttcatgcgggatatggaatcagactttctaatggatacgaagcattccggtcagttgctagaaaacttcatattccaatagtaacatattggaatgcggttgatttaatagaagacgataatcctttatattgtggaagagccggaaatatgggggatagaccggggaattgggcaattcagaatgcggatttaatactagcggttggaacgcgaatttcaatcaggcaggttggctataattgggagacgtgggccagagcagcagaagtaatcatggttgatatagataaggctgagatgaagaaacatacaatccatgtggaaatgcctatttgggcagatgcaagagatttcctaactaaactggatgatttagccactgctttagctccggtgaatagaagcgaggattggcttaagacctgccaaagatggaagaatgaatatccagttgtccttcctaaacattggaaagagaatgggaaaacggcgaatgtatacgcatttattcgatacttaagtagcagactccctgaaaatagtttaacggcagtttcaaatggagcatgttgcgtggtaggtaaccaagcgtatgtgatccaaaagggaagccgtatggctaacaatagcgcgattgcaagtatgggatatggtttgcctgcagcaataggaacttgtataggtggagggcgtcgacagaccatttgtcttgaaggagatggaagtataatgatgaaccttcaggaattgcagacggttctaacaaataaattgccaataaaaatatttcttatcaataatagtggatatcagtcaataagaattactcaaacaaatctatttaataaaaattttgtaggtattggagaagaatcaggagatttgtcttttccagagtttaagaaaattgcggaagcatttggatatccatattattcggcaagtagcaatgaagaaatgaaaaatatagttgacaaggttcttgacatagaaggaccggtattttgtgagattttcacagatacagaacaggtgtgggagccaaagagcagcacaaaacgattggaagatggaacgcttgttagcccacccttggaagatcttgcgccatttttacctagagaagaattgaaaaaacaaatgtttattccaatgatagaagaggtgtgaggaatgggtaagatcagtcttttagattgtactttaagagatggcggatatgtgaacaattggcattttggagaaaatacaataaaaggattttgtaaaaaaattgcacaaactggtgtggaaatatgtgaagtcggttttatcaaaggagaaacatataatgatgatgtgtctgtgtttcccgatacggatacatttaaaaaagtaattactccaaaatctaatacaatgaaatatgttggcatgatagatatgagtgctccagttgcaaaagaaaaaatagctccatatgatggaacatcaatcgatggtataagagttatttttaagaaaaacagaatcaaagaggcctttgagtattgtaagtttgttcagaagcagggctattttttgtctgttaattttgttggaacagatgcgtatactgataaagaatttattgacggaatagaattatttaattctattcacccggatgcggttgcgattgttgatagttttggtcttattaagagaaagcagtttttgcgattggtatatttggcggataataatttggaatctgagatagcgcttgcttatcatgcacataataatctgcaacaggcatttggaaatgcagaggcattagtggaaatgaatctgaaaagggatttaataatagatgcctgtgtatttggaatgggacgaggtgccggaaatctgaatctggaattattcgcagattatatgaacgagaattatgataagcattatctgattgaaccaatgcttgagataatggatgaatatctaaatgatatttataagaataaattttggggatattcgcttccgctatatttatctgcttcaacaggatgccatcctaattacgcaatatatttagctgaaaaggatagtctgacggtaaaggcgtttaatgaattattacatagcataccggatgaagataaaccgaagtttagcaaagataatgcggaaaagtattacagagagtttcaagagagttatgtggatgataagtctaccataggggaattatcaagtaaatttgacagtaaaaatatagtaattttggcacctggtcggagtataaatgactgtaaagcggatatattggcagaaatatcaaaagatgatacactttcgattgctttaaatttctgcgcagaagaatataagccggattatatttttagcagcaatatgagacgctttgcaaaaattcaaaacagaacaaaggcgaaatgtattataacatcaaatatgaaagaagcaactaataaagattatgttgtaaattatgcaagctattctatgaaaaatcctgatataattgacaattctggcttaatgcttattaagctattgatttcatgtggcgtaaaagctgtgaaaattgcgggcatggacggatattcaacatattatggaaataattatatgaattctaatcttgaatacgacttttcaaaacaggcaaaaaaaaggaatgaactcatttcttgtgaatttaaaactttatcaacattaatttcgatagagtttataacgcccacgcaatatgaattttagaagtcggagacgataataattagcagagtcgtaattgagatgaagctatgcttggattagcgtcaaatgaataccatagattctttagaatgattattgttggtatctttttgaggaggagtagcaagtgttgtacgaaatacagaatgtggaggaatagagttggtgtctattttgagagaaaataataaagtagtggatataaaagtagaaattgaaaatttaggggaatactacgactccggtattttatatatgaaagcaataacatataatcctttgggggtgaggcatgataaataatattgttactcaagatatggaagatatttattccggagatgttttgtgggaaaagttaaatggtaagacgattcttcttactggagcatatggtatgcttgcctcttatttagtatattttttggtatatataaggaatcagaaaaatgtgaatgttaacttaattgcagtagttagagatagaaataaatttttctcaaaattctctaatattggtgtattagataatgttactgtaattgaaaatgacatttctaaaccattagatattagtgaacaaattgattatattatccatgctgcatcgttggctagtccgcaatattatggtatttgtccggttgatgtattgatgccaaacactataggcacatattacttgcttcagttggcaagaagaaaaaaagttaaaagtttcttactgtttagtacatgtgatgtatatggggagccaaacacaataaatggaatgattacggagactgcatatggaaaaatggatactctggatatccataattgttacagtgagagtaaaagaatggcagaaacgatgtgcaaagctttcaatgtgcaatatggggtaccaactaagatagctcgaattgcacatacatacgctcctacaatggatattgatgatgatccaagggtgtttgcttcatttgtaaaagatattgtttcaggacatgatattgtgatgaaaagtgatggtatgagcaaaagaagtttttgctatattacagatgccattgtaggttattttatgatattgtttaaaggagtagacggagaggcatataatgtttgtaatacatctcaatttgtgagtattaaggagttagctgaaattctcgtatcaatatatccagagaagaaattaaaagttgtgcaaaaagaacgacaaaaatctgaacattatattgaaaataatttattagtgggatgcgattgcattcctgataattccaagttgatgaggttaggatggaatgcaaaagttgatattaagacgggatttaaaagagttattgatattatagggaatgtgtgattatttcgtcataaaaaatgatgctattgggaaaatatgaggatttggtataaatgactaaaagaaaagattatatagatactgcaaagttttgggctatttttttattgtttattgagcatagtcagttgtttgctaattttactggttattacaaatatttaaaaatatggatatgttcatgtcatatggcattgtttttcatcacttttggaatggttgcatcggatagcagaatcacaagcaaaaaagatgcagttagttttgtgaataaaagatatagaggattgatggttccatattttttatggagttttatatgcatcctcattaaatggtaaagcttttgctggtatactatatggtacaaacccatctttaggatatgcatgtacaaattcagttttctggtttttgcctgcgatgttttgtgcaacaattttgttccaaatattagttaatattggttattattttgaaacaaaaagagaaattgtatttggaatagaactaatggtatgttctgccattagtttattattgaaaagtatgcgacctaatatgggatttgtttggggaatagacatatcgtttacaggggttgttttaatgttgattgggttattattacgcccgcttatagacaaaatgtacgagctaaaaaagagtaaaattttaagcttatccttagtatgtcttttaattggaggtctatgtgcacagtttaatacgccagatgaatcatgggtttctataatggcattggcatattatggaaaatcatattggggatttataattttggcagttattagtagtttaggaattataggggggagtatgctgttagagaaatgtcgtctttttacatggctaggaagaaatagccttttgcttatgacattgcattttgttatactgagtagacttgtgacgttatgtcaaaaatattttggagttttaaacatggcagtggccatattatgtgccactatttgtatggcaatatgtgttccattggtttatttgattaataaatttgctcctgttcttaaaggaaaagagtaaacgcttcatagccagtatctacccattttaccccgattttgcaataattacttgcagttgtaaatgtcaatgaaaaagtttaccagtgcaatatcaataatgattacttattctttgttgtgatataacatagttgtaacagctcgatctaataagatataatcttagaaggaaacgaggtatgttacagatgaatcaacattatgaaccagaattcaagaagaagattgttcgtcttcattttgaagagggaagattcctcaaaggtcttgcagcagaatacggagtatcgcatgcaagtatctcaaattggacaaatcaattccgtgaagaatgccaaactaacgaagaagccaaagccgattatgattacatgaaggagaatcttcagctcaaaaagcagcttgcagaacttcaaaaggaaaatgactttctaaaaaagcagcggaattctttgcgaaggaaatcgattagaggcttatcgatttactcaaaaatacaacaaggaatttggacttagatggcttctcaggaagtttaatatctgtccaaatgcttataacaattatcttaaaaattgaaaagctgattatcatcaaaagaagaatgaaatcaaaaactctattcgaaaaatatatcactctcatggtggagttgatggttatagaaccatacatgcgtatctgattcgtacaggacacgatatcagtcgcttaacggttcacaaatatatgaatatcgaaatgcagttgttctcaatctctaggaaaaataaaacggagtacgaacatggtgttgcgcataaagtatatgagaacaaactgaatcaggattttcatgtagatgcgatcaatcaaaaatggtgtacagattttacttatctttttttgacagatggcagcaagcgttacaattgtactattcttgacttacatgaccgaagtgttattgcaagcataactgatagaaatataacctctgatttagcgaaaaggaccttagagaaggctattcattcccaacctgggatcgatttaagtaagcttctggttcattcagatcaaggaagtcagtacacttcaaaagagttcaccgaattttgtgagaaactcggtattactcaaagtatgagaaaagcaggatatccatatgacaatgctcctatggaaagatatttcaatacattgaaaaatgatcttatttaccagcattattatcatacagaagatgaactctacacagcgatcgaagaatttgcgtatgtacaatataatcatgtacgtccgcattcttataataattacaaaacgccttacgaggcacgctacggggttgcataaaccctgtggcagaaattaggtcgtagtgttacaaaaaagcttgaccacaacactttgcatagggatagaaacgcaaaacttacaattaaggagaataggttagattgctaatggataaggattgtagaatagtaataataattccatcatatgagccagatgatcggcttttaggattattaaatttattaaaccaaaatttattttctgtagtgttggtaaatgatggaagtgataaaaaatatgatatgtattttgatgctgcggaaagcaagtatggagttaaggtaattagatatagtgtgaatcagggaaagggatatgctataaaaaaggcatttgaatactgtattgaaacctatacgaatttgcaagggtgtataacggtagattctgatggtcaacattcgataaaatctattatggagctaaaaacagaggctgaaaaaagtaaagaatctttaatattaggagttagagattttaatggacctcaagttccggataaaagtaaatttggaaataatcttacaaggaaaatgtttaaactactttatagagttgacatatcggatacacagacaggactcagatatattccaaaaagttttatgctggaattgcttcatcttaaggaaaatagatttgaatttgaaacaaaaatgcttattgaggctataaagaataaagttgcaattaaggaggttgggattgagacgatttatgattccaaggagaatcatcagacacatttcagaccaatagttgattctgttagaatatataagctttttttaggcaatttttgcagatatgttttgtcaagtttgtcgtcttgtataatagatttatttatatttaacattatatgcattgtgtgcagacgtaaatttgactcgtatatatatatttctttagcaacaatcattgctagagttttttcgtctatttataattacatggtgaactatagatatgtatttatgagtaaaaagaaacatagggcaacaatgatacggtattttggcttggttgttattcagatgtgtttgagtgcatgtcttaccagcttatttgtaactataacaggagtatctgcggaattgtatgtaaaaattcctgtagatctgggcttgtttttcgtcagctattatatacaaaaaagatatgtttattagataaggggagagatatgaagaaaaagatattcaatatcatttgggctttggctagtgctatgctgtttcaaaagtttatatgtgatgatacgttagggtattctaatagtgtgatgccgcttattacatgtgcagttatatatattatgctgcagaaaggaacacaggcaggggataaaagaaaaataagttgtacacatgtactaggattcatttttgcatgtatgatttctatgggacattcattggatgtgaatgagacggctttttttgcctggcaacctatatgtgttgttttatttactcataatattgcaatattacttggaatgatttgggatgtaatagaaagaataaacgtgaaactaagcggtagtagacgcaatagaaggatatatattatttttaaacatcctatttttattttttgttttatacttctttgctggatgcctgtatttttggcggattttcctggcggattcaggtatgatgcaacggtggaattggctcaaagcgcaaatggttataatggaaatattccgttgttacattctttgatagtaacgaagctaattccttttgtatatgttattactggttcgtggaatgcaggagtcgcagtttatgtagtgattcagatgatattggccgctgcgatgtatacattcatactgaaatatttttattcaaaggaaataaacaaagacttgttactaggtctggtagcagtatgcgggttatttccggtaatacagatgcttgttgtacaggaagttagagatgtcatgtttagtctattgctcgtaaatactaccttttggatttatgtgatggctacggataaagattatttttttagtaggattcgacgaccaattttacttgcggtgtcaatagtactaacagtgtatgcaagaaacaataatatgggcattgttgtgccattgctgataattgcagttgtaattattgtttgtatagtaaacataaaaaaatatcaaagaggggttattgtgtttagtgtaacgacaatcatgttatatgttattgttggatgcatgcttactcttctatgtaaaccatataatgaggatccgtcgatcagtcagtcgttatctgtcatgtcacagcctatagtgagggcgtatatgaataatgatgattggacagatgaagagatagcggagttggaaaagtattttgatcttgataaaatgctttataacccggaaaatgctgattatacaaaaaataatttgaggctgtctgacaattttggcgagttttttggattttggtgtagaatgggtataaagtacccacgtgactatatagatggcatattggcaacaaatcagaatatgtggttcccaggaagtgttgtggatgggtataatcaatctggaattgaagggttttatcattataatgaacttgataagtgttatttatatatgggagatctggttgagtatccggctgaacataaaagttatttgccaagactgttaaaatactattcgaatataggattaaatatttcttttgagaaaataccagtggtttcgatgcttttttctataggcttttggttttggggagtgttaaatcttgtgttttatcttatgtacaaaaaaaataaaaaattgttatggccttcgggaataatgttgctctatatgtttatgtcatcctttgttccgttagtattgttgagatactttgcggcagtttttcttgctgcgccactactgatagtgtttacgttgcagccaagttgtgaaaatgtacaggaatcgggtacacatgaacgtgaattgaatagtgacggcttatgtgagggggcagattaaaaaattaaatgttctacaatcacaattggacacacgtaactattgatgaatttattgatgcgatagatgattacatgcattggtattctacaaaacgtattaaaatttcattaggagctatgagccctatggaatataggcggagtttaggactagtatcttagtccaaaaaaatatccgtaccctcagtggtcaactattataatagcgtttacatatgtaattgataattgatcacacccccacccactccataaactttctcatagccgtgctctgattcttcaccccggagtaagcgaacccaacagttctgctcggaataggagtgtcaagcggaagctcggtgatgacgcctgagtccagctgttcctgggcgaattcgcggactacgctggcaacgcccataccgatggcggcgaagtcgatgaggagatccatgttgttgatctccaggacctggctgcagcttatgccctgggagcggagatattcgtccacatgggtacgggttacattggcctcctcgagaaccatgagattggaattctcaaggatgtcaacggttgatatattggagatatcggtgttaattgaattaaaaatagtgttagaagcagaggtgccagatgaatgtctggtgtctctgcttttttcatcatgcttcggaactgaagcatcctcacctatggcatgggttagacctgagcttagcagagggatgaagttgcctttgatattgtttggaagatcatcagcgaaactatagtgagccttgtcatttgcacgctcgtagaaattgtccagatattcgggactggccacaaatacgtcgtggatctccctgacaggagagtagactatcccctttgggagctcggtgttgcagataaggcctatatctatatcttcatttctgagtaacttgatggtgttcacagttgagtggcagtcaatgctgaacttgatatttggattttctcttatgaagtccttcaggtagtccaagagtatgtgcttgcacagcgatgtgctcacaccgatccttatgtgtccgatcccaagttctttgtagttcttcagattttcctcacccatgttcagtgaatcgaaagccctctccacatactcgtagagcacctgtccctcctcggtcagtaccacgccccttgagcttctggaaaagagggcagtgccaagctctgcttcaagcttggatattgatttgctgatcgctggttggctgatgtagagctggcttgcagccttgctgatatttccggtctttgctactgtatgaaatatgacgtaattgttcagattacttatcatggcattcctccaagttataataactattctttttatatattgtaattatacctagatgagtgatattatcaagagtaagaatttgtatttagaaacaaatgataggaggactatacatatgggtatgaccatgactcagaagattttagctgctcatgcaggactgccatcagttgaagcaggacagcttatcgaggcagatttggatttagtattaggaaatgacgtaacaactccagtcgcaattcacgagatggagaagttcaacaagaaggaagtatttgacaagaagaagatagcacttgtcatggatcacttcacaccaaacaaggatatcaagagtgcagagcactgtaagtgtgtaagacagttctcagctgcaaatgagatcgagaactatttcgatgttggagcaatgggtatcgagcatgcgctccttccagagaaaggacttatcgtagcaggagagacatgtatcggtgcagactcacatacatgtacatacggagcactcggagcattctcgacaggtgtcggaagtacagatatggcagctggaatggtgacaggcaaggcttggttcaaggttccatcagccatcaagttcaacatcgttggcgagaaggcaaagtggatcagcggtaaggatgtcatccttcacatcatcggtatgatcggtgttgacggagcactttacaagtctatggagttcgttggcgagggcatcaagaacctcacaatggacgacagatttacaattgcaaatatggcgatcgaggcaggtgccaagaacggtatcttccctgttgatgagcttacagaagagtacatgaaggagcacagcacaaagtcatatacaaagtatgaggcagacgaggatgctgtatatgatgcagagtatacaatcgacctgtcacagcttaagccgacagttgctttccctcatctcccggagaacaccaggaccatcgacgaggttggcgatatcaagatcgatcaggtagtcatcggttcatgtacaaatggacgtatctcagatatgagaattgcagcagatatcatcaagggaagaaaggttgctgacggtgtcagagttatcgtcatccctggaacacaggatatctaccttcagtgcattgaggaaggtcttatgactatatttgtcaaggctggagcagtggtttcaactcctacatgcggaccatgtcttggaggacatatgggcgttatggcagcgggagagagagctgtatcaacaacaaaccgtaacttcgtaggacgtatgggtcacgttgactcagaggtatatcttgccagccctgctgtcgcagcagcttcagctatcacaggtaagatcagcagccctgacgaacttggtctgtaataaaaacatagaatatgaagaagtttgctaagcatgacaaagcaccccaaaaggtcgggctttcatgatttagcaaatttctgtagagataaaggagatagactatgaaagcacatggaacagtacacaaatatggtgacaacgtagatacagatgtaatcatccctgcaagatacctgaattcatcagatcctgcagagcttgcaaagagctgtatggaagatatagataaggatttcgttaagcgtgttaaacctggcgatatcatggtagcaagaaagaacttcggctgtggatcatctagagagcatgcacctatagccatcaaggcttcaggaataagctgtgtaattgcagagacatttgccagaatcttctataggaatgccatcaacatcggacttccgatcatcgagtgcccagaggcagcagaggctattcaggctggcgatgatgtggagatagatttcgacagtggtatgatctatgacagaactagaggaacagagttcaagggtcaggcattccctccgttcatgcaggagatcatcaagagcgagggactcatcaactacatcaataataaaaataaatagaaggagaaagaaaaatgcagtgtaatttagccgtaataaaaggcgatggtatcggccctgaggtagtcacagaggctatgaaggtgttagatacagtcggagagaagttcggacatacatttgactatgagcagatcctcatgggcggatgttcaatagatgcaacaggcgtaccgctcacagacgaggcagtggcagttgcaaagtcaaaggatgctgttctcctcggttcgattggaggaaatacatccacatcaccatggtataagctccctccaaacctccgcccggaggcaggactgttaaagatcagaaaagagcttggcctcttcgcaaaccttcgccctgcaaatctttatgatgagctgaaggaggcttgtccacttaaggcagagatcgcagagcgcggatttgacatgatgatgatgagagagctcaccggtggtctctacttcggcgagagacacacagaggaggttgacggagttatgacagctgttgataccctcacatacaatgagaacgagatcagaagaatagctatcaaggcatttgacatagctatgaagagaagaaagaaagtcacatcagttgacaaggcaaatgtccttgactcatcaagactttggagaaaggtcgttgagaaagtggcaaaggattaccctgaggttgagcttgagcacatgctcgtagacaactgtgcaatgcagcttgtgaaggatcctgcacagtttgacgtggttctcacagagaatatgttcggagatattctctcagacgaggcatccatgatctcaggttctatcggaatgctttcgtcagcatcaattaacgagacaaagttcggtatgtatgagccatcaggcggatcagcacctgacatagcaggacagaacaaggcgaatccaatagcaaccatcctgtcggcagcaatgatgctcagatacacatttgaccttgataaagaggcagatgcggttgagaacgctgtaaagcaggtgctcaaggacggatacagaaccatagatatccactcagagggaacacagctcgtaagctgctccgagatgggtgatcttatctgtgagagagtataatagccaaaaagaaatgtcataagcggacatttgagcccgccgggcgaataaagttaaagaataaaatttagaaatgtaagacgagagtacacattacaataccctctcgtctggaagggataaaaagatgaagagtgataatgttagggtaggaatgcagcaggcgccacacagatctctgttcaacgcactgggcatgacaaaggaagagatggagagacctttagtaggtatcgtatgttcatacaatgagatagttccaggacacatgaacctggataagatagcacaggcagtaaagatgggagttgccatggcaggcggtacacctgttatgttcccggctatcgctgtgtgtgatggtatagcaatgggacatatcggaatgaagtattcactggttacaagagatctgatcgcagactcaacggaggctatggctatagctcatcagtttgatgcactggttatgatccctaactgtgacaagaacgttcctggacttctcatggctgcagccagagtaaatgttccaacagtatttgtatctggtggtcctatgctcgctggacacgtaaagggagataagacaagtctttcaagcatgtttgaggctgttggttcatatgcagccggaaccatgactgaggaggatgtatacgagtatgagtgcaaaacatgtcctacatgtggatcatgttcaggtatgtacacagccaactcaatgaactgtctgacagaggctcttggaatgggacttccaggaaatggaactattccagccgtttattcagagagacttaagcttgcaaagcatgcaggtatggctgttatggatatgtacagaaagggcatcaaacctagagatatcatcacaaaggagtccatcatcaacgctctgacagttgatatggcacttggatgttcaaccaactccatgctccaccttccagccatcgcacatgagatcggcttcgacttcgatatctcatttgcaaatgagatcagcgcgaagacaccaaacctgtgccacctcgctcctgcaggccatacatacatggaggatctcaacgaggccggcggtgtgtatgcggttatcaagcagcttgctgatgcgggtctcatcaacaaggactgcatgacagttacaggcaagacaataggagaggctgttgcaggcagtgttaacaagaatcctgaggtcatcagacctatggacaatccatattcagttacaggtggtctggcagtgcttaagggtaaccttgcaccggacggctctgtagtaaagcgatcagcagttgtgcctgagatgctggctcacaagggccctgcaagggtatttgactgtgaggaggacgcgatcgcagctatcaagggtggtaagattgtagagggtgacgtggtagtcatcagatacgagggaccaaagggcggtcctggtatgagagagatgctcaatcctacatcagccatagcaggaatgggacttggttcatcagtagctcttatcacagatggaagattctcaggagcaagccgtggagcatccatcggacacgtatcacctgaggctgccgtgggcggacctatcgctcttgttgaggagggtgatatgatcgagatcgatatcaacaacctcagcatcaagcttgatgtctcagacgaggagcttgcaaagagaaaagctgcatggacaccaagagagccaagggttacaacaggctaccttgcaagatacgcagcaatggttacatcaggcaacagaggcgctgtgcttgaggtgccaaagaactagtcgataattgtgaaacatgcatgttttggacatctgatagggcaaggctaaacctctcagatgtaatcaatgtttggcagtttcacaattatctctacgatatgagagaaaagaaggagaagataataatgtcaaagatatcaggttctgaaattgttatagagtgccttaaagagcagggcgttgacaccgtgttcggttatccgggaggaaccatcctcaatgtatatgatgccctctacaagcaccaggatgagatcaaccatgtgctcacatcacatgagcagggcgctgcccatgcagcagatggatatgccagagctacaggcaaggtcggagtgtgtatggccacatcaggcccgggcgcgaccaaccttgtaacaggtatagccacagcatacatggattcaattcctgttgtagctatcacagcaaatgtaggtgtaaacatgctcggcaaggacagctttcaggagatagacattgcaggtgttgttatgccaatcaccaagcacagctttattgtaaagcacatagatgatcttgcgccaaccatcagacgagcgttcaagatcgcaaagagcggcagaccaggacctgtacttgtggatataacaaaggatgtaaccgcagcggagacagagtatacacctgagacaccggaggttattgagagaaagacagacaccatccgcgaggaggatgtgaataaggtcattgagatgatcaaggtttcaagaaggccatttatcatggcaggtggcggatgcattatctctggcgcgtcagcagagcttgcagaatttgcagataaggtggatgcacctgtgtgcgatacacttatgggaaagggcgcatttgacggaagaagcgagagatatacaggcatgatcggtatgcacggaacaaaggtgtccaacctcggtttgtcaagggcagatctcgtgatcgttgtgggagctagattctcagaccgagttatcggaaatgcatccaagtttgcgccaaatgcgaagatcatacatatagatatagatgcagccgagatagataagaacatccctacaaatgccagcatagttggcgatgcaaaggaagttctggagatactcaacggcaagcttgcaacacagtcgaacaagacatggatgtctgagatcgaagacctcaagaagcagaacccagatgtgtacagctttgacacattgaacggtcctgcagcgatcaagaagatatatgagctgacaaatggcgatgcaatcatcacgacggatgttggacagcatcagatgtgggctgcccagaactatacatttaaggagccaagaacattcctgtcatcaggcggccttggaaccatgggttacggtgtcggcgctgcgatcggagcaaagtacggcagacctgataaggttgtcatcaacatagctggtgacggatgcttcagaatgaaccttaatgagatagcaacagcggcaagatacaacgtacctattatccaggtagtcctgaacaatcatgtgctcggaatggtaagacagtggcagacactgttctatgatcacagatattcgaacacagtgcttgacgattcagtagatttcgtcaaggtcgcagagggacttggtgcaatgggaatcagagccaacactcttgatgagtttgaggcagcgatgaagacagcactcacagcaggcagaccggtagtaatagatgtaacaatagcaggagatgacaaggtatggccaatggtagcacctggtgcagccatcgatacatgcttctcagaggatgatatgtaagatttataacggcacaagatgaaaaagcaccatatttgtgtgcacacatacataaatatggtgcctttatatataatccccacttgccgacaagtgaaaagagtgctatagtacagggatataagcgataatgaa

SEQ ID NO: 133 - DNA, 28192 bp, unidentified
  source 1..28192: mol_type = unassigned DNA
atgagaacttatctggtaacaggaggggccggttttatcggttccaactatattcattacatgtttaaaaaatacgataatgaaatccgtatcatcaacgtggatgcactgacctatgcaggcaatcttgagaatctcaaggacgtggagaagcgtgagaactacacctttgtcaaggctaatatctgtgacaaggatgccatcagcaaaattttcgcagagaatgatatcgaccgtgtggtacattttgcggcagaaagccatgtagacagaagtatccgcaacccggagatcttcgtacagaccaatgtcctgggtactgcagtgatgctgaactgtgccaaggcagcctgggagcttcccgatggcagcttcaaagaaggcaagaagttcctgcatgtatctacagatgaggtctacggatctcttcccgatgatgacagtgcattcttctatgagaccactccgtatgatccccacagcccttactccgcaagtaaggcaagctcggacatgctggtgaaggcatatatggatacctatcatttccctgccaacattaccaactgctccaacaattacggtcctttccagttccctgagaagctgatccctctgatcatcaataatgcattgcatggcaaaaagcttccggtctacggtgacggtaagaacgtccgtgactggctgtatgtggaagaccatgctaaggctatcgatatggtacaggaacagggaagactgttcgaaacctacaatgtgggcggacataatgagaagcagaatatcgagatcatccacattatcattgagactctgcaggagatgcttccggattccgatccccgcaaggcgcatattaacaacgacctgatcacttacgtggaggatcgtaagggacatgacagaagatatgccattgcaccggacaagatcaaggcagagatcggctggtatcccgagaccatgttcaaggaaggcatccgcaagaccatcgcctggtacttcgagcatgaagactggatgaataatgtgaccagtggtgattaccagaagtactacaatgagatgtacgaagaaaagtaaagaatacctgttaaatgggaacgatgaacgtcgttcccattcggtgtgttaaaaaacaagtaaaaagaagcccgaaaagggcggatcggaggacgaaatgaaaggaattatactggcgggaggttccggaaccagactgtatcccctgacaaaagcgatttccaagcagatcatgccggtgtatgataaacccatgatctattatcccctgtcaacactgatgctggcagatatcagagaggtattgatcatctccaccccaagagaccttccggtatttcaggaattgctgggagacggcagccagctgggcatgcgcctggaatatgcggtgcaggatcagccccgcgggctggcagatgcctttatcatcggtgcggatttcatcggtaatgacagagtggcactggtactgggagataatattttctacggacagagcttttccgcagtattgcgcagagtagctgccagagaaaagggcgcaactattttcggctattatgtgcgtgatcccagagaatacggtgtagtggaatttgatgagaacggcaaggcactttccatcgaggagaagccggagcatcccaagagcaattatgcggttcccggactgtatttctatgacaatgctgtagtggagatcgcaaagaatgtaaagccctctgcaagaggagagattgagatcaccagcatcaacaacgagtacctgaacagaggcagtttacaggtagagacactgggaagaggctttgcatggctggataccggcaatcatgatgcccttctggatgcggcagattttgtggcggctttccagaagagacagggtctgtacatttcctgtattgaagagatcgctttcaagcgaggattcattgacaaagagcagctgcttgctctggcagagccgctgcttaagacgaactacggaaaatatctggtagaggtagcaaatggactctaagctgcggaaaatggcgattctggcctccatggcggtgatcctgctggtggcactgctggtcatgtatgtcaacagggaacagtttacggcagcttccggaccgtcggcatccggcactcagaatgccggagcgggtgacagtgcatctccggcggaaaatggcgatcaggcagaagagacggtctcaccggatggtcagatcggcaatgatctgaaggcatttttaaaagataatacgttttttgatcaggaagtaaatccaattctggaagctgcaaaggataacagcaaccgtctatctctggtagccacctccatagaaaaggatctgcggatccagatcgtggacaacgaaggaagtccggtgaccggggagagcttctacgtacgactggacggattgggagattacaaggatctggatcaggacggtatcatttacattggagatctggattccggagactattatattgagctccttcccattgagggatataaggttccaatcagtgagacaagagttcacgtcaaggataaagtggagtatctggccattgacgatatttccctgttgatcaagatggaggatgaagtggatgcagaagccgaggacagcgccgtggcaggtgctctggcagatgcggacaagacagagatcaagaagctgcagaccacgtccggtaatgcaaaggtcggtatcgatgtctccaaatggaacaaggagatcgactgggataaggtggaaaatgcaggagtgcagtttgccattatccgtgccggataccgcggttcggtaaccggaagcctggtggaagatcccatgttcgtgacgaacatgaagggtgcacaggccgcaggaattccggtgggcgtatactttttcacccaggctgtggatgagaaggaagctgtggaagaggcttccgcggtgatcgaactgatccgggattaccggctgaactatccggtatttatcgataccgaaggtgcgggcggtaacggccgtgcggacagtctggatgcggagaccagaacactggtatgtgaagcgttctgcaggaccatagaaaatgccggatacacggcgggtgtctatgccagccgtaactggtacaacaataatctgcagacagcaagactggaaaactatcatatctggctggcagagtatcgcagtgttccgttatatcagggatattataagacctggcagtatacctccaagggaaaagtggacggcatcgaaggtcgtgtggacatgaatatcacctacgaatagtcaataaaaataaagagtgaggacgaaataaatgggtaaaataacagtagaaacctgtgaaattgaaggattaaagatcattactcctacggtattcggagatgccagaggatattttatggagacttacaattataacgatttcaaggctgcgggaattcctgaggtgttcgtacaggacaatcagtccgcttccaagaagggtgtattgcgtggactgcatttccagaaacattttcctcaggacaagctggtgcgcgtgatccgcggagaagtctatgacgtggcagtggatctgcgggaaggttccaggactttcggccagtggtacggagtgcttttgtctgaagagaacaagaagcagttctttatcccgaagaattttgcacatggttttctggtactgtcggattatgcggaattctgctataaatgtacggatttttatcatcccgatgatgagggcggtattgcttacaatacaccggatatcggtgtaaaatggccgattcccgaaggtatggaactgacgctttccgagaaggataccaagtggggcacattggaacagtacgtgaaggaaaaagagaatgaaggtaagtaaaaaagcgggcattgccctgtttgtgacaacggcagtgatcatggcagtacttattgtattccataagaatctgggacctgcggcggatccgggtcaggaactggccaagaagatcatttcctgtgtggtgatcgcggcggcatgctttgcttttattcactggtatgataaattcaccggactgccggtggagctgttccagaaccggcatctgatctggaaactggccaaaaatgatttcaaaaaaagatatgcgggatcttatctgggtgcggtatgggctatggcacagccggtggtcacggtggctatgtattacattgtttttgataagatcatgggtaatacgagtactcccctgcgggagggtgtggaagtaccctttgtattgttcctgacggctgggcttgtaccctggttctattttagtgaggcattaaacaatggaaccaatgcgctgctggaatataactatctggtgaaaaaagtagtatttaagatcagtatcctgcctatcatcaagattattgcagccacctttattcatgtattttttgtgtgtctgctgttgatcgtggcagcaatttacgggtattatcctaccatatatacgatacagatcgtatactatagcttctgcctgttcatttttgtactggcactcagctatacgacttgtgcagtagtagtatttttccgggatctgtctcagatcatcagtatcggattgcagatcggcatgtgggccactcctattttgtggaatctggattccctgtccggcaattggatcacgattctgaagctgaatccgctggtgtatattgtaaacggttatcgaagtgctatttatgagaaggaatggtttttccaggatttcttttccaccatgtatttctggatcgtaacggtagtactgttcgggttgggagccgttattttcaaacgattgaaggtacatttcgcagacgtgctataatacgaatgattgttacgatttcgagagttcgaagaacggagaaatcgtattataaaaaacagagcatagcaaaacttttatagatgaagaaccttgtggggaggagctgcattacaaaactgttgtggggaaaacagaaagggtgaaagtaattgaagggtgctcgtgaaaaatttagaaaattttggttatggaagccgggaaagatcctgctggccgtgggatgctgcggactgctgctgttgacgctgattccattgtttcgtctgacagtctatgcggttccgtattatgatgattacaatttcggaagatttgccagagctgccatggagcaggaacagtcaaaatgggctgccatctccggtgcactggattgctccagaacgcagtggtatgcgtggcagggaacctattcttctattttctttatggcattgatgccggcaatctggggagaacagtattatttcctcggtccagtgttcatcctgctgctattgctggcgggtaccatgatatttacccatgtgatcctgcggaaagtactgggcatggaaaagtggaccggcctggcagcacaggcagtgattacagtggcagtctttatgtttatttattccgcacagagtggcttctactggtataacggcggagttcattacgtgggaatgcacggctttggattgttgatgttgtctgtggcaatctgcctggagagagcagaaggaagaactgctaccgggctgctatttacggcctcggtgctgctttccatgatcacggccggaagcaattttgtcacggcattgcagggacttttatcgctgttgacgattctgtttataagtgtggtagtggaacaccggaaaaagggactgtggctgttgcctgctacgctggtatacattataggatttgggctgaatgtagcggcaccgggcaattccgtgcgggcccgcagctatgtcggctggggatacagtcccctggagtccatcggcagatcttttctggaaggagtaaaacatcttccagagtttacgggatctattgttctgatggtaatggtgatgctgttacccctgatctggcaggcacttaaggagacggagtatcgtttccggtatccgggagtcgtacttctgtggtccttctgcctgtatgccaccggttacaccccgagcctgtattccctcggacatgccggattgtccagaactctgaatgcggtgaagatcacatatttattgctgttgttcctgaacgaaatatactggtgtggctggctgcagcaaagactgcagaagaaggcatcaggcagcacggcaagatggctggcgaactggaacggagccgcagtgtggtggttttatgcgattatgggtctggaatttatcatgatctttcaggtgtcacccaatcaggcaggacattattcggcttatggggcctattactatgtgcataccggagaagcgtataatttccatcaggaatatctggaacgggtggagaagctattgggagatgaggatgatgtacagctgcaaccttatcactacaagccctggtttttgtgcatgggagacctctcggaggatgaaaataacgaggccaaccgttctctggccatatggtatgacaaagacagtgtaacgctgataagcgaggattaaaattgatgcaggaaaagaaaaagctggccattgaagtcgataatgtccagaagatctataaactatatgataagccctcagatcggatgaaggaggctttcggcttcggaaaaaagacgaagcataagcttcactatgccctgaagggtgtggacatgaagatctatcagggagaaacggtgggtattatcggtaccaacggttccggtaaatccacgatcctgaagatcatcaccggtgtattgaatcccacttcgggaagagtgttggtaaatggccgtatttccgctctgctggagctaggtgccggattcaatatggaatataacggcattgaaaatgtgtatctgaacgggacgatgatgggattttccgagaaggagatcgaggcaaagcttccggagatcttaagttttgcggatatcggagattacgtctatcagccggtgaagacttattccagcggtatgttcgtccggctggcctttgcggtggccatcaatatcgagccggagatcctgatcgtggatgaggctctgagtgtcggtgacgtatttttccaggcaaaatgttatcataaattcgaagaattcaagaagatgggcaagaccattgtgttcgtcagtcatgatctgagcagtatcagcaaatattgtgaccgtgtatatctgctgaatcagggaaatatcctgggcgaaggcagtcccaaggctatgatcgacacctacaagagggtattggtgggacagtatgacggcccggagagtgtgggagaagagactgccagtctgctggatgatgaagacctgcagagagcagctgcccaaaaagcagatgagaaggggaccgatgcttcccaggcttccatggaggccaaggggcagaatcccaatgccctggaatacggtacgaagcaggcacagattgaggaattttacattacggatgacagaggggttcccaccaatgcaatcctgaagggcagtatgtttaccatccatatgcgggttcgttttatggatcatattccggcccccatttttgcattttctgtaaaaaacgtcatcggtgtggagatcaccggtacaaataccatgattgaaaaggcttttctggacagcgtggagccgggagaggtgaaaaatgtgacttttacccagaagatgaacttacagggtggtgagtatctgctgtctctgggagtgaccggctacaatcaggataccttcgaggtatatcacagactgtatgatgccttgaatattacggtggtatcggacaagaacaccgtaggatattatgatatggattccgaaacaaaagtatgggatacggaggagaagtaaggaatgacagagaccatcgggaagatcacactgaatctggataaatatcccggcgaggattattattgcgacggcagtgtggaggacgagatcttagacattgtaaaaaaatacagtacggtggaatatgacaggatcattgcggagcgaaagagctggccgatcctgtatcatttgtctgctctccgggaaaatatcgtggatttccttcccatacagaaaacagagaaagtgctggaagtgggcagtggatgcggagccatcacgggtgcactggcaagaaaagccggggaagtgacctgtgtggatctctcgaagaagcgcagcctgatcaacgcctaccgccacagcgaatgtgaaaatgtgacgatccatgtgggcaatttcacggatgtggaaccggaacttcccgcagactatgactatatctgtctgatcggtgtttttgagtacggacaggcttacataggcggcaagacgccttacgaggatttccttaagatcctgcagaagcatctggcaccggacggcaggatcgtgattgccattgagaacaaatacggattgaaatattttgccggatgcaaggaagatcatctgggcagctggttttccggcattgaaaattatccggagggcggtgtggtacgcacgttttcccggaaaaagctggagcgcattttcgatgcctgcggtgtgggagaacgcagtttttattatccgtatcccgattataaatttatgaccacagtctattccgatgcttatcttccaggacgtggagagctgtccaacaatctgcggaattttgaccgggacagaatgctgttgttcgatgagaagagtgcttttgacggaattgtggaggaaggattgttttccgttttttccaattcctatatggcggtgatcggagcacctctggatctgaaatatgccagatattccaatgaccgtgcggaaagcttccggatccgcaccgagatcctgcgggacaaggaaggctgtaagacggtccgaaaatatccgctgacaaaagaagcggaagcccatgtgcgtcatatgccggaggcttatgaaaaattgaaggaacggtatgcgggaagcagtctggatgtcaatgtctgccatctgggagaagagaacggcataccttatgcggaatttgagttcgtaccgggcagaccgctgtcggaactgatggacgaatgcctggacagacaggatgtggagggatttcacaacctgtttgcagaatatctggagagagtgggctacggggaggatgtgccggtggcggactttgatctgatctttgccaatattctggtggatggtgaccactggacactgattgattatgaatggacttttgaccgtcccatagagaccagagctctggccttccgggctgtatactgttatgtactggaagatgaaagacgtaatgcactggaactggatcgtattctggatcgtctgggcatcacggaaaacgaagccagacagtacagagagcaggagatggaatttcagaaatatgtgaccggacagaaattgtccatgggtgagatccgcaatctcttaggcggcgaaatttataagcccacggaatggatcggacggttccgtcagacggagggagaactcagggcacagatctatgaggacaagggacagggattttccgaagaaaattcctatttcccggagaacgtctatgcagaggaaaaacaggcggaatttactgtgaatttcgatggaaatgtccattatttacggctggatccggccatgtgcgcctgcgtgtgtaaaatccgggagcttaccatgaacggacagccggttcctgtgcagcacaaaaagatcgttaccactaatggaaaaatcttaaagtccgcagacggtgcggagcatcccagcgtggtatttcccacggaggatccgaatctgacgatccgggtggatgcattggacagaaaggcagagaacatcctgactgtgaaaatggagatcgtgcagattccccttgctgtggcaagtgacatggcgggagcggtgaaaaaatttttctaaggagacaggaaacttgagcattcggacgtcagtaaagcagatgcttgtcagacaacaggataaaaagtatgaagcagaactggcaaagctgcgggtgacctacgcgcaatgggctgcggagcaggaaaaaaagattgcggaaacagtggtcacagagatcggggaaagagccggtcttgcggaattcgtgatctacaggcagcagaaaggacagctggcggaaaatgctgtggagcggatcaatgcgtattttgtgaagcatccggaggcagagatcgtctatggagatgaagatctgctgtcagagaacggagagcgtgtgatcccctggttcaagccttgctgggctccggatacctaccgggctttcttctatgtgggaagcgtcgtggcagtgcggagcagactgctgcagaaactgggggagcccggggttgtgacagaaggagagagcaccggcagggaaatagtattttcgaaagcggaagagatccgtcccctgatggatcggctgtttctggcggccggtggatttgagagaggctgtcataccattggacatctggaagaagtgctgtttcacggcacttttggtactgcgggaatcggactgcagggaccggcagaaaccagccgggagaaagcggaagatgagcagaacccctgggaagagtaccggacggcagcggaatccgcaaaactgtccgtggaactggcggccaaagcggcagaggaagccagagaactgttcgccagagagcttagggtctctgtgatcattccttccaaagataatccttccgtactgggaaaatgtctgcggtcgctgacgcaacgcccggagggcagtgttccggtggaaatcctgctgatagataatggaagtaacgaggaaaacaggaaaaaaacagaacagctggtggaagaaatccggacagccggaacaccgatccggtatgtatatgagcctgcggagttcaatttttccaccatgtgtaatcgtggcgcagaactggcagatggcaagctgttgctgttcttaaatgatgatattgaattatgtgagaatgactggctggataaaatggtgtccagagccttgcagccttatgtgggcagtgtgggactgaaactttattatccggattccgtgaagatccagcatgacggcattgtcaatctgccggtgggaccggtgcataagctacaatttatggaggatgacagaagctactattttggacggaaccgttttacacaggattgtgtggccgtgacgggagcctgtctcctgatccggacagaggtgttccgggaggccggaggattccgggaagtgttgcgggtagcctataatgatgtggaactgggcttccggcttctggaaatgggatactacaatgtggtgtggaacgaccgctttgcatatcaccatgaatctctcagccggggaagcgatgaaagtcctgagaaaatgcagcgtctggtacaggagagagaactgctctaccagatgcatccacagttccggggagaggatcctttttacccgaaggggctgaaccgggagggactggacagccgtgtggttccggcatatctgacagatcggaatgttttacaggagcctttctggaaaaggggacttcctggcggagaggaattacagaagatccgcagggataactgtctgatggccagagtagagacagcgggaccggaacggatccagggatacagtgtaattctgggagacgataatgcctgctatgaaaaacatctgttgctgattccctgtggggaaacagaaggacaggatgtgtggtccatgcagttgatgcctgcctaccgacaggaactggaggaaaatcttccggatcagaaaaatgtggcattgggcggcttttgtgtcctcagagaaggagaacaactgccggcgggaaactatacgatcgctgttcttgtggtgaatcgtgtcagcaagctgaaactttggaatactacgggaaaatatctgaccgtagagcttccggcagcaaaagaataaaacagatgcatgatccgctaaaatgcggtgaaagcatcacggaggagacatatgtcagagagcaacaccgagatcaattataaggaagcctacgagagagagcatgaaaaatgtgcggatctggcggacaagatcgtagtactggaatcggagaaggaagatctgcagttcaaactgaaccgaatcaagaaaaataaattctggaaggctacaggacctgccagaagtgtgatccattttgctcagagacagaaggaacggctgtctcattgcggtggtcccaaagatattctgcggaagatccgtaacaagagtcaccagaagagcctgatggaatcctacggtaccggaagctttcccgatgcggagcagaggaagaaagaggaagaaacggtattcccctatatgccgaagatcagtattctcgtgccgttgtggaataacaagagagagttccagatacagatgctggactgcgtcatgaaccagacctatcagaactgggaactgtgtctggcggacggttccgatgcggaacatgcttacatcgaagaactctgcaaggagtacgcggcgaaatcagatggccgtattgtatataagcacctggaccataacggaggtatttcctacaacaccaatgagtgttacaagctggccaccggagactatatcggactgttcgatcaggatgacattctgcatccttccgtattgtatgcctatgtcaaggaaatcaatgaacagggtgcggattatctgtactgtgatgagaccaccttccaggaggacaatattaataaaatgctgaccatgcattttaagccggattatgcaccggataatctgcgggccaacaattatatctgtcatttcagcgtcttttccagaaaacttctggaaggcgaggaactgttccgtacggcttttgacggtgcgcaggaccacgatatgatcctgcgtctgacggacagagcacaaaagatcgtacatgtgcccagactgatgtattactggagaagccatgcgggcagtaccgccgccagtattgacgcaaagccctatgccatcgaggcggcaaagggtgccgtggcggatcatctgaaaaagcatggattcaaacattttcagatcaccagtaccagagcctgtgccacaattttccggatccgctatcagattctgggagatccgaagatctccatcgtgatcgccaacaaggatcacgtggaagatctgaagagatgtattacttctattcagaagaacagcacctggagcaactacgagatcatcgtggtggagaacaacagcaccacaccggaaatccgggattactattcccagctgctgggattgtccggcaatgattcctacgcagagagatgcaagctgcataccgtctgcggtcatgacggcgggattctgcacagcgaggacggccggatctctgtggtgacctatcatggtgattttaattattctgctgtaaataatctgggagtatcctatgccaccggagattatatccttttgctgaacaatgatacggaagtgatcactgccaactggatggaagagatgctgatgtatgcacagcgggaagatgtgggtgccgtaggtgcaaagctgtattatgcggacaagacgatccagcatgccggtgtagtcatcggactgggggcacatcgcaccgcaggacatacccattatcgtattccggtacagaacctcggttacatgggacgcctgtgttatacccagaatgccacggcagtgaccggagcatgtctgttggtgaaaaagagtctgtatgagcaggtgggaggactggacgagagctttgtgatctctctgaatgacgtggatttctgcctgaaactgcgcaaactgggactgctgaatgtatggaccccttttgcggaactgtatcattatgaatctatttccagaggtctggatgatcagggagagaaggcggagcgttacaacaaagaatccgagcatttccgtgaaaaatggaaggcagagctggaagcaggagacccctattacaacccgaatttctctctggatcgcagtgactacgcgctgagagatccggttagcggacgttaaattgctcttttcagtaaaggtaatctatggtagaataatggcggagagcgtttactgaagaaagataaagatagcgataaaacaggaggataggaaaatgagttatatggacgaactgaatttctggttgaatgatgattattttgaccagaagaccaaggatgaacttctggcaatccgcaacaacgaggtagaagtggaagatcgtttttacaaggaactggaattcggtaccggcggtttacgtggcgtgatcggtgcaggaaccaaccgcatgaacgtatataccgttcgtaaggcaactcagggtcttgctaattatatcattaagcgcggcacccagagcaagggtgtggctatcgcatttgactcccgccgcatgtctcccgagttttccgatgaggcagcaagatgtctggcagccaatggcatcaaggcatacatttttgaatctttaagacctaccccggaactgtcctttgcccttcgtacgctgggatgtaccgcaggtatcgtagtgactgcaagccacaaccctcctgagtacaacggctacaaagtatactgggaggacggcgcacaggtaaccgctcctatcgataaggacatcatcaccgaagtacaggccatcaaggattatcataccgtgaagaccatgagcagagaagatgcggaaaaagcaggcctctatcaggtgatcggtaaagagatcgatgacaagtacatggctgagctgaagaagcagatcattcatcccgatgttattcaggaaatggctgatgacatcaagatcgtatatactccgttatgcggtaccggtaacaagccggtaagacgtatcctgtccgagctgggatttaagcacgtctatgtagttcccgaacaggagaatccggatccaaacttcaccacactggattacccgaaccctgaggatcccaaggcatttacatacgcactgcgtctggccaaggagaaggatgcggacatcgttctggcaaccgatcccgatgcagaccgtctgggtgtgtatgccaaggataccaagaccggcgagtatgtggcatttaccggtaacatgtccggtatgctgatcgcagaatatatcctgagagagaagactgctaccggcactatgcccgagaatcccgcactggtaaccaccatcgttaccaccaatatgaccaagcccatcaccgaagcttatggtgtaaagctgatcgaagtactgaccggcttcaagttcatcggtgagcagatcaagttcttcgagcagaccggcagcaacaattatgtattcggtctggaagagagctacggctgtctggcaggtactcatgcaagagataaggatgcagttgtagcagttatgtgtctgtgtgaagtggcggcttactgcaagaagcacaacatgactctgtgggatatgatggtatccatgtatgagaaatacggttacttcaaggagacccagtacaccattaccatgaagggtatcgacggtgcaagacagatcgccgagatcatggataagcttcgtaagaatccgcccaaggcattcggtgacctgaaagtggagaaattccgtgactatctgaacgatgtagtcatcgacatggagagcggcgagaagaccactaccggacttcccaagtctaatgtcctgtattttgagcttcccgacaatgcatggtgctgcgcccgtccttccggaaccgagcccaagatcaagttctacatgggtgttaaaggtaacagcatagaggatgcacaggccaaggtagagaagctgaccgaggatgtaaaggctgtactgtaaccactatgagcaaatagcatgatgtcggggtcaaaagcccccgactttgatgcctacggattgttccgtgctacgcactcccacaattctacccaatattcgcatatcgtgggattatcatcccacttttatgctcatatcggggcgggtcctaaggtctttcacccacctatgagcaagctcatgtgggcttagaccttttgaccctggcatcatagcatgcaagtatgttattcaggaaagctctggaagagcgattttgcgaatggggttctgaatagttaatgttatttttaagagcgaatcgcccgggaagggcgatttgctcttttataaaagtggaggtatccgtggcaaagctgaacatagcaaaccttaagaaaactctatattatttgcaacgcaacggcctgagggaaacctggatctctgtaagggaacgcctgacagagacagaccgctatttttatgtgccctgtccggaagaggaactggaaaggcaaagttgcagaaaatgggataatccggttacactcagcattgtggtgccgttgtaccgtaccccggaaatctatctgaacagaatgataacaagcgttatgcaacagagctatcctcactgggaactgattctggcggatgccacagaggatcacagtgtggaggagacgttgacaaatcagggattcctgacagaacggctcccggaaaatgcggaaactattgcagcggatgcaaggatccactatatacaccttacggaaaatgccggaattgcggcgaataccaatcaggcattaccctatgcaaggggagaatatatcggcctgctggatcatgatgatgtattgacaccggatgctctgtatgagatggcagatgctattaccaaagcaaatgacagaggtgtcagagttgcattcgcttattcggatgaagacaaatgcaacggggatgagacaaaatattacgatcccaaccataaagaagactttaattacgatttaatcctgagtaataactatatctgccattttctggtgatggatgcagatctgatgaagaaactggcattccggccagaatgcgacggtgcccaggactatgatctggtgctgcgggcagtgtcagaggtgctggctgaagatggccgctccggtgaggagagaattcttcatattcccagagtgctgtatcactggagatgccatgaagcatctacagcagccaatccccacagcaagaaatatgcttacgaagcggggctgcgtgcactgcaggatcatgctgcagaacgtgggatcccggcaaaggcagaggagaccagacatgtaggattttatcggttacaatatacagaggtattacaggagagaccggatgtggctgccgtaggtggcagagtgctgtccgggaaaaaccgcggcaggatcgccggcggcagaatgactgcggacggaaaggtgttctatgagggactgccgaaggactatggtggttatcttcatcgggcggagctgtcccaggatgcagaagcgttagaccttcgctgcatcaggatccggtcagctgacagggaattgtttgaaaaaatcgtgggagtgccttatacggaagtagtaagaggtccggaacaacagccggtatttgacagctccacactgcctgccggggcagatatccggcttttaagtctgcaattatcggaagcattacgaaaacggggaagactgctgtatctgccggagtatccggagaaatgggagagactatgaaggaagtaaccgtcgttatacccaattacaacggaatgaaatatttaccggaatgcatggcttccctgtgtcagggacaggaaaatgcaccggaatatgaagtgctgatcatagacaatggttctgctgacgggagcgtggaatatctggacagcgaatggtgtcgcaaaaaagaggcaccggcagaagaggggggaaaaccgcaggtgcgtctgatcgccctgccggagaacaccggcttctgtcatgcggtgaatctgggaatccgggaggcacgaagcccctatgtgatcctgttgaacaacgataccagagtagaagctggatttgtgaaaggactgtatgatgccattcggaaggatgaaaagatcttttccgtcagcgccaaaatgcttatgtgggataagccagagctgctggatgatgcgggagaccgctactgcgttctgggatgggcatattcccggggaaaaggccggcctgctgtggattatgacaagaatgtcagcatattctcagcctgtggcggagcggcaatttacagacgtcaggtatttgaggagatcggctattttgacgaagcgcattttgcttatctggaagatctggatatcggttaccgtgcccggatctacggctatgagaaccggtacgagccgacggcatccgttctgcattacggcagtgcttctacgggatcccgctacaattcccggaaaacggaactttcttcttccaataatatctatgtcatcggcaaaaatatgccgctactacagtggatcctgaatctgccgttctttttgcttggatttggcataaaatttctgtttttttgtaagaagagaatgggaaaactatatttaaagggattggccgaagggtggaaacgtaccgtgggtcctgtgggaaagcaggcaaaggtgcactttcaatggagccatctatggaattatgtgaagattcagtggcaattatacctgaatgtttttcgaattcttatgaaatcttaagaaattgcttcataaattcttaagttgagaaaaaaccaccgttattgtagaatgaaatcgttgaaaagaagcttttcggacttaaagattgggtgacccgtatgataaaagacaaccagaaagtctttaacaggcttcttgtgataatagatgcgctgatcacggcagcatcttttgtccttgcctattatatcaaattttatatcttaaatgacggtccggggatcggtgtcctgccggtgcaggattattatatgctgcttccctttattgtacccggttatatgttcctgtattaccggtgcagtgtgtattccccgaagcgtacggttcgccgtagacatgagatctacagtatcctgcaggcgaataccattggcctggcggctttgatcattattttgtatatgatcatccgtgagatcaatttttcacgatccgtcatggcaattttttatgtcctgaatgtttttctgacttccgtattccgtatcatcatgcgcaaggcattgcgttccatacggaaaaaaggatacaatctgaagcatattttgctggtaggttattcccgggcggcggaggaatatattgacagaatcctcagcaatccccaatggggatatgtagtgtgtggtattctggatgagcacatcccgggcggcacgacctataagggagtgaaagtactgggaacgcttggtaatctggaatacatccttccggagaacaagctggatgaaatcgcaatcacactttccctgaaggattatgattatctggaaggtgtggtggatatctgtgagaaatccggggtgcacaccaaattcattccggattacagcagtctgatccccagcagaccctatacggaggatctgatggggttaccggtgatcaatatccggtatgtaccgttgacgaatacaggcaatatggtgatcaagcgggcaatggatatcgttggttccattttcggtatcattattacctcaccgatcatgctcatatcagcaattctggtaaagctgtccagcccgggaccggtgatctttaagcaggaacgggtaggacttcataataagccgttttatatgtacaaattccgcagcatggcaatgcagacggcggcggaagagaaaaagggctggacggtacgcaatgaccccagagtcaccggtatcggtaagattctcagacgtaccagtatcgatgaacttccccagctgttcaatatcttaaaaggagatatgagtctggtcggtcccagaccggaaagaccgcagtttgtggaaaagttcaaggaagagattccccgttacatggtaaaacatcaggtacggccgggactgaccggatgggcacaggtgaatggcttgcgcggtgattcctccatcaagaagagaatcgaatatgatatttactatattgagaactggaccattggatttgatatcaagatcattcttatgacgttctttacaggatttatcaataaaaatgcttattagtacaaggagaagacaagatggcaacaaattctaacaacaatggcggcaatggtcagagacctgccggaagcggaagaaaaccttccggaagcgcacagagacctacaggacagagacccgccggaagcggtcagagacctgccggcagtggacagagaaccggagctgcgaacggacagaagagaatgtctgccaaacagcgtgcagccaagaagagaaaaaaggttatcatctttggcatagagatcgtagtgatcctgttcatggtagcattattgtatctggtaatgactcataccaacaatgagggccccaaggtaaccgttctggagacagaagaacttcagattcccgaagaggtgcagcaggatgaaactatgaagggctatatgaacattgccctgttcggtgtggacgccaccaaggaaagcctgttgtacaagggcagccgaagcgatagtatcatgatcgccagcatcaacatggataccggtgatatcaaactggtcagcgtatatcgtgatacgtacctgaataccggtacggattcctaccagaaatgcaatgccgcttattcctatggcggagcagagcaggcggttaagatgctgaacatgaatctggatatggatattacgaactttgtgaccgtaggctataaaggactgagcgaagtgatcgacggtctgggcggtatctatattgatgtggactctgaggagatcaagcatatcaacaactatcagatcggtattgcagaagttttgaaatgcgattatacaccggtaactgagaccggtatgcagctgttgaatggtctgcaggctactgcttactgccgtatccgttataccgctggtaacgactttaagcgtgctgcccgtcagcgtgaagtcattcaggcaatcgaagatcaggcaaagaaagcagattatgcaacattgtccaaggtattcaacagtgccatcgacgacatttacaccagtctggattccaaggacatcctggatctgctgggcaatatttcaaattatcgcatagtggacgaaggaggtttccccgaagagaccatgcgtgacaccggcaatatcggtgcaaagggaagctgtgttattccggtaaatctcgaaagcaatgtagtatggctacatcagttcctgtttgatgatgccaactattccgtaaccagcaacgtgaaggaatacagcaataagattgaatctgacacatcaccttatatgaataagtaagaaacagtgtatagagtaaagcaacaggaatacaagggagtcttccggaatctgccggggctcccttgtgcattacccagaaggttataagccttttggacagtaggaaaaggcttgtgccgcaataagagttaaagtataatgaaccagagattggaaaagtgaggagcgctctgacatggagatagatgtgatcattcccctgtataagccgggaaaagaattatttacattattggataaactgggcagtcagagcgtaccggtacatcaggtgattcttctgaatacggaagaaaaatattttgaacagctgatctacggaatcagatttctggaaacctatcagaatatcaaggtataccatgtatccaaaaaagagttcgatcatggcggtacgagacggatgggagtaaaaaagtcttccgcggatgtcttcgtgatgatgacacaggatgccatgccgaaagatgacaggctgatcgaaaaactggtggaacccctgcagggggaagtggcggtggcctatgcgagacagctgcccagagaggattcgacaccggtggagagctataccagagaatttaactatccggcaaagtcccggatcaaatcggcagcagacctggacagcctggggatcaagacctttttctgctccaatgtttgtgcggcctatcgccgggagatctatgaggaactgggcgggttcgtcagacatacgatatttaatgaagatatgatctatgcggcaaaggcggtggaagcaggatactctgtggcttatgcggcggatgcgcaggtggtgcattctcataattataccaacgggcagcagttccacagaaactttgacctgggagtatcgcaggcagagcatcccgagatttttgcagcatatccttcggagtccgagggaaaacgaatggtgaaagatgtgacggtatatttgcgcaacaaccatatgtctgccggattgccccatttttatatgcaatgcgcctgtaaatatgcaggttatttactgggaaagaactatcgcaggctcccgaaaaaatgggtacttgcttttacttccaacaaggaatactggaaacagaacagaaaggatgtatgactatgtgtggtattgtaggttatattggaacagaacaggcagcaccgatcattctggacggtctgtccaagttggaataccgtggatatgattccgcaggtatggcgatttttgacggtgagaagatcaacaccagaaaagcagtgggaagacttaaggttctggagaacctgacccatggcggagagaatatgaaaggaacctccggtatcggacatacccgttgggcaactcacggagctcccagcgatatcaattcccatccgcatatgaacaatgccggaaccattgccgtggtacacaacggcattatcgagaactatattcccctgaagaaaaagatgcaggataaggggtatcagttcgtatccgagactgataccgaggtattggcacatctgttagactattattacaagggaaatcctctggaagccatcacgaaggtgcttcatcgtgtggaaggctcttatgcgctgggaatcatgtttgcagatcagccggataagatttttgcagcccgcaaggacagcccgctgatcgtaggaaagagcgacaacggcagctttatcgcttccgatgttcctgcgatattgaaatataccagaaccgtatattacgtagacaatcaggaagttgtggaattacagcagggtagtctgcgtttcttctccgtggatgaggaagagatcgagaagcagccggtgaccattgactgggatgccaatgcggcagaaaaggctggatatgagcacttcatgctgaaagagatctatgagcagccgaagaccatcaacgataccatctctccgagaatcaaggataatgatattgtgatcgaagagctgaacatgagtgatgaagagatcaaagagatcacgaagatccatattgtggcctgcggctccgcatatcataccggagttaccgcaaaatatgtgatcgagggtctggcaagaatcccggtagaagtggatgtggccagtgaattccgttatcgtgatccgattcttcagaagggtaatatggtcattgtcatcagccagtccggtgagacggcagatactctggcagcactgagagagtccagggaaaggggcttcaaggtactgggcattgtcaatgtggtgggaagctccattgccagagaggcagacagtgttatgtatacctgggcaggtcccgagatcgcagtggctaccaccaaggcttacagtgcacagctgacggcactttacatgttggctatgaaattcgccagggtacgtggtactattgatcaggagaagttcgccggtatgctgacagatttaagatgcctgccggatcagatcgaactgcttctgggacagaaggagaagatccagcattttgccaaccgttacgtgggagcaagagatatcttcttcatcggacgcggtattgattacgcgatttcactggaaggatccttgaaactgaaggagatctcctatattcattccgaggcttatgcagctggagaactgaagcatggtacgatttctctgatcgaagatggtacgctggtagtggctttggcaacccagccggatctgttccagaagaccatcagtaatatggtagaagtaaaagcaagaggagcctttgttatggcagtcaccattgaaggcaacaaggccattgagaaagcgtcggattatgtaatatacatccccgagaccaatccgtactttaccaattctctggcaatcattcctttgcagttgttctcctactatgtggcagtgggacgcggctgtgacgtggataaacccagaaacctggcaaaatccgttactgttgagtagagtgtaataacttacccatagagagactgaggactgcttgcaggcagaacagactctctgttttttcaggattcataattgcttcagaaagttatcacaattcggacacaattgacggatatactgtgttcataaggtgagaggaagaaatgaaacaggtaatggtaaaaagagttctcacttgcaacaggataggaggaagcaatatgtacgagaataataatttttccggttacggaaccggcaatgaaaatacaaccggtacattcagtggagcagatctgaatgagacaagaacagaaaacagttatggctatgaaaatcatagtactacccagagtgcagcaggaagcaccaatggttacaccacttatcagatgggcggaaccacaggcagcaacaatacggagcctaagaaaacccaaaaacatggcggttacttccggaaggcaatggtaagtgtcagcctgggattgttcttcggactgttcgcaggaatcggtttctatgcagtacagcagggaaccgggatgtttacgaccagcacagataccgcagtggtagatgagatcgcttctgaggcaacgacagaaagtacccagagtgcacagctggctaccaatgttacttatgtagagtccgatgtatccaatgtggtagaaaaagtaatgcctgccatggtatccatcgtaaataactttaccgagacagccaatgtcttcggacagcagtacacacaggaagaagcagccagtggttccggtatcattgtaggtaagaccgatgatgaactgctgatcgtatccaataatcatgtagtagagagtgcagatactctgaccgttacttttatcgatggcagtgaagcacaggcacaggtcaaaggactggattccgacatggatctggcagtgatcgcagtatctttaaatgatctgagtgatgataccaagaatgctattacagtagcaacacttggcagcagtgatgatctgaagcttggtgagccggtcatcgctatcggtaatgcccttggctatggtcagtctgttaccaacggtattgtaagtgccctgaatcgtgagatcactctggagaacggctctaccggtctggagaacggctctaccggtactttcatccagaccaacgcagccatcaaccccggtaactccggcggtgcactgctgaacatgaatggtgaggttatcggtatcaactccaacaagatcggtggtactgccgtagaaggtatgggatatgctatcccgattacttcggcaagtcctatcattgcagatctgatggagcgtcagaccagaaccaaggtagctgaggatgaagtcggttacatcggcatctccctgcaggaagtaacttcccagatctcccagatgtacaacatgccggaaggtatctatgtagtatctgtagaggaaggcagcgcagcagccaatgccggtatcatgaaaggtgatatcattaccaaatttgacggcagcagtatctcttcctactctgatctgcagaaaacgttacagtattatgcggccggtgattccgtaaccgtaacggtacagagacctcagaacggtgaatatgtatccatcgagctgaatctgacactgggcagcagacctgcaagccagaaataaagaaataacaggtaaataaaaggaaatggaaagagacccgggcgagacatatggttttgcccgggtcttgtaatatttaccaaaatatgaatagttataaatggtttagaaaaacttaacttgtgccccgctacttcattgagtataataagcgtaggcaatgagaagtgtcagacacgggtattatgcaatatgactgcttgcaggcattattgcgtaatggccggggatgatagggcgaagcccggatatcgagggaacacgaagtgttgccgagatacactgcgaagatgctttggagccggggatgatagggcgaagcccggatatctagggaacacgaagtgttaccgagatacactgcggaataatggtaggaaacaaagaggagaataacatgacagataattataatgatgattatagagaagtgatccctaaggaggaaaaaacagagaccgatgtgagtgaaactcaggataacgaaaaaaataacggaaacacacaggtggcggatactgcaaaagaaaattccaccgaaaaaaagtcagaggacaaaaaggacagcagcgaatacgaagatgtctgctttatctgccgcagaccggagagcaaagccggcagaatgttcaagctgcccaaccatatctgcatctgcgatgattgcatgcacaagaccatggagactgtgagccagttcgattatcagggaatgttgaacaatcccaatgatttcaaccagtttaacggacagaacggattccccaacatcagttttgtgaatctggcggatcttcagggagacggcggtattcccaacaagcagaaactcaagaagaaaaagaaggcggaaggtcccaaacctgtattcaatatcaaggacattccggcacctcataagatcaaggccagtctggatgaatacgtggtaggacaggaaaaagccaagaaggtcatctccgtagcagtatacaaccattacaagagagtggccactgacactatggatgagattgagatcgaaaagtccaacatcctcatgatcggccccaccggttccggtaagacctatctggtaaagacactggcaaaacttctggatgtgcctctggctattgctgatgccacctctctgactgaggccggttatatcggtgatgatatcgagagcgtggtatccaaattgctggcagcggcgggcaatgacgtagaaaaggcggaaaaaggtatcatcttcatcgatgagatcgacaagatcgccaagaagaaaaacaccaactcccgggatgtcagcggagagagtgtacagcagggtatgttgaagcttctggaaggtgcggaagtggaggtgccggtaggtgccaacagcaaaaatgccatggtacctctggcaacggtgaacacccgtaacattctgtttatttgcggtggtgcgttcccggatctggacgagatcatcaaggagcgcctgaccaagaccgcatccatcggtttcaactcggaactgaaggataaatacgataaagataccgatattttatccaaggtgactgtggaggatatccgcaagtttggtatgattccggaatttatcggtcgtctgccgatcatttgtactttacagggattgtcaaaggatatgttggtgaagatcctgaaagagccgaagaatgcgattcttaagcagtaccagaagctgttggagctggatgaggtaaaactggagttcacagacgatgccctggatgccattgccgagaaggcaatgaagcgtgataccggtgccagagccctgcgctccatcatcgaggacttcatgctggatatcatgtatgagatcccgaaggatgataacatcggaagggttaccattaccagagagtacattgaaggaaccggcggccccatcatcgacatccgcagcaatgaaattctggaacaggtggagaacctgaagcagattccggtggaagagaaataaattgagagttagtgaaatacattggcaaaatccacgaactcccggagcatgcgatacacat

SEQ ID NO: 134 - DNA, 14990 bp, unidentified
  source 1..14990: mol_type = unassigned DNA
ctagttaacaagaatctcctctgtctccttatcgaagatatgaatcttgcttaagtcaaatgcgaactgaactgtatcaccaggtctagctgttgtacgagcatttactcttgctgtgatatcgaactggtcgattgtgaagtataagtaaacctcagcaccaagcatctcatagatgttgattctagcatcgattacgctctctggtgatgactcgatgaagagctgctcatcatgaatatcctctggacggataccaagaacaacttccttatcaattgcatcaagtgcgatgagtctctcagccttgctgtctggaaccttgattgagtgtgaaccaaacataaggaggacgtcagcgcctgacttaacaaccttacaatcgatgaagttcataggtggcatacccatgaatcctgcaacgaagagattacatggcttgtcgtagaggttctgaggagtatctacctgctggatgataccatccttcataactacgattcttgtaccaagtgtcatagcctctgtctggtcatgtgtaacgtagatgatagttgtctgaagtctctgatgaagctttgaaatctcaacacgcatctgaacacgaagctttgcatcaaggtttgaaagaggctcgtccataaggaatacctttggctcacggacaattgcacgtcccatagcaactcgctgtctctgtccacctgataaagcctttggctttctgtcaagaagatgctcgatatcaagaatcttagctgcctcatgtacagccttgtcgatcttctcctttggaacctttcttaacttaagtccaaatgccatgttatcatatactgacatatgtgggtacagagcgtagttctggaataccatcgcaatatctctgtcctttggctctacatcgtttacgagcttgtcgccgatccataactcacctgagctgatatcctcaagtcctgctatcattctaagagttgttgactttccacatcctgatggtccaacaaagatgatgaactccttgtcttcgatctcaaggttgaagtccttaactgcgttgaatccgttaggatataccttgtaaatgttcttaagtgataaacttgccatttgaaattacctccgtagtgtatataatcttgtttttgttcaccctaaaaactattgttattctacatcatccacatttttcattctatgtgattattgctcaaaaaaatctttgaacttttgtctaaaatgtatacgttcgcattttttacaacattttgacgattttctaggctttttgataggctttgcactttgttttttgtgaaaccttcaccaatagctcacaattttcaccgttttttagtaaggttttcagtatattttataacttttgcctattcaatttaaccatatatatacttgacaaaaattgtttctcttttaccactgcttcaaatttttgttattttgtcttaattacgactttttttatcctgcgttgatttcaatttgatttttaccatttcaaaatatgcagtatttttactacagtcaaaaaaatccttcgtaccgatgaaccaccatcagtacaaaggacttcataatattctagttatttgctgcgttgtcaacaccgatgacaacaacaatatccgcatcacttatatctacatctgccatagaatcatctatgtcagttctggcacttgtggaagcagatccgagaatcgctgtaagtgaacttacatcgtatgaatcagatgtatataccgtcgtggaagactgtgtatctccctgatatgttcctatatccaccgatgtgtaaccatcagctgtaagtgttgtctgccatgtagctgcaactcctgatactcctgatgcgttgagtactaccatttttgcgttctttgcacttgatgagcttgtatcctctgaaggatcctgcgaattctcgccgtctgatgaagcatctgttgtttcatcagcatctccgtctcctccaaatgtaggatccgatggatcattctcctctgtaactatacttgacacctctttcttgcttgtagtgtcgttcttcttactcttgctcatcgtctttgcgaggagcaccagcattgccactatcgcaaccgctagtattataaccgcagctctgagcatggtatctaaaaacaatttcataactttcttacccattatacagcctccatattctttatgcatttcaatatttgatcagtatctttaaatccaatttaagtctcatcagtttatcaacaaaaacaactagagtataccaaagtgcttttttattttcaacatgtaattcacatgatataataattttcacgaggaggacccactctgtgggagagtccttgtgaagcacgcaggcacctcgcgcagcgacttttcatgtgcctgctccacttttcacgaggagaacccgcttacgggagagtccttgtgaagcacgcaggcacctcgcgtagcgacttttcatgtgcctgttccacatttatggcaaggaggtgtcattttttggatactgcaataataatcggagcttctaccggtatcggaagggccactgctttaaagcttgctgactcatataacaatatcgcgatcacttctttcagacacagagacgagctcatgtctctcaaaaaagaacttgatgcaaagggatgtcactgtctggcaatgagcggggatgccggggatatggatttcatggagaattttatacgaaccatcacagacacattcggtgatgatatagatctgctggtgaacaacgccggaatatcctacgtagggcttctcaccgacatgaccatcaaagattttgacagaaccatgaaatccaacatatactcagtgtttaacagctgcaacagagttgttccttatatggtacgcgctcacaaaggccatatcataaatgtctcatctgtgtggggatgctgcggagcttcctgtgaggttgcctactcagcctccaaaggcgctgtaaactcattttcaaaagctctcggcaaagagctcgccccaagcggcatagcggtcaatgcaatagcctttggcgcagtggatacgaccatgaacggtcatctctcgcctgatgaacgtcagatgctggaggatgagattcctgcaggacgcatggcaacgccacaggaagccgctgagttcatatgccgcatagccggctgtggaaactatctgaacggccaggtcatcacctttgacggtgcatggcagtagccacatattttattgaacattttcaaccaaaacattgtgtaacttaccaaattcctattgcctatttgtacatattgctttagaataaactatatatgttatagaaacaggggttataaaatgggatttggatttgggaaaaagaaaaaaagcaaacctgctgaggataccacattgaccgatatgcagaccactcttgatgaaaacggtaatgtcgagattgtttccaaaaatttcaaaatgaaaccgactcagaagacttcagagggcaccaccgaaacaggtgacacatggatatgctggggatgcggacagcccacaagtcaggatgtgtgtccagtttgcggtaaaaaacgaatcaaatagcacacacaagcaaaaggagattgtattttcacaatctcctttttgttgtcttgtctaaactattaaaatgttattcctgccgcatttatgagaagtccccacataagtcccgctgcatagagcaccgctgctattctaatattctcagctggtctgtgtctgttcattctgaacaaaacaacaagtcccaccccggcactcacgagaagtccggacatcatggctccggcactgagtatcccctgaagataaagctctgttatgatcactgaagccgcacagttaggtatgagtcccaccagagcagccgaagcctcaccaagaactggcacatcattgaatatccttgctatggtatcctccccaaccaactctataactatatttattatcagggtaaaaatgaatatgaatatcgcaatctttgcagtgtgtaccaatgccgatctcagcacgccgccctcgcagtcacagtgttcctgttcacacacctcatgtatatttttctctccataatgtccgtgatcgtggctgtgctcatgaacgtaatcatgcacgtgtccgccattgtttttctcaccctttatattgttgtaaactatgttctggggatactgtgtattttctgccgcagcttcgccatgcatatgcccatgttgatcctgatgtacatgaccgtgtccgtgttctatcctcttcacttccactggttttctgagcctgtccagcacaaatcccactaaatagcccgttataactgctataacagcctttgtcacaagaatctttgctatagttccggcacttatggcatcatttgagagcattatcgggagcatctcatccgatgttgacataaatactgctatgagcacacctgcgcctattactcccccactgtacaggtttgatgccatgagcgaaaatccacactgtggcactatacccagcactccgccaagcaaaggcccaagtttttctgcctttttcaacacatttgcctgtctgcccgcagtctttctctcaagccattccatgatcacgtaggtgatgaacagaaacgggatgagtttgaccgtatcaaacaatgcatccttaaatgaatctattaacaatccaaacatatccctaacactccttgccatcagaactcatatacattgtatccgcaattgtcctgactaaattcaaaatactcctcgttggtcatatccctaaaataactgcatatcacgcggcatattccattgtggcatacaaacagcaccgacgaatccggatatcgcttcttcgtctctatgatgagatcgtacgtcctcctggctatatccatcatggattctccacctgggtatctataggcaaacatcctcttattattgaggaaatcctcatcatctctaggaaccccctcatacacaccgtaatcctgctctatgagcctgtcgtccgtaacgacctgcaaatgttttctctgagcaaccgcctgggccgtcttctgcgctctcgaaagcggagatgctattatcacatcaatagggcagtcatccaacttgtctgcaaggagctgtgcctgtctgagtcctgtatctgtaagaggggagtccgtcctgccacagaccttgttcagtctattccattctgtctctccatgtctcgcaacatataacctcatctgtacactccttccgactttatcagatgtcacatctttataatattaagcatttttgcaaataaatcaactgttttggataataaagtatctggaattttattctggaattttattttatatgcttatactttctgtatttttaagcgtttctgtggactgagtgctgttatcttgcccaccgttctgtctcttatctgagttctgtgaatttccagcgtctgaaccgtcgcctgtgctgtctggtctctgcataccgccgttgcctgtgctgtctggtctctgcatgccgccgttgcctgtgctgtctggtctttgcatgccgccgttgcctgtgctgtctggtctctgcatgccgccgttgtctgggtctccacctggtccctgcatgctgctaggaccttcgctgtatgtcacatcctccattgcaaatgtgctcgtctgatctcccgcagtcaaagtgtatgtctcaccctgtttcatatctgaagtacttatcaaaactgagtcaaacttcttgtcagccttgtaagttaggagcttattaccattggaatcagttagggtgatcgtctctccggcatctatccactcatcaaaattgacaagtgcagaacattgtgtggactcatctccaaattcctgttccatgcctgaaccgcccacagccaccatctcaccgccggtgatagtcgcatagattccgtaatccagcgcaccatttccattgtttgaagggccgagtacatacacgctgccacccgcgatgccaagataaccatttgaatctattccatcgccgtcagcattgatattgatgattccgccagttattagaatatatgcgtcataatcagtatccatgcctgcgcccatgccagatccgccaggtgtgtctgagtctcccggccggtctcctttttccggaagttctggtctgttcgtttctgtgtcatttgtccttctctggaacgaatccgtctgcctctgatcatcctcggttgattgtgtgccatcgctctgtccgttgctgtcgggtcttgccgcattgaaaccgtcatcgttggctaccacgtctatatcgccaccagtcaccagtatcttataaccctcgataccctcatagctcttggaaatgtctatatctccaccggttataatcaaaaggccttccgcgtgcatcgcatcgtctccaaccgatatatcaatgtctccaccttctatatatatgtagctatcctgctgatcgtcgtttccggcatgtattccatcttcatcacaggtgagggtaaatgttccatccgcaattcttacgctatatttgccgttcaggcagtgatcctgactatctatcgtataggttccacccgttaccaccagatcatccttggacacgattccatgtccggtggtatccttgaccgtaagacttccactgccgcccagcgtgagatcacatttggcaaatatgacagcgtccacattgttgtcatcagtctgtacatagtcgcctgacactgtaagagtgttctcagtcccctctgtcaatgtcacaaataccttgtctgcgttctttgcatatatcgccgcatagtctgcagccgtgatcgacacgccatcaaatacaagctgcaccttgtcatcatcaccggcatccactacgacggttccgtctgtgagtgtccctgacagaacgtatacacctgccgccttgatcgtcaccacaccatcttctatatgtacatttgagctgtcacatgtggctgtctttcccgataatgttatctttacagcctcgctctcatcataggttcccgccagatcccgcttcgtgaacatatctgttatatctatagccgcattgctcatggcttcatctatagccgcctgcatttcctccacagtcatctctgtctttgtacttgtgttctgtgcatccgctgcatctgtgtcagcatctgtggctgtgctcacttcacttgccaactcagtatctgaagtcgaacctgtgctctggccggtcgaacatccggcaagcattgccatgcacatggccgctgtcagccccaccgccaaacacttgcgtattcccgctctatgtctcatatatttattcttcctcatgcgatcatctccttactaagcatttgccaaccgatctaaatttctgctctgctttatatcatcaacatcatctcatacatttgtcatcatctataatgtcatatcccccgaatccacctgtgtcagcatgatctctaagttgccatttctcaccctgagtctatctatcatatccttctgatttgtatctttcttaagttttaccgcatatgtaagcttgaacagacttcccatgttggtcgttttcacatttgtcagtctgtaactgtctgtacagtcggcaagtacctcgccaaatgcctctgtatagtcaagattttcaggcacagtgatcttcagggctctctcttcatcccttccgccgccaaatcccgtaagactgcaagcgaacattgctccgccaagtattatcgcaaataataccgcgtatccgataaatcccattccggtcacaagacctgctcccatcgcaagaaatatcgcacatatctcctttgccgagccgggcactgatctgaatctcaccagactaaaagctcctgccaccgcaacgccagcgccaacattaccatttaccatcattatcaccacgcacacgactgctggtatgagtgccagtgtcaccaaaaagctctgtgtatatttactcctaaacgcgtacacccctgcaaggaatacgcctatcacaagagataccgctatgcagattagaaactcctgcaccgttatcgttgtcgctgtaccaaatacactgtcaaataatcctgtcatcttctatatcctcctgcttatgtttgcccttgacttatgtcaaccaaccatctgtttatatgcctctccatactttgaaaatgatgttctgtatacattgtattttgtgagcagatgtgacagccacaatggaaatccgcctgccatcttgatctccatcaacaccttatattcaggtatgaccttgtgcccatacggctctttctgcagtgtaagatcatcgttctgccagagtatgtcgtagtcaaatgtaatccttagtctcggattgtctatgcctttgtaagaatcacgctcatatgagagaaccactgcaggctccagatctttgtacacctgcatgaaataatctatctctcttcctatctggcaatcttcgtgcagtggctgaccgcccaccagataatccatcgcctcctgttcaggcacctccagcctccttttgtacacaacagatttgtatttcttcttgagctcaataaaaacctctgaatcatcatctggtactccatagcttctgagcctgagcttttctttgtaaaccggcttttctatggagtccctgatgagtctgtgggaaggggtatcgaaatatatgttaatgatctggctatgtgcgaaccggtccggctgcatataccttatcatttcactcattatctgctcgtactgttctctatctaacatgtacttaagttcatatcttttaaacgtgttgtctgccataagcatcatcctttctttacattatctcctcttgatgatgctataatagcctaccaagcttaaacgaactttaaatataaaaaattgtcttcggtgactcctattggtgtgtattctctacgttgtatatccaatcggtagtgccggcgaccgagctttgacgcttctgtgccgccgcagagagctaggcgcccttatcgtgcttggcgtggcgtgcacgatggaagcaaagtcaaagtgagggtagacaaacgtgattggatatacaacatagagattacaccagcaggaatcaccgaagacaaccacaacgcaaaaacgcccatctgcggatcactccacagatggacgtctatagtcttatattataatcttatgtctagttgatttgaagataaggctcccgccaaatgcttaggattagcaaacgccctgagcaagcatagcgtcaacaaccttctcgaagccggcgatgttagcacctgcaacatagtctgcgtttccgccaactgtcatgttgtatctctttgctgcatctgagatgttagcgtagattgtctccatgattcccttgagcttgccgtcaacttcctcgaatgtccatgaaagtctctcgctgttctggctcatctcaagagctgatgtagcaacaccacctgcatttgcagccttaccaccaacgaagagaacaccattctcctgaaggtacttagtagcctcaagagttgtaggcatgttagcgccctctgttactgagataacgccatttgcaacaagcatcttagcatcgtcaaggttaagctcgttctgtgtagcacatggaagagcaaggtcacacttgattgaccatacgccgtgatcatttgcatccttctttacatggtactcagctgatggtctagcagcagcataagcatcaagacgtgctctcttaacttccttaacttccttaagaagtgcaacatcgattccttctggatcgtagatccaacctgtagaatctgaacatgtaacacacttagcacctaactgatgtgccttctggattgcgtagattgcaacattaccagcacctgatactgcacaagtcttgcctgcgatatcaatgtcatgatcctttaacagtgcgtttgtaaggtaaagcagtccgtaaccagtagcctctgtacgagcaagtgatccaccatatgtaagtcccttacctgtgagaactccctcgtatgatccacggattctcttgaactgaccgaacatgaaaccgatctctctagcgcctgttccgatatctccagctggaacatcgacatcagcaccgatatacttgcaaagctctgtcatgaagctctggcagaatgccatgatctctctgtctgacttacccttagggtcgaagtctgaaccacccttaccaccaccgattggaagtgttgtaagtgagttcttgaaaacctgctcgaaaccaaggaacttgatgataccaaggtttactgatggatgaagtctgagacctcccttgtatggtccaatggcattgttgaactgtacacggaaacctctgttgacctgtacctgtccgttgtcatctacccatggtactctaaacatgagctgtctatctggctctgtgattctctcgaggatagcattctttctgtaaagctcctcatttgcctcgatacaaggtctgagtgaatcaagaacctctgttactgcctgtaagaactcaggctgatctgcattcttcttctgtactatctcgagtacttcatcaacatatgacatagtaaaaatcctcctaaactgattatatatcgtgacctgttaattatttcctgaccacgctccctattatagtatagggaattaagattgtaaagaaaaaacttgtgaaatctaagtatttttttgtttttgcttaattttcccctgtatttatcaattacgcttatcatttgtaaacattattactggttatgaccgttgtcacggaagataatccgagatatttttccactgatctcagcttctactacttgtcatcgtcatggtgaagatcattcttccagtatctgcatctgtgctttacatttgtggaaaatacgatctgagtcttggtcttgccaaatctctgaagctctcctacaaaatgatcgagatctgccgttgtcttaaaacgtacctctatgagcattgagtaatctcctgtcacgcagttgcactccacaacatttaacacgctgtctatatatggatagaactcagccttctgctcaggtgaaacctccagattgataaatgccttgatataatgacccatagcctcaggattcagcttggtcgtaaatccctcaagcacgccctcggcaagcatcctgtctattcttgttccaaccgctgtaggtgacatggacacctcagcgcctatatctttgagtgatacacgtgcattgtcctgaagcatggcaagtatcttctcatccacctcgtccagtctgtagtatatcatttctttcttttccataagatgtcttctccttctcactttctaaggcaattacaatattatcctacataaccgcaattgtcctttttcctattcaagcaccttatctcgcggtgcaacttgtgtttcacaatcatattagcatatttacttaagattataaatgtgtagtgtcattatataccctgctctgcgcaaattacaacctgatttttatgtatatttgttgttgttgtgttgttatacgcaacctgatttttactcataatgttttcgtcattttacggtataattatcctcaagccagtgcgccaccccatcctcatcatttgatgatataacagatgtggcataccttttaagctgttcatcagcattttgcactgcgtagctttcgtcagcaagttcaaacatatctatatcattcctgccatctccaaaagcaaccaccctatcgcatcccagaagtttctgcaactgttttatcgcatttgccttggatgccgcaagcggcatgatctctagccattgttcatccgtataaatgtctttctgatatacacagtgaaatgtttctttatatttatcgtacattggctttagcttttccggactatcaatacaggtgatgtagaaaatgtttcccactttcagattctccgcagactttactatattcgtcctgacatccccctgcctgctgagcaggaacttcttcataccatctgtacacagctccgggacatacgaaaatttctccctgccatctattcgcgcatacactatcggaaatatctgattaccgaatagatcgtcaagaactgatcctaccgattcatcaaagtaattcgcagcaaggacttcaccggtaagattgtctactataaacgcaccattgtacacgatcagcggaatttctgcccgcagtccacttgtcactttcttcgctgtgataagtgagcgcgccgtcgcataagagaatatcatccctctgtctgtcagattattgattacactgtttgtatactcggatgtggtctcattactgcgaagaagcgtaccgtccagatctgatacatataaagttttcatgttgtcacccacctatctcaatttttctgcaatatatgctatttttctacaactcacacattttcatacaacgtacactattcctataacgctttcgttttcccacaattcactcgattttcaattttctactacatactattttccataacattctatcttctgtacaggatctccacatccccatccacgaatccggcggcaacagcctcatacttcttcagctcatcggcatattttccctctgtgagatactttctgatcatctcacaggaaatatcaagtatctcctcccagccggtatcctgctgccatccgtacagatcttcccctgtcgtgaactcctcgtaacaattccagtcctcatcctcctcgtcaaaataagttgcacttatcaactggatcgaccagtgcagatcaacttcttcgtatatattgaaattgatagccactcccggcagcggcatattctcgtccaatatccggtctaaccattttgcaaattcatcgtacatatctatttcccctgttcgtcacgttttttcctacaagtctttactgttatttctatgttcaaccttctaatccttctcatatataaatgtcgtatctcctatggtgcatttcagatattttccatctatcgtacccgttgaaaagctaagagtatccgtcatcttaaagttgtactgattatcccccgtctgttccacctgcagattgatagtcttatcccccatcgccttaccggaatagtaaaatgttgcagtatcaccacttatttcatagatctcttttgtgtcctcactcttgaccttatacgtcttgccatctgatgtctcactttttacaagcacccattttccatccagcgtctcagtcttaccacacgctgtaaacgcaaacacacataccactaccagtatcactgatatcattttctttatattccccattttatttcctcccttttgaatatctgtcatctaagttattttatcaaaaaaggctgatgtgaagtattccctatacacatcagcctcgttttatgactctatatgattattacttgttgttcttgatgtactcatcaattccctttgcaccagctctaccagcttccattgcaagtataactgttgcagcacctgttacagcatcaccaccggcatatacgccttccttggtggtctgtccgtttgcctcttctgcaacgatacacttccacttatttgtctcaagtccctctgttgtcgatgagataagtgggtttggtgaagttccaagtgacatgatgactgtgtcaacgtccattgtgaactctgaatcaggaatctcaacaggtcttcttctgccggatgcatcaggctcgccaagctccatcttcacgcacttcataccacaaacccagccattctcatcctcaaggatctctgttgggtttgtgaggagatcaaatatgattccctcttccttagcgtggtgaacttcctcaactctggctgggagctcctcctctgaacgtctgtacacgatatgtgtctcagcgccaagtctgagtgctgttcttgctgcatccattgcaacatttccaccaccgacaacggcaaccttcttgcctctcatgataggtgtatttgaattctcgtcaaatgccttcatgaggttgcttcttgtgaggtactcatttgctgagaatacgccgttggcattctcacctgggatacccatgaacttaggaagtcctgcacctgatccgatgaacactgcgtcaaatccctcatcctcaaggagtgagtcgatggtgactgactttcctactactacatttgtctctatcttgacaccaagtgacttgatgttctcgatctccttggcaactaccttctcctttggaagacggaactctgggattccgtatacgagaactccacccggctggtgaagtgcctcgaatatagttacatcgtaacccatctttgcaagatctccggctgctgtcacacctgaagggcctgatccgatgactgccaccttgtgaccattcatctcctttgcaggctctggcttgattccgttctcacgggcccagtcagcaacaaatctctcaagcttaccgatggatatcgcctcgcccttgattcctctgatacacttctgctcacactgtgtctcctgtggacatacacggccacatacagcaggaagtgctgatgactcgctgatgatcttgaatgcctcagcgaagttgccttccttgacctgagctataaatccaggaatattgatagatacaggacagccattcatacatggggcattcttacatcctatacatcttgaagcctcagccatagcctcctcttcattatatccgtaacaaacctcttcaaaattctttgcacgtacctgtggctcctgctcgcgaaccggcactctcttccaaacatctacttctatagccat

SEQ ID NO: 135 - DNA, 19653 bp, unidentified
  source 1..19653: mol_type = unassigned DNA
  misc_difference 385: note = a, c, g, or t
  misc_difference 386: note = a, c, g, or t
  misc_difference 387: note = a, c, g, or t
  misc_difference 388: note = a, c, g, or t
  misc_difference 389: note = a, c, g, or t
  misc_difference 390: note = a, c, g, or t
  misc_difference 391: note = a, c, g, or t
  misc_difference 392: note = a, c, g, or t
  misc_difference 393: note = a, c, g, or t
  misc_difference 394: note = a, c, g, or t
acaattaagattaacggcatgatgtgcccgcattgcgaagccactgttaaaaagtgtctggaggcgttcccgcaggtcacatctgcagaagtcagccacgaaaagggcacggcggtcattcagctcaatgctgaaatttccgatgccgagctcaagaaagccatcgaagataagggctacgaggtcgtagactgagttcgataaagcttgacacaaatttaatctgtgttacaataaaagcactgcctgtgttgagggcagtgcttttgcattttacaatttgttcacagcaaattggctttttagaaagaataacggcgtaaaattaacataaagctaacgtaaagcaaacggataaagtttcgcccgcctttttcaaaggcgnnnnnnnnnntggactgttgagacgtagggaacccagttgcatgggttccctgaaaggcggcacaaagccgccttttcaaaaaccacacagccaaagaatactaaagaagagatgaggaaatcacatggcacgagagcggtatctgctggacgatacggaagacaccattcataaaaacgaaatcaagccgcagaccgcggcggataaacgcaaaaactggtgggattatcacaagatgcacgtcctgctcgtcgcgctcgccatagccgtcgtcggctatttcatatattcggtcacatccaaaacggaacccgattataccatcaccgtcatgacgcagtataccgtgccgagcgacctgcaaaccgatattcaggagcttttcgagaaatatgcagacgaccgcaacggtgacggcaaaacatacgtcgccatgaatttctgccgctttaatacaagcggcacctcggagtttgaaacatcagagctgcaggcctcgttcgtcaagttcgcgaccgatgcctccgccggtgacagcatgattttcgcctacgatgacgcaagctataaatatctcgaccaggatgagttagaaggcttcttcggccccgtagacggcaccgataacgactattacctctggaaggacattccggcgctgaacaacttagagctcaaccactataacgaggagggcgcaacgaaagaaagcgtgctttccgttctcggtgagctcaaggtcgccgtccgtacagaagacggcgccgcgttcaaaaagcaggaaaagatcgattaccgcaatgacagcgtcaagctgtacgagcgtcttttgaacgacgaacccgcaaataccgaaaattaagtgagagagctgcacatttttacgcgcagctctcttttttctttgacagaaccacgcagacggactataataagcacatagtataccatgtcggtatacatcatccgaattcacgaaaaaggatgggataaaaatgaaactgaaacaacttttaaccgccatcgagtatcgcgcggagcaggtgccggacgtcgacatcaccgaccttgtgtacgattcccgtaaggctgtaccgggctgcgcgttcgtttgcctgcgcggtgcgaatgcagatggccataagtacgcgaaaacggcagcggaaaaaggtgccgccgtcatcatcgcagaggagatcgtggaagcgcccgtgccggtcattttaacggataacacccgccttgccctcgcatatttgagcgccgagttcttcggccaccccgcagagcagatgcacgtcatcggcatcacgggtaccaagggcaaaacgaccaccgcattcatgatgcgctccattctggaggccgcaggccataaaaccggcgtcatcggcaccatcggcgtactgtacggcgataccctcgttcaaaccgataacaccacacccgaaaactacgaggtgcagaagttcatgcgccaaatggtcgatgccggctgcgaatactgcgttatggaggtctcgtccatcggtcttaaagatcaccgcgttgcaggcttcacgtttgagctcggcctcttcacgaatttctccgaggatcacatcggcggcgcagagcataaagatatggcagagtacatggcgtgcaaaagcatgctgttccgcatgtgccacaccggcatcatcaatatcgatgacccgaattataccggcatcatcaaaaaccatacgtgcaatattgttacctacggctacgataaatcggccgattttgttgcgcatggggaagaactcgttaccacaccggggttcctcggcgtgcgcttctccgtcacaggcaagctgaattttaccgcggatgtcgccatccccggcaagttcaacgtctataacgccctgtgcgcaatcacggcgtgcagcgttttgaatatccccgtcactgccatgcagcaggggcttaaaaccgtcaaagtcaagggccgcgtggagcccgtgccaatgcccggcgatttcaccctgctcatcgattatgcgcacaacgccgtcagcatgcagagcattttaacaacgctgcgcgcttatcacccgaagcgcctcatctgcatgttcggcgcaggcggcaatcgccccaaggtgcgccgtttcgagatgggcgaggtcagcggcaatttagccgatctctccgtcatcacggcagataactcccgttacgaaaatgtgctcgatattttagcggacatcaaggtcggccttgcaaagaccgacggcaaatacattgaaattcccgaccgccgcgaagccatccgctggtgcattgaaaacgcacagcccggcgacattattgtcctcgcaggcaagggtcacgaggattatcaggagatcgagggtaaaaaatacccgtttgacgagcgtgtcgtcattcgggaaatcctcgattccatgaaataaaacgcataaattattttcgagaaaggacttgtgcagaaatgaataaggaaatcacattggaacagctcgcttcttatgagactgcgttcgacagcgaccgcgcaaaccgcatcgccatggatgctgccacgaagaacggcgtcaacaacgccgccatgcgctttgagaacgctcgcgaaatgcgccatacgttcaacatttctctggagcagggcgacatcacgaatcagaagcagagcggtcgctgctggatgttcgcagcgctcaacaccatgcgcttccgcatcatcaaaaagctcggcatcaaaacgtttgagctctcccagaactacgcgctgttcttcgataagctcgaaaagagcaactatttcctcgagagcatcttagagacgctcgacgagcccaccgcaggccgtcttgttacatatttgctttccggcccgctcggtgacggcggccagtgggatatgttcgcaaacctcgtagagaagtacggcgtcgtgccgaaggaagtcatgccggaaaccgccgcatcctcctccacacgtgagattgtcggctacctcaccgaaaagctgcgtgagtttgcctgcacgctgcgcaccgcgtatcagaacggcgcttccatggaggagctccgtgcaaagaaggacggcatgatgcagaccatctataacatgctgtgcatcagcctcggcaagccgcctgtgaagttcgatttcgaggtcaaaactccggacggcttcgtgcgcgacctcggcatcaccccgcaggcgttcttcaaaaagtacgtcgatatggatctttcccggtacatcagcctcatcaatgcgccgacgtccgataagccctacggcaagacctacaccgtcgcgttcctcggcaacgtcgcagagggccgacccgtcaagtacctcaacctgcccattgaagacctgaaagcggcagccatcgcccagatgaaggacggcctgccggtttggttcggctgcgatgtcggcaagcgcagtgttcgcgacggcggcgtcatggatctgaacgctcttgacctcgaaacgctcttcaacaccgagttcaccatggataaagctcagcgcctcgattacggccagagcctcatgacgcacgccatggtcttccagggcgtcaatatcgacgataacggtaagccgaaccgctggagagttgaaaacagctggggcaaggatgccggcgtagacggctactacatcatgagcgacgcttggttcgacgagtatatgtatcaggtcgtcgtcgataaaaagtacctcacagaagaacagcgcaaagcgtttgagcaggagccgatcacgctccagccgtgggatccgatgggctccctcgcttcggtgcgctaaacgaaaggaaactactgcatttatgaatttaaaggtatctgagatcgccgaaatgtgcggcggcaggctcgtcggcagcggcgaaaataccgtcacgtcgttttataccgacagccgcgagacgacgcccggcaaaatgttcgtgcccatccgcggcgaaaacaccgatgcacaccgctttatcccgcaggtcttcgcatcgggcgcggcagcgactttttccgaagagccgctcgatgcccccgcaggcgatgttgtctacgttgaaaacacccgcgcggcactgcaaaaggtcgcggaacactatcgcgagcgcttcaatatcccggtcatcggcatcacgggcagcgtaggcaagaccactacaaaggaaatggtcgctttagctgtttccgccggtctcaaaacgatgaaaaccgccggcaacgcgaacagccagatcggcctgcccatgaccgttctgcgcatcacgccggaggacgaagccgccattgtcgaaatgggcgtcagcatgcccggtgagatggcgcgcatcgcaaaagtcgcaaagccgaacatcgccgtcatgacgaatatcggcgtgtcgcatatcgagttcatgaaaacacgcgagaacatcatgaaagagaagttcggcatcacggattacctgccaaacggtagcaaggtgttcgtaaacggcgatgacgacctgctttccacattaaaaagcaccccggaaaagcagatcgtgcgcttcggtctcggtgaaaattgcgactggcgcgccgtagagcttgaggctgatacggagggaacaaggtttatctgtgtgcacgacggtaaacgcgaagaaatgtacgtccccgctgccggcgagcacaatgtgcgcaacgcccttgccgctgtcgcggtcgctgtggaagtcggcgttccggaggaaaaagccgtcgcggccatccgcacctatgcaccgcccgccatgcgccagcagattaaagaagcgcacggcgtcacgctgatcgacgatacctataacgccagccccgattccatgcgtgccgctttgaaaattctcggcggcctgaaagcgaccggcaaaaagtacgccgtacttgccgatatgctggagcttggcgattacgcagagcgcggccactatgaaaccggcgcgtttgcggcggaaaacggcaccgatgtccttatcggcgtcggcccgctcgcaaagcacatcgtcgagggctttaaaaatcgtgagaacagcgcgtggttcgcctcgaatgcggaagccatcgcgtatctgaaagaccgtctgcatcccggtgatgccgtgctgtgcaaaggttcccgcggcatgcacatggatgaaatcatccatgccctttcggaataagcccgtatactataatatatttaatatatatcacaatataaagacaaaaaccggcaagttccttttcacttgccggttttttgcaaaacggaggaaagttgtatgaaaacaagattactgcgcccggaagaaaactggaaatcaaatctcaccatggctgtcgcctttgagggagattacgacctcgaaaaagccaaagaaagcgccgctcgtgagcgcaccgaagaagaaaagagggaagacgcccgcaaccgctgcttcggcacatttttagacgacgatgagaccatctgcggtgttgtgaacagccgcgagtacctctgccgcttcgacggcggcacgtataagctcggcggtgtaggcggtgtttctacattgccgcagtaccgccgcggcggcgttatccgcgcttgcatgacgacctctctcaaagacatgtacgcaaacgatttcacgttcgcttttttgtatccgttcagcatgcagtattaccgcaagttcggctttgaagccggtgcgccggaataccgttggtcggtgccgttcacagcgatgaagccgcaggacgtcggcgggcacgtcgagcagatcttccccggcggcgatttcaccccgcttctcaccgtctataacgcgttctatgcagaccacaacctctccgccgtccgcgaaacgtatgataaaggtctcgaaaaagcgaacctctggaacgataagcgctacgtattcgtctggtacaataacgaaaatcagccgcgcgggctgatgattacccataaaatcgaagaagacggcgtcacatatcttgactgcacccacacgttccaaagccccggcggtttcctcgcgtgcgatgccgaagcgttcaacggcttgctgttcttcgcaaaatccgctttctcgtcggattacgagaagctccgtttcaccgtcccgtccgatatgcacttagagcagctcatcggcgaaaacacgcgcacgttctgctccgtgttcccaaacggcatgctgcgcgttgtcaacgtcgagcgtgttttagaaaactgtgcttgccgcggcacaggggagatcaccctccgtatcgaagacgatatcatcacggaaaataacggcacatggcgcctgcactttgcccccggcgagcaaaataaagtcgaaaaaaccgccgctgtaccggacctcatcctcaacatccgcgccttctctgccctcatcaccggcgcccgtgccgccgccgatatcccctggatgcctgacgtccgcctcctccgccaagctcccgccgtccccaacgtcttctaccccaaaaagtgctccatgatggatctgttctaagcatattaattttattgcaggattattagtaacaattacgaaaaaaagaagagattatagggggtaattagtgcgttgcacaggatttaaaaaacgaattgacaataagcgtgtcgaatggtatcatttaaaatatgtaacaatatttatttagaatataaggtgcgtgaatataaatgaataacagaaagtttgcgctttctatgatcatgaagttctccatttttgcattgcaattcggcttttttgccatggttttgttccaatattacggcccaagacttttccgtagggcagacagcatcggatatgcggtcacattgattctctatgccatcgtatatgtagcgctcggcaatcttttccgtgcgtttaaaattacagattattccatagcagaaactattttttcgcagttcctgtcctttggcatggcagatttgctgctctatggcgaattctgcatgattcgccataattatgtgaacttaattcccggcattctcacggtgctttgccagcttttggcggcagcgtgctgggctcttgtcggcaagcgttttaccatcgcgttcggcaaaccggagaagaccctcgtcatctccggcgcggataatgtgaatgagtttctacaaaaatttgataagattggtcatatcttcaccatcgaaaaggtcgtttctgcggatattctgaaggccgactggaaaaaagaagtcgctccctatcaggctgtcattttctatgaagtttcctctaaaaagcgttcagaggtgatctggtactgcatgcagagccgcaaaagcctctatatcacgccgcagctcagtgagattaccatggaaggcttcggagcgcgtcatctgatcgatacgcccatgatgaaatatgagtaccgaagcgagcgtttctggtacaatcttgtcaagcgcgtggtcgatattctgctttcccttacggcacttattctgctttccccgctgcttcttcttacagccttggctatcaagctcgaggatcgcggtcctgtgttctataagcaaaagcgctgcaccaaaaacggcgaggtttttgaaattctcaagttccgcagtatgatcgtagatgcggaaaaaggcggcaaatccattccgtgtcgctccggcgatccccgcatcacacgtgtcggccgcgtcatccgtaaactgcgcatcgatgaattcccgcagattattaacgtcttaaaaggtgatatgtccatcgtcggcccgcgcccggagcgcatcgaacacgtggaagagtacacaaaagaaatccccgagttttcctaccgcttgcgcgtcaaaggcggcctgaccggctatgcccaaatttacggcaaatacaacacgagtccctacgataagttgcggctcgaccttcagtatatcgaaaaacagtcaattttgcttgatttaaagctgattctgctgacaatcaagatcatgttcgtgccggaatctacagaaggcttcacagaagagaagtctgcccagatgacggagaaaaccaagagtgtggatgaactgcaagataaatgaacaaatatgttgtataatattttatattagggtttgtaataggtaaagggcttatgaagttttgagtggagcgggtttaattaaatgaaacaaaatgtagatgtagtaatagtcaactgctttgatacatacgagcacagggctatactattaaaagaagtttttgagagtattgggaaaaaagtttgtattatcacttcagattacaaacatattttcaaaatgaaacgcgatgattttccagtggactttgatccgatacatgtttatccatacaagaaaaatttatctgcacaaagactgttttcccattatagatttgcatgtgaagccattaatcatttgacgcaagaatatgataatgtatcgctggtttggttttttgttccacccaattcgcttgttaaagaagcggctaagtacaagaagggcaattcacaagtaaaggttgtatttgatgttattgatatgtggccggaatctatgccgatttccaaatacaaaaatttacctccttttaccgaatgggggagactgcgaaatctaaagctcaaagtagcggatgctgtggtttctgaatgtgatttatacaaaagcgtattaaataggttttatgataaagagatttatacgttgtatttagcgcatgataacaattctctcgagtctaaacctaatccaccgcagaatagaatttcactttgctatttggggtcaattaacaatattgttgatatttctagaatttgccgtgtgattgccaatctggataaaccggtagacttccatattataggtgatggtgagaaacggcaagagctgattgatgcggcatccaatgtagaggcaaatgttgtttaccacggcaaagtatatgatcgagtagaaaaacaaaaaatctttgatagctgtcatgcaggcttcaattttatgaaagacagtgtttttgtcggtctaacgatgaaaagtatcgattactttgaagcaggactcccaatcctgaatacgatcaaaggcgatacgtggaaatttgtagacgaactgggaataggtgtaaatgtcggagataattcggtcacagcagatcagattatggctttgcaaaaatcaagaaaagaagtgcgcagcttttttgacaagaactttacaaaaggtgtattccgtgaaaaagtgttaagaattatttcaactttaaatttgtgatgaatacatagtgcttgcgcagactattgtaatcatataactgtgtttagtggttgaaattggtattttgtagcttgagaatcggttgcatcatgaaaaaacgatgtggccgatttttcatataatgctcagattgctgttacctatatttaaatctttgcgtttcagtaaatgcaaattctagcttagggttgcttttaagcagataatacggtataatacattatgaattaagttgtcgatttatgtggaaatacatcgtaataaatattagaataagtcatatttatggtatatattgttgaaagaaagttgatgttatgaaaaagatttcaatagcgatggcagtgtataatggagaacgttttttagaggagcagttagattccattctgcagcaattagagcctcaggatgagcttgttatttcctatgataactctaaagacagaacatgggaaattataacctctttttcagagcgctatccgcagattgaaatttacaagaataaaacgcccggtgttactggaaattttaataatgcattgtctttgtgcacaggagattacctgtttatttgtgatcaggatgatcgttgggcagagaataaacgtgctgctgttttggagacttttgaaaaaacaggtgcggatatggttattcataatggcgttcatattgatagtgaaggaaaagtaatttctgaacctttttttaccacatatagaataggtgatggaaaaatcagaaatatccttcgctctcggtatagtgggtgctgcatggcttttacacgtgagatggcacagaagatcttgccgatgccgccgaagatcgatgcgtatgatagatggattggcacggtaggagagttcttaggaaaaattgcatatgacgatcgaatccttttatatcaccgtatgcatggagataacgttactacgaatacgcgttctataggcgtaattttgagtaccagaattgatcttgttaaagagcttagaaagcgaattcgccgggagagaagagaataatatggatagttcctgcaaaattgcggttatagtggttgtatataataaatcgtgcaaagaaagtatcacttgccaagcattgaaagcacttagacacactaaggtatcggttttagtatatgacaattctgtgcgagattttggcaatgcgtcttattgcgaaaaacaagaatggatttacttctcgcaaggggaaaatgttggcatttcaaaagcttataatgtgtgtgtagaccatttaaagaaatatatgctggcagattatttgtgcttatttgatgatgatacgaatattagcgaagagtactttgatacattgaattccgcaataaatggttatgatgccgatatatatgttccattcattttttctgcggggaggttgctttccccatgtaaaataaaacctaattttagtgtgtcaatgttcaaagatgaaaaggaagcactgtcatacaacggaagagatattacggcgattaattctggaatggcaatcaaattaaatgtatttgataactattgttatgatgagcatattttcttagatggcgtagatcataattttatgagagatatgaacatccagaaaagaatgataaaggttttcccttatcgatgtacgcatgaattcagtggagatagtaaaccctctatgcagagcgctttaacaagatttcaaatttttgcacgggataataggtatattttacaaaatagtcgtatatcttatttctttattgctggaaaacgagctgttaaattgaccatcctttatcattcgatgagttttttgaggactttttttagagttagtagttttaaagagttcaggggagaggcttatgaaagaaaaaatgactaagcaagttttgcttaaagacttaccgggagttttaattggtatagttggattaatccttggacttgttatttgcccggataatcattattttgccgggctgcttctattagtatgtgctgtatgtgtttatgtgcactgtgtgtttgttcaaacttccagaaattggttggatattcgaggcgtcttttctgctatatggatagcaacgattggattagctgttttgcgccttacagattatcaagtcttatgggaaacggagacatggatttgccaaatcattgcttacatagcatttcatgttggtgcgaatttgggaattcactttggtggtacatggttcgtaaaaatcaagagcaaaaactcagaatcggaagaatctctcaacaataaagatacattcagactccatggagagagattatttccgatatgtgtcattcttacaatatttggcatagcttgctttgttattaatatttgtatacgcggctatattcctttttttgcagctgatggtaataatgcgtatataagattttataccaaatggtatttttttgcagttgcagcgactattgtgtctgggttggattattacgtgataaaaacacaaagcgtaaaaatatggcaaaaagtttttttatggtttagtatcatttattcggtaattattttcccaattttaatagtaaatagaagtgcacttttatctgctggattgtcacttattacagtggtgttttatcttaatagaaagaaattcacggtacttttgttaagcgtgatagtgcttgcagctgcatttggagtttgcaccagcgggcgtggatattcggaggcacagttaaaagaattttttgaacccagtaagattgaaattggtgtagcagaatcgacagacaattctgaaccagttagcgaagatacaagcaattcccaatcttccacagaaggcttgccggaaagttcttcaacagatgacggtagtgctaatatagaagataatcctgatatgagcatttcagaagaaactgataataaggggacaggatttgagctttcagggacagcagcgtttatatatacctatttgacggtaagtcatgataatttaaatgaggctgtgttgcatgatattgatagaacatatggtgctttacagtttactccttttaacgttatcttgagaatcccatctatacagcaaatgattgatgaagcacatatttataaggttcgtgatcaccttactacaattaatttgatcggatatgcgtactacgattttggagtagtgggagtagttgtttttatgctcttatggtcgtttgcattcggagtcattcaggcttgttatgaaaaaggaaaaggtattttttctttgatggctttaggtgttgccatgacaccgattgcactgtgtttctttgatccatggatgagcgagtttattcaatgggtatattggggagaggttttgattttgtttatggtatcatatgtttctgtgaataaaatcaaaagcaaaaataaagtgtaaacaaatttaaataattcagaggagagtgaaaacatgaaaggcatcattttagctggcggctctggcacccgcctttatccgctgacaaaagtaacatcaaagcagctcttaccgatttacgataagcctatgatctactatccgatgtctgtcttgatgagtgcaggtattcgagatatcctgatcatttccacgccacaggatctgccgcgttttgagcagctacttggtgatggtcatcagttcggtgttcaactgagttatgtagagcagccgtctccggatggcttagcacaggcctttattttaggtgcagattttattggcaatgataccgtcgcaatggttttgggagataacatttttgccggtcacggtttgcagaagcgtttgaaagcagcggttcagaatgcagaaaacggcaagggcgcaaccgtgttcggctactatgtggatgatccggagcgtttcggcattgttgaatttgataagaacggcaaggctgtttctattgaagaaaagcccaaaaacccgaagagcaactattgcgtgacgggattgtatttttatgataaccacgtagtcgagtatgctaaaaatcttaagccgtctgctcgtggtgaactggagattaccgatttgaaccgcatttatctggaagatggttccttgaacgtagagctgctggggcagggctttacttggctggacactggtacacatgagagcttggtggatgccaccaacttcgtaaagactgtcgagcagcatcagcatcgtaagattgcttgcttagaggaaattgcatatctgaacggttggatcagtagggaagacgtactggaagtttatgaggtgttgaagaaaaatcagtacggtcagtatcttaaagatgttttagatggaaaatacatagataagtagggagagtatgaatatgacgatcatcgttaccggcggcgccggatttattggttccaattttatttttcacatgctgaaagaatacccggattaccgcattgtctgcctcgataagttgacctacgcaggcaacctgtctacgctggcgcctgtcatggataatccgaatttccgctttgtgaaggccgatatctgcgaccgcgaagctgtaaataagctgtttgaagaagaacatccggacatcgtggttaactttgcggcagaatctcatgttgaccgttccatcgaagatccgggtatcttcctccagaccaatattatcggtaccagtgtgctgatggatgcttgccgcaagtacggtatccagcgttatcatcaggtttctaccgatgaagtttacggtgacctgccgctggatcgtcctgatctgttcttcaccgaggaaactccgattcacactagctctccgtacagtagctccaaggctgccgctgacctgctggttctggcttaccaccgtacctacggtttgcctgtgaccatttcccgctgctccaacaactacggtccttatcatttcccggagaagctgatcccgctgatgatcgcgaatgctctggcagacaagccccttcctgtttacggcgaaggtctcaatgtccgtgactggctgtatgtagaggatcactgcaaggcgattgacctcattatccataagggccgtgttggcgaggtatacaacgtcggcggccacaatgaaaagcagaacatcgagatcgtaaagatcatctgcaaggagctcggcaagccggagagccttatcacgcatgttggcgatcgcaagggccacgatatgcgctatgccatcgacccgaccaagattcataacgagctgggctggctgccggagaccaagtttgaggacggcatcaagaagaccatccagtggtacctcgataactgcgagtggtggcagaccatcattagcggcgagtatcagaattactacgaaaaaatgtacggtaatcgctaaaacgctcagggagagatcagtatgaagttttttgtaacaggcgttggcggtcagttgggccatgatgtgatgaatgagctgctgaagcgcggccacgaaggcgtgggttctgatattcaggaaaactacagcggtgtagcagatggttctgcggtaacaaaagcaccgtatgtagcactggacattaccgacaaagatgctgttgagaaagttattacagaagtaaatccggatgctgtaattcactgtgcagcatggactgctgtggatatggcagaggatgacgataaagtggcaaaagtccgtgccatcaatgctggcggcacgcagaacattgcaaatgtatgcaagaaactggattgtaagatgacctatatcagcacggactatgtgtttgatggtcagggcacagatccctggcagccagattgcaaggattataagcctttgaatgtatacggtcagacaaagctggaaggtgagttggcagtcagccagacactggagaagtatttcatcgtccgcattgcttgggtgtttgggctgaatggtaagaattttatcaaaaccatgctgaatgttggtaagacacacgacaccgtccgtgtggtcaatgaccagatcggcacaccgacctatacatatgatttggctcgactgctcgttgatatgaatgaaaccgagaagtacggctattatcacgccaccaacgagggcggctatatcagctggtacgatttcacgaaagaaatctatcgtcaggctggatataagacggaagtcctgccggtgaccacggcagagtatggtctgagcaaggcagctcgtccgttcaacagtcgcttagataagagcaagctggtggaagcaggatttactccacttccgacttggcaggatgcactgagccgctatctaaaagaaatcgaggagtaaatattatgggacagatcacagttgaaaagaatgttggtggcattgagggactttgtgtaattacgccgactgttcatggcgataacagaggttatttcatggagacatatagccagcgagacatggtagaagctggactgaatatcccattcgtgcaggataatcaatctatgtctacaaaaggcgttttaagaggactgcattttcaaaaacagtatccccaaactaaacttgtgcgcgcgatcaaaggaagtgtatttgatgtagccgttgatttgcgtgcagattccaaaacctacggcaagtggtacggcgtattgctcacggaagacaataaaaagcagttcctcattccgaaaggctttgcacatggctttctggttttgaccgatacagcggaattctgctataaatgcgatgatttctatcatccaaacgatgaaggcggtctcgcatggaatgacccggaaatcggtgttgaatggccggagttgaaaggtgagtacaaaggcagcgcaagtgcagatggctacacgttggaagatggcacggcactgaatctgagtgataaggaccagaagtggctgggactgaaagatacctttcagttttaagtaatatttatgagtaaagaaaaagaaagcagaagtgcggtttctgcgggtattggttatacgattggaaatatacttataaagggcataaatttcctttctgttccacttttcagcagaataatgactccggatgagctcggtgtatacagtgcttttgtagcgtatgattccattctttttgtaattctaagtttagccatacatagcagtgttaaaaatgctaaatacacattttctggggaagtagacgagtatacttcgtctgttagcttgattttgtggatgaatatggctattggtcttatcgtagcaacactattttcaggcccgttatcaagcttacttgggctgccggttgtttgtctttatttgctggtgttcatgagttttggctcgtcggtgctaaatctttataattgtaggattagcttggattataactataaagggtatttgtttgcagcctttgctaatacagttggaaacctgttggtttccttagttttaattcacactatattccaaaatcaaaaagatttaggccgtatcatcggtgtttcggtaacaatgttgttgctggcactggtactattgggcacgctttatcatagggctaaaccaaaatttgaacgcagattctgggaatatgctgttcggtatagtttgccattggttccgcatggtttgtcacaagttcttttaggccagtttgatcgtattatgattcggtctatggtaagtgatgcggcggcgggtatttatagtgttgttgcgaatatcagtttaattttaacaattattatcgattctgtatctacggcatggactacatggttttacgaagcgtatgctgagaaaaagattgctgagattcaaaaacgagcagtgcagttaaccattttttttgccatacttgctattgggttaatggcgcttagcccggaattggtatggatattgggtggtacacagtacgaatcgggtaaatatgttgccattccgcttattttaagtgcttttgctgtatttatatataatgtggttgttccagttgagtatttttgtgagaaaacaatgtatattatgattggaacggctgctgctggtgtggtcgatattgttttaaactatatttttattatgaaatatggatttatagcagctgcgtatacaacacttgtggcatatatatgttatgctgtgcttcattttattattgctcggaaactttctggaatatctattttgccttttaaggttgtttgttttatagtagttttgctgctgtgcatggcagctttaaacttagttttcatatcttccattattattcgatatcttgcatgtgcggttgtagttatcccgatgggattattactgcttaagcggctatttaaggagaaaaatcaaaatgactaagagagagttgacgctagctgaaattcatgagggcacgttggaagtattaaaaagattcatttccgtttgtgatcagataggagtacagtatttcttggcatacggttcactcataggcgcggtgagacaccatggatttattccttgggatgatgacttggatgttattatgcttcgtccagattacgaaaagtttagagagtattgtaataaacatgaaggggaacttactcctttcaggttttttgatcgccacaacacgccggattacccttatacgattggacgcttttgcgatacccggtatcgaatggtacgaaatgacaacgtgccagatgcagggcaggggatgtttattgatatttatccgcacgatggtgcaggtaataacaatgataaacgttggaagagtattctgaagaagaaaaaacatttgatggctttacttgggtgcgcatttagtaaaactcctattccatctaaaagcaataagctgctcacaccaattcggttgcctatatatttgtattcacatttcaaaaagccaaagtacttccttgataaaatggaagcattaagggaagtttatccttttgataaaagcaaatacgtcacttgtattatatgggatgtagaggttcgccagtgcccgaaagaatggtttttagagtatacaactcttccctttgaaggaattcaagttaaagttccaaaggactatgacagcgtattaagagatacctacggcgactatatgcaactgccaccagagagagaaagacatccgtaccatggatatcgactttatagaaaagaagattaagcattatacgggatggttttgaattgaagctaagaggtacttttatgttatcaattattattccatcttgtatactgcaagaattgaaagacaaaggaactagatacttatggtatttggggttaggcatgcttgctgcgttggttgtttattaagcttaattgaggggtaatacagaaaaatgaaaagttgctaaataaagaggcagtattgtatatagtatttggaatattgacaactgtagttaattattcagtttttttgctttggtataataccttatttagaggcaaagatggtctttatgctaatagtatagcttttattgaagcagtgctttttgctttcgttgtgaataagttatttgtgttcgaaagtaaaagttggtcttttatggttttgaaaaaagaaattccatcttttttagccacaaggataggttcatttatagttgaagaatttgggatatttattgctgaaaaaatattgcggttgaatcgttttgaggttttgagaatttgggatactgtgattgacggtattgttattgcaaaacttgcgttagttattgtcgtggttttattaaactacgttttttgcaaattttttgcctttaagagtacaactattaaatagcaatattgttatgggattttgaggtagttattcttctgattgcgcaacatacatagctgtcatatcgctgttatcccctccccacatgcaccaaatgcgcgatgcccggtatgctctcgccctgctgcgaagaggttgtg

SEQ ID NO: 136 - DNA, 26770 bp, unidentified
  source 1..26770: mol_type = unassigned DNA
aaacgatgaaactgtacaggagataataatagatgagagtattgataataaataaatttctatatccaaacggtggatcagaaacctacatatttaagctgggtgaggcgctggagcaacacggacatgaggttcagtacttcggtatggagcatgaaggccgctgcgtgggcaaccgggtcaatgcttatacatctgatatggacttccacggcggcagcaaactgagcaagctgacctaccccatcaaaactatctacagcaaggaagcacgggtgcagctgagaaaagttctggacgacttcaagccggatgtctgtcacctgaacaattttaactaccagctgacaccttccatcattctggaaatcgtgaagtggcgcaaggaaaccggaagagattgcaagatcatcttcacggcacatgactaccaactggtctgcccgaaccacatgctgaacaatccgaacacccaccagaactgtgagaagtgcctcggcggtcatttcgtgaattgcatgaaaggcaagtgcatccacggctccacggcgaagtcagccatcggcatgatggaggctgagttctggaagtggaagggcacctacaagtacattgacaccatgatctgctgctcggagttcatgaagagcaagatggacagcaatccgctgtttgcgaccaagaccgtggcaatgcacaacttcatcgacaaggtggagtggaaagaaacggagaaaaaggattacgtcctctactttggccgcttctctgaggagaagggcatcggcacactcatcaaggtctgtaaggaactgccggatgtgcagttcattttcgccggtactggcccgctggaagagacagtaaatggtattaagaacatcaaaaacgtcggcttccagaaaggcgaggcactggagaagctgatccgtgaggcacggttctccatttacccttctgagtggtatgagaactgcccgttctctgtgatggaatcccagatgtacggcacgccggtgctgggagcagacatcggtggtatcccggaactgattcaagttggcaagactggcgagctgtttgaaagcggaaatgctgaagatctgaagaagaagattgagaagctctggggtgataagaagcggtgtgcggagtacagtgcgaactgtaaggacattagcttcgataccatcgatgagtattacgagaaaattatgaaggtgtatcagtaattatagtgaatgagttaagggaggaataaagatgcgagtaggaattttgactttattccatggaaataataactggggtggagatcttcaaggttatgctttaaaggcttatatcgaagataactttaaaaatactaatgtggatttaataaagtatcgttctggtgtaaatgttatttataaaagtaaatttgagcagatggagcaatacggaccatctgaggtgataaagaagatatcagaacgcatagttaagagaaaaacacctgctgatggattactgaagaagcggaatgaactctttgaacagtttcagaagtgttatttgacgaatgaccacgtatatactgatgaagaattgtcggagttggcaaaagagtatgattgcctaatttgtggatctgatcaaatttggaatcctaacgttgcacgtcctggttactttttgaaaggtatagaaggaactagaaaagtatcttatgcagcaagcattgccagagatagactttccgataaagaagccagcgcgatgattcctctgattgagaaatttgacttcatttcagttagagagaaaacagcaaaaaaaatattggatggttatttaaaaggaaaaaagagcgtttatgaagtattggatcctgctcttatgcgcacacgagaacagtggtctgagtttattggcactgaaagatatgagacagagccatatgcactgatgtttttcttttcggatagctcggcatatagaagccgaattgaagcctactgccataatcatgggttaaagctaataggaattccgcatgcggccacttacatcaagagcgatgaggctggaaattatgaaaaagcatatgatgtaggaccagttgaatttttaaggctatttcgagatgcatcgtatgtcttcacagattccttccacggctcagcattttcgataatttttcaaagacagttttgtgtattcgaacgcgataagaatacaaagacatctaaaaactcgcgtttgtatgatttgctggctaaatttcaagtgtcagatcgtttggtaaggaacgctgaagatgtagatgatgtcttgagaaaagaaatagattacctgaaagtaaatgctattcttgaaaaggaaagaactacatcgggagagttcttaaaaagcgcgctaggccactgtgaagaaaagcagaaaaagaaagaagtaacagttgcagatttccaaaagaaatcctgttgtggatgtggattatgtgcacaggtatgtcctaaaaaatgtatagaattgcggcaagataatgaaggcttttattatccagttgtaaatcaggaagagtgtataaaatgcggtcgctgtgtacaaaaatgtgttcaaactatgcagaacgatcagactttaatggatgcatatattggttataatcctgatgaatctgttagaaaagatagttcttctggtggtattttcaatgcaatagcaagcgcatttattgacaatggcggagtcgtttttggcgcagcatttgatgatgactattccgtaagacatgtaagaattgagaataaagaaaatttgtctcgaatcatgaagtcaaaatatgttcaaagtgatttgaaatatatttttgatgcattggcagaagatttgaaaaagggacggtctgttttattcacaggcacaccatgccaggtcgctgctgtgtgtcagtttgcagatggtttgagactaaggggaaaactttatacaatagatttcatttgtcatggtgtaccttcaccgggggtatggaagtcatatttgaactatatttccaaaggtttagaagttcacgaagtgaacttccgagataaaagtcatgcaggatggcatgactattatctccatataaaatatggagataatagtcaactgaatgaaagtcatgaattgaatacctatatgcgtttattcctttcggatagaaatatccggccagcttgttactactgtaatttcaaatctggcaattatatgtcggacttgactttggcagacgcatggaagatcgagaaagaatatgagccttgggcagacgataaaggaacatcactttttattattagaagccataaaggagagactcttcttgcatcgtgtgattcacacctgaaactaagaaaatccaattatgaattttggtcaaaaatgaacccgtctttggtaactagaactcaggttggaggaggcagaaaaaaactgttctcagattttacagagttagacgaaagcgcattttgggaaaaatatagtccaattccaagaaagaagaaaatccgctatatagctaagaaagttgctaaggtaaccggtatagaaaaagccttgcggaaaagggtgtaatcccatttgttaaggaggaatatggtggataatagaacacgatatgagggaatagatggattgaaggcatatgccattattggcatcgcgctgatgcacgtcctcgcaaatggcgaatatgggataggaggatttgtgtttgagaggctgataccatctttcactaaccttgttttcctttttatgatggtcagtggttttggaatgtgctgcggctattaccagaaaattgttgaccagaagatcagcgtagaggatttctacaagaagcggtatatcaaaatatggccgtactttgccttgctgtgtgcgctggatttcatgatgtcaccgagcaaggaatccttgtttgaggtattcgcaaactttacgttatgccaaggacttctgccgaatgctaagatctcggtcattggtgtgagttggacactggcagttatttttgtgttctacatgctgtttccgtttttctgcttcctgattggaaacaagaagagagcgtggagcgtggcagttgtagcactggtgttcaactggctgtgtagcaattacttcaatgctggaagaacgaacattgtctacgatgcaatctatttcgttgccggtggtttagtctttctatatcggaaagagctggccgagttcgcatcaaaatacaaggttatcgctggagcgattctgctgattgccacagttgtttattttgcagtaggcggcaatgcgcttacaatgctgtttttctgtgtggtagcactggtctatacgctcggttgtagaacgggggggggtactggtcaatccagtcgccaagttcctcggcggtatcagcttcgagatttatctgtgccacatggtaatttatcgtgtgcttgagaagctacaccttgtacatctatttggaaacggtctgctggcatatatcttcacagttgttgcagtcatctgtggttcagttgtgttctcagtatgtgccaagtggttcttaaataaaattgaaacattcttaaaagagaaagtaaataataggagagttaatcatgtctgaagaaaagaagttaaatggtacggtcatcgttacttatcgctgcaacgctcgttgctctatgtgcaaccgttataaagcaccttccaagccggaagaggaaatcagcatcgaaaccatcaagaaactgccgaagatgtacttcaccaacatcaccggcggcgagccgttcatccgcaccgacctgaaggatattgtgcgtgaactgtacaagaagtctgatcgtatcgttatttccacgaacggtttcttcaccgaccgtatcgttgatctgtgcaaggagttcccgcagatcggtatccgtatctctatcgaaggtttggagcagaccaataacgagatccgtggtctgcagaacggctaccagcgcggttacggcacgctgaagaaactgcgtgagatggggatgaaggacgttggcttcggtatgaccgttcaggacaaaaatgctcctgacctggttccgctgtataaaatctccgatgagatgggcatggagtttgctacggcttctctgcataacagcttctactttgttgaagcaaagaacatcatccacgaccgcccgatggttgcaaagaactttgagaatctggtcaacgagctgctccgtagcaacagcccgaagaagtggttccgtgcttactttaaccacggcctgatcaactacatctacggccagaagcgtctgctgccttgcgacatgagcttcgataccttcttcatcgacccgtatggcgatgttatgccttgcaatggtaccaaggataaggaagtcatgggcaacctgaataatcagacctgggatgagctgtggaacagcccggaagcagagaaggttcgtgcaaaggttcgctgctgcgaccgtgactgctggatgattggttctgtcagcccggctatgcataagtacatctggaagcctgctacctgggttctggttcacaagttcaaggctctgttcactaagcatccgtacagcatgtacgagctgaagatctgccgtgactaccgtgatggcaaggtcaccaaggaagaactggataagtgcagcacctgcgatatgaactgtgtgattaacaatggtctgagtgaggcgagcaaggagcagctgaagcataagaccggcgaggaaattgtggacgctgatatcgcacagcagatggaaaagtaaaaggagagagagatgaaacgagcactaatagtagcggcaacaggtggatttctaaatggattcttgattccagatatgaaactattgcaagaaatgggatatgaagtacattgcgcagcaaatggaaattcggtttctacgtttgtacctgaagagcgatttgcgtctattggagttacgtttcaccagattgatttctcatcgacatctccagtaagcaaagaaagtcttacagcatataaacagtataaagaattactgaatagatatcattttgattttgttcatgtccacacgcctattccgggagcaattgttagaattgctacaagacgcaagagaaaagaaggatgtgtagtagtttatactacgcatggattaacttttccgaaggggtcttcattaaagacaaaaatcgtctatggcggtgtagagtggttttgttcatggatgacggatgggattataacaattaataaagaagactatgctcaaatgaaaaagatggcatgtaaaaatgtctatcatatcaatggcgttggagtagatacgtcaagataccatgaatgtcaaatagacagagataggtatcgagagtcactggggctttcagaaagtgatattgcaattctggaagttggggaattgtctactcgaaaaaaccataaagttatcatcgaagccttgtcaaaaattaatgacaaacactatgtatttttgatttgtgggaaggctatgagtaattcgggaacatatgattttctgaaaaaatatgcagaagaaaaaaatgtgagagtaatcttcttgggattcagaaaagatattccagaaataaatagatgtgcagacatcgcagttcttccgtcattgcgtgaaggccttggattagctggaattgaggccttggcatctggagtgcctgtggttgggagcaacgtacagggaattaaagactacgttatagatggccaaactggatacctgtgctctcctagggatgcggatgcctttgcagataaaatccagttacttagtgataaagaagcaaggttttcgatgcggaaggcatgcgtagaaaaagcagaagaatttagactggatatttctcatcagcagatgaaaaacatctataagaatttgctgcgtgaacaggagagagttgaatgataggtgtgtgtattaagtattttcatgagaattatggtggaatgctacaagcattcgcaacagttaaaatgcttgaatctcgtggaattgattatgaattaataagatataagaagaaacttacaataacggaaaagataagatctgttccacggttattgaatggagtacttctgaatgataaatatgaagcttttttgaaaaggcagggaatgaaaaaacatccggaatttgcaaagaatgatgcagttcggatgaaggcctttgaaaaatttaagaataaagcttttacaaaattatctccggagttttgtggatataaagctctgtgtgaaggggcaaaacgatatgatgcggttgtaaccggaagtgatcagctttggtcaccagcgggattgcctacaaatttttataatttgatgtttgttcctaatgaaattagaaaaatctcgtatgcttcaagttttggtgttggtcaaattccatggtatcagaaaaaaagaacagcagattttctgaaacggttagactatatcagcatgagagaaaatcgtggaagcgaaatagtaaaagaactaacaggattggatgtcccggtgattttggaccctgtttttaattttaataaagagcagtgggaaaagctgattcctataaaaaaagagatgaatgaaccatacatttttgcatatttcttgggtgcgaatccagaatacagaaaacaggttcggaaattagcgaaatcaacaggccttaaaatagtggctttgcgtcatatggatcagtatgttgaggatgatgagagctttggcgattatgcaccgtacgatgttgcaccggatcgctttctgaatttgttacgtggtgcagagtacgtctgtacggattcctttcatggaacgtgtttctctattatcaatgaaaagagatttatgatttttaatcgttatgcaaatacaagtgcaacatcgaaaaactccagaatagattctctctgtcaaaaccttggtgttagtgatagaagattttcgggagaaatttcagatattcaaaaaactattgattacaaaaaagtttattgtaatttggcgaaactgaaacaaaaaacagaccagtatattaatgcagcattcatgggttgagcataattgaataaatgctgccataaaacattggaaaaaagcgggaggataaatcgtgaaccaagcaaaacatattttagttacagctcccttggggtttggtggcattacatcaatgatgatcaacattcaaaaaaatatagatagagataagcttaattttgattatcttgttttacatgatcgacatgaggatttggaagatgtcgttatcaaaatggggtctcaaaagttaattgcatctgcggatgaggtgaacaataaatggcgtagagtctttgttcgatggtatagactataccgggttttcaaagacaatgaaataaaggtgttacatttaaatggtggtcctgcttcggatatgacaatggtctttattgcaaaattggctggagtaaagcacgtaacatttcatagccataatgcgggaaacgcagtatatagaaataagattactgtggtgatgtctaaagcttttaaaatgcttatgcccgcttttgttgatgaattttgggcttgttcatcgttggcagcgcagttttcattcccgaagagtattgtaaaaaatcagaagtataagtttattcctaatggtgtagcactggaaaaattctcttataatgcatctgttagggaagaaatgagaaagaaattaggtgtggaagacaaatttgtaattggacatgccgggagatttaatatacagaagaatcatgagtatttaatagaagtattctctgcactccatagtaaatgcccggatgctgttttattgctctttggagatggcgaattgtataagaaaattcaggacaaagttaaaaaaatgaatctagaagacagtgttcgatttatgggtacaacggatgaaatgcctaaaatgtatcaagcaatcgatgtttttgtaatgccatcattctgtgaagggttgccagtggctggtgttgaagcacaagcttcaggtttgcctgtaattcttgctgatacaattacaaaggaggtcggtgtcacaaactgtgtaaaataccttcctctttcagatgataaggcggaatgggttcgggaaatcctgaatttccgcggatttaaaaggtattctcgctgtgaagaattaaagagggcgggatttgacgaaaaggatgttgcaagaaactttcaaaactactatttaaatgtattggaaaatttgtaataagggagatgaggacaggtgattacaattaaagataaaaaagattgttgcggttgtacggcttgctataatgcatgccctaaaaaagcaattgaaatgcaagcagatcaagaaggctttctatatcctgtgattgatcagaaaaaatgtgtggattgcggaatatgtgatgcaacttgtcctattattaataaagtagaaaagaatcctgaacagacagaaggatatattctgagaatcaaaaacaataatgttctttttgaaagtacatccgggggggggttcacagctctggcagaatatgtgctgcataatggcggcgtagtttatggagcaggctacgatgaaatgatgaacgtcatttgtaaaagggcagcaacgactgctcagcttcaggaaatgagagggtcaaagtttgttcaatctacgcttggaaatacgtttgaaagaataaaaaaagaattgctagatggagcgtatgtgatgttcacaggatctccatgtcaaattgccggacttttgcattacttaaagaaaaaacctgagaacctactatgtgtagattttgtctgtcgtggtgttccttcaccaggattgtggagaaactatgtgaattttatggaagaaaaattcaacagcaaaatggtaggagcacggttcaaacataaaacgtatggatatcatacgacaacgatgaaaattgattttgataatggaaagacctactatggctcagggcgagtggatccttacatgaagtcctttgtcagtgaattggcttcgagaccatcgtgtgcgtattgtgcatttaaaggattggaacgtccgagcgatatcacaatttttgattgttatgaatacgcaaaattgaccggaagggaagacgatgataagggatactcttcaatttttgtgcattctgaaaagggtaagaaagttatggaagggattgcatcagaagttgaatgtttttctatagatgcagaagaactggttcaatataatggaatcatggttagaaacagtgcaaaagcaaatgaaaagcgggatgagttttattgcttagcagcagaaatgccaattaataaagcacttaaccaggttgcaccaattacgattaaagattatgcaattgagaaagcaaagaaatttttgtattcgacaggtacaataaaatatatcaggaaacttaagaaaaagcacacgatagcggtaacaaaatgacataagtagataggagaaaaaaatgaaagatgtattgattgtttgttatggaatgggatgtgggggtgcggaaaagagccttatctcttttttgaatcgattaccaaaaaatagatggaatgtcgatttaatcgtcgcaaatcctaacggaatgtatatgaagcagattccaagcacagtccattttttaaacaatcagtacgaactggaaaactttgccacgcccatgagcttgcgtagaaagaaagtgtgtaatggccgagacctgataaatcaagcaagttggcaaataaaatcaagatttttatgcaaaaatctaagttggaacgagaaaagatgggaattatggggaaagcatctgccaaagctcaaaaaaagatatgacttggcaatttcttacatgaatggcccgacaaactattatgtgattgataaggttacggctaaaaagaagattctttggattcataatgaatttgaaaagttggatgtaaactatgactatgagagaaattattatgaaaaagcggatcgagttgtaaccatttctcaggattgcgttgatagttttgccagagtttatccggatcttagaaaaaaggctcttgtgcttgaaaatatttcttcaccagaaacaattcggaatgctgcaaagatggtcccggaggatgactttttccagtatgagggactaaagattgtatctattggaagactagctccacaaaaaggatatgaaattgcaattgatgcagccgcaaaaataaagaagcagggaatagagtttgtttggtatatactgggggaaggagaactaagagcgaaattagaaagactaatcaagacaaatgaacttgtaaaagaggtaaaacttgtcggtataaaggaaaatccctatccatatattgctggttgcgatattttcgcacagacatcccgatacgaaggaaaatcaattgcattagatgaagcaaaaatactcaataagcctattttagtaacaaattatgcaacggttggggcttcaataaataatggagaaaacggactaattgtatcgatgaacggagaaagtgttgcagagggcctaatgcaacttagtgaaaatcagcaattaagaaatcagcttgttgagaatttgaaaaaagaaaaaacaggaaatgaagaagaaattaataaatatattcagctgattgaagaaaatttaaattaaagggggaaagatataatgacaccatttttctcagttattttgccttcttataatgttgaaaaatatcttgatagatgtgttaagtcctttctgacacaaagcttcacggattacgaaataattattgtggatgatggttctacagatcatactggtgaaatcgcagattcttatgctgcaaaatacgattttataaagtgtattcacaaagagaatggtgggttatccagcgcaagaaatgtaggaatagcagaagcaaaaggtcagttcattcatatgtgtgatgctgatgactgggttgcgcctacatttcttgaagtaatagcaacaaaagcaattggcgatattaggagttcgtctcgagtaccggatattgttaagtttaactattatcgtcatgtggatggaaaaacaacattatgtaagaatgttcttcaggagggctcctacgattcagttgaggatattgattcgttaatgaaacaggcacttaaatcggtaaattcatatgtgctttcggcttggtcacatatttatagaagagattttctaatagagaataatttaacttttgtttctgaacgtaaagtgggaagtgaagactttttatttaatctggaagcactttgttttgcaaagaaagtgtatgctgtaaatgacgcttgctattattatgatttgcgatttggaagtctgacccaaaagtatcgcgaatcgcttccaaaacaatatgtgaacttatatagatcatatatgaaatttattgagaacagtcatgtaagaaataaacatatagacgagtttcaaaatatgtttttatggcagttgatttttggtacatgctttccgaatgaatacaggaagacagaaaatcactcggtagcagatggaagagtaagggtaaaagaaatttgtggtataaacgaagttcataccattgcaagaaatcagttgaaaactgctaagaaaccaataaagattttatatttattagcatttgttttcaagcaggaatggatttttttctggatatttgttggaaagaaaaagaacagttgaatatataatagtaggtggagtaaggaggatgtgcatgattgtaagaaaaaaacaacttatcacatttataatgacggtgttgatgtttcatctgtcattcatagcattcagagaagaatattttgttggatttttgaaaatccaacgttatgcggcgattgcattaattggtcttgttttcattaatataaatgcgtttataaaaaaagaaaactgtttgataaatatcattataattcttttgagcgttagcatgggatattcgtcatggatgaataaggatttgtcgggatacggtttaattaatattatattttctgttgttaaaactgttgcaccacttattgctttggaatatgcctgtgaggtaaaagaggagaaaacagccatacgagttttgtttgcttgtacgctgatttattgttttattgcagatgtacacggcttttctactgggtttattggacagaataaaagcaatttgctgttaggaaacaaattcaacttatcatatttacatatattttcagttgctttatacgccaatatctgtgaggagaaaacaaagaaagtaaatacaacattaatcgttttatgggggatagcattttttattgcaataacatcgacatgcacgactgctgcggttgcatgtggtttgtttgcagtgctgtatttatttcaggaaaagtttgaaaaaataattttgaatcccattgtagcgattgtattgattctgttttgcgattcacttttgtttattaattcagctattctaacgtggggacccataaatagttttattgttaattttttgcatgaagatacaacacttactggtagaatgatgatatatcaaaatgttctaaaacttttgatgatgaatccgtggtttggtttcggagcagagaataattatactatgtctcacacggttgctatgggaatgaatactcagaatggtttggctgatattattgtttcgtatggtgttgttggagcttgtttgattttactcctaatggttgtatcgttattgaaaaggaaagaagattatagtagatcatatatggcgttaatgtataccttcataattgtttctatggttgaaattacattgggaaattattttttgattacattagcgttattggcctttgtggaaaatggaaatcgcagcaattaaattgatttgtaatatatcgcaatgcaattatatttagtaattcaagaatgtctggaatattatggagcataagtgaaaatggtaaaagaaagaactaaaaacgctacaagaaatatgatatttggtatattgcaacggatgtatcatatgttggttccattttttatgagaactgcaatgatatattttatgggagtgcaatatgttggactaaacagcttatttacatcaattcttcaagttttaaatttggcagagttaggtgtcggaagtgctatggtttatagtatgtataaaccgattgcggaagatgataaagataccatctgcgcattgatgagattatataaaatatattatagagttattggtagcgcaatagcagttgtgggtttgggtgtaacaccgtttattccttgtttagtaagcggtagtatacctgagaatcttgatttacatatattatatcttttaaatttggcggctacagtattttcttattggctttttgcgtataaaaatagtttgttgatggcgcatcaaagaacagatgtgacaagcaaagtttcaattgccgttggaactgttcaatattgtgctcagtttttagcaatatatattttcaaaaattattatttctatttgattatggctattttaagtcaaattgctaataatattgttacttcaaatatagtatcgagaatgtatcccgattatttgccaaaaggtaaattgagcaaaaaagaaacacggtctattaatggtcggataaaagatttgtttatcgcaaaactaggtggagttgtcttgaattcagcagatacaatagttatttctgcttttttaggattgacacttcttgcagtatatcagaactactattttattatctcttcaatatgcggaataatggaaacgttacttacatcaattagagcgggcctcggaaacagttatgtgacagaatcaagagaaaagaattatatagatcttaaaaagattacatttatgttttattggctgataggaatgtgtacatgttgttttttaggtgtatttcagccatttatggaattatgggttggagagagttttttacttccattttcagtagttgttcttctgtgcgtatatttctatctgtatgaaactacgagattgttaaatgtatttaaagatgcaggtggagtctggcatgaagacaggttcagaccgctgatttcagcgcttgtcaatttgagtcttaacttggcagcagttaagtatattggaatatacggaatagttctttcgacaatagttgcgttgggaatgatagaagttccctggctattacgtaatattttcacagttatgtatgattcctctttatttaaggattattttaaaatgtttgtatcgtggattgtagccacagtgttttcatgtgcaagcatcgctgtactgacctacaaagtgactctttctggatggggtgcatttgcctttttcgttgtggtaagtgtgttgattcctaatattgtttttttgcttctaatgcacagaaaagaggaattcaaattaagtattagtatggttaataggattactcataacaaattgccggttatcaagaacctatgattgagggaggagaaaaatgagttctattatagtagaattgcttaaaaagatccggggggggcgataaagaaaataacggggtttcaaattccatttgctggttctgtatgtaatttagaatatgaggaggcaatcgaatatttacaaaaaagatccaaaaagccaaatggaatcgtagaagtacataatagattgaatcctcaatatgatttacagattattattccagcatataatgcagagaagtatattgagaagtgtttgaactcgattttatcacagaaaacacaatatacatatgtgatcacagttattaatgatggatctacagatgaaacatcacagatactttcaaaatatcttgatgatgagcatattgatattattagtcaatccaataaaggtttttcaggagctagaaattgtggcctgaaaaatctagtaggtcattacttaatgttcgtggattcagatgattggatttgtgaagatgccattgaaaagcttatgaacaaatcaatagaatgggatgcagatattgtcgaaggaagcgttttattcgtggatgataacggaagaacactgtctaggaagcatcatttcagtagctgtggtgataaagattatgaggaaacattatggggacagccttggggaaaagtaattagggcaactgtatttgaaaatctttgctttccagaggggttttggtatgaggattccatttttgagtattgtatatatcctttttggaaaaagaaatatacaatagaaaatgatgtatatgcttataggtataatttaaatggcataacttataaaagtagaggaaatgtcaagtcaattgatcactattggattatgctttatttatgggattggataaaagacaaacaaatattaaggtcagatgaatggcttcagatcagtatgctggataatatggttttagggtactcaagaacaaaaaatttggatgagaaaacggtacaatctggatttgttgtgctgcgaaaacgttatttatcaagctttgcaaatcctccccgacaacagaataaatatatactgttagataaatccatacgtaaaaaagattttggacagttcaaattgctgtgtgatagatggaggtatttataaattgtaaatttgccagaaataccaacttgagttacgaaaataactatttgaacacgaaaaatgaagcaataatttatgtaaaagaaatgaaatcaaaagtgaagagaaaaaaagtatacttcataacagttgttattggatttgctatatgcatggtcggagttatatttggaagccgattggtatttcagcgaacctgcgaaagaagaactactccatggtcagatttaggtactgcagacgatgatgaatatagaattctcatagatgcatgaccaaaatcttgcagattacattcgattgccagattacattgaaaagaaaaaggacgctggccagattccgatggctggatatgcggatctgatgagatttgcattactggaacattatggtggaacatggattgattcaacggtatatcttacagatcctattccagatatgattttaaatagcgatttttttgcagtacgaaattcactgctgctgatagataaccctgtgctatatcctgcatggtttcttcatgcaaaaaagggaaacaaaacaattcgagaaataagaaatgttgctttcgcatattggctcaaaaacgaacatgtaattgagtatctgctaccaaatttgattataacattggtggtaaagagcaatccggaagttgagaaagcaattccatatatgaacagtgattatagcgagtatcttgttaaggttttagctgatgattattcagaagagaaatggaattggatcaaaaagcttacaggtattcataagctgacatataaattatcaccggacattgaagcagaaggcacattttataaggcgctgattgaaaacagtatagaataaatattgcaaagtgggttggaaaagaagtatgggagcaattgagttaataaaaagcgatttgtttcgctatgccggaacaacatcatctaaggcatttattaaaacatatgttaaagaagctggttttcgcttctccgtggcatttcgattggtaaatgctgggggagtgttaaaactgtttggaataatcctatggaaattgagaaatcaccagcagattcagatacttcgaaaaacaaaaattggttatggactatatattagccatggagggcctgttgttgttaacccttcaacagttattggaaataattgcaatctgtctcaatttgtaacgattggctcaaatgaaggaaaagcagcagtaataggagataatgtttatattggccctaatactttatagttgaggatgtaagcatcggagataatgctacgattggtgcaggaagcgttgttaccaaggatattccatcaaatgcaacagcagctggaaactatgcaaaagtgttgaattttaataagccaggtagatatattcataatagatatttggaatagtgattcgaagagtggaaggaatattatgaaaaacatattgtttgtgatgccatcgttaggaagtggtggagcagaaaaaagtcttgtaaatttattaaatcttatagattatgaaaagtatccatacagataagaaattagtgattgctggtggatcgagtgatgcagatgcatttgcgaatgaattaaaagaattagcaaaaggtgatgatagaatcatctttactggatttgtacagggtcagttattagatgaattgtatagtaatgcattcatttacactttaccttctgatttagaaggtatgcctctttcattattggaagcaatgaattatggaaattgttgtttgatttcagatattcctgaatgtgctgaagttgttgaagataaggtagtgacattcaaaaagagtgatgtgaatgatctgaaggacaaacttgaatggcttttaagccatgaagatgctgtacatacatataaagagaatgctactgattttatctgtcataaatatagttgggataatgtcgtagataagacaatggagttgtataaatgaaagtattgatgattttatcatcagtattttgagtatcactaccgacgtttgaaaaaagcactctagtttataaacaacacattggaagtgctttatttgaccagaggtggtgacattcaaatataggcttcaaaaaaataaggagataaatgcaatgagtatagttaatttagaaaacaaaacaattctagtcacaggtgcggccggctttataggttccaaccttgtgaagcgaatttatcaggaggctccttctgcgacggttatcggcatcgataacatgaatgcttactatgatgtggcgctgaaagagttccgtctgaatgagctggccaagtatcccacatttacttttgtaaaaggcaatatcgctgataaggaactgatcactgagctgttcgagaagtacaagccatttgtggtcgttaaccttgcggcacaggctggtgtgcgttactccatcactaacccggatgcttatgtggaatcaaatttggttggcttctttaatattctcgaagcctgccgccattgcgagagtctggagcatctggtttatgcctcttcttctagtgtttacggttccaacaagaaggttccgtatagtactgatgacaaggttgataacccggtttccctttatgcagccactaagaaatccaatgagctgatggctcatgcttattctaagttgtataacatcccgtccactggtctgcgcttcttcaccgtgtacggtcctgctggtcgtccggacatggcttacttcggctttaccaacaagctggtgaagggtgaaaccatcaagatcttcaactatggcaactgcaagcgtgactttacttatgtggatgacatcgttgagggcgttgtccgtgtgatgaagaaggcaccggacaagaagaacggtgaagatggtctgccgattccgccgtatgcagtttacaacatcggtaatcagaaccctgagaacctactggacttcgtgcagattctgagcgaggagctggttcgtgcaaaggttttgccggaagattatgacttcgaggcacacaaagagctggttccgatgcagccgggtgatgtacctgtgacctatgcagataccagtgcgttggagcgtgacttcggatataagccctctaccagtttgcgcgagggtttgcggaagttcgctgagtggtacgcaaagttctacaaataatgaagaataggaaaataaaccgatgaagtgtgttgaggtttacaaggaattatatcatcaggagccgtttgatgtggcgttctgcccgtaccgtatcagtccgcttggagcgcatatcgaccatcagtacggaaaaatcaacggtctggcaatcgacaagggaatccatatggcctaccacccgaaacagaatggtgtggtggagctgcagtcgctgaacttcccgaagcgtgcccagttctttgtaaatgcagtgccggaagaaaagcagggagactgggctgatcatctgcgtggtgcggcaaagatgctgggagaaaagtaccgcctgaaagttggtctgtctggcatcatcgagggtagcctgccgataggcggtttgtcctcgtcggcttcggtcattatttgctttttgtctgcactgtgcaaagtgaatggtatccatctagagccgatggagatgattctcacggcgaaggccgcagaaaaccagtatgttggtgttgcttgcggcaaactcgatcagagttgtgaggtgtattccaagagaaatcacttgttgtaccttgacacgaaagatgatagctatgagttaattccaaccagtgggaaaatgaaaccttataaggtggcgattttcttctccggcttggagcgttctttgaaaaactctaagtacaatctgcggcaagatgagtgcaaggcagcggcctatgcactgatgggctatgcagggatggactacgatacctttgcaaacacccggctccgtgatgtaccgtttgaggtctttgaagcctataaagaacgtctgcccgaactgtggcgcagacgtgcagaacactattacagtgagttcgctcgtgccgaaaagggtgcagaactgtggcgtaaaggtgatttggagggctacggtcagcttgtttttgaaagcggaaaatcctctatttatagctatgagtgtggctgcgatgaactgaaaaagctgtatgagatcatgaccgataccgatggtatctacggtggccgcttctctggcgcgggcttcaagggctgctgtatggcgctgattgacccagacaaggccgaagatattgaagcaaaggtcacagcagagtatctgaaagcgttcccggcattggatggaaagtatagtttccatctgtgtgagagtgcagatggcgttgaattgtaagaggggagcacatatagatgaaatgcttaattttggcagcgggctacgctacacggctctatccactgaccgagaatttcccgaagccgcttctgaaagtgggcgagaagtccatccttgattggttggcggatgatttggtggacactaccgacattgacgaatttgtggtgatttccaaccataagttcgcacagcattttgaggattggaaaagtaataagcaaaagacgcggccttatgagattactgtgatcgacgatggtacaagcaccaatgaaactcgtctgggagcagtcaaggatattcagctggcggtagaaaaactgaagttggctgatgatttgctagttatggctggcgataatgtgctggatttcagcctttccaagtttgttgactttgccaaggaaaagaatacttcctgtgtgatgtgccatgaggaaaacgaactgaaaaagcagcagaaaacagcaatcatcacgcttgataactcggatctgattacgagctatgaggaaaagccaaaggaaccaaaaggaaatctggctgtgccgccgttctactgctatcgtgcctgtgatgtaaagcggattcaggaagcactggacaatggctgcggttatgacgcaccgggtagctttgccgcatggctgagcaagcagaccccgatgcacgcttatgtcatgccgggcaaacggtatgacattggcgatattaacagctatgagtatgtaaagagtgtgttctcaagataagtatacaagggagaaagtaataatgaaggagtttaaagatttgaaaattgccgtggccggtacgggatatgttgggctttcgctggcagtgttgctggcacagcaccatcaagtaacggctttggatatcgttcctgagaaggtggagatgatcaataacaagaaatctccgattcgggacgagtacattgagaagtatctggcagaaaaggagctggatctgactgcaactctgaatgccaaggaagcgtattctgatgctgattttgtagtcatcgccgcaccgacaaactatgatagcaagaagaatttctttgacaccagtgcggtggaagctgtcattaaactggttatcgaatataacccggaagccattatggttatcaagagcaccatcccggttggttatacagcaagtgttcgtgagaagtttcactgcgacaatatcctcttcagtccggaatttctacgtgagagcaaggctctgtatgacaacctttatccttctcgtatcattgtcggtactgatgtagataatgctcgtctggtaaaggcagcacacacttttgctgaacttctgcaggaaggtgctatcaaggagaatattgacacactgtttatgggcttcacagaagcagaggcagttaaactgtttgccaatacatatctggcactgcgcgtcagctacttcaatgagcttgatacctatgcggagatgaaggggctgaacactcagcagattatcaatggcgtctgccttgatcctcgaattggtactcattataataatccatcctttggatatggtggatattgcctgccgaaggacaccaagcagctgctggccaattatgctgatgtgccggagaacctgattgaggctatcgttgaaagtaatagaacaagaaaagacttcattgctgatcgtgtgctggagattgctggtgcttatgaggcaaatgacagctgggatgagagcaaggaaaaagaagttgttgttggcgtataccgcctgaccatgaaaagtaacagcgacaacttccgccagagttccattcagggtgtcatgaaacgcatcaaagccaaaggtgcaactgtaattatttatgagccgacgttgaaagatggcgagaagttcttcggtagcgtagtagttaatgatttggacgagtttaagaagcagagtcaggccatcattgcaaaccgttatgataaatgcttggatgatgtggaggaaaaagtttatacaagagatattttccagagggattaatggagacaatagaatggcgcagaaaggagaacggacagtgataagaatattacaagttgtaaatgacatacatcgcgctgggttggaaacgatgcagatatcatggtagacatacacagtttgtcgaagtgcttccgaatacaggaaccagcagccgaaatcagagtgttttagaattgactggactgacaaatagaaccgttcgagatttgaatgatttttcatatatgcaaataaaagaaagagccgagccataacacacagttttggaatgaaattaagagcactcatgctgggaaaagaagttgagattactttctgtgatgtgcagaggacaaagaaaaaatataaattcacagatgaagaaaggctttcgtttgttctttttggtattctctatgcttctcgttgcaacaatttccatggaaatgttgcagctcgaatgaacagcatcaatgcaaataaagatacatttaaaatgtatacagatatgtttttgacagaatatattattttagcaatccatctgaatagccaaggtgctttaccggatatggtactgaataaggttaaggaaaatgccaatttgatggtatgatagatattgctcgtagactcgcagagtgatatactttagttattataattggaaagaggtttgtgtcctatgcccagaactaaaggtagcaagaataagccgaaaactgtgaccgctgattttgcgacgcagcttgcagaaaagcagtccgcgaaggaagcactcacagccgagattgcatccatcaccgctaacattgacactttgaaggctgatttgaaagcaaaaaaggctgctctgaagaaggccgaaaaagaagtggcatccttggaagcaaagaaggcgaaggcagatgccaaagctgcagaagaagcaaaaaagacagaagcagagtccgttctgaaaaagctgcttgccgaaggtatgagtgctgatgaaatcctcgcaaaactgaaataacaagaaaaacccgtgatggacagtgcatagcgcaccgttcattacgggttttaggattataagaacataagatcatccggcggcaacatcaaactgaaaatgtgccggaaggttgagatttttgataaacgcatggtgctgggcgtaatagtgccgtagatcgtaccccagatgatgcagttccagcagcttcaccagcaccagattgaggtggattcccttagcagcggcaatctgcgcagcgtccagcccacgtttcgtcatttgatagacttcatcactgtccagcatcaggtgggatgtgaaagcgttatgctcataaagaaggatgtgcttatccttaatggtcagaaatttgttcagagtatgcaagtccataagaagctgatgctccagataatgtcccagcgcataaccgcacaccatctgctttgtctgtttgttcagctggcgattgataagaatcagtggcttatcaaaatagagcgaaagtaaacccaacatatctttaatgcgggatgtttcactgatgtccagactgcaactgcgcgcgatttgtttgatgttgcgagttccggcattttggacaagttcgttggcggcttggtgaataaatgcagaatccataatgtgatctccttccggggatagcatagtgaatagaacagtggttcacaggttcattattcgttccttttctcgtttttgttctcggtacttaaaataggctttgtgcatttcatacatgatgccgtccatatcctgcgcggtcaactctccgctggcaaaaagctcagtaagctcgaatgcgagatgctgggcttctattttacccttttttccgtaggttgctgcagcgcgttcaataaataaagactgatccggttgtatgtaggtcagaggcacatggaatatatcggccattttttcaagtatttcaacattgcgaggatagcgaccatcacgttcccatccgatgattgttcgtttgctgacacccagacactttgccaattcgtcctgtgttaaggaatttttctttcgtaaatcacgaactttctctccaaatttcatgtttgcaacctttctatggagcagttatcgtactgtaacaatgtgcaacggaatttgtaaatattcaattcagaatgtgcaataatgtttcacattttcctcttgacaccgcgacactacttgaatataattatgctatattctttcaacttttatggctattatactggaaattgcgtaaatatgcaagtgaaaaaggtgaaattcaagaaaagttcagaagagtccattaagttgaaacggaatgaacgaaaaggtgaaatttaaaccataaaaaggaggccgtgaaaaagatgagtaatggagaacatgagatccgcactccgaagggattgcggattggaaatcgcagtgtcgttgatggaaagaatatgcttcagatcaagcgtggaggctgtgaagattacatttctgctgaatctctggtggagcgcattcacggcctgcccgtgaagagtatcgagtttatcacagaggaggatcagcgaaaagacgcctgaagcagaatccttcatcggacactgagagtgcagaggtggaagtttaggcggcacttagttagccgaccagctccatcagatgttcttttgggtctacaatataatatctgtttgtttagagcgataccgtagcaatatgtgatattggccggaacagaatgagcgaaagcagcgcagaagtgcgcctgcaagtagttcatcctgttccggccttttttgtttttcaaaaaatatttttaaaactgtattccaaaatgcccctgcggattcctattagtatagggacttcccaaaagtagaaagcagcaagaggaatcttagattcccgtttaaaaaaaacgggtgaatctgagacgatttttgctgcttttttcagttcacccggagccgaacggcagaaaggtggacaaaatgcttacattgaaaaaggtcaaggaactggtagaacatcgttgtactgtggattgtacgcctacttgcgttgccagtgattgcgctgctgtatgcggcgggatttgtacttaatcttctgtatggtatctgcggcagtattggtatgattcttgccgggctgggcggctttgcggctttccttgcactgttagatggcagctatgcacaggcggcagcttcggcgcttgtggcgctgctgttatgcccgtttgcagcaccgatgctgctatcgttggcaggaagtgccttgattgtcactgcagcagcattatttgcttggctgttctgaaaacagaatatgacgatgaaccgctgtcggctgcacagcggtttttctttttcagatagcattcaagaagttataaagtcgggatagtaatggaagaaactgaaattgaagattattttgccgattgctttgctaaactttcgcacactcttgcgaggtgcggcaatgaatggtataatcataataaagtatacgcaggagggcgtcatggctgtttcgtataaccgtttatggaaactattagtcgatagaaaaatgagca

SEQ ID NO: 137 - DNA, 7374 bp, unidentified
  source 1..7374: mol_type = unassigned DNA
  misc_difference 1368: note = a, c, g, or t
  misc_difference 1369: note = a, c, g, or t
  misc_difference 1370: note = a, c, g, or t
  misc_difference 1371: note = a, c, g, or t
  misc_difference 1372: note = a, c, g, or t
  misc_difference 1373: note = a, c, g, or t
  misc_difference 1374: note = a, c, g, or t
  misc_difference 1375: note = a, c, g, or t
  misc_difference 1376: note = a, c, g, or t
  misc_difference 1377: note = a, c, g, or t
cacagtgacagcgccgccgtgcagggcggctattttttgtgccatggcaaggcccaagccgttgccctgcgtccggtggctggtgtccccctgatagaactgctcaaagatatggcggcaggtttcggcgtccataccgcagccatggtccgtgacagccacaaccggtctgccctgctcgcagtgcagtgttacgcttatggttccgttctcctggctgaacttggcggcattatccagcagattcagccagatttcctttaccagcgcttcgctgccgtggtaggtgcagggggccagcgcggcctcaaactgcagcggcttatcgcgccacttttgccgggtcacaaggatgcactggcgcagctgctcatccagcgaaaagtctgtgcagtcggtcagaatggtctgtgcctcgatacgattcaatagcagcacactgccggaaagctgtgccagccgcctgctctcatcgcggatgatttgcagatactcgcgctgttcctccggggtgacatcctcgtccagcagcaggtcggcaaagccgctgatgctgacgatgggcgtcttgaactcatgggaaaagttattcacaaaatccttgcgcagcagctccgtgccggaaagctcctccgccgctttgttgaaggctgctttaaactcccggatctcggtgggctcatacccgtgggcagcaggctgcaggcgcacggtgaagtcccctgccgccagccggttcatcgcctgcatgatgtttttgataggctttattaacacaaggcgaatcgcaaccacaaggctgacggccatcaaaatacagctggcgtacaaaataaccagcgcaccgccgatgctgacgctgccgtcttgaataaaaaagccgtggtcagcctccaatacaaccagcaccgtcacaacggtcagattcagtgtaacgatgaaaaacaggttcagcaccagcagcatcgtcaaatttacggtgcgtatgcagtcgcgcagcttatttacaaattgcgccatatcacaccttctttatagcacggtagccgatgccgcgaatagtctgtatctcaaactccggccaatcgtaaaagcgggtgcgcagccgattgatatgaacatttaccgttttgtcgtcactttcgctgtccatgccccagatctcatccagcagctccagccgggtaaaggtcctttccgggtaagccagcagcttgtataggaggttgaactccttgggcggcagcacctgcgcatcgtggccgcgccgcacggtgtgggtgtcgtagtccagctcgacatcccctatcgtgattttgtgttcatccacgatgcgggcgcggcgcagcagcgccttgatgcgcagcnnnnnnnnnncctgccggtccggcggttttgtcatataatcatcggtaccaacgataaagcccgtgtgcttgtcctgcggcatatccttggccgtcagcatcaaaatgggcagcatgctgccgctttcgcggatagcctttgtcagcgcaaagccgtccatccggggcatcatcacatcgcagagcagcaggtctatctggttgtggtcgagcagttccagcgcttgcacaccgtcggcagcaatcagcggctcatagcccgctcgctttacgatggcgcaaagcagacgtgctgtgctggggtcatcctcggcaatcaaaatacgaaacatccgtgtatcctccttagttctattatagtacagcgcaaagataaacggaagataaaccttcccgtttaccaaaggtttattttggcggtgtatccttaggagcatcgaaacaaaaaacaacctacgggaaaacggaggatacagctatgaaaaccatctatcttgtcaccggtgctgccggatttatgggcactaatgtctgcgcacagcttttggagcgcggtgatgccgtgcgcgcttttgtgctgaagggcgaccccgctgtaaaatttatgccgaaggccgtcgaaatttttgagggtgacctctgcagtgccgaggactgcgagaaattctttgtcgtggagccgggcgtccagactgtctgcatccactgcgcgagcatggtgacgatcaacccgaattatagtgaaaagctgatcgccgtcaatgtgggcggcaccgaaaacatgctgaacgccgccaaaaatcacccggagtgcaaaaagttcgtctatgtttccagcaccggcgccatccctgagctgcctaagggcgagagcatccgcgaggtatacagctttgttccctacgatgatgatcgcgtggtcggctggtacagccgcagcaaggcaatggcgacccagaaggtactggacgccgccgcggacgggctgaatgcctgcgtggtgcatcccagcggtattcttggccccaacgaccccgccatcgggcagacgacccgcacgctgatccagattttgaacggtgagatgcccatcggtatgcagggctcgttcaaccttgtcgatgtgcgcgatctggccgccggtacgattgccgccgctgaccgcgggcgcaagggagagtgctacatcctttccaatgacgaggtttcgctgaaggagctgtgtgagatgctcaaggctgataccggctgccgcggctgcctgttttatctgccgctgtcttttgcgcattttgccgccaagcagatggaggcccgcgccgccaagaccggtaagcctgctgtgctgaccgagtttgccgtttacaatctggagcgcaacaaccattttgactgctccaaggcaaaaaatgagcttggctttgccccgcgtccctacaaggaaacactgcatgatctcgcagtatggctcaagcaggagggaaaaatcgcatgaagaagctgtatgaatctatctgcaagcttatgcaaatgaatgaccagcagtgggagtgctatctccacgcactggattccctgcactgacacaaagaaaagggaggtgcctattatgaaaaaggtttgcgttatcacaggcggcggcagcgggatgggacttgccacggcgaagcttgtctgtgaagaagggtattacacgattttggtggggcgcacggcatccaagctggaaaaggcagtcaccgacctgcgcagtgcaggcggcgaggctgaggcgttcagctgtgatgtttccgaccgtgaaagctgctttgcgctggccaaacacgccgccgaatgcggcgaagtaaaagcggtattgcacattgcgggcctcagccctcacatgggcgatgctgaaaagattttgcgcagcaatgcgctgggcacggtgaatatcaacgatgccttttatgaggtcatggcgccgggcggctgtgtgatcgacacctccagcatgagcgcctaccttgccccgcagtttgtcatgcccaagggtgcgtacaagctggcgcgcaccgaccgtgaaaaattcatcaaaaagctggtggcgcgggcaggcatcgcccctaaggacgcccgcccgggtctggcctacgccatcagcaagcattttgtaatttggtttgctaagaccgatgccgcacgctttggcgagaaaaatgtgcgttgcctgagtgtgacacccggcaactttgacacgccgatgggcgcactggaaagcgggcaggcggatgtattcaaaaaatactctgctctcaagcgcaacggaaagccggaagaaatcgccgctttgtttgcgcttcttctggatgagcggctgggtttcctgaccggagcagacattcttatggacggcggcgttgtggcaagcggcaccagcggattgagcaaataaaaaagggcagcaaagtaaaccccgattttagcttttggggtctgctttgctgccttttggattttgtgctttcgcttggctgtactttagtgcagctcgctttcgcagcggtccagcacggcggcgatgacctgatccatgtcgtaatacttgtactcacccaggcgtccgccgaagatgaccttcggctcggcgtcggccagcttcttgtactcggcatacagcgcgccgtttttagcatcattgacggggtaatacggctcgtcaccgggcttccactcagaggaatactcgcggctgatgatcgttttgggcaggtcgttgccgttctcgtccttgccgaactcgaaccatttgtgctcgatgatacgggtccacggcgtctcgcggtccgtatagttgacggcggcgttgccctggaagctgggcttgtcgagcagctcgttctcaaaccgaacggagcggtactccaacgtgccgagtttgtagtcaaaataagcgtcaatcggaccagtgtagacgattttgtcagccagtgcgtccagcgcggccttgttttcgaggtaatcggtgttcagccgcacctcgatgccgtccagaagattggcgatcatcttggtgtagccgccgatgggaatgccctgatacagcgcgttgaaatagttgttgtcaaaggtcagccgcacaggcaggcgcttgatgataaatgccggcaggtccttgcaatcgcggccccactgcttttcggtgtagcccttgatgagtttttcataaatgtcgcggcctacaagggagatggcctgctcctcgaggttctgcggctcgtgggtgatctcgcggcgctgctcctcaattttggcggctgcctcctccggtgtgacgacgccccacattttattaaaggtatacatgttgaagggcagcgaatacagctcacccttatagttggcaacgggagagtttgtaaagcggttgaactcggcaaaccgggtgatatagttccagacctttttgttgttggtgtggaagatgtgcgcaccatacttatggacgttaataccctcgatgttctcggtataaatgttgcccgcgatgttggggcgcttatccacgaccagcacggatttgccgtgggccttggcctcatgggcgaagatggcaccgtacagaccggagccgactaccagataatcatatttcatataacaggtgttcctctctttaaaagtcacagggatattgtgcggtaatggcattgagagccttactccgccgtcaaaaagcggctgaaaggcggttcagtctctgccgaacagatcccttgtgtagaccttgtcctgcacatcgtctaggcaggcatcgtagcggttggccagaatggcctgactctgccgcttgaatttgtccagatcgttgaccaccaccgagccgaagaaggtcttgccgctctccagcgtaggctcatagataatgacctgtgcgcccttggccttgatgcgcttcatgacgccctgaattgagctttgacggaagttgtcgctgttgctcttcatcgtcaggcggtagacgccgatcgtgacgggcttttcacggctttcgtcaaactcattttcctgatcatagccgtagtacccggccagcttcagcacgcggtcggcgatgaagtccttgcgggtgcggttggactccacaatggcctcaatgagattttccggcacatcggcgtagtttgccagcagctgcttcgtgtccttgggcaggcagtagccgccgtagccgaagctggggttattgtaatggctgccgatgcgcgggtcaagacatacgccgtcaatgatctgcttcgtgttcaggcccttgctctccgcgtaggtatccagctcattgaaataggcaacgcgcagcgccagataggtgttggcgaacagcttgacggcctcggcctcggtaaagcccatgaagagcgtatcaatgttctccttgatggcaccctcctgcagcagtgccgcaaattcgtgggcggctgcgacaaggtgcgcatcctccgggtcggtgccgacgatgatgcgggacgggtagaggttgtcatacagggccttggactcccgcagaaattccgggctgaacaggatgttccggctgccgagcctttcccgcaccgacaccgtgtagcccacgggaatcgtcgatttgatgaccatgacggcgtttgggttgacctccgtgacaaggcggatgactgcctccactgcagaggtgtcaaagtgctgggtctggctgtcgtagttggtgggtgcagcaatgaccacaaagtccgcatcggcgtaggctgcctttgcgtccagcgtagcggtcagatccagctccttctctgccagatatttctcgatatagtcatcccggatcggcgatttacgcgcgttgatcaatgcgaccttttccggcagaatatctaccgccgtcacatgatggtgctgggaaagcagcgtggcaatcgaaagccccacatagccggtcccggccaccgcgatcttatattttttcatagcagtttatactccgcagctgcgaattttccgtaaggcagcggtcaaaattgcgccgtgccggcttaccgtatgtgggtttattatagcacgtcaccggccacaattcaatatagccgcttccctcagaattgtttgaacaataatccagtattgaaaacaatcgtctctactcagtctttgctgtatctgctaagatagaatcacggtactggcgtggtgtcagaccggtttgtttacggaaaacacgataaaagtaattgtcatccaggaatccgatctgctggcagatctgtgcattggacagattcgtatcgcaaagaagcttcatcgctttttggatgcgcaggtgcgtgatctgctcgttgatgccgcagccatagagctgccgggaaagatagtacagcccggtacggcttagcgaaagatcacggcagatcgtttcgtttgtcaatgtctcatccagatgttccgccaggtagcggctcagtttttcctgcgcactgcccgctgccagccgcgtcagccccttttggtacaatgcagccgccgccaaagccagcagatccgctgctgatttcagcaccggatagggcgtgtgcggcaaggcattataggctttttgcagtgccgttttatcaattgcgtaagccgagcagcatttttgcgcatagctccactcgctctgctcatcggccccctgtacaatgtggctcaacagcaaaaagcccacaacagcaccatcgatttggaccggcgtgatcacttcgatcaaccccgcatggcaggggtagatgatcgtctgcttttgccgcgttgccttgcggcaagccgcctggtcacacaggtaacagccggtcttgccatcaggcacactgcggatcaagcggcaataagctggcagttccggcggataggcaagcacttcgattccatacgaatcaaaaacggcggagcgcagccccgtaaggcagtgaaaatcctgcaagagaaccaaaagctcctttttattgaaaacggttcccat

SEQ ID NO: 138 - DNA, 48404 bp, unidentified
  source 1..48404: mol_type = unassigned DNA
gcaacgccgtgggcgcctaccggacactgtcgccccgctggacgctgctcggatacaacggcgtgctggccgcattcctcatcctgggtttctatttcgtggtttcgggctggacgctggagtacatgatccactccctcacgggcgagctggcacactactcgacggccggagagtacacggccctgttcgacaccttcgtccgcaatccctggcgaccggtgctctatacgacgcttttcgtgctgctcacccacgtcatcatcgccctgggggtggaaaagggaatcgagcgctcggccaaggtgctcatgccgctgctgctggcgatcctggtcgtcctctccgtccattcgctcctcatgccgggcggcggcgaggggctgcgcttcttcttcaaacccgacttctcggcggtcacgccccgcacggtgctcgtcgcgctgggacaggcgttcttctcgctttccatcggcatcggcacgatggtcacctacgcctcctatttcaaggcggacaccaacctgcgccatacggccctgagcgtcaccctgctcgactcgctcgtggcgatcctggccggcgtggtcatctttcccgccgtcttcagcgtcggcatcgctcccgaatcgggcccatcgctggtgttcatcaccctgccgggaattttcaacaccatgccgctgagcatggtctggtcttcgatcttctttctgctgcttgtggtggcggcccttacctcgaccatctcgctgcacgaggtgctcacggtctatttcagcgaggagtggcacctgagccgccgtgccgcggcatggacgaccaccctctcgacggcggtgctggcagcgctggcctccctctcgctcggagcgctgggcggctatcccatcttcgggaaaaatctgttcgacgggctcgacttcctcacggccaacatcctgctgccgctgggcggactggcgaccagcctgttcgtgggctggcacctcgacaagcgggtaatccgccgcgagatgaccaacgaaggctcgctgcgtttccgtatcttcgggcttttcctcttcctgctccggtacgtctgccccgcggtgctctgcctgatcttcctcgacaacctcgggctgctcaaggtgttcttcacctgaccggcatacgttccgccaccgcatcccggccatcccgggccgacgcaaccaccccgaccggcacgcaaaacccgccggccgcatccgatccgtgcgcgtccgcaaacgggacgataccgaaccggcccggttttccggccacaatcggccggacaattgtccgctgccgaagcagccttacgccaccgaacagggatatcgccccgctccgaacatgagcatatggtccggccgaccggaatcgcttccgtcgggaatggcctgttacgccaccgaacagggaataccgagcgcctccacgcaggcggcgatccgctgcaactcctcgcggggcactttttcgagggtctggcacggggtgtcgcggtcgagcgaatagaccatcacctgccggggccggatccggtcgatcagccgcagccaagcctccacctcccgctcggtggtgttgtccaccgtctgcccgccgcaggagccccgcaggaacatggtctgcacgatcagcctgccttcaaaccgcaccatctgctccacgacctcctccacggagtaagcgcctccggggttgttaatcagccgcacggtcggatcgaacgccgaatcgagcttgaggatgttgttgtccacacgcagcagggcacggcgcacctcctcgcgaccgatgcgggtggcgttgctcagcaccgacaccttcgccgccggacaaatcgcatcccgcagggcaagcgtgtcgtcgatcaccccctcgaaatcggggtgcatggtcggctcgccgttccccgcaaaggtaatcacgtcgggaggcgtcccgtcggcgaccatcctgcggagcgtttgttccaggagccggcgcacttcggcgcggtcgttgaagcgtgcacctccgcggtgctcggcattccagccgcattcgcagtagatgcagtcgaagctgcaaagtttcgacgaggtcggcaacaggttcacgcccagcgaaaggccgagccgccgggaatgtaccgggccgaagatgatatcgttataaagtgctgtcatacggacaaaattatgcaattcgcggcaattgcggatcggcggcagcgaattttttatacttttacgtaaacaaaccacccatgagattcaaattcggactgttggcacgtgtgctgaccgccatcatagcgggcatcggctgcggcctcttcttccccgactggctgacgcgcatcgccctgacctataacggactgttcggcaatttcctgagcttcgtcattccgctgctcatcctggggctcgtcgctccgggcattgccgacctgggggcccgggccgggaggctgctgctcatcacggcggcgctggcctatgccttcaccctcttttcgggcttcggaaccttctttacctgccggggcgtctttccgtccctgttgcagggggaaagcactgcgggaacggctctgcccgccgtcggcgaggcgctgcgcccctatttcacggtggatatgccgcctctgatgggggtgatgaccgccctgctgatggcctttctgctcgggctgggcatggcttcgatccgcagcacccagctcaaaggggtgctggacgagttcaaagccgtcatcgaacgggtggtggcccgggtgctgatcccgctgctgcccttctacatcttcggcatctttctgaatatgacccgttcgggacaggtggcgggcatcctgggggtattcgtcaaactgatcgtggtgatcttcttcatgaccatcgtgctgctggcagtgcagttcaccatcgccggccttgcggcacgccgcaacccgctcaggatgctgcggacgatgctcacggcctatgtcacggcgctcggcacccagtcctccgccgcgacgatccccgtcacactcgaacgcaccctgctgctgggtgtgcggcccgaggtggcgtcgttcgtcatcccgctctgcgcaaccatccacctgtcgggctcgatgatgaagatcgtcgcctgcgccctggccgtcatgctcatcaccggactggaggtatccaccggaacgttcgccggttttatcctgctgctcggcatcacgatgatcgccgcacccggcgtaccgggcggggcgatcatggctgcggtgggactgctcgagtcgatgctcggattcgacgagaccctcatcggtctgatgatcgccacctacatcgccatggacagcttcggcacggcgaccaacgtgacgggcgacggagcggtggccgtcatcgtcgatgccatcgaccggcggcgcggccccgcagccgacgcgggggaataactgcctcggaatccatcgaagcgccgcgcgatgattcacgcggcgcttcgatcgtgtatatcggcatcacggcttgcgtcgatacgttccgtcagataccgaaaatataaccgccggcattgatgagcaggcaaccctgcgattcgctccagatgtaggcgtaatcgcccgcattggcattcagcgactcgagcgccgcttccatcccctcgcggtcgcggccggcaaacttgtttgcggtatcggtgcccatgccgacgcccgatgcaggagtctgctcggcccaccaccagcatccgttgagtttgccgtaccgaccgctcatcatgccgaccacgccgcccatattggtcgcagcgggagtgccctccgtcgatacggttcccccgacgagggcataacatccgttcaggcttttggcacgggcctgcatagccgccgcaaccacccccgtgacgccgccgaaactggccggggcgccgtcgcacgaaagcgtcacacggccatcgacgatcgcaaaacaggaggtgaggttgcccgtcgtcgccgagccgttgactccgccgaacgaggcgccctgccctccttcggtcgcgaccgtcaccacggccgtattgcgcaacagggcatagcagcaaaccatctccgacgactggcccgttacaccgccgcacatggcgtagattttggcgcgagccgcaagcgtgccggcaatatccgtcgaacagcggccggttatgccgcccgtctggtaggtcgcattgccctgcatgccacccgtataggccgcatctcccgttgtgacggcagatacgaccccggaagtggccacactcaccgacatgagcgcaatgccgtaaccggcattcgcttgctgggcgatggctcctgcggcatatgcctttccttcgccccgggcctcgaccgttccggaaatcgtcagtccgcacgactcgaccacatcggcggcgtttaccccttcgaggccgcctgccgccacgtcggcggtcgcacatccggtgccgtcggcacggatcgttccggagacttcgaccgtcgctccctgcaccgaaaccccgaaactattgccgatcagtccgcctgcatagacgccgacgatgggatcgtccgcgggcactacctcgccgatgcgggccaggatatcgcccgccacgatcaccgcggagctgttggcatgaccggaatcgcccgtggcagccaacgctcccgccgacgcgaccgcaccccgggcgaagaggagctgtccggcggggatttcagccgaacaacgttcatacgtacctccatgtacgatcataccggttataccgcccgcataggcgcagactttcgggtcactcgatgatagtgccgaaacggagcctttgaacaaacaattggtgaataaggaaccgtaattcacaccgcagaagccgccggccaccgcatagttgtcgggagccgtgcagtcggccgacaccgtcgcttcgagggtcagatcgcggatcgtcgctccgcggacgattccgaacaggccggccaccgccgcttcgtccgaagcggtcacagcgacctcgagcccggcgatacggtgtccccgtccgtcgagtgttcccctgaagcagtttttgtccggcataccgagcgactcgttgcccgaaccggtgccgacaggcacccacgcacgtccggtcaggtcgatgtcggccgtcagggcatagaatgccccgacgtatgcctcatcctgtgcattgacccgctcggcaaacaggagcagttgtccgaaagtagcaatctgccagggatcggcctcggttccgtcgcctccggcaaaggagggcgacacgtcgctctcggcctcgaattcctcccacgacgaccacgacgaatcgagcaccgtccctccggcgggcgcaagagcccgcacacgcaccgagtagatgattccggtcggcatatcggatatacgcaccttcggatcggtcacgcggctgtcgtccacgtcgctttcggcctgccggatctgtatgccataacccgcagcggcttcgaccggattccaaacgaccgttgcctcgtttccggacacggtcaccacgatcccgtcgggcactgcgagcgggaccgcctcctcggccggcgtggtaaattctccccagggagtgtacgccgaggcaacatggtcggtatccccctcggccggcagggccgcaatggagtaggaatagctttgtcggggaacaagcccctcgaacacgatccggagtgtttctaccgccttctcgatcacctttccggagggttctttcagacggaccgcataggactccgcatgtgcgacccgctgccagctcaattcgaccgttgtcggggtcgctacgacttcgatcgcagcgggagactcgagaggaacgggaatccgctcctcgttcgcagcatcgtcgcaggacaagcaaacgagtgcaacgaggcacatggaagctgcgataaacaaacacatcagtcgtttcatctgtttggattttaaatgattattaaggggactacaggctattccgaaccggttcgcgcacgatccgcggacttctctccgggaaacaagatactaaatcgatgttgaaaaacgaaattataccggacaaaataatccccatcgcgtgatacccgattccggtacacggcttgcagtccgtacaacgcaccctgtcgcaaagccggctttcggcccgcggacgaggaacggggtcacaagcagaaagcggacagcaaaggccgcaaccggcgctcaggttttccgtgccgccgaccgaccgctggttccccttgccgccgaccctttgcggcccgcagacggacgtttcctcccccattccgatccgcgtttccggcaccgggaaaccgcacggaagcgcccccgccgatgcacgcatttcggggcggagcaataattaaaaaaattaaaatttttactgttatttttttcacatcgcgaaagtttttctacctttgcctcggccggaatcataaaatgcgcgttccggcgttagcttaccgaggatgttctaataaaaaatagttatggataaaaatgatttgaaaaagtacgggattacaggcgtcaaggagatcgtctataatccctcttacgacgagcttttccgcgaggagacccgcaagggacttcgcggctacgagaaggggcagcttacggacaccggcgcggtaaacgtgatgaccggcgtttacaccggccgttcgcccaaggataagttcttcgtgatggacgacgtgacccgcgacacgatctggtggacgtcgcccgagtacaagaacgacaacaagcccgtgaccaaagccgcctggaaggagctcaagaagatcgccgtcaaggagctttccgacaagaagctctacgtggtggataccttctgcggtgccaacgagaacacccgcctcaaaatccgcttcatcatggaggtggcctggcaggcgcacttcgtcaagaacatgttcatccgtccgacggatgccgaactcgagcagtacggcgagcccgacttcgtggtgctcaacgcctcgaaagccaaggtcaaggagtacaagaggctcggcctgaactcggagacggccgtcgtgttcaacctgaccgaaaagatgcaggtaatcatcaacacctggtacggcggcgagatgaagaaaggcatgttctcctacatgaactacctgctgcccctgaagggcatcgcttcgatgcactgctcggccaacacgaacgaaaagggcgagacggccatcttcttcggtctctcgggcacgggcaagaccaccctttcgaccgaccccaagcgcgagctgatcggcgacgacgagcacggctgggacgacgacggggtgttcaacttcgagggcggctgctacgccaaggtcatcaacctctcgaaagagaacgaacccgacatctggaacgccatccgccgcaacgcgctgctcgagaatgtgaccgtggacaggaaaggacatatcgactatgccgacaagtcggtgacggagaacacccgcgtctcctacccgatcttccatatcgagaatatcgtgaaacccgtatccaaggctcccgccgccaagaaggtgatcttcctctcggccgatgccttcggggtgcttcctcccgtttcgatcctcacgcccgaacagaccaagtactacttcctctcgggcttcacggcgaaactcgccggcaccgagcgcggcatcaccgagcccacgccgaccttctcggcctgcttcggcgcggcattcctctcgctgcacccgaccaaatacggtcaggagctcgtgaagcgcatgcagcagtcgggggccacggcttacctggtgaacactggttggaacggcacgggcaagcgcatctcgatcaaggacacgcgcggcatcatcgacgccatcctcgacggttcgatcgacaaggcgcagaccaagaacctgcccgtcttcgacttccgtattccgacggccctgccgggcgtggaccccgcgatcctcgatccccgcgacacctacaagaatccgaaggagtgggacgagaaggccaaagacctggctgcccgcttcatcaagaatttcgacaagttcaccggcaacgacgagggcaaaaacctcgtggctgcaggaccgaaactctaaaaccgcgcatcgcgcatccgcacgggacggcctcggggccgtcccgtttttcgtctttgcggggcacggtggccggagttttgcggactgaaacgaaaaagacaaccgcaatgcaaaaaatcatcgaccgcgcctcctcgcgcggatacgccgaccacggctggcttaaaacctaccatacgttcagcttcgccgactattacaacccgcgccggatgcgcttcggagccctgcgcgtgctcaatgacgacaccgtcgcgggtggtgagggcttcggaatgcacccccacgacaacatggagatcgtctccataccgctggccggcgccctgcgacaccgcgacagcatgggccacacctcggtgctgcacgcgggcgaaatccaggtcatgaccgccggcacgggtatcgtccacagcgaatacaacgcctctgcggacgaacttgtcgagttcctccagatctgggtcttccccgagcagcgaagtctcacgccccgttacagtcaggtgcggctggacgaggcccggcccgacgagccgcgcctgattgtggcgccccggggaagcgagcatgtggcctggattcaccagaaagcctggttccacaccctgcggctgaccgagggaggcgaagtcgctttccgcctgcaacgcccctccgacggactttacctcttcgtgctggacggcgaaatcgaagccggcggcgagcggcttgcacgccgcgacggaatgggcgtgcaggagttcgacacgctcacccttcacggccgccgggaatccgacctgctgctgatcgaggtgccggtgtgacccgccgcacatcggcatccccgtctattctcacggctgcatacgacaggggccggcgccttacggcatccggccccgcaaatgtcgcgcacgcggatcagaaattgtaaccgatggtgatgtagaagctgccggttttcacgctgcccaactgcggcttgaccttgtccttggagatgttgataaggcctgcgtcgtagcccacgccgaaatagagctgcttccaggtcgcacccgcaccgacgcggataccgaagtcggaccggttgaagtagttgccgaacacgtcggagctctcgcccagcgacttgtatttgccgccgacaccgagtgcatagtacaagccgaagtagggctgcaccgtccagttgcggccgatctgcacgtggtaactcagcagagcgggaatctccagataccagaggttcacctcgttggtatagccatcgaccgtctccttaccgcctttgtactggagatagaggcccgtctcgaagtagagcgggaagcggcgcgtaagcatgatctcgtaggaaccgcccagattgaagcccgccttggagttgaggttggtcacggtggcgatattcagaccgccgcggatgccgaagccgccgcgacgctcgatatcccgacggtcgtcgatgcggccgcggttctcgttgtccccgtaattgggattgttgtaaccccggttctggtccacatatccccggtcgttgcggtcgttacggtagttgtcgtcgcggtattcccggcggttctcgcgccgctcctcccgatactcgcgccggttttcattggcgttatcgttccggttgtacgaggtattccggtaatcctgagccgaagccatgccggccacggtaaaaatgccgataagggcaagaagtagtgatcttttcataatctgtaaaagtttattgccctacccatgcaaatatgatacaaaattgcaccttttccacccattcgtcccgctgcggctgatgttcagcatttttaccccgcatcctcacgcacgcacggattcttttcgtacctttgttccatgcttcgcttatcgcttctggtggccacttacaaccgcagcgcatccctgctcggggccctcgaatccgtcgccggacaacgggccgaccctgccgtatgggagtgcgtggtggtggacaacaattcgcaggacgacacggccgcatgcgtcgaggcgttccggcaggcccatcccgggctgaatctgcggctggtgcgggaatccctccagggcctctcccatgcacgcaaccggggcatcgccgagagccggggcgaatacctggccataatcgatgacgacgagcgcatcaatcccgatttcgtgcgggcctacatcgacttcttcgacacccatcacgaagcggctgcagccggtggacgcatcatcgcggaataccctcagggacgtccccgctggatgtcgcgctggacggaagcgcccatcgccaacccgatcgacctggggccaaaggtccgtcccttcccgccggggcgcattccgggaggcggcaacatggccctgcggcgcacggccgtcgaaaagcacggggccttcgacccctcgctcggacgcacgggaaaacggctgctcgggggcgaggagagcgacctgttcgaacggctgcgcaagggaggcgagcaaatctggtatgtccccgatgccgtgatgtggcacatcatcggccccgaaaagctcaccgaggactatttcgaccggctgagtttcaacgtgggccgcagccagcgggcccgggcggaaatccacggccgcatggtacggctcctgctgggcgaagcgctcaaatgggccgccaccctcgtcctggccgccggctgtctgctcgggatgcggccggcgaaagcgggacggctccttaggatgcgggcacgcatcacccggggcatcctgtgctcccgcacctgaccccccccgcggaacagcctgtgcacagcatcgcataaaaaacccggcgtcgaacgcgccgggccgttttccgatcgcggcgaaaccgccgcgcttctatcaaaataggtatttctcgttcttgaccttgctgaccagccggaaaatatcctgccaggcctcctccgagaaggtcgtgccgaccacctcgatcactttgcccgcggtaatggccccgatggtgccgcactgacgcagcgtaagtccgtcgcacagccccgcaaggaagcccgcggcatagaaatcgccggcgcccgtggtatcgacccgtttggcagccgccatgatgcccacgtgaacgacctcgccgccctgcttgataagcgcccccttgatgccgattttgacgatcgccagctccgcgatctccgaaatggcttgcagggcgttgagcggctcggcctcccccgtaaaagccttggcctcgtcctcgttggcaaagacgatgtccacgtactcctgcacgagcccgcgcaggaattccaggttctcgtccaccacgttgaaactcgccaggtcgatcgccaccttcagtccgcactgcttggccgtgcgcacggccgcgcggatcagctcgtgatcctgcaccaggtagccctcgacgtagaggcagtcgtagcactcgaagatcgccggaacgatttcatcggcccggagctcgagcgccgcgcccaggtgggtgaccatcgtacgctcgccgtcgggcgagatgagcgacacgcacttgcccgaacgttcgcgtccccggaagatgaacggctcgacgcccaggttttcgagcgcctgcacgaaaaagtcgcccgtcttgtcgggccccaccttgccgatgaagcccacgtcgcaccccaggcgggccatggcgcggatggtattgccggccgagccgccgagcgagagcgaatagggaaggccggccaccgacttcgatatgtcggtctgcaggcgggtgtccaccaggctcatcgagcctttgggaagattgtatcggtcgaggacccggtcgttcttcaggttgaccagcatgtccgtcagggcattgccgatgccgattacgcgtttcatcaattttgcagggttcggtaagtagtcagtttctttcgccggttggtgtcataccggcgcatcgtttccattgcctccccttacgagggaaagccgcgcggaatcgtctgcatgaagggacgaaaccgtcgcacacaaaataatatcgtctcgtaaaaatttcatggatcgacagggaaacactcagatcgagaggatgcgcaccaggtcgatcgaagcgcggtcgatagtcttcgagtggctcacggctttggggaaaggcacatagacaatctgcccgttctgaatgccgatcatcacgttgcgctgcccttccatgagggcttcgatggccgactcgcccatgcgcgaggcgatgatgcggtcgatggccgtcggcgagccgccccgctggatatggcccaggatcgtcacgcgggcgtcgaactgcggaaactccttcttcacgcgctcggccagccccatcgcgccgcccgtcgccgggttctcggccaccagcacgatcgccgaattcttgcttttgcggaagccctggtcgatgagcgcgcccagttgatcgacctcggtatccatctcgggaatgatcgctgcctcggcgcccgaggcgatcgccccgttgagggccaggtaaccggccgtgtgtcccatgacctcgacgaagaagagccgctcgtgactggtcgccgtgtcgcgcagcttatcgaccgcctcgacgatcgtgttgagcgccgtgtcgtaaccgatggtggcgtcggtgccccccaggtcgttgtcgatcgtgccgggcagcccaacgatcgggatgttatactcgtcggcgaagatgcaggcgcccgtgatcgatccgtcgccgccgatgaccaccagcgcgtcgattccgtgggcctgcatgttgtcatacgccgtgcggcgcccttcggcggtcttgaactcctcgctgcgggccgttttgaggatggttccgccctgctggatgatgttcgacacgctctgcgacccgaaatccacgatctcgttggccaccagccccttgtatccgcgcatgattcccttgacggtgtagccgttgtagatggccgtgcgcgtcaccgcacggatcgccgcattcatgccgggagcgtcgccgcccgaggtgagaatgccgatgcacttgatcgcagccataatcttgtcgtattagcacaaaaacgtccaaaggtaataaaactttctgcaaagtgcaaaatcggggccggctccgtttccggcgccggccccgaccgctgaactttttatttcaaatcaacgcctgacggtctcggtcgtttgccggatcacccggtaacttttccgttccaccccgtcgtcaccctccgcagcggccgtttcgagcgccgacgaatcgggaagcagggcgcgatccggttttccggcagcgacccgcagggaggccgaatggtcgtcgatacgcatatcgacccggtcggggacgctgatgcgcagcccgttccggccgtcgatccggatttgcgccgcgtctgccccatcgtccatgaattcgtcctcatcccccagcggccactcgatctcgtagtggtcccgtccgatattttcccagaaccgcccccggatagccaccgtacaaagcgcgacgatcgtgaggaaccagacgatgaaggtcacgagcaccgtcttgccgctgggcttgcgcgaggcgatcaggcacatgagcacatagataagcagaatggtgggaatcaggacggccaccacaccgaagctgcccacccagacggaagccgcattgcagaacaacgccatgttcccttcccccccgacgatcaatgcgaacagagcgataatcagggcgcaggccagcaggatcaggccgaagacgaccagccccgcgatgactttgagcaggataagcaccacctgtccgagggtatagaccacgcgggccaccacgggtttggccgtgctgtcgggatcgctcgccacggcagtcgcatccccgatcgaccgggccgtgatgcgctcgccgttcatttcgagtttctgccgcgccgtgcgcgccggcgggacggcgaaccacatgataaggtagcagacgaagaagatgccgaacaggttgcccatcaacgcactcagccagccgaaaagcggcacccagccgaagagcgtgagcagcaggggcaggaagagtccgagccgcacccacacgggatcgatatcgaaatatttgccgataccggcgcatacaccccccagcttcgcgttttcggtgtcccgatagagccgccgcggaatgcggggcccgggggcgggctcctctccgccgtcgcggatgtcctcggcggaccccatctgggcgatgatctcgcggatcaacggtttctccaccacgctggtgttgtcctgatgagagagaatcagctcggcgatgcgggcctcgatatcggccacgatctcacgcccctcgtccgaactgccgtaggtttgcttgagcgacgcgaggtattgaccgagggtctcgtaagcgtcggcgtccagcgtgaaagccacccccgatatgctgcattttttgacttctttcatggttgtcggtcgttggattacaatttattgacgctgcccccgctgcttgccgagacctccacgacggcatcgcccgcataggagacggttccggcgctcgaagcatgggcgtcgagcgactcttcgcagcgtaccgtgacgctcgccgcactcgaggcgtttgccgagcaggtccgggcggtgaattcggccgcatcgatgcgtccggcggacgaagcccgcagcgagcactgctcgcacgaccctttcatgcgcacgcgtgcagcgctcgaaacccgcacttcgcaggtttccgcctccagtctggtgcagacggtcgccgaactggtcgctccgatgcgacattcgcgggcacgcacggccgcacgcacggtcgcggcgctcgtcgccgagagctgaactctgtcctgctgcgcgagcggctggtcgcagacgatcgaagcggcgctcgaagccttcagcagccggatgtcgccgttatcgggcaccgtgacctcgacctgaacgttatgcagcgagttgatccgcttgtcgatgccgatgcggagcacgccgccccgcacatgggtctccacgtattccatcacgttttcatccgcgcggacggtcaggctgtcgccctgaccggcgatcacgacccgcaccccgcgcgaagcctccacggcgttgaagggctctacgccgacagagcgtgtccgaagcacgccgctcccgttgatcttcttgccgaataccgtgctgccgctgcaccccgcagccgccagagcgacggccaacgccgtcgccgcaattaaaaatcgtttcattgccgtgtgttattaagggtttgttgttctccgtgacggatcgtgcggatctgctcgaccagctcgtcccatgcctcgtcgagcgtgcgcaggcagtcgcgccctttctcggtgagcatgtagtatttgcggggcggcccctgcggggactcctcccagcgataggtcagcagcccggcgttcttctgccgcgtgaggatcggatagagcgttccctccaccacgatcatctgcgcctgcttgagctcggtgatgatcttcggggcataggaatcttccctcgaaagaatcgccaggatgcagtactccagaatgcctttgcgcatctgcgcttttacgttgtcttcgttcatggccggtcactttacgggtttcggatgcgaaggactcttcgggacgatgatccacaggaggatatagacccagagcgaaagccctccgaaaagaatcagcagcagcgtggcgagtcgcaccagcgacacgtcgagcccgaaaaattcggcgacgccgccgcaaacgcctccgatcatccggtcgtcggacgagcggcggagcctcggtctttgttggttgtcggttgtcatatgctatcggttttttgaatttgcacggttgccgtcgcagcccgcagcggcgagcggctcctccggaatgacgatccaaaggatgacgtaagcccagatcgagaggccgcccagcaggatgagcagcagcgtgagcaggcggatgagcgtcggatcggcatcgaaatattcggccaggccgccgcaaatgcccgcgatcgatcggttcgtgcgggagcggtagagccgccgcaccgccgtgcggtcgcattcgccggcagtctgctcgtcggcaggaggttcgccggggccgaagtcggcggggctgcccatctggtccatcgcctcccgaacctccccgaccgttacgacccgcatgggcgagggtactttttcacggaaaatctcggcaatgcgtgcctcgacatcccccatcgtctccgtgtcatcctccggcagccggcggcggatctgatcgaggtaacgcttcaaaagcgcgtaagcatcctggtcaagcgtaaaagcctgcgatgcgatattcacgtttacagtctctttcatattgcactgcgcgttattaagggtttcggtcgtcaagggtttcacccgatgacactgcaaatataagacaaaaattaatactatgcaatacaaagtactaaattttcacgaaatatttttctgccacgagttccgaccggctccgggccgcatcccgaccctgatcccaactcctgccgatcgggacaccctgcccgggcgatggtcccgcacgaccggtggtttcctgcaaccgggccggccggcccgcacctgatcgccaccgccccgaaaagagtgccggcggatgaaatagttttgcaatatccccgcgtttgactacatttgcatcgaaaatctggcgtatgggacgaagacttgcggcggtcatcctttcggtactcctgctctcgggcggctggctcggcctgagcggcttccccctgctggcggcgctggtgccgctgctctggatcagccgcggctacgacgcctcgcgccgcgcatggtggggcatgttcggctgggcgctgcttgcgttcgcactctggaacgccgcaaccgtctggtggatctggtacgccacccccgtcggcccgttcgcggccacgctcgcctcctcgaccctcaacatgatcgctttcatgctgttccacaccgtgtcgaaacgggcgcccaaagccctcgcctacacggtgctggtcagcgcatggatcgccaccgaatactggtacaccgtgggcgaattctcgtggccgtggctgctgctgggcaacggcttctcccacgaggtttgggccgtgcaatggtacgaatatacgggcatcttcggcggcacgctctggacgctggtcgcaaacatcctgctgttcgaggcgctcgtctcgcgccgtacgcgacgcatcgtcgcggcggcagcgtggatcgttctccccctctgcgtttcgctcacgatctggtttacgtggcgcacgcccgcggcggggacggtgacggtgacactcgtgcagccgaacgtcgatccctacaaaaaattcgaggacggcacctcgtccgcccagatggacaacctgctccggctggcggccgaagcgccggcggacgcggactatatcgtcatgcccgaaaccgccgtgccgggctactactacgaaacctcgatccgcacggctccccccgtgcaggctttcgcccggctgctggccgaaaaatacccctccgcccggatcatcgcggggttcaatacgctaaggatctatcccgaaggggggcaaagctccaccgcccgacatgatgcaagggggtggtacgacgtgttcaactcggccctcgaaatcgattcggcctcgggcgtttccatccatcacaaggggcgcctggtcataggagccgagaaaacgccgctgccgtggctgttccgggccctcgatttcctggtgatcgacctgggaggcacgctcgggcagatcggcgtcggcactcggggcacggctttcacgggcccggcggggagcgtcggccccgcgatctgctacgagggcatgtacggcgactttttcggtgacttcgtgcgcaggggcgcgcaggcgatgctcatcatctccaacgacggctggtggggcgacacccccggttacaagcacctgttcaccatctcccgcctgcgggccatcgagcaccgccgagccatagcccgcagcgccaacaccggtatctcgggcttcatctcgccgcgcggtgacatcggcgccaccctgggctgggacgtgcgcggcacgctcacgggcgaagtgcctctcatggccgaacagaccttctacacccgctacggggattacctgggccgcatctcggaatacgtgctgctcctctcggtgctctacttcatggcctaccgcatccgccgccgcaaccatctggtaccttaacatcccatcgatgaactatacccaaaccctcgaattcctctacgcgtcgctcacctcctttcagcagaagggcgcagaggcctataaaccggggctcgaacgcatcaccacgttctgccgtcacctgggcaacccgcagcgcaacttcttcaccgtccacgtcgcaggcaccaacggcaaaggctccgtatcgcacatcctcgcctcggtgctgcaacaggccggctaccgcacggggctctacacctcgccccacctgcacgacttccgcgagcgcatccgcatcgacggggagatgattcccaagcagaaagtggtcaatttcgtggacaagcaccgcgactgcatggaggagctgaaactctcgttcttcgagatgaccaccgcactggccttcgactacttcgcgcagagcgacgtggaggtcgccgtgatcgagacggggctgggcgggcggctcgacgccaccaacatcctgctgccgctcgtgagcgtggtcaccaacgtcggactggagcacaccgacctgctgggggacaccgtcgccgagatcgccgccgagaaagcgggcatcgccaaaaaaagcatccccctgattctgggggaggcggacgaggcctacaacgcggtattcgagcagaaagccgccgctctcaagacgcgcgtgatctatgccgagcgggatttcacctgcatggcacaggaaaaccggggtactttccagcgtttcgacatcctgcgccgccgggacggaggccggtttcagatcgacctcgacctgatcgggagttaccaggcgcacaacctgctcacggcctgcgccgccgccgactacctgcacgaagagacccccctgaccatcagccgccgcgctttcctcgaagggacccgcaatgcggcccgcaataccaacctgcagggacgctggcaacgtctggcggaagagcccctgaccatctgcgacacgggccacaacgcccacgggctccgctatgtggccgagcagttggccgccacgccccacgaacggctcttctgcgtcgtgggtttcgtgcgggaaaagaatctcgccgacatcctgccgctgctccccgccgaagccacctacctctttacccaggccccgaccgagcgtgccgtgcccgccccggaactggccgaaaccgcaacccgatacggtctccgcggcgaggtggtgccggaggtgaaacaggccctcgaccgcgcccgcgaactggccggcccgcacgacctgatcttcgtcgggggcagcaatttcatcgtggccgaggtgctctgatccgcccgcatttgaaataatatatataggaatccgccctgctcggggcggattcctgttgtccgataatggagcttggccatttgtccgccagcccgagtggggaggaaaaaacggcagaccgtgtgcggtctgccgtcgggctcagagccggggattatcagaagaacttgacgggatgcccttcgatggccgtcagcaggttgttggcagccgacgaagcgccgatgcggaacaggtccgtcgtcagccagtcggggcccagaatctcctcgacaatggtatagtagagcgcggcatcctcgggcgtgcgcacgccgccggcagccttgaacccgacgcgacgccccgatttctcgaaataatcgcggatggcccggcacatcaccacggccgcttcgggcgtagcggcgacgtcgatcttgcccgtcgaggtcttgacgaaatcggcgcccgcaagcatcgatagcagcgaagccttgcggatcagctccggcgtacggagcgcgcccgactcgatgatgaccttgagcaccacgtcccggtcggtttcggcccgaatcgcctcgacctcgctggccgcctcgtcgtaatgccccgtcagcatcttgccgacgttgagcacgatatcgatttcatcggctccgttctcgatggccatgcccacctccagcgccttgacttccaggaaagtctgcgacgacgggaagccgcccgccacgctcgtgatccgcatgtcggtaccgtccaccgccaccccgaccgtctcgacgaaaggcggataaatgcagatcgaagccacgttggggatatgggggaactgctcgtaaaacgccaccgccttgcgggcgagctcggtgacagactcgaccgagtcggtacacgagagcgtggtcaggtcgatggccgaataacagaatgtatagacctcggtcgtgcggttgcgcacggcggttgcgccgaggcgtgcaacctcgtcggccacctgcgcctcgctctgagccgggccgtattcctgcagcagttttgcgtattccatagaaatcggattttctacaaaattagaaaaaattgttcataaaatgaccgctcaagaggcgataattttccttccgctgcaaaatccgtgcgcggcgccgcgccccggacgaaagcggcacgggacaacccgccgctccgttcggcggaaacggcggccgaccgggaccggcaaaagaaagacgggaagtccatccgcagcccgaaagcggacggcggcataaaatccatcggacggcgcaggcccggtcggaacgcacggcgcaacggcccgaatgtgccgccgcccggctgttaccctttgcgcttgtagcgcgaggggctggttccggtatgctgcttgaagtacttgccgaaaaacgactgggtcgagaaaatcaggtgataggcgatctcctggatgctcagccccgaatacttgagcagcgtcttggcctccaggatcaccgactcgtcgatccactgcgcggcggtcttgccgctcacatccttgaccaccgaggagaggtacttgggggtgatgcgcagcttgcgggcatagaagccgacgttgcgctccatcttgttgtattcctgaagaagctccatgaactcctcgaagatcacctcgcagcgcccctgccggcggggttccggctggtcgcgctggttgagttcggtgatgatgtagaacacggccgtgaagatcgtgcggatgatctcgtggcggtagcgctccttgtcgctgcgcagcatggtcttgatgagctggaagagctgacggatttcgtccacgtcctgctgcgtaacctgcaaacaggggtttttgccgaaacgcatatagaccggcagcgacgtggagaggtcgatctggatctcgttgacgaacgacttggagaaggccaggaaataggcggcggcgtcgggagaacatttgaccgtgcggatgatgctgtcgggattgaagaaaaccagcatgttgggccgcacctcgtactcgttcatgtcgatcgagaccacggcgttgccgctcatcatcaccacggccgagaagccgtcgatggatgcgggatgctcggccgtcgcattggtccgggcgtcgagcgccgtgatgaccaggtcgtccgagaggtaactcacgtctttcatctcctgcttgatgcgggagatggagaccttgcgtagattgatttgttcagggctgttcatgtgcagggcatttgggaaattcggacaatgatagcaaattccgtccggaaaaacaacattccggacgaaatccgcgcgtcaaaatttcctaccccggcggccttccaacgctacctgcctcatattcttccaaaaaacggaagactccgccatacgccctcggcacgcggcgcgtccctatttttccggcggacagaaaacccggagctccccgggcagacactcgatccgcaatggaaaacgggcgccccgctgcccgtccacgtcggtcagctcgtcgagcggcgagacgatgcccagcgagcgcgtgcgcaggtgacgcaccagccggggattgccgcccagcagatagcgcaccatcgcccagaccgagcggaggaaagcccgcttctcgagcaggatgcagtcgaaaaggccgtcccggacgctcgaccgccgggccaggcggaatccgccggccgtctcgccgttgaagacgagcatcatcagggcatcgatccggaaccgttcccggtcggtcgccacctcgagcggcacggcatgcagccggcgcagctccttcaccccttccaggatataggccagcttgcccagccggtgcttccgctcgtcgggagtgcgctgcgaggtggtcgtgaaaagcccgaaactgaagatattgacgaaatgcaggtcattgacccggccgcagtcgatccgctcgagacgccccccgacaatctgccgggccgcttccagcggatcgcgcgacatgcctatcgcccccgcgaagtcgttggccgtgcccgccgggatcacgccgagcggcacgtcgagcccccgctccttcatgcagttgaccacgtaattgaccgtgccgtcaccacctgcgacggccaccagcgccaaccccgggcgcccatcgaacgggttggcggcgaaatccaccggcagggcctccacctggtagccggccgcgccgaggattccggcgattgcgccggcctcacggtcgatccggcccttgcccgagcagccgttatagagaaacaaagctttttccatcgtatgtttattcgtcgtcgcgcataatcatcgcctccatcgcgggggtgtaccacacgcggtatccttctttttcgtccgaaaggatgaaacaggcccgcagcccctccatccgcccggccagcgcgagcgcctcatccccgcccagggccatgaacatcgttcccagcgcatcggccaggatgcaactgtccgcgacgacggtggccgagagcagcccggacacggcgctgcggcccgtcagcgggtcgatcgtgtgggccaccttgcgcccttcggcgtcgatatagaaccgccggtagttgcccgaagtggccatggcgccgtcgttcagccggacgcggacgctcacgtaatccccctcgctcatgttgccgtcaaacggggtttcgatccccacgcgccaggggttgcccccgggattgacgccccggcaatggatttcgccccccacgtccaccaggtagttgcgggcgccgcagcgctccagcagctccgcgacccgatccacggcgtagcccttggcgatggagttcaggtcgatctgcatacgcgggtcatccttgacgagccgcccgtcgcggacacggatcttatcgtgccctacgaagcgaaggatcgaatcgacgttcacccgcgccgcccgctcgtgcccggcgaatccgtacgcctcgaccaacggtttgaccgtcacgtcgtagcggccgccgctcagctcgctcacccgttcggccagggcgaggttgcgcacgatatgcacgtccaccgagtcggtttcgttgcggttcaggcggctcagcagggacgtttcatcgaaaatggacatcgaggccttcatctgccgatcgagctccatgagcgcggcataaagttccccgcggtcgcaccccgtcacgtcgcccgtcacatggagcgtcgtgccgagcatcgtcccatcgacggtcagataaccgccgcgcggcgcacaggccgccaacacccccgcagccgccagcagcgcccatcggcgcatcgccatttttttcatcgtcctcaccgttttgccgcaaaagtacgatttttcacaggagttttcaaaaaaagcgcaccgaaacgaaattaatccctttgacgggttgcggtttgccaattaattcgtacctttgcgctacgctctggcgtgatccacggtaagggggatgcgtcgtagagtgaaactaaataaacttattcgcaatgggttatttaacgcctgagaaaaaacaggaacttttcggtacgtacggcaagtccaacaccgacacgggttctcccgagagccagatcgcgctgttctcctaccgtatcaaccaccttacggcacacctcaagagcaacaagcacgacttcgggacccagcgttcgctgctgcgtctggtcggcaagcgccgccagttgctggaatacctgaaagagatcgacatcgagcgctaccgcgccatcgtgaagacgctcaacctccgcaagtagtccgcaggggaagaggaaaaatggggttgtccgacgcatgagttggcagccccattttatcgacggtcgcaccgaaacaggcggccaggacgcagggcccggcccctttcgagccggaatgcggcagtagccgcatgggatgcaagcacacatttttggataaatttatggaagaaaacaagttgtacaacgccgttcgccgcacgatcaccctcgccgacggacgcgagatcacgatcgagacgggcaagctggccaagcaggccgacggttcggtggtggtcaagatgggcgacacgatgctcctgggtactgtcgtggccgccagggacgccaaacccgacacggacttcatgccgctgcaggtggaatacaaggagaaatacgcctccgcgggacgctaccccggcggcttcatgaaacgcgaaggccgggccaacgacagcgaggtgctggtcgcccgcctgatcgaccgcgcgttgcggcccctgtttccggccgattaccacgccgaggtttatgtgaccgtcaacctgatctccgccgacaaggacatccagcccgacgccctggccggcctggcagcctcggctgcgttggccgtttcggacattcccttcggcggcccgatttcggaggtgcgcgtggcacgcctgggcgggcggttcgtcatcaaccccacctattcgcaaatggacgaagtcgatctggacatcatggtcggcggcacgatcgacaatatcctgatggtcgaaggcgagatgaaagaggtctcggaggaggtcatgctcgaagccatcaagttcgcgcacgaggagatcaaaaagcaatgcgccgtgcagatcgaactctcgaaagaactcggcaaggacgtcaagcgcacctactgccacgaggtcaacgacgaggagctgcgccaaaccgtcatccgcgaactttacgacaaggcttacgccatcgccaccagcggcacgatgaagcacgagcgcgaggagcgtttcaacgccctggaagccgagttcgccgcacgttacagcgaagaggagttggcggagaaagcgccgctgatccacaagtacttccacgacgacgtgcagaagaaagccatgcgcaacatgatcctcgacgagggcaagcgcctggacggacggcgcacggacgaaatccgccccatctggtgcgaagtgggctacctgcccgcagcgcacggctcggcgatcttcacccgcggcgagacccagtcgctcacgagcgtgacgctcggcacgaagctcgacgaaaaggtcaaggacgaagtgctggtgcagggaaccgagcagttcgtgctgcactataatttcccgcccttctccacgggcgaggccaaggccgcgcgcggcctgagccgccgcgagatcggccacggccacctggcgtggcgggccctcaagccgatggtgcccgtaggcgaggagaatccctacgccgtgcgcgtggtttcggacatcctcgagtcgaacggctcgtcgtcgatggccaccgtctgcgccggcacgctggccctgatggatgcgggcgtgaagctcaagaagcccgtctcgggcatcgccatggggctgatctccgacggcgaaaccggtcgctgggccgtcctgtcggacatcctgggcgacgaggatcacctgggcgacatggacttcaaggtgacgggtacgcgcgacggcatcaccgccacgcaaatggacatcaaggtggacggcctctcgtacgaggtgctggccaaggcgctcgaacaggcccgcgtaggccgcctgcacattctgggcaagctcaccgaatgtctccccgcgccccgcgaggactaccgtccgttcgtaccccgcatcgtgcagatcaccattccgcaggacatgatcggttcggtcatcggccccggcggtaaggtgatccaggacatccagaagaccaccggcacgaccatcaccatcaccgaagccgacaacaagggtttcgtggacatcttcggcgtggacaaagaggccctcgacggcgcattgcagcgcatcaaggccatcgtggtcatgcccgaggtgggcgaaacctacaaggggcgcatccgctcgatcgtcacgttcggcgccttcgtggagattctcccgggcaaggacgccctgctgcacatctccgaaatcgactggaaacgattcgagaccatggaggagagcggcctgaaggagggcgacgagatcgaggtgaaactcatcggcgtcgatcccaagaccggcaaactcaaactgtcgcacaaagtactcgttcccaagcccgaaggctatgtggagcgggaacgcaagccgcgcgacggcgaacgccgcccccaccgcgagccccgcgacaaataggcggcatttgtttcccataccgcttcggcatgtatttcaggcgcattttctctcgcagaaaagcgcctgaaatcttgcagaatcctaaagagtttcatatatttgcggcgaacgcgctccctcgcgcggagttacacggcaaggcaagcaaacgaaaacagtgaagtaaaacattttaaaccattttttgcatatgaaaaatctgatgaaactgagcatggtgctcgtgatcgccgcattggccttctcgagttgcaactgcttcaagaagatggccaagaatcgcgaggacatctcgtggaactgcacccccgaggtgctggtgctcaacaacggcatcgtcgccgctgacatcagcgtatcgttcccggccgaatactataacgccaaggcggtggtcaaggtcacacccgtcatggtattcgagggcggcgaaatcgccggcaccccgaaattctaccagggctcgaaggtggacgacaactatacggtcgtggacaagaagagcggcggcaagttcacccagcacgtcgagttcccttacgacgagcgcatggcgatctccgagctgcagcttcgtctggagatcaaatgcccgaagggcaaatgcaaggagttcacgctggtgaacgccaacacgggtgagatcgtgacggccgcccagatcgaggccgaccccgccatcgtgcgcgaatgcggcctggtggtcgccacgggtgtgaacaccctgcagcaggacctcaaatatgcggacgccatgctggggatgcccaacgactacaagcgcgtgaccaccgaggtggacaagaccgaaatcctctacccgatcaacagctcgaacgcaagccagaaggccatcaagagcgccgacctcaacgcattcaagcagaacgtggatgagaacctgcagaacgaccgcgccacgcagcatctggccgtgaagggctacgcttcgcccgacggaccggtactgttcaatgacaagctctccaaagcccgcagcgaatcgggcaggaaaaccgtcgccaagatcctcaaggacgccggtctggaaatcgacgctgaggcttacggcgaggactgggaaggtttcaaggagatggttatcgcttccgacatcaaggacaagaacctgatcctccaggtgctgagcatgtatgattcgtcggctcagcgcgagagcgaaatcaagaacatggcatccgtcttcgacgagctcaagacgggcatcctgcccaaactccgccgctcgatgatcgtaaacagcaccgacctgcagggcaagaccgacgaggagatgatggctctggtaaaccagaacaaactgggcgacctgacgcaggaggagctcctcttcgtcgccgagtcggttgccaaggacaacgccgtgcgcgcacaggtgctcgaatacgccgctcagaagtacaacgatgcccgcgcctacaataacctgggtgtcgtttacgcccagatgggccgtgatgccgagtcgctcgccgcattcgagaaagccgccaaagccggcgccgccaccgacgcgatcaataacaacctcgcactggccaacctggccaacggcaacgtagccgaggccgggaaatatgcgaaagccgccaacgccgagacccgcagcctgatcgaggcagccgagggcaactacaacgaggcctcccgccagctcaaggggtataacgccgccgttgccagcacgctcaacaacgactacgccgccgcgaagaaagccatcgcccaggatacctcggccgatgccgattacctccgcgccgtaatcgcctccaacgaaggcgacctgaagaccgccgaggcacagctccgcagcgccatctcgaaagacgcacgcctggccaagaaagcggcccgcgacgccaacctgaaagcgcttcgcgacaacggcttccggttctaagaccgcaaccacacggctgcggccggcaagcccggtcggaagtccgaaaagcagaaaagcacaccgaaacggtgtgcttttctgcttttcggctgcggtcgaaattatccgcctccgtcggcgggtctctcgaccggaactccgtccgtatcgcccggaagagctccgccctttccgcaccgcacagtgccgggtcttcccgcaacaaaccactccagccgcaccgggctataccggatgatcgtaccggaatgaaccggactgtaccggactgttcaagagtgtaccagaccggtccggtatgcaatatggaatcccattcatcggcccgcaatgtaacgaaaccccggcggacgcacaagtcattcgccggggttgaaccattcgagtcgggataggggtcacggacaaagcgtcgtgacaccgccgcgctaccggttcaggatttcgtgtcgcacacacattcgcatgcggctccctttttcccggaccccttgtcggcccgctgggaggcgagcgccttgtccagctcgatttcaaaatccgacaatacgttcatgtagttgataaacgcatcgtaggatgagtcgtagggattgaaataggagtgcacatccccgtccgaaagccatttggtcgccatgtaatagaaatggtcggaggtctgcatgaaccgccaaacgtagtcgaaatcgggattgcgcagcgcctccaccttcgctttctgggcatagagcttccggaacgcttcgttctgcaactcgttgccgagccaggccgtcacgtcgcgctcctcatcggcccacgacatcacatgcggacaatggagcaccgcgaccggctgatgcctgagggccgtttcgctcacggtggcgaactccagcccgccgctcgcgagagccgcctcgggaagcgctttcatgaactcgaaaatacccgtgtcggcatgctgatgttcgccgaacgtttcgtagtccataaacagattgaccacctcgcccggcgtttcgtccgaggcgagccagcccgcatatttcccggccgtcaggggccactcctcccaaccgcggttcgagaatcggaaagcgatatcgtccgacagtttgtaattgcgcagcagcagccgcagcttctggtcgatcgcgttggtgtacacgtagtcgggcgacttccagccgagcacgtgacgggctccctcggccagcatcgtgcggaaacccatctctgccacggtggcgccgatctgatcggaatagatgagctccgtattgcggaaagccgtcgggcgcaggccgaactccttgtggatcatcgtgcaatggagcttcacctgctcggtaaaatcctcttttgaagcaagcgaggcgagcgaatgggagtaggtctctcccagaaactccacgtaacccgtggccgccagctcgcggaacgagtcgagcacctcgggcgcataggcccgcatctgctcgacgacgatccccgtcagcgagaaggaacagcggaaacgtccctcgtagcggcgcagcaggtcgagcaacagcgtattcatgggcaggtagcactcccgcgccacctgctgcatgatcgaacggttcagcaggtcgtcgagatagtagtggtccttccccatgttgaagaaacgatacctcttcagacgccagggctggtgcacctgaaaatagagacagactgttttcataatatcggtatttattcttgattgcgttcgttggcagcgacgacctgctcgtaaacctgcctgattttcgccgccgcattgttccatttcagtccggtcacctcctcgtgcccctttttggcgaacatgcgtgcgagcgcgggataggtaatcaacccgtagatcgcatccgccagcgcgtccacatcccagtaatcgaccttgagcgcatagtcgagcacctcggccacgccgctctgcttggagatgatcaccggcacgttggagcgcatcgcctcgaggggcgaaatgccgaacggctccgaaaccgagggcatcacatagacgtccgagagctggaacatgcggttcacatcctccccgcgcaggaatcccgtgaaatggaagcggtcggcaatccccagccgggccacccggcggatcacatggttcatcatatcgcccgacccggccattacgaagcgcacgcccggcacccgcttgagcaccttggccgcggcctccacgaagtagtcgggtcctttctggtaggtgatgcggcccaggaacgtgaccaccttgtcctcgaccccgcgttcgggcggcagctccccttttccgggaaagcgcacggcgttgtgcacggtcaccaccttatcggcggggatgccgtatttctggatcacgatattgcgcgtaaggttcgacacggcgatcaccttgtcggcagcctccatgcccgctttctcgatggcatacacctgcgtattgacgttctcgccgctgcggtcgtactccgtcgcgtgcatatgcaccaccaacggtttgcccgagacccgcttggcggcgatcccggcgaaataggtcagccagtcgtgggcatggatcacgtcgaactgcccctccagttcgcgggcaacctcggccgcgaccatcgcatagcgggccacctcctccatcagattggctccgtacttgcccgaaaaggtataacgctgtttccacacgtcggtcgtctgccactgtttgcgccccgaatgcacaaactcctcgcggtaggaggcatactcctcgggcgaaatgtagggcaccatgttcgagtcgatatggatgaaggacatcttgttcacgatatcctcgccgccctgctccgtaatcgtgtagagcgtctccacgtcgcttgcattgaccacccgggcgaaacgctggtcctcatccccataggcccggggcaccacgaagatcacctccacgtcgttgcgtgccaggccgcgcgtcatcccgtagcaggccgtacccagcccgccggcgatatgagggggaaactcccagccgaacatcaaaactctcatcggttattgcttttttattgttttcacccgcctgcgtgcctcggcatgccgtgccgcgggacgcttggccgctgcccgtgcacaggcgcaaggctcccgtcctgcggcggactccgccttcttcggagtacccacacgtttgccggctccgtttttcgtctccactcccgccccggtcggttttccgggcaggtcgctccggttccctccgacagccgcatcgctctgcgcagcagccgcgtgcgggagcagttcatccgccaccgccttcatatcggccgcgagattcgcagcctgcgtgtcggtcagggccgcacggttctccgcgagggaaccataccgctcgatcagccggtgaatacccaacaccgcccccacgctccaggcctgggagatggctccgcgcggggtaaacggcgggtcggcatcgtaaagctcattgaccgagccgatcccgtaggtctggatatcctcgtcgaaaccggccagaatctcctcggcttcgaccaggaagctgcgcccgcccagatcgaacgccgccttgacatagaaccaaagaggccagacccagaccgctccgttcatcgactcgatctcgcgggcgcgcggaccgccctccacccggctttcgtaaagcggattgcggggcgacaggctccgcagccccttgggggtaagcagatgttggcgcaccgtgcgaaccacgtcggcgcggtgctgctcgtcgagcatcgtaaagtccaacccgcaggcgacaatcatattggggcggatgaagcggttggctccctgttcgtccacatagtcggccaggtaacgctcgtcctcgatccagaacttgtcgagaaaactccgccgcgtccgctcgggcagctcccgccacccggcggcgaacgcctcgtccccaaaccgctccgccagccggagtgcatagcataccgcattgtaccacaaggcgtttatttctaccgcatagccgctgcgcggcgtcacgggagccccgtccaccatcgtatccatccacgtcagcgcccggcccggcacggcggtacgaatcaatccgtcggcctgcaattcgatgccctcgacgccgcggcgataggcggcgagcacctgtttcatcgcctcgccgtaacgtctccagaccgtctcttcgcccacctcctcggcgagtcgctgcagcgtccagaaaaaccacaggggcgcgtcggccgcctcctgcatggagaaggtacccgtaaacatcccgtcacgcatcccccgcacgatcgtatcgagcgcatccatgcagtcctccttatgcccctgttcgagcgtgatgcccggcagggccacgagcgtctgtcgcccgatctccccgaaccaggggtagccggcgatgacctcggtgcggtccccggaccgccggattacgaactgccgcgccgagtggtgcatgcagctcaggaagtcgatcttgtgggtgcggcgggcgatcgatgcgtcgaacgcctcgcggatcgcgccgggagagtccatcggggcgaccgaagccgagaaaacgatgctttcgcccttgcggatcgtcgtttcaaaatagccggtggtcagcagatcctcgtacccttcataaccgcgccgcagctcctcggggtactcgaagccgtaccaccagtcgggcgcgggaacgaactccgccccatccttgtcgatctggaggtaaagccacggaaacgtccggtagagacggcacctcacgcctcccggaacgggccacgagcggccgtcggcctccatgttggcgtgggagagggcgtgtttgtcgcggaaggcgaagaacgggcgcaacctgagcgtggtttccgagtgggcgtccagaagggtatagcggatcatcagttgcgtccgcttgtggatccacagcagctctttgcgcaggatcaccccgcccacacggtaggtgatcgtcggggtgggcgtgtattcaaagtcggtgatgtacttatgaccccggggctcgtaaacccctttgaaccgatgcagcgcgaggttgaacgactggtcgtgctgcacgacggtctcgtcgagcgacgaaagcagcacataggagcggtcgctgtcgtcgatgggcgcgaccatcaggccgtggtacttgcgcgtattgcagcacacgatggtcgtggacatgtagccgccccgacggtcggtggcgagcatctcgcgctggagcgcgtattccaggttgctcagttcgcttttgtcgaaagtaagtactgacatgactcttacactattttacgcttttaaagttacgaattttcagccggaaacggtaactccggaacaaaaaattacgtcgcaaatccggtccgttacgcccacttgaccagcgcgaaatccatgcggtgcggcagccgtgggttgctggggaagatgcgcagggccacgtcgaacgttccggcgcggtcgggcctgtaatcgagggcataggtcaccaggctcccttcggcggcgatctccttcatacggatggtctccaccacattgaccgcctgccccttctcgatctggcgggcgatcaccagctcggcgccgatatccgacggctcgagccccgcgacgttcaccgtcacctcgaaatggtagttcgatccgacgaaaatcgcctcgttgtcgatcttcacccgctgcacgtccaccacgcgcacgccgtcccaggccgccgacaccttgcgtttccaggccgcgatctcgcgggcgagcatgtagtcccccgccgtgatctcacgcttgcgggccgccagcttgtcgtagaacctctgctggtaatcgcgcagcatccggttggtggtgaaccgcgaggcgatatccgccacgcagctcttgaccgacgccacccactcgtgcggcacgccgtcggcgccccggttgtagtatttcggcacgatctgctcctcgatcgtgttgtaaatcaattctgcatccagttcgtcctggaaatgctggtcggagaaggtgcgcttcatcggcagggcccatccggccccctcgcgatacccttcgacccaccagccgtcgagcaccgagaactgaagcacgccgttcatcacgcacttctcgcccgacgtccccgaagcctccagcggccgggtgggggtgttgagccacacatccacgccctgcaccatgcgacgggcgagctccatatcgtagttttgcaggaagatgatcttccccacgaactgcggcatggccgccacctcgacgatgcgccggataagatcctgacccggctggtcgttgggatgggccttgcccgcgaagataaactgcacgggacgctcgcggtcgttcacgatcgcggcaaggcggtcgaggttggtaaagagcaggtaggcccgcttgtaggtggcgaaccggcgcgcgaagccgatggtgagtacgtcgggcttgatgccgtcgatgatctgcaccatctgacggggcgagtcgagccgcacctggctggggtcgctgaagcgcttgcggatatgacggatcaacttgttcttaaggaacatgcgttcgtcccacagctcccggtccgaaatatcgcgcaccttctgccactcctcgatgcgataatcgtgcccctcgaacccggccgggaaataccgggcatagagccggcgcagacgcgaagccgtccaggtggggaagtgcacgccgttggtgacatagccgatatggagttcgttcttgaagtatccgggccacatgttgcccaggatctctttggatacctcgccgtggagccacgacacgccgttgacctcctgcgaaagattgcaggccagcaccgacatcgaaaatttctcgttcggatcgttggggttggtcttgcccaggttgatgaactgctcccacgtgatgcccagcacatcggggtaatgggccatatactgccggatcatcgactcggggaatgcgtcgtggccggccggcacgggggtatgggtcgtaaagagcgacgacgagcggatcacctcgagcgcctcggagaaggtgagcttcttgcggcttacgaggttgcggatgcggtcgatcccgatgaaggccgcatgcccttcgttgcagtgatagacgtcctgccggatattgagagctctcagggcgcggatgccgccgatgccgagcaggatttcctgcttcagccggttttcccagtcgccgccgtagaggtagtaggtgatctgccggtcctcttcgaggttggcctcgaagtcggcgtcgagcaggtagaggtcggtgcgtcccacctgacaaagccatacgcgggccgaaagggtacggcccgggaaggcgatcgagatgctcacccagttcccgtcggcgtcgcgcacgggcgagatgggcagcttgtagaagttctgcgcctcgtaggtcgcctcctgtgccccctgcgccgaaagccgctgggtaaagtagccgtagcgatacagcaggccgacggccaccatcggcacattcttgtccgacgcctccttgaggtagtcgcccgccaggatgcccaggccgcccgagtagatcttgagcgacgagtggaggccgtactccatcgagaagtaggcgatcttcggcgtcgcgggatcgggtttctcggacatgtagtcgcggaactgggcatataccccgtccatcgcctgcaggaaatgggcgtcttcgaccagctcgccgatccgctccacggagagcttgtccagaaacgcgatcgggttgcgttcgctctcggcccacaagtcggcgtcgatggcctcgaacaggtcgcgagcgcccggattccagcaccaccagaggttgcgcgaaagctcttcgagagggcgcaaccgcgcgggaaggctcttttcgaccatcatccggttccagttgggccgctcgggaacaagctgctgccgcacgaagttgatctgctcgttgtaggcgcctccgccgtcgagcaccgcccggttggttcgggatatggagttctgaatggcgtcggagtaggcctgttcgtaagccccgaaaaggtgctcccacagcgccgtgagggatatttcataggccgagcggcgcacttcggcgacctgctttccctccagcagcgcgaagcgcagcagtgcggcggcgatctgcgcggcggcctcgccgccgttgtagtcgtcgcggcgaatcacctccacgcccggacgggctccgagcttgttcacccacagcccgaatcccgcgagcgtcgtggtgatggtcggcaccgagaaagccaccgattccaacggcgtatatccccacggttcgtagtaggaggcgaaaaccgtcacgtccatgcccgctagcagctcgtaataggtcttgtcgaagatgccgtccgtaccgttcaggtaggtcggaacgaagatcacgcgcaccttcgatcctgccttgtcgagcacgctccctccgaccgcacgcacgatgggatcgccgcccgggttttcgaggtagtgggtcacataggggagctgcgccgcatcgaccggccgcgacgggtcttgcagatgggcctgcaaatcggcgcgggggccgttgttggccgccggcacggtgataaaggccagcacatcgcgtccgagccggtccgacgccgcgagcgccttgagcgaatccagaaagacgtcgagccccttgttgtgaaactcgtaacggccgctggttcccacgatcaggggctcctgcgcgtacttctgccccagacaggcctccgccacggtaatcatcgcacggcgggcgtcggcacgacgccggtcgaactccgcacccgtccacacgaagccgttgtcgaagccgttgggggtcacgccgtccacctccctgcccagcaggaatttgcactcgttggccgtgatgtcgctcaccgtcaggaacgcatcgtggtaggtggccgccatcttctcgatcgaatgtttggccaccacattgtagcggcgggccaggtcgtcggcgttcagacgcggcagatcgtcgtaaagcggcaggcagtttccggcgatgcagcggcccatcacggtggcatgggtggtgaacacggtggcgatgtagggggagttcctgcgcaggtacaatccgcccgccgcggtcatccattcgtggaagtgggcggccactttgtccgaagaggcgcagaaattctccacataggaggcgatcaccatgcctgcggcatagccgaacagcaccggctcgatgtagtcccactgcccggagatcgaatcgacgcggtagtcctcccacagtcttttgaggatttcgtccttgcgcgaaaagagcgaggtgaagtccaccagcaccaccagcggcgaaccctcgattttccagtggccgacccgtatgcggatgccctcttcatagaggctctgacgccacatgcgcagcaggccggtgtcctcctcgaattcgggattcaccccttcgtgcgagaggtcgggcccgatgagcacgtaacgctcccccaaagtccgggttacggtcggtgccttcgtggcaatgacggtatggatgccgccgaccttattgcagacctcccaactcacctcgaataggtagtcgggcgtcatttttacttcgttcataactatcgtcgtgattaatattatcctaacccgtccggaatacgggacttccggatcggctgcaaagttaccgcatccgggcggcaaatccaatttatcccggatattttgtaaaataatttaataataaattaacatcgcctcacccggtcagctccccgctgcctcacacctcgaaaaagcgttcgatcacactgtccgacagcagaaaacgctcggccggtatcgccagccgcactccgtgccggaccagcagccccgcagcttccagcggcccggcttcctgcaggaaacgttcccgcctccgttcgccgaaaagcgctccgatccggtcgggatcgaccccctcggccgtgcgcagcccggtcatcacacattcgttgtagcggtcgcgctcgctcagccactccgatccgtacagcgcatcggtgccggccagccgcaggtactcctctaacgatgcgacgccccaccgtcgtatgccccgggcgaaagagtgggccgaaggaccgatacccaggtactcgtcgcccgtccagtaggccgaattatgccgggcccggaatccctcgcgggcgtagttcgacacctcgtaatggcagtaccccgccgtcgtgagggtttcgtgcaccagggcatattcccgttcgctcgtccgctcgtccacaggcccgaaggtgccgcgtgccgcccggcggccgaaagcggtcgccggttcgatcgtcaaatggtatgccgaaatatgaccgggagcaagcccgacggccttttcgaggctctgcctgagactcggttccccgaacccgggaatgccgaaaatcaggtcgagggtcacgttccggaatcccgcctcctgcgcacgccgaagggcctgttcggcctgggccgccgtatgacgccggttcatcaggcgaagggccccgtcgtcgaacgattgcaccccgacgctcaggcggtcgatctccgtgcgagcgagggcctcgaggtaggctccgtcgaggtcgtcgggattggcctccacggtgcgctcctcgaccgcggaacagtcgagcagcgcggcggcatgatccatgagctcctgcagccgtgcggggggcagcagcgacggcgtgccgcctccgaaatagattgtccgcacatgccgatccgaaaggaagggtgcggcggcctccaactcgcggtgcatcgcttcgacgagcgcgtcgctccgccccagctcgacgctgtggaaaaagtcgcagtaggcgcagagacgtttgcagaaagggatatggaaatagaggccggccatcgttcgtttcgttccgtctcaaaagtacacattccccggcggaaacggagcgccggggccgaaaatttttcaacccactcgcatggaacgcatccccgctccgccaccgttcccgaaaccggccgccggacagcgacccggcatcggcctcgacagggcttacgcacgcgaaagcacagggcgggcgattaggataaatgcgcccgattcgctatctttgcccgggaccgaaacaccttaccgatgaaacacatcctcctgattgtcctcgccgcactgacgctgcatacgctgtcggccgccgagccggccgcgtgcgggcgcgaaacctacccgctcgacggcggatggcacttcagcttccgcacggagaacagcagcgacaacgcacggatcgtcaccctgccccacacgtggaataccgacccgcgcgccgacgaccgcaattttctgcgcacggaggccaattacgtccgtaaaatccgggtgcccgcctcctggcagggccggcggctcttcgtccgctgccacggcgccgaaaccgtcgccgacctcttcgtcaatggccggcatgcgggcgagcaccgcggaggccgcacggccttcaccttcgaggtgaccgacctcatccgtttcggcgccgacaacacgctgcaattcgcagtcagcaacgcctttcggaacgacgtgctgcccacctcgtccgatttcaacccctatggaggcctcacgcgcggcgtcgagctcatcgccacgccccgcacggctgtaaacccctgctactacgggacggacggcatcgtcgtgcggccccgcatggttacggccgaccgcgtggagggcgagctggaggtgcatctggccgctgccgccggaaccgcatgccgcctgaccgcggaatttttcgcacccgacggcacgccggccctcagccgggaacagcgggtaaaagccgacggcaaacccatcacggtgcccttcgcgctggagaatccccggctctggagcctctccgacccggcgctctatacagtcagggtgagcgtggaagagggtgcggcgtgcgacgaagtgcgtctcgaaacgggcttccgcagcgtggcggtcacagcggacggaggcctttcgatcaacggcgagcgggttttcgtgcgggggctttcgctggcctacgaccgggccgaccatgccggggccctgaccgccgaggattacacggccgactatgccctgctgcgggagacgggagccaatgccctgcgctcacccgccgggcctcatgccgacgcgctgtacgacctgtgcgacagggagggtacgctggtctggatcggcctgccgtttctgcgcgccccatttctgagcgacatctgttactaccccaccgagcggttccgcgaaaacggccgccggcaactgcgcgaaatgatcgcccagcatatcaaccgcccctcggtagttatgtgggggcttttcaccgacctgtggcagcggggcgacgacatggaaagctacctgaaggagcttcaacacatagccgccgaaagcgaccccgcacggccgaccgcggcatgcagcgaccaggacggaagcatcaacttcatcaccgacctgatcgtctggcagcaggacgtgggctgggagcgcggccgcacggaggacgtggccgtatggagcagcctgctgcaccgcaactggagccgcctgcgctcggccgtctgctacggcgcaccgggaagctgctcccagcagagcctccggcccgaccgaccggcacgagccgaccgcctacccgaaagccgtcaaacccgctttcacgaggagtatgcccgccatctggcacaggactcgctcttctggggcgtctggatcgaccagttggccgactatggctcctcgcgccgaccctacggggtgaatgcccgcggcctggtggggctcgaccggtgcgaacgcaaggatgcgttctatctctacaaggcgttgtggaaccgggaaatcccgacgctgcacatcgccgaacggcgtctgcgcgaccgggacggcggcgcgcagagcgtgcggatctactcctccacgggcaagccggtcgtgcacgtaaacggggacacggtcgcggtgcgggcctacgccccctgccagtaccggaccgactcgctgcgcgtagcaggacccgtcacggtggtcgcgacagccggcacgctccgcgacagcatccgctttaccgcaggcaaccccttaagaacggccccgccgagggaccttccgcgaacaggaggtcgatgaccgaaaggttccccacgaagggcatccggtcggaaaagagctggaaatagggctcggccacaaaagccgggcctttttcatcggcccctgcgaatccggtcgcaccgggcggcacgcccccttccccgtttgccgcacccatgcgggcacatcctgccgccttccgctcccgctcccgcgagcgcaggtccaggtcgtccggccccgccacgatgtaacgctgcgcgagcgcgggcatgggcacgtcgcccagcaagcggagcaacagggccgtcagctccaggtcgtaatccgccagaaattcgtaacgccggcggtagaaaggctccagctcgccggcatagtggtcgaaaaagggggaggagcggtaggccgagacgagcgcgacccaatgccggtgctgccaccgtttggagtagtcgatccgcatatcccgcacgggcgtgccgggatggttggcgcggcagagctgcacactcaggtccatcgggccgttggccgtgagaatccgggcgcggttgcgctgcgaccgcttgacataatgttcgcccaggtcgatcgtgcagcctcccgcaaggatgcgggcgaaatattcgaccgagcccaggtaggcgacaggcaggatggtcattgcgcggagttttggggttctgcggccgtcccgtcgtcgggactttccgcacgggccgggacatccgtccagtcgccgttcgcccggatcagggcctcgagccggtcgatcgcctcgtgttgcggaatgttgcgttcgacgaccgtgcgccccttatagagggtgatgcgcccgggagccgcccccacgtagccgtaatcggcgtcggccatctcgccggggccgttgacgatgcagcccatcaccccgatacgcaggtttttcagatgccccgtgcgttccttgatgcgggcgagcgtcccctccaggtcgtaaagcgtacggccgcagccgggacaggcgatgtattcggtgcggctgaaacgcacgcgtgccgcctgcaggatcatccgctccacctcctccagctccccctccccgaaccggggagcgacgatacggatgccgtcggccagcccgtccaggaacagcggcccgaggtcggccgccgcctttaccgccagcgtctcgagcgaagattcgcagtagcggcagctcacagcggccggacagcccggctccaggtcgagcagcgcggcccgcagctcggcggtcggattttttgaacaggcctccagcacgggcatatcggccggaagctcgctgcgcgtcagcggcacctgaacggcgctgcgacggcggaattcatagggagagaaccgctcgggatggcggacggggaaccggcccggccgctcggcgaaatggtccgccagcagccgcgcgacggggatctcgcgctcgggggcttcggtcagcgaaacgcggatcgtgtctccgatgccgtcggcgagcagcgccccgattcccacggcgctcttgatgcgcccctccagtccgcttcccgcctcggtaacgcccagatgcaggggatagtccatcccctcgcgggccatctcgtcggccagcagccggtaggccgccaccatcacccgcgtgttgctcgacttcatcgagaccaccacccggtcgaagtccagctcccggcagcggcgcaggaactccatcgccgacaccaccatgccgcgcggcgtatcgccccattcgtccacgatgcggcgggcgagcgagccgtggttcaccccgatgcgcagggccacaccccgctcgcggcagcgggcgatcagcttctcgaacgcgccgtcccggtcggcatagttgcccggattgatgcgcaccttgtccgcataggacgccgccgtcagagccacgtcggggagaaaatggacgtcggcgaccacggccgtatcgtaaccgtcggcccgcagacgggcgacgataggcccgaggttctcggcctcgcgccgtccctgcgtggtcaggcgcaccacggagcagcccgcatcggcgatccgctcgatctgcgccacgctcgccgcggtatcgttggtatccgtattggtcatcgactgcaccgccaccggccggccgccgccgatcaccacaggcccgacaggtacctcgcgggtcttgcggcggatgtattgcgaaagttccatatccgaaagttttatgcctcaaagataacaatttggattttcaaattattcaacttatctttgaaaaacaaaccaccgtatttaacccaaaccaaatcatcccgttatgaaaagccgacttatcctgctgctgctcgccctgctgggcatgggagcctgtggcggcgaatccctggacgaatacggctcgccgacggccgactttgaaatcaagggcaacgtgaccgacccccagggcaatcccgtcccgaacattcgggtcgcagagacgggagattacggaaacttcaacgaaacccgctcggacagcaaagggtattatacgaccgaatggaaaggcggctactccagggggacttatacatttagtttcaccgatacggacgggccgctgaacggaggcgatttcaccgaacgcattgtggaggtgaccttcaagaatgccgacctgatctcacccggatcgggatggtatgaaggtgtttactccaaaaccgtcgatgtgacgctcaccccgaaggaggacgactgacccggccgagaaccgcaccatgcttcatccggccggacgaggcgtccgcggaatcggacacccgaaccggcccgacggacaactctcttataaaacgctctgttatgaaaaaccgattgatttggctgcttctctcgctgctcggcatggccgcggggtgcagcaacaacgacaagctcgttcctgtggaatacggttgcccgcacgccgattacgagatcaagggccgcgtaacggacccggacggcaatccgatccgcgccattgaaatcaccaccgacgaactccccgtcgcttactcctcggcaaccggagattaccggctcaaaggcacggcatttccgggcgacatgcggattcgcttcaccgacacggacggccccgacaacggaggaagtttcgccgaacgcacggtggtggtgaccttcaccggggaggactgcatcgaaccgggcgacggcagatggtatgacggcgccttcttcaaggaggtggacgtgcagctcgatcccgaaacggagccatgagcagacgcctgaccctgcgcaagcgggcggggctggaactgttccgccgccttcaggccgagcgcatcgcacaccacgagctgcataccctcttctgggagtgtacgctgcgctgcaacctgcactgccgtcactgcggcagcgattgcctgagctcctccgtgcagcccgacatgcccgcctcggacttcttccgcacgctcgacacgcagatcacgccccacgtcgatacccaccgggtgctggtgatcctgtcgggaggcgaggtactcgtgcgccccgacctggaccggatcggattggagctctaccgccgcgagtatccgtggggcatggtaaccaacggccttgcactcgacgaaaagcgcttcgaccgcctgctgcgggccggactccactccatcaccgtcagtctcgacggcttccgcgaggaccacaactacctgcgcggcagcgaaaagagttacgacgcagccttgcgggccgtgcgcctcacggcacacgaaccctcgatcgcctcggacgtggtgacctgcgtgacggcccgctcgctcgggcggctgcccgagttccgggaaatgctgatcgccgagggggtacgttcgtggcggcttttcaccatcttcccgctcggccgcgcggcgcaggatccctcgttacagctcgacgacgagcagtttacccggctgatggaatttatcggcgacacccgcagggaggggcgcatccgcgccagctacggctgcgagggctttctcggcggttacgagacggaggtgcgggacaatttctaccaatgcaacgccggcgtctccgtggcttcgatccgcgtggacggcgccatctcgggctgcacctcgatccgtgcggattataatcagggcaacatctaccgcgacgacttctgggaggtgtggcaaaaccgcttcgtcccgttccgcaagcgggaatgggcccgccgggacgactgcgccgactgcgcgatgttccgctactgtctgggcgggggcatgcacctgcacgacggcgacggacgcctgctgctttgtcattacaaacgcctgacacgataggcgatccttgcggctccccgtttagcggcctatccaccttccgctcccgtccggcctccaccgattccgccgcgaacacgcggacggcgcaaacggcgcccggacacaaaccgaatcagacggatacaaaaacgcctgcggaaacaaatccgcaggcgtccttacatttgcaccagcttattcataaggattcaccaaagttccgctgtaacttcccgtgatgcggtgcccgctcggactgtcatcgaccagatcccaggtgatgtcgtactcgtatcctcccttatggttcaccgtgaccgtccccgatttgacgaatccgaacgatacgtcatatatttcgaggaacgtaccataattatcgccaaattcatcgatcaatccgggcctaatcgcaaccggatcgggcgtataggtagtcggatccggattgctctcgatcgtgaacgtacccgaaggaatggcgcccccggtatccaagccggtgtaaaaatcgagctggagcgacatctcgtcgtttgagaagatgacatcaaacagattcatcccctcgtaatactcttccatatcgtaaaaatcggcataggtaatatcctcgggtcgcatcgtcacatcgtgagtcagggtcgagaaataatccacagggtcgggaggcgtcgcctgcgaggtcatcgggatcgtgcccgtataggtcgctttgaccggcaaatccttgtcggaaaccgcatcgagcgtaatggtatagttgtcacccgaccgggaaacggtcatcgtaccgtcgctgaggtagttgcgctcgggtcgtccgacattccacttggtcgcgatcgacccgatgggttgattgttcccgtccttgccgccgcgcatcagggtcttgatcgcgaaggtgttgttgaatgtatattccccttcggtcagggccgcctgctcaaaggaatcgaacggctcgccgaagaaaaccaggtcgatcagcgtgccggagccggacggagtgccgctttccgtaagcgacacatcccgtatctgcatggaccacacgctggtgcccatgccgtacagatcgccctgccatacggcctcggcctccgtgcaggtcacatcgagaccctgcggaatatccttgttcacgaacggcatctcgccttcgtaggtgaaacggatcttttcgtcctcggtcgtggtgaaatcggcggtcatcgtgtaaatattccccgaatgggcgaagacgatcgatccgtcgatgaatttgagcgcctcataattctcgatcgcacagaaggtcggccctccgcgccccatcgcttcgttcacgaagaacgtcccccgcgtcttttccacattcgagtacacgtaggttccgtcgggaagcaccggattcaggatgtcggcgggcagttcgctgtacaggtccaccatcagcacgtagttgtcgcttccattggccgggaagccgttttcatccacctcgccgcgcgccaggttgaaatagaaattaccggtgttttcatagtcgtcctcgctgtagtagtaagcaagaagcgtattttccaactcgacgacgcgaacgggcggctcgtcgggcaacgtcgtggtgagcagcagttttttcacctcgctcatcgtctccccgttcgctgccacggcataaaccgcataggcggtattcggggtcaggttatcgaccggcacctccgtcggcttatccgcagccaccggggtgccttcagcaaacagcgtcgccgcatcgggagccgccgccgtctgcagcagcacccgataggcacaacgatccgcgtccgtaggggtgacggtaaacgtaatcgtccggtcggtcgccgttccgccgctaagcgttacggaaggaacaggttggggaggcgtcggaggggtatcttcgtcgtccccgcatgccgtgcagcacatgagtgccgtcacagcggctaacatccataagtaatattttttcatggcatgaaatgttttgattccgcccgcggaaccgattgactttccggtttgcagccggttctccattccggcccgggcttgccgcccgcccgccgaagcggacggagcagttgccggaacgaagaccggtcatcat

SEQ ID NO: 139 - DNA, 27067 bp, unidentified
  source 1..27067: mol_type = unassigned DNA
taagagagccaatggattcaactatacctgcggttttcaggctgggctgaatcagaagtggacagtggtttccgtcaatcgtattttgaaaaatgaatcctatacgggaacattgattcagggtaaacgcaggaaaatcaattacaaagtaaaaaagagccatgatgttggaagtgaaaactggattcgggtggaagatgcgcatgatgccattatcagcaaaggcgagttccagcaagtacaacagttgttggaactggacactcgtaccgcaccatcgcagacaacagtttatccattatcaggttttctgcgctgtgcagactgcgggcagaatatgattcgccgcacggtgacgaaaaacggaaagaagtatcaatactatcactgctctacctataagaatggcggcggctgcacaccgcacatgataaacagtgagaagctgacggaaagcgttctggctgcgattcggcatcaagtgacacttcttgtagaagcggaaaaggtactctccaatgcagagttggcaagcggcgaacagattggaataaagattctggacagccagatcactgcactggaagctgaattagagcggtacagtaatttgaaaatccgtctgtatcaggacttatgcgatgatgttgtcagtcgggaagagtacggagaaatgaatactcgctttgcgcagaagataaaagaggcgcaggataagattcaggaaatccgcgaaaagaagcaggaggcattaaagcacgacacactgcttcctacttggttggaagaatttaagcaatacgaacatatcaaaacgctcgaacgtagggtcgtggtggaactgatcgaccacatagatgttcatagcaaaacagagattgaaattcatttttgcttcgaggatgaactgcacagtatcacagaaaaatttatggaatatcaagcacatcatggaaatgaggtggcagaggaatgaaatgggtcagttatacaaggtcgatttccagcaggatcggagaagaaaatccatccaatacgattgcggagcagaatgagcgaattgcacggtatctaaaaaagcttgggtgcaacgtatccgaaaaatacagtgaccgaaagagagcagcagaagccacagagggctttgacaaattggtacaggatgggatggcgcggaaatttgatgcagttgttgtggattctatcttccgctgtggaagaactcttccgtttgccattgaagcactgcagaggacgttctatccgcttggtatccaatttgcagttgtggaagatgacttttgcagtgcagacaaaactgccgaagaagttgcagagtatttcaatggaaagaccattgataagattcgttcggaatttattaccaatcgccagaatcactttgaagaaggtacattgacccatcgacaggctaaatatggttatgcgctgtcagaagatcgcagaaaccttgttcttaatcctgagagcgcacaggttgtaaagctgatttttcagatgtatctggaagatatgaaaatcccggaaatcgcaagagcattggaggcacagggcgttccatctccacaaatccagatggcaaagaaaaaaagatcaagaacaaaaatcaagtggccggattcaacaattcgctcgattttgaaaaatccactctatatcggaaagtgtacgctgacactggcaaaggcaaagcgagaattggaggttccggcgattgtttcaaagacggaatttcagaaagcccagaaaaagttggaatctacgaggttgccttcgagaaaaaaggcccgaaaaaaaccaaatctgctcttcaaaaaaatctatgacaaagaaagcggaaaaggactgctgtgcagaacatcagaagatgaaagccagcaaatctattcgtttgacaaggggtatagatgcttctctggaaaagcccctttcatcgaaagcgaaaaaatctttcgagagattctttcagctttggaaaaagaaaaaatgcaagctgcgcgtattgatagggtgctggacttgaatcctgagaaagtcaagcagtgcatggatgctggactgttgcagtacagaaaaagagcaaatgagatcgttgcgcacttgatggccaaggacgatgaacgaacagcagtttatcggaaatacgagcagggattaatttcgctagaacaggtagaggagtatgaacatcagtatcaggtggcagtccagaagcaggaaacggcctttaaaaaagtaatgctggctgttaatgacatagaaaaagcatttagccatgggaatccctggttgatgaagttccgagcgatttcaattcctgaaacgctggagcgcgcacatcttaaagaatggcttgaccatgtatggatcgtagattttgaacgggtagaagtgatcctacaagaaagtgagtggaagagattcttcccggaagaatggctgaacaacggagaggaagattgtaatggcaagaaagagtagaaagaatatgatgccgcaggccgctgtgcaggaggccgtacagcaaaacgaaaaagaacttctgcgcacggcagcgtatgcgcggctgtcggttgagaacggcgggcatgaaacagaagattccctgcacacacagattttgcaaattcataattatattagggaaaacccggatctgacgctgaccgatacctatgcagacaacggtttttcgggaacacgttttgaccgaccagaatttgagcgtatgatgcaggatgtacggacaggcaaaattcagtgcatcgtagtgaaggacttatctcgatttggtcgtgactatatcgaaacgggaagctatctggaaactattttcccgatgctccatgttcgttttatcgccatcaacgatgattttgacaacatccggcagtcggatgtggatagtcttgcggttcccatcaagaacatggtaaacagcttgtacgctaaggatatttcaaagaaaatcagccttagttaccagatgcgccgcgaaaagggaatccctacatcgtggtgtacaccgtatggctatcagttgaaccagcagggaaataagtttgaagcgactgaggatgcaaagtgggtcaaactgatctatcaatggtatcttgcaggagtgagcacaaacgaaattgcccgcaggttggaatttttaggagtggcaaggccgaacgaacggctgaatcgcaaattgcatgagggagatgaccctacctataataaatggcatcccagtacggttcttcgtattttaaacagcagtgcttatattggagaactggtatctgggaaaacgcaaactgcatcatacaaagggattggcctccatcctgtggaaaagaaggaatggcatattgttgaaaacgctcatgaagcaatcattctgaaatcggattttgaaaaagtgcaggcacggcgggagcagaataaggaaaaacgggaaagggcgatggctcgttccaaggcaaccagagaaaagtgttataaccatctctcaggaatggtttactgtggctgctgcagacgcaacatgacgtttgaacggcgagtgcatggcacggtgaaagaaacgcactatggagtgttcatttgcaaaagaaagaagaacacgactccctgtgcctatcatgcggtgccggagaaaatgctgatgatggtggcgatggatcagattcatcatttggtgtctaccatgtgtgaagaagaaaagctggtaaaagacatgatgcgcagcagcaatctggattcggctcgttccatcaaaatgaaagaaaactctatcctgtttcggattcaggaagctgaagaacggcggttgcgcttatatgaggactataaagctgaaattctggacgaagatgaatacagtcagctaaaggaacactacatagcagaaaagcagcggttggaacatgaactgcaaaagcagcgtcaacgtgcattggaactggaaaaaagaatcaaaatctgcgatgcgcagatggagcggatgcgcgggattctgaatcaaaatgaatttgatgaagaactggtgcatgaacttatcaagagaatctatgtaggaatggacaattctgtggaggtcgaatttaagtgtagcgacccctatcaggaagtgcttgcaatcatgtcggaggttcagaatgaatgataaaattgcaatctatctccgcttatcattggcagacggagatttgaaaaagggcagcaaggatgaaagtaacagcattgagaaccaacggatgctgctccacgattacattgggaagcaggaagatttgtttggcgagattgtagaatatgtagatgatggctatactggaacaaattttaatcgtccggcttttcagaaaatgatcgtggatttgaagcagggcgatataaaagtcatcatggtaaaggatttatcccgccttggtcgtgactatatcggtgttggcgattacattgaacagatttttccgttgatgggagttcggtttattgctgtgaataattcctttgacagcatgaaactgaacaacggaacaccgggaatcgaagtggcggtcagcaatctggtgaataatatgtatagccgggatattgcgaaaaagattcgggctgctctggaaacgaactggaagaacgggaaagccacctgcacgaatgttccttttggatatgtgtggaacaagaaaggtgggcagcggtgggagattgacccggaggcagcaccctgcgtgaaaaaagtatttgaattagcattgtccggccgcaatacaacgcagatcgcctacggcatgaacgaattaaatcttcctacgccgggattgtatgcgaaacgaaagaatctgctgatgggcagcaatcctattattgccccggatagcgaaatgttatggaacgcagcgatcgtgtggagaatccttagacggtatgaatacactggtgcgctggttatggggagaagaaagaaaattgatgtgaatactacctctgttcggacgctcccggaggataagtggatcatcgcagaaaacgctcatgcggccatcgtgacaaaagatgaatactatcaggcacagaaagcaatccgtaacgtgactccaattcagtataaggtgggtgatgattttgcgttaaaaggaaaaatctgctgcggaaactgtaatcggcagcttcgccacgaaaggcaatatggggaaatggttttctattgcggctataaacggtcagccggaaagttctctaaatgctacggcggctattacagagaatattcggtgaacgcaaaagtggctcgtgcgataaaaacagtattctatgcgctggatgtggtaaatcagggaatgcagaaaaagcagtctatcacggtgcgctgcgtggacattgaggacttggaaaagcaagcagaagccattcgggtagagcaaatcaaactatatgaatcgtatgcggacggtgtgctgctgcgagatgcgtatatagaaaagaaaaaggctctttcggaaaaactggctgcattgcaggatagcatacggatagaaaaggaagaacaggagtgtgccgatgaattggatgaagaaatccgcgctctgacaaagcaggccagcgagaaaacgtacatcggtgggctgacaaaagaatgtgtggatgcttttgtcagcatggtttatctgtatgacgaccaaacgatgaaaatagagttcaactgtgaggatgtgattcggagagcgttggaaaagtatggcgcataattggatggaagaagcggcataagaaaaagaatacccgtctgggtgagaggattcaggaaatcttctcgaccaggcgggtgtttcattccgcaggaatgtgtctattagaggctgagggtttctacccatgcggacaagtcggctttgctggaataggaattgaataccttaccatgcagcagctttgcaccggggcagctcggcgcaagtttttcgttggtcttacccatgtcgctgccgccagatgtggcaaagggaatgattgttttacccttcaaatcatagctttccagaaatgtattgataatggtgggagcaacataccaccagatggggaatccgacaaagatggtgtcgtattcgtccatgttatcacgcttggcagcgatggcagggcgagaggtaggatcgctcatttcgatggtgctgcgggatttcttatccatccagttcagatcggcttttgtgtaagggacttcgggacggatttcaaaaatgtctgcaccgatggcatctgctaaatcttcggcaacttttgcggtaatgccgctggcagaaaaataggcaacaagctttttgctcatgacaatgcactccctcaatatttgatttgataatagtatagcacggtaagggaggggtatcaagaagtgaaatgaaagcaaaattgtttggaaaatattggtgtttcaatagctggatttggataatcataacttttatattgtatcttaacttaaaatgagttataatacagaaaaagagttgtgaatggaggcgatagagtggaataccttaagcgagttttaggaattgaagtgctatatgaaaataaagctttagagcatttgccaaacttcatcagtacaaggtatgattcacagaaagtatctctgagtggtcaaaaagcagtttttttgtatccaaaaaccgaattggagcaggtggaaacattaaaaaagcatctggaacgtgtgaaaaaggttgcggattgtccggtgattttagtattggaacagatcactgcacggcagaaagagtatttgcttcgagagaaaatagcatttattgtggatggaaagcaaatttatctgccctttatggcagcatatttgcaggaacgctgtgatgcagaaaagagtgacagagaagaaatcttgccatcggcgcagatgctgttgctttactatatttatgagggagcaaaggagctgtctacaagtcaagctgcaaaagatttggatttgacaccaacgtctatttccagagcttctaaacaacttgaaggaatgggatttctgcgatcaagaaaaattggagtgcagaagatactgctttcggaaaactctgccaaagagttattttacaaagcagagaaagttctgctcaatcctgtgaaaaggacggtctatgttccatgcgaggaagtaaagagtgaattgttggagagtggatatttcgcattggcggagtattcgatgctcaatgcgcctagtgttcggtgctatgcttcagaaaaaatatctcagtggaatgactgtatgaccaaggatttacaggactcaaattcacaggtggctgttgaaatgtggagatatgacccacgaaaattatcgaagggaaaaatggtcgatggactttctctggcattatcgctcagggaagatgcagatgaacgggtagaagaagcagtagaagaaatgttaaataatctgtggaggaagatagatggtaacagggattgaaagctttaaggaatggttcaagggtaacgaaagccagtatgcaattatcggtggaactgcgtgtgacatcttgatgacagaagaaggcttagacttccgtgcaacaaaagacattgaccttgttctaattattgaagccgtggatgcggcttttggaagaaaattctgggactatgtaaaacaggctggatacgaacatcgtaataaaagctctggtgtgccgcagttttatcggttcagtcacccgacttcaaaccgttatccagcaatgatcgaactgttcactagaaaactggatgcaattcaacttccagatgatgcagtattgacaccgctgccaatggatgaggatatatcgagcttgtctgcaatccttttggatgatgattactatgagttcttgaagcagggaaaagtgactgttgatggagtaacggttttggacgctgcatatttgattccgttcaaggcgaaagcatggatggatttgacggatcgcaaagcagccggagaacacgttgatagtaaaaacattaagaaacataaaaatgatgtttttcgtttgactgaactgcttgaccctacggttaagattgtcactcctagtggcgtgtatgaggatatgcagaagtttgttgatcgaatggaaaatgaaacggttgatgttaaacagttggggcttgtgggacgaacgaaagaacagattcttcaggaattagtagaattatatgcgctacaataattgatgggttatggaatgaaccactagcttgtaaggaagtgatataacatggaaaagaaataccagatttttatttcatcaacgtataaagatttgatagaagcccgtagcaaagtaagagatgccatcctatcgatgatgcatttcccagttggtatggagatgtttaacgctgctgacgaagaacagtgggaaatcatacaagagacgattgatagttcggattattatgttttgattttgggacagcgatatggctctgtaatagaatctggatcggatgctggaattagctatacggaaaaggaatttcgctatgcgagagagaagaaaattcctgttctggtattcataattgatgatgatgtggcaattaagccggaatttatagaaaaagatccagaaagtataaaaaagctggctgatttcaagacagaagctaaaaaaggacgaacggtacagtggtggactaatattgacgaacttgctagagaggtttcagaatctttacatcagcaaatggatcgaaaaaagcgtccagggtggataagaggagatgcctttgatattgaagcaagtcatgcagaaattctcagtttgaataaaaagataagagaacttgagcaggaaaatgctgagttgaaatcacagattgtaaagcgggttcctgagttgatggccgcagttgtgctggatcaacaggatgatgaagaagtggacggaaaaggtcttaaaacacatggaaaattgcttattgatagctcagataatgcaatcaagatccagttatatcataatgatggagaatgctacaaaaacaagtatgaaccacttgatttaagttgcgttgaatcacatttaaaaaagtatgtaaaagagaaggacttgcaggcttacaatgcagcactaccgtctgaagaagaaataaatgattatgcacacaagatgagtgtatataagacaataacaaacggtggtgttgcgctcaagctaagagtgcttaataagggaacagcgaaagcaaccgacattagaatctcaatcgtatttccaaaagatatttttgtatatgacattgatgatatcgaaaaaatgaaggagccgaaagcaccaaaacttccaccgaatcctattgaaaaggcagaggaacgttttatgagcgacttaaatccagtatatggcttgttgaaaaatagtatggacggaatgcagccattctactcagctcgaagcttgccgattatagacccggcaatttttaacaactccaattcttctgtgtttgaatcaatatctatacgagataactcaatatttgctgaatgcaatcagttgccacataaagatgataccgagtttgatgggatatatattgttccggctagaaaaggaaaattcaaagtaagcgtttcactgatgtgttcggaatatattgaaccgaaagttcatgatattgaatttgaaattgtctaataattaaaataagtacgaataagccgcatagggcttcccaatggttttaacccaatgggaaactttatgcggcttatttttttgctttttttgaaaaaattgttgtccctatcttgacatcagggggacttgcagcggtaagctcttcctttttcgcagcactttgtagtgcatttggaagatacgatgtggtgcatatccatgcagaaggtcctgcctttttctgttggataccaaaactttttggcaagcgtgtaatctgcactatccacggtttggactgggatcgcgagaagtggcgcggaagcgttgcatccaagttcattcgcggcggcgaaaagaatgctgtgaaatatgcggacgagatcattgttctaagcaaagacgtgcagaagtatttcttggagacctacggaagggagacacattttatccctaatggtgtcaatcggccagaggttcgggaagcaaagctgatcacggatcattttggattggagaaagattcctacatattgttcctcggtcgtctggtgccagaaaaggggattcgatatctggttgaggccttcaagaatgtcaagacggataaaaagctggttatcgcaggcggctctagtgatacggattcctttatggaggaattgaaagaactggcgaagggtgacgatcggattttctttactgggtttgtgcagggagcaatgctggatgaactatacagcaacgcttacatctacacgctgccgtctgatctggaaggaatgccattaagtctgctggaagcaatgagctatggaaactgctgtctggtttccgacattccagagtgcacagaggttgtggaagataaggcattgatttttaaaaagtcaaatatagaggacttgcaagaaaaactgcaagatgcctgtgaccatcctgaaatggttatgaaaatgaagaatcaggcagctgactttatctgcgagaaatataactgggatgatgtcgtaaaggaaacgatgaagttatataggaaatgatgaagaataattttattgataaacatctctgctattgttttatctggacaggaaatacgaaataaagcaaactcacagaaaaggaagttaaaatatgcggattttacttgtaaataaatttatatttcccaagggtggagcggaaacgtatacattcgatgtaggaaaaatgttagaagaacatgggcacgaagtccagtactttggccttgagaatgagaaaaatatagtaggaaatcgaatcggttcatatgtaacgaatatggatttctctcaaggaataaaggcaaatttaaatgcaccttttcgtattatctactcaagagaagcgcgtaaaaaaattcgtgcggttttagatgattttcagccagatgtagtacatctcaataatatacagtatcatctgaccccttctattattttggaaattaacaaatggcgcaaagaaacaaaaaaagaatgtaagattgtttacacgacacatgactatcagcttgtttgtcccagccatggaatgttcgatgtgaacatgaagccgtgtgaacgatgcttggatggtcattatattcattgtcttcaaactaaatgtttgaaaaattccagagcaaaaagtctccttggaacgttggatggatatatgtggaaatatagcaaagcatactcatatgtagatgcctatatttgctgcagcttttttcttaaatcaaaacttgacacgcagaaaagattccgtgataaaaccattgggctgcataatttcaaaaaggaaatgccgcacttggataacattcaaaaaaaaggttatgtattagagtttggccatctttcgcgagacaaaggaacggatactttgcttgaagtagccaagaagatgcccaataccgaatttgtgtttattggctatggtccgtcggttgataaaatgaaggatattcccaatgtgaagtatctgggatttaagactggagaagaactctatcgcattattgctgaggcagcaatcagtgtctgcccgtctgagtggtatgagaactgcccgtactctgttatggagtcggtacttttgggtacgcctgttgttggatctaaaatgggaggtatccccgaattaattgagcctggtaaaaccggagaattgtttgaagcgggtaatgtggaagaactgatgaaggcgataaagaaggttcttcaaacacaagatgtactggaaagatatacaaagaattgcagtcaggtgaaatatgaaacgacagagagctactatataaaactgatgaaaatttatcgaggagaaaagaatgtggaacaaatttcttcgtaacccacttcatattgtcaaggattatgagctgagaaaactgctttggcaatcggggggggggcacagcggtttgtaaaaaatatctgaagttcagagataccgctcctgaaaagctgacgttcccagaaacccaagtagatgaacctatttggttattttggaatacagggctggagcaggcacctgagatagtgaagacttgctatcaatctataaaaaaatatgctggcagacaagttgttttgcttacagaaaacaatgtgcagaactatataaatatgccggattatctgaatgaaaaattaaaaagcggagtccttccattagcgatttatacagatttgatgcgtgtagcattattggagcattatggtgggacatggatggatgcaacaatactgctaacagatgaaatcccacaggaaatattaaatagtgatttttttgtgtttcataattcactcggcgaaattgataatcccgtattgtatccggtctggttcatccacgccaagcaacataatagaacgatttgtgagattcgtaatgttctatttgcctactggaaacgaaataatcatgtaccagaatatctgttttcaaatattgtaattacacaaataatgaggtcatcaccagaggttgagaaaaagatgccttatttgaatagtgactacagcgaatatctggttagagtattaggagataaatttacagaggaaaaatttaattggattaagcgacttactgggatacataaactaacctataaattagaaccatcgattgataaggaggaaacagtttaccattatctggtgcggaatctatgagccttttgaatagtagtttctgcaagataaagggagacaattaaattattatgctgaatgactactatcagaatattggtatgaaaggctttattcaaagatatggaattgtgaatgccgtcaaacgaggggcatttatgtttatcaaattgcatcttgtcaaggattatgaggtgcggaaggtattgtggcaggaacgagcttctaccaagataaaaccatatttaaagtataaagacacagatgctgaggggcttagctttcccgaaaatgatgtcgagaatccgatttggatttattggaacaaaggtattgaacaggcaccgatcattattcagaagtgctatgaatctgtatgtaaacattcgaatcaaaaaatcattttgctgaatgaccaaaatcttgcagattacattcgattgccagattacattgaaaagaaaaaggacgctggccagattccgatggctggatatgcggatctgatgagatttgcattactggaacattatggtggaacatggattgattcaacggtatatcttacagatcctattccagatatgattttaaatagcgatttttttgcagtacgaaattcactgctgctgatagataaccctgtgctatatcctgcatggtttcttcatgcaaaaaagggaaacaaaacaattcgagaaataagaaatgttgctttcgcatattggctcaaaaacgaacatgtaattgagtatctgctaccaaatttgattataacattggtggtaaagagcaatccggaagttgagaaagcaattccatatatgaacagtgattatagcgagtatcttgttaaggttttagctgatgattattcagaagagaaatggaattggatcaaaaagcttacaggtattcataagctgacatataaattatcaccggacattgaagcagaaggcacattttataaggcgctgattgaaaacagtatagaataaatattgcaaagtgggttggaaaagaagtatgggagcaattgagttaataaaaagcgatttgtttcgctatgccggaacaacatcatctaaggcatttattaaaacatatgttaaagaagctggttttcgcttctccgtggcatttcgattggtaaatgctgggggagtgttaaaactgtttggaataatcctatggaaattgagaaatcaccagcagattcagatacttcgaaaaacaaaaattggttatggactatatattagccatggagggcctgttgttgttaacccttcaacagttattggaaataattgcaatctgtctcaatttgtaacgattggctcaaatgaaggaaaagcagcagtaataggagataatgtttatattggccctaatactttatagttgaggatgtaagcatcggagataatgctacgattggtgcaggaagcgttgttaccaaggatattccatcaaatgcaacagcagctggaaactatgcaaaagtgttgaattttaataagccaggtagatatattcataatagatatttggaatagtgattcgaagagtggaaggaatattatgaaaaacatattgtttgtgatgccatcgttaggaagtggtggagcagaaaaaagtcttgtaaatttattaaatcttatagattatgaaaagtatccatacagataagaaattagtgattgctggtggatcgagtgatgcagatgcatttgcgaatgaattaaaagaattagcaaaaggtgatgatagaatcatctttactggatttgtacagggtcagttattagatgaattgtatagtaatgcattcatttacactttaccttctgatttagaaggtatgcctctttcattattggaagcaatgaattatggaaattgttgtttgatttcagatattcctgaatgtgctgaagttgttgaagataaggtagtgacattcaaaaagagtgatgtgaatgatctgaaggacaaacttgaatggcttttaagccatgaagatgctgtacatacatataaagagaatgctactgattttatctgtcataaatatagttgggataatgtcgtagataagacaatggagttgtataaatgaaagtattgatgattttatcatcagtattttgagtatcactaccgacgtttgaaaaaagcactctagtttataaacaacacattggaagtgctttatttgaccagaggtggtgacattcaaatataggcttcaaaaaaataaggagataaatgcaatgagtatagttaatttagaaaacaaaacaattctagtcacaggtgcggccggctttataggttccaaccttgtgaagcgaatttatcaggaggctccttctgcgacggttatcggcatcgataacatgaatgcttactatgatgtggcgctgaaagagttccgtctgaatgagctggccaagtatcccacatttacttttgtaaaaggcaatatcgctgataaggaactgatcactgagctgttcgagaagtacaagccatttgtggtcgttaaccttgcggcacaggctggtgtgcgttactccatcactaacccggatgcttatgtggaatcaaatttggttggcttctttaatattctcgaagcctgccgccattgcgagagtctggagcatctggtttatgcctcttcttctagtgtttacggttccaacaagaaggttccgtatagtactgatgacaaggttgataacccggtttccctttatgcaaccactaagaaatccaatgagctgatggctcatgcttattctaagttgtataacatcccgtccactggtctgcgcttcttcaccgtgtacggtcctgctggtcgtccggacatggcttacttcggctttaccaacaagctggtgaagggtgaaaccatcaagatcttcaactatggcaactgcaagcgtgactttacttatgtggatgacatcgttgagggcgttgtccgtgtgatgaagaaggcaccggacaagaagaacggtgaagatggtctgccgattccgccgtatgcagtttacaacatcggtaatcagaaccctgagaacctactggacttcgtgcagattctgagcgaggagctggttcgtgcaaaggttttgccggaagattatgacttcgaggcacacaaagagctggttccgatgcagccgggtgatgtacctgtgacctatgcagataccagtgcgttggagcgtgacttcggatataagccctctaccagtttgcgcgagggtttgcggaagttcgctgagtggtacgcaaagttctacaaataatgaagaataggaaaataaaccgatgaagtgtgttgaggtttacaaggaattatatcatcaggagccgtttgatgtggcgttctgcccgtaccgtatcagtccgcttggagcgcatatcgaccatcagtacggaaaaatcaacggtctggcaatcgacaagggaatccatatggcctaccacccgaaacagaatggtgtggtggagctgcagtcgctgaacttcccgaagcgtgcccagttctttgtaaatgcagtgccggaagaaaagcagggagactgggctgatcatctgcgtggtgcggcaaagatgctgggagaaaagtaccgcctgaaagttggtctgtctggcatcatcgagggtagcctgccgataggcggtttgtcctcgtcggcttcggtcattatttgctttttgtctgcactgtgcaaagtgaatggtatccatctagagccgatggagatgattctcacggcgaaggccgcagaaaaccagtatgttggtgttgcttgcggcaaactcgatcagagttgtgaggtgtattccaagagaaatcacttgttgtaccttgacacgaaagatgatagctatgagttaattccaaccagtgggaaaatgaaaccttataaggtggcgattttcttctccggcttggagcgttctttgaaaaactctaagtacaatctgcggcaagatgagtgcaaggcagcggcctatgcactgatgggctatgcagggatggactacgatacctttgcaaacacccggctccgtgatgtaccgtttgaggtctttgaagcctataaagaacgtctgcccgaactgtggcgcagacgtgcagaacactattacagtgagttcgctcgtgccgaaaagggtgcagaactgtggcgtaaaggtgatttggagggctacggtcagcttgtttttgaaagcggaaaatcctctatttatagctatgagtgtggctgcgatgaactgaaaaagctgtatgagatcatgaccgataccgatggtatctacggtggccgcttctctggcgcgggcttcaagggctgctgtatggcgctgattgacccagacaaggccgaagatattgaagcaaaggtcacagcagagtatctgaaagcgttcccggcattggatggaaagtatagtttccatctgtgtgagagtgcagatggcgttgaattgtaagaggggagcacatatagatgaaatgcttaattttggcagcgggctacgctacacggctctatccactgaccgagaatttcccgaagccgcttctgaaagtgggcgagaagtccatccttgattggttggcggatgatttggtggacactaccgacattgacgaatttgtggtgatttccaaccataagttcgcacagcattttgaggattggaaaagtaataagcaaaagacgcggccttatgagattactgtgatcgacgatggtacaagcaccaatgaaactcgtctgggagcagtcaaggatattcagctggcggtagaaaaactgaagttggctgatgatttgctagttatggctggcgataatgtgctggatttcagcctttccaagtttgttgactttgccaaggaaaagaatacttcctgtgtgatgtgccatgaggaaaacgaactgaaaaagcagcagaaaacagcaatcatcacgcttgataactcggatctgattacgagctatgaggaaaagccaaaggaaccaaaaggaaatctggctgtgccgccgttctactgctatcgtgcctgtgatgtaaagcggattcaggaagcactggacaatggctgcggttatgacgcaccgggtagctttgccgcatggctgagcaagcagaccccgatgcacgcttatgtcatgccgggcaaacggtatgacattggcgatattaacagctatgagtatgtaaagagtgtgttctcaagataagtatacaagggagaaagtaataatgaaggagtttaaagatttgaaaattgccgtggccggtacgggatatgttgggctttcgctggcagtgttgctggcacagcaccatcaagtaacggctttggatatcgttcctgagaaggtggagatgatcaataacaagaaatctccgattcgggacgagtacattgagaagtatctggcagaaaaggagctggatctgactgcaactctgaatgccaaggaagcgtattctgatgctgattttgtagtcatcgccgcaccgacaaactatgatagcaagaagaatttctttgacaccagtgcggtggaagctgtcattaaactggttatcgaatataacccggaagccattatggttatcaagagcaccatcccggttggttatacagcaagtgttcgtgagaagtttcactgcgacaatatcctcttcagtccggaatttctacgtgagagcaaggctctgtatgacaacctttatccttctcgtatcattgtcggtactgatgtagataatgctcgtctggtaaaggcagcacacacttttgctgaacttctgcaggaaggtgctatcaaggagaatattgacacactgtttatgggcttcacagaagcagaggcagttaaactgtttgccaatacatatctggcactgcgcgtcagctacttcaatgagcttgatacctatgcggagatgaaggggctgaacactcagcagattatcaatggcgtctgccttgatcctcgaattggtactcattataataatccatcctttggatatggtggatattgcctgccgaaggacaccaagcagctgctggccaattatgctgatgtgccggagaacctgattgaggctatcgttgaaagtaatagaacaagaaaagacttcattgctgatcgtgtgctggagattgctggtgcttatgaggcaaatgacagctgggatgagagcaaggaaaaagaagttgttgttggcgtataccgcctgaccatgaaaagtaacagcgacaacttccgccagagttccattcagggtgtcatgaaacgcatcaaagccaaaggtgcaactgtaattatttatgagccgacgttgaaagatggcgagaagttcttcggtagcgtagtagttaatgatttggacgagtttaagaagcagagtcaggccatcattgcaaaccgttatgataaatgcttggatgatgtggaggaaaaagtttatacaagagatattttccagagggattaatggagacaatagaatggcgcagaaaggagaacggacagtgataagaatattacaagttgtaaatgacatacatcgcgctgggttggaaacgatgcagatatcatggtagacatacacagtttgtcgaagtgcttccgaatacaggaaccagcagccgaaatcagagtgttttagaattgactggactgacaaatagaaccgttcgagatttgaatgatttttcatatatcgatcaggagattgattttaaggaagcgaatgaaaagattggtataagtagaatagaatccattcggattttagaggaaatgctaacagagcagattggaatttgaccgtaaggatagtggaggatgaacgaatgaatatagctattatatctcacagtgccggtggtggtggagcagaacgtgtggctgttaatttggcaaaccatttattgaacgagaacgaggtgtttttctgtgccgtacattcagatagaagggaatattatttggatccgaaagttcaatatgattatataggaacagaaagaagtggatttagagggcagctatctattgctattaatctgagaaaatacataaagaaaaataatatagaagtcatgatttctttagatatttcagttgagggtattttcttaattggcaataaaaaactttttaaaatatattccttgcggaatgatccgacaaaggtctttaatagtgggcttaaaaagatccttagtaatttagtgtattgggatgcggataaaatcgtatttcaaaccccagatgccagagattatttttgccaaaagatccgtgaacatggagtcttgattccaaaccctgtgaagagcggattaccctactggaatgaagaaaaccaccgaaaagaagttgtggctgcatgccgtttggccaaacaaaagaacctttttatgctattggacgcataccgtattgtttgggaaaagcggcaggactataaactttcgatttacggagaaggggagctgaaggaagcccttgtgaggtacgctgagcagttgggcatttcggaggcggtgaaatttcacggtttctccagtgaaattcacaaaattatggccggatcggctatttacgtttcttcctctgactatgaaggtatttcgaattccatgttggaagcgttggcaattggaattccggcgatatgcacggattgcccggtaggtggcgccagaatgtatattcgtgacggggaaaatggttatttgattcctgtaggagatgcggatgtgatggctgatcgtatgctcgccttaatggaagacaaaaaacttggagaatctttttctaaagagtctgttaaaattcgtgaagaactcacagacgataggatttttggtatgtggaaagcgttgctggttcgataagtttctccgtaacttgattaaatgcgagatcaagctggattgtctttgtgaaatttgaagcaatcggaaaaggagaatagaatggaaatcagaattaacaaatcggcgattacacaatatttattgatatacctcatgttcataattcctggaagttgtttatttgcaaagtactggacaggaactatgaagtattttgtattacttataatatatgctgccttgattgcttttaagaaaaaatatcaatctcggtattcgatttgctttcttttattattgttgttctttactgtattttctagatttttgattggtggtgtaggactttctgcgtggtgtcagtttgctgtatgtattcttagcacacaaattgctatttgttgtgatagaaaaaattttttaaatagatggattcaaactgttgaattttttgcagcaattagtattgggttttgggccgtcttttgtattgcaccgaatttagtcaacctttggccggctcaatcttttgatactcaggcgctgggaacagcaggttgggaaacatattggcatggtaaaggagtacttctgtatagctacttggaaattcatcccacaagaaattgtggcattttcactgaaccaggagtctatcagattgttttgaacatggcattgtttgtgttactgttttggaaagataaactctcttttgcagcggaaagacgatatagaagatgcttaaatataatcttaataggaattattacagctcaatcgacgacaggttatttgggattgattctcatcttgtttttcttttattttactcatcaagaatatgaggtgagccgagttaaattttacttaatgggattggtttttattgctctcgttgttttatttgtagattatgcaacaagagcaaatgatagtattttgtataaacagattatcgaaaaactatttggatcttctggtagcggttttgatgtatcatcggggacaggccagtatagattaggaaccatgatgattagtcttgcaaccgtttttcagcatccattgggagtaggatatgacgcgttctatgcagcacgaaatgcttttggaagtggtttagtagcagcaagtcttttagcttatgctgctgtttatgggattatcccatggttgatagttcttggaatgatattcacgccggtgtttagatatcaaagaagagcagttgcatttttgtatgttttgctttttgtaaatactactttggcacaaacagatttgatatatccggcatttttcatgattccaatgtatttggtggcaactaagaatatgaggaggtgacaataaccgatgaagaaaactcttatgatatgctctaacgaaaatgcgtactattttgatcatgtccatattccgggattatcaattagaggactctttaagaaccacgctgagttcaataatcctgtactcaaatttctcagaaaagcgaaatcgagatggacatgtttcttttatcaggattggttcgaaaatattgattcatatgaaaaaataattgtattagatgtggctttttcctatgattctcaacttctacgaaatattgcacagaaagctacgaattcgaagttgtatttttattcctggaatatagcaaaagatgaatcaaaatttgaaattacttataatgcggtaaaggattccggatttcagttttattcatacgatagaggagagtgcgaaaagtatggtttgaagttcaatacaatcatgtatgatcgcaccttgactttgcagacagctcatgaacaatatgatactttgttccttggatatttaaaagacaagaaggaagatattttatcgttatacgatatgtttacttctgcaggattaaccccaagatttgttattgttagtaatggagaaagaaaagaaaaatttccatttgaatatcgagatgattatgtagggtactacgattatttaaagatggtcggaaccagtcgtgccatattagatattgcgcaacagaaacaagatggatattcgatgagagtgatggaggcaatcttttttaataaaaaacttgttacaacgaatactgcggttaaacaatcagtattttatgacgaaaataatatcttcattgttgacttaaaaacaactactgcagatgaacttcaagctttctttgcaaagccttttagaaactacagtgacgaagttcgagaatattattccatagaagcgtgggttgaccgctttaccgagtagcttttgaaaggagcagactgtgtggatataaagaaaaaaattcgtagaaagatagaattatacaattttaagcgaaatcatagaggcttgtatgtcgatggttctttacagcttcggcttcccaagtatatatcatgcggttccaatatcgcgataggagagaatagcaaactcttgtgctgggattcttacaatggtaagaaatttgagacttctccctcaattataattggatctggggtacgtataacgcggaacctgacgattcaatgtgccaatagagttcaaatcggtgataatgtgctgatagcgtctgatgttttcatcatagattataatcatggaaattcgccacttacaaagaattaccgagataatcccttaaatatttcgggggggggcgtaacaattgagaatggggtttggattgggaataatgttattattcttccaaatgtaacaataggggaaaaaagtatagtgggtgctggttctgtagtaacgaaaagtattcctgcatactcagttgcagtagggaacccggctcatgttattaagcattttgattttgaggctaatatatggatagaggattagaatgaacaaaatattagataaaataaagaatgtgcccatcggagtaaaagcggcagctgtgtataccttggcatctgttttttcaaaagggctggcaattatcacagtaccaatttttacgagaatcatgtctacttctgaaattggtgtagttaatttatataattcgtggaattccatgttgaatgcagtagtgacgctttcattaacgtctggaggttattctgccgcattaaaagagtttggaaaagagagagatcaatatcagtcatcggtattatcattaacgtcttttgttgcgttaattgttgcttttatttatataatatgtccgtctttttggaatggactgaccggtctgtcaacagatttaatggtcttgatgctgattggtttttttgtagccccagcatatgatttttggcttgctagacagcggtacgaatataaatataaacttgcgggcagtttaacagctattacagctcttcttgcatcgttatgtgctgtaatgattgtgcttcacatgaacgctaaggaactgtctgacgtggcgaatggacgactctatgcatcgaatatcgtatcttatattatttacggaattttgtggtgcatcattatttttagagggaaaacatttttcaataagaaatattggaaattctccttacaattgagcattcctttgattggatatgccttagctgcacaggttcttagcgtatcggatcggatgatgattagcaaaatggtggataatagtgcagttggaatttatagtactttgtataccgttagttcgatatctttactggtatggagtgcgataaatgcttcttttataccatatctgtatcagaatattgagtcagataagaatgaaataaagaaatattcacttttgcttatgggcgcttatgcgattgtggctgcattattaacattctttgctcctgaaattgtaagaacattagctactgaggaatattatgaagcgatttatattatgccacctattgctggcggtgtgtttctgacatgcgtatccaatatgtactcgaatattatgatttactataagaaaactcaatatattatgtatgcttcgatagctgcggcagctaccaatgttgttttgaactatttttgtattgcgaaatttggttatatggctgcggcatatactactctggttgcgtatatcgtattagctcttggagaggctgtttgtgctcatgtggtatgtaaaaaagagagaggtgccaactacgaggtatacaacgataaagcggttggactgatggcggttatggccattctactatgcttgagcggattaatttggtatcagtatgctgttttaagatatggaattattatagctggctgtgcggttggtgccgtactgggatatagagttataaaaatgaggaaggtgaagcagtaatgttatacaagattataggtgctcttgtttttccggcattcttttgttaccgaaacaattcattgctgaaagaggatatgaagcgctatcggtaaatataaaggaaatgcatccgctgacggctatcaactcatggatggaactcagttaaatctaagtgaaaaagatcagaagtggatgggcttaaaagacacattcaaattctaaaggaggaaccaaaattgaaaatattagtgactggtgcaaatggatatctgggacaggggattgtaagaagtatcttgaataatggccattgtgttgtagctacggattttaacacccagtttgtagatgagcgtgcagaaagaattgcctgcaatttatttgaagttgataacccgtatagtttctttggcgaacctgatgtgcttctccatttggcatggagagacgggtttgttcactattccagtgcgcatattgaagatcttcctaagcactatgcgtttattaaaaaaatggttgatggaggtattcaacaggttgctgttatgggaagcatgcacgaaattggcttctttgagggtagcataaatgaaagcactccttgtcatcctacgactccgtatggaattgcaaaaaacgcattacgcgacttaacacaaatgttatgtaagcaaaaaaatattgtgttccagtggctacgtggctattatattgttggtaattctaagtttggcagttcaatattctcaaagattacagcggccgtagatgaaggaaagacagagtttccatttaccttgggtcaaaatcaatatgactttattgactaccctgatttctgcgcacaggttgccgcagtagttggccagaaaaatgagcaagggattattaatatttgctcaggcaaaccagaaaaattggcagatagagttgagcgctttattaaggaaaatgattatagaattaagctgcaatatggagcatttccagatagaccgtatgactccaaggcaatttggggtaatgacacaaaaatcagaaaaatcatggagaaccagacaaattaaacgatagaccagctaatgacgcgtttttgccgcgtagaatgggaactgtatcatgggcataataaataaaatatggaaatgtataatgaagcgccaaaacccgatgcggtatgctcgcaagatgggcgtagtgctaggtgaaaactgcagacttattggattaccagattggggtagtgagccatggttgatttctattggaaatcatacagaggtttcctttgatgtagcttttataactcatgatggtgctacctggtgttttagagatcaagatgagtataagggaacattaaaattcggaagaattcgaattgggaataactgttttattggtgcccgcagtacgattttaccaggtgttacaattggtgataatagtatcgtggcagcgggagcggtggtgaatagaagtataccctccggagaagtgtgggggggggtaccagcccattacatcatgaaaacaaaagactatgcagacaagtgtaaagaaaatactcctatctatgatttagaaaactatcggaagaattttcgtgaggaggttaatttgatctgcgataggatggaacatagcatgtgaaataagggatagggtccgacagcgaggatagtctgggtaattaggagaatattattgggttccattggggtcagaccccatgaagaagaaataatttttttctaaagaaactataaacgaaaatgagagcataggctactggcgctgctttaataatcacaaaaatctttgtggaaggcacgttgagtaggcttcaaggcatggaaacatcggtgtacaaggggtacaaacaagataaaatagaaatgaggggcgatag

SEQ ID NO: 140 - DNA, 25224 bp, unidentified
  source 1..25224: mol_type = unassigned DNA
  misc_difference 11844: note = a, c, g, or t
  misc_difference 11845: note = a, c, g, or t
  misc_difference 11846: note = a, c, g, or t
  misc_difference 11847: note = a, c, g, or t
  misc_difference 11848: note = a, c, g, or t
  misc_difference 11849: note = a, c, g, or t
  misc_difference 11850: note = a, c, g, or t
  misc_difference 11851: note = a, c, g, or t
  misc_difference 11852: note = a, c, g, or t
  misc_difference 11853: note = a, c, g, or t
  misc_difference 22062: note = a, c, g, or t
  misc_difference 22063: note = a, c, g, or t
  misc_difference 22064: note = a, c, g, or t
  misc_difference 22065: note = a, c, g, or t
  misc_difference 22066: note = a, c, g, or t
  misc_difference 22067: note = a, c, g, or t
  misc_difference 22068: note = a, c, g, or t
  misc_difference 22069: note = a, c, g, or t
  misc_difference 22070: note = a, c, g, or t
  misc_difference 22071: note = a, c, g, or t
acggtggcgcggcaggtaacgaggatgcggcgcatctcggaggaaggcatacggacgatagcgtacttgccctccttacccatcagctggcaggagttaccggcggaacgggcgatagcggcgcccttgcccggctggaactcgacggcgtggatgagcgtaccgacggggatgtcggcgaggggcagagcgttgcccggcttgatgtcggcgtcagaaccggacatgatggtctgaccgacctcgaggcccttgggggccagaatgtagcgcttctcaccgtcagcgtagtgcagcagagcgatgcgagcggaacggttcggatcgtactcgatcgtggcaaccttggcgggcacgccgtccttgttgcgcttgaagtcgatcacgcggtaacgacgcttcacgccgccgccctggtggcgggtggtgatgcggccgttgttgttacgaccggccttcttgggcaggggctcgagaagagacttctcgggcttggtgcaggtgatctcggagaagtcggagatcgtctgccaacgcctaccagcggaggtcggcttaaggtgctttacagccattacaatccctttcaataggaatccgttagccatcgcagacagggattcgaggttctgcctcgggtgcgatgacaccggacgtatacacggttccgggcgtgtccattttatacgcccaaaaccttgagctcccgcctcccctatttgggaggcatgagctcactcaacagcagcgagtcttaggcctggttgccaaagacctcgatggtgtcgccctcggccagcgtgacgatggccttcttccaagaacgggtcttgccggcgacatagcgcacgcgcttggtcttgggcttgaccgtcagggtgttcacgcgaacgaccttgacgccgaagatctcctcgacagcgtccttgatctgatacttgttagcatccttggcgacctcgaacgtgtacttgttcagctccatgccggagaaggaacgctcggacacgatcggacggatgatgatctcgtgggcggtcatttatgcaagcacctccccgaagtgagcggcgatgtcggcgggcatcagcacagcgttgttgttgacgagatcgtaggtgttggcctcgtcggcagtgatgatgaacgtcttgggaatgttgcggaacgacaggtaggcgttgacgtcctcatcgcgaacgatgatggtcagacgcttgccctcaaggccgagagccttgagcatggcgacggcagccttggtggaaggcttctcgaagccgtagtcgtcgacgagcacgagctcgccatcggccagcttggcggacagcgcggagcgcatagccagcttgacctccttgttgttcatacgcttagcgtaggaacggggcttgggggcgaagacaacgccaccgtgacgccactgggcagcacggatggaaccctggcgggcacggccggtgcccttctgacgccaaggcttcttgccgccaccggaaacctcagagcggcccttagcagactgggtgccctgacgccaagaggccatctggcacttgacgatgtggtgcataacgtggatgttcggctcgatgccgtacacctcagcggcgagctcggcctcggcgaccttcttgccctcgctgttctttacttcaaactttgccatttaagtgttctccttggtatgacgctgggctaaatgggctgggcccttaggccatacggatggcgacgagaccattcttggcacccgggacagcgcccttgaccaagatgaggttctgctcggcatcgatgcggacaacggaaaggttcttgacggtaacgcgctcgttacccatgtgaccggccatcttgacgcccttgaggacgcgcgcaggataggcgcactgaccgatagaaccggggtgacgctggaagtgagaaccatgcgtcataggaccgcggcgctgaccccagcgcttgatgcgaccctggaagcccttacccttggaggtaccgatgacgtcgaccttctcgacatcagcgaaatcagcgacggtgacgacctcgccgaccttgtgctcctcgccgttctcgacgcggacctcacgaaggaagcggacaggctcgacgccagccttggcgaagtgaccagccatgggcttgttcacgttcttggccttgatgtcgccgaaaccgatctggacggcgtcatagccgtcggttgcctgagttttaacctgcgagacagcgcaggggccagcctggatgaccgtgacgggaacgacgttgtcgtcctcgtcccaaacctgggtcatgccaatcttgcggccgagaatcatgctgatcaagatatgatcccaactctcgcgtggtcttgggacaatgcgtacaccaccgagcgtacgcccctagaggaccactacttacacgacgtgctccccagccttgtatttcgcccggactacctgacaaccctattaagcaggcattttgtccagccagaatactcccctggtttcacacagctgtttagtatacacggctgcgggcgtatccatcgagattcatatttcactcacattgtttacgcaggtaaagtgcgtggcacgttcccagtgtgcggcggagggggcgggcctgagacatattaaggttgctgctctacagtcctgctcacgacggagagcacattaagtgctctcctgttcgtgcggaactcgcgacaaccttaatatgtctcaggcccgccccctccgccgcacactgggaacgccacgttgatgtctgctaaaccttgctcgctcaggctaatgactttgttgggggtccactatttgctggagggtgaacttgcacttcattggctcgccttctgcttgtggctttgcctcgtcaaaatcgaagatcatgatggcacagttggggagtttttctgggagctcgaagccctctggggctgcagccttgatgaattggcggctggcactgccgtggcttactgctaggagggtttcggtgtccttagcactcatgagattggtgagggtgcctaccatgcgcgcttgcagggcccggcttccttctcctccgaaggggaccaaatcctcgccggggtcccagacatcggtgggcagggcgtcgtgagggccttcctcgaaggttccgtagcagcgctcgataatgcctttgcagggctcgactgctgcgtccgggccgatgagctcgcatgcgacgagctgagctgtgtccatggctcggcctaagggtgatgagaccactttgtcgggaacgacgccgtgggccttgagccatgcggctgccgcccgtgcctgctggcggcccagatcggtgagcggagaatcgcagcgaccctggacgagctttttgacgttgaattccgtctggccgtgacggagtagatatagacgcttcatgctctccccttctgtatagcttgctttaccggcacagccctactcgtgggtatgccctacgtagtcttcgtcgatcgtaatcttggcaatcgacttgggatattccgattcgaccctctgggccaacgcgtgtttgagctcatcggctcccatgcccaaatccgaaggtcgcacgcagtcaaaaatcacattggtgtgcgtggggcccggcacgcaacgcagatcgtgaatcgaaaggcggctatcgatctgttgggccatagcgttgatgcgcaggcgcatgctcgccacatttggatcgtcggtcacgatggggtcgtaatggagcgtgacaatcatgccatcttcgttcctaaacgactgctcgatgttatcgagcgtgtcgtgactttccagcgggctggcctcggctgccatctcggcgtgagcgcttgcgaacttcctgcccgggccgtagtcgtgaaccatcaaatcgtgaacgcccaaaacgccgggatagctcatgatcttgtctcgaatgcgcttgaccagcttaggatcgggcgactgacccaaaagcgggctcaccgtatcctggatgagttcaaaaccgctccagccaatataggcgccaacggcaaggccgacccatgcgtcaagattgatgtgcgtcacctgcgaaacaattgcgcacgccagcacggcgcccgtggcaaggacatcgttcttggaatcctgcgcggtcgcatgcagcgtctcggactcaatgcgatcgccgagcttttggttgagggccgccatccagagctttacgaccatcgaaagcactagaactgccaccagggcaagcgagaactcgacaggttcggggtggatgatgcgctcaaccgaggacttcaccagctcaacgccgatcagcagcacgagcgccgccacgaccagacccgagagatactcgtagcggccatgtccgtaaggatgctcggggtccgccggcttgctcgccagcttaaagcccagcacgctcacgatattcgagctggcatcggacaggttgttcatggcatccgccacaatcgaaaccgatcccgacagcacaccaattgtgcccttcgcagcacaaagcgcaacattagcgagaatacacaccatgcccgtcaacgtgcccacgcgcgcacggtcgccctgcgcacgacgaacgatccactcgaccatcttcatcagcccccacggtactgcctatatatatctattgctcaaacggattgtagtgtagccactttgtccttcagatacaaaaaggccgcgacccacacgggccacggccttggagcatggcaaaggaatcgtccttgtgtcgcacaggtttacgcgcttacttcggccacgctcttcgaggtttcgggtgaatcggctccgtcccccatcgtctgtcccttcgccggcaccacgccaaagcagtagctcagcgccgcagacaccgcaaatgccacaccgccggcagcgcagcaccacagcaggttcgagatgccgcccgtggcaaagccaatgaccatgaggacattcgtcatgccgatggtataggccgtaacgtggcccacggctgcaacaaggcctccgacggcgccgccaatggccatgcacgtcaggcacctgccatatttaaagccgcaaccgtacagcgccggctcgcttacgccgccaagaacacccgagattgagtagcccagcatgagcgccttctcgtccttatccgcaacgcggagcgacgcgccaaaaggcatgccccaaacggcgaacgtcgccatcgtcgcggcaatcaggatgcacgaatccgttcccacactcataaactgcgcgtacgcaagcgatagaacgacgttgctgacgcccgctatctttaggaactcccagcccgcggcaagccccatgagcgtgagcagcgacacgatgccaccggaattgccaagcataaacataagctggcccaacagcatgcccagatagctgcccgccggtgccgtaatacacagcgaaaccggaaccatgacaagcatggtcgcaaacggaacaaacgaaaacgccacggccctagggataacgcgcttaaagaaacactccactcgccatagcataggcaccgaaaggagaactggaataacagtcgtcgtgtaatcgttgaccggcgcgggaagcagaccatacacggaagtcatcgatgcccccgtcgtcgatgcggcatcgacgagcttaagcagatcgggcgcaatcaatacgccgcccagcatcatgcccagctgctccgagcaaccgagctggcgggcggccgcccaaccaagataaatgggcaaaaagtagtagccggcgttatagagccaactgtagaacaggcgatagatttcggaatcggcagaccataggcccagcatgccttcgcccataatgacggcgacggtgcggaacaacgccgcgcagacaataaacggcagcgccgacatcatgcttttggacagatagtccaccacggccatggcgtttgatgaaaccgtcgttgtaaacgaggtgttagaaacttgtgacacaggaaccctttcccaatgtgacatgcggactgtccctttgttacatcgtgctgtaccgaccgattgcgcggtacttttcgtaacggaggtttgtgagggtcgcgtcgtcgagctgcccaagcgcatcgaaagcagcaaatgccgaggacatgacggcaccggcgatctcctcatgagacaggcccctatcgtcgacaatgccgtcgatgatgccgagcgccaacagatcgggggccgtgagcttaagcgcctcggcggcctcattcgcgcgctcggtatccttccacaggatcgacgcacaggcctcggggctcacgaccgaataggccgagctcgagagcatcaggatgcggtcggccacggacagcgccagcgcgccaccagagccgccctcgcctgtcaccaccgagacaatcggtgtcttaaggccgctcatctccatgagattctgggcaatcgcctcgccctggccgcgctcctcggcaccgataccgcaaaacgcgcccgaagtatcgaccaggcacagaaccggtcgaccaaacttttcggcctggcgcataaggcgacgcgctttgcggtagccctcgggatgcgccatgccaaagttgcggcgcatacgctctttggtcgtggtaccgcgctcaatggcgatgaccgttacggggcgtccatctttccagccaatgccagccaccacagcggcgtcgtcgccaaagtaacggtcgccgtgcagctccacaaatccatccaggcccagcgagatcatctcacccgccgtggcgcgatctgccgagcgggtctgcttgacaatctcgagcgcggtttttggtgccggcgagtgcttaaacaagtgtcccagctttttgccgcggcgacccgtatgcacgatttcatgcggtgcccccaggccgggcgcgtgcccttcatgcagcgccagcagctcgcctaccgtgagcgcaatctcgccacgcggaacaacggcatcgcaaaagccgtgctccagcaaaaactcggagcgttggaatcccttgggcaggcgcttgtgcatgttctgctcgatcacgcgcgggccggcaaatgccgtcagggcatcgggctcggccaggataatgtcgccctccatggcaaagctcgcagttacgcctccggtcgtggggtcggtgagcaccgtgatatacaggccgcccgcctcgctgtggcgcctaaccgccgcagaaatcttggccatctgcataagcgaggtcacgccctcttgcatgcgcgcaccgcccgaaacggtaaagccgacaactggcaatcccagctcggtcgcacgctcaaatgcgcgacagatcttctcgcccaccacggagcccatcgagcccatcataaagttagcgtccataaagaagagcgcggtatcgcaaccgcagattttgcccctgccgcacacaacggcatcgcgctcgcccgaacgctcgctcacgcccttgagcttatcggcatagccgggaaacgagaggaagtcctccgacgccagattggcatcccattcctcaaacgtgccctcgtcgaccgtcatgcgcatgcgcgcgcgaccgctcacgcgaaagtgtttgccgcaacgagggcagacctcgaggttgtcgtgtaggcgtgcctcatcgatcacgcggcggcactccgggcacttgataaacacgtggcgcgtgggaaactcggcgcacgactcggttatcggcccctcgaggacgttaaccgtcttcgcttttctattcgtcagcatagagatgccccatcagatcggtgtgatacatgcccgacaagaactcgtcgtttgccagcacgtcgagctgaagctcgctgttttcgctcacgccctcaatcacgagctcgcccagggccgagcgcatcttgcgaatggcgccgtcacgcgtgggcgcacacacgatgagcttgccgagcatggagtcgtagtacggcggaacgttcgcaccggtaaacatggcggaatcccagcgcacgcgcggaccacccggcacacgcaacgcggtgaccgttccgcatgatggcagaaagtccggcgtttcggcattgatgcggcactccatggcgtggttgcggaccggcatgtcctcctgctcaaagggcagaggctggccggctgccacgcgcagctgccacttgaccaggtcggtatcggtcacaaactccgtaaccggatgctccacctgcaggcgcgtgttcatttccataaagtagaaattgccgtcgtccgaatacaggaactcgatggtaccggctccttcgtagccgacggcacgagccaggtcacgcgctgccttgtgcatgcgagcacgaatgtcgtcgtgtccgtcgaggcacggcgcggggctctcctcgatcagcttttggttgcgacgctgcaccgagcactcgcgctcgccgagcgaaaatacatggccctgcttatcggccataatctgcacctcaacgtggtgcgccggcgcgacgaacttctccatgtagcactcgccgtcgccaaaaacggcctcgccctcggcacgcgcctcgatgaacgcctttgccgcatcttccacgcgctcgaccttgcgaatgccacgaccgccaccgcccgcgcgcgccttaatgagcacgggacagccaatgcgctcggcctcggccgtcgcctcctcgggacttttgagcaaatcgcagcccggcacgatgggcacgcccgccgcggcagccgttcggcgtgcggcgtccttgtcgcccatgctgtcgatcacctcggccgaaggaccgacaaaagccaggccatacttgtcgcagtcgcgtacaaagctcgccttctcggaaaagaagccgtacccaggatggatcgcctttgcgcccgactttacggcacaggtgagcacggcatcgtcgttgaggtagctctcggcaagacgcgggccgccgatgcaatacgcctcgtcggcaagttgcacgtgcagcgcgtccgcatcggccgtggaataaacggcgacggtcttgatgcccatatcgcggcacgcgcggataacacggaccgcgacttcgccgcgattggcgatgagcactttgtcgaacatgaagccttccttaactttcgtgcatgagtgcaaaagacatatcggcgcggcagcaaacctcaccgttgacgctcgcagtacccgtcgcaaagcggaacggcccgcgcgcacgcgtgatggtgcacaccagatccaccgtgtcgcccgggcgcaccggacgcttaaagcgcaccttgtccagactcgtgtagaacggcgtcgcgccgcgcgcctcctcatcgcccatcagtagcacgcaacagttttgggcgagcatctcgcactgaatcacgccggggaccaccgggtttcccggaaaatgcccctgcaaaaagtactcgtcgcccgtgatcgtgatcttgccgtgggcctcgtcgcccaccagctcggcctcgtcgagcaaaagcatcggctcgcgatgcggcaacagcttcttgagctcttctttgttcatggacatcacctatccgatcctcatgaggcagctgccaaactccacgaggtcgccgtcggccacgcagatctcgagcacctcgccgtctgcctcggccgtcacctcgttgagaaccttcatggcctcgatgatgcagagggtctcgccggccttgaccttagagcccacgtgcacaaacggctcgtcgcccggcgccggggcagcatagaaaacgccgaccatgggagcggtcacctcggtgcccttgggctccggtgcggcggcaggcgcctgcgcggcgggctccggtgcggcggcaggcatggcgacaggagccaccgccggagcagtcacggcacccggcataggcatgggcacggcaaccggctgtgcggcgctcgcgcgctcgagttcgaccgcggtgccatcgggctcctcaacgcgtacgcgcgtgaggccgcggtcctccataacatcggctatctcggcaagtcttttggaatccatgctctagctcctcgtatatctacgcagcgcgatggcggcgttgtgtccgccaaagcccaggttggtcgaaagcgcccaggtaaggtcggcgcgaaccgcgcgattgggcgtgtagtcaagatcgcaggcgggatcgggcgtgtggtagttaatggtcggcggcaccacgccttgttcgagcgccatggcgcaggccatgacctcgatggcgcccgtggcaccgatcatgtggccggtcatcgactttgtcgacgagacgtgcgcggcgcgcgccgcgtcctcgccgagtgcacgcttaatgcccgccgtctcggacgaatcgttaagcttggtcgatgtgccgtgggcattgatgtagagaccctcggaaggcttgacgtcgccctcggtcaccgccagcgatatcgcgcgggcaatgccagcagcctcgggatcaggactcgtgatgtgataggcatcatcggtgttgccgtagcccacgacctcggcataaatgtgcgcaccgcgcgtctgcgcatgttccatgctctcgagcacgagcacgcaggcgccctcgcccatcacaaagccgtcgcggtctgcatcgaacggacggcaggccgtcgcgggatcggggttggtggtcaatgcgcggcaggacgtaaagcccgcaacggcatcggggataattgcagcctcggcgccgcccgcgaggatcgcgtcggcatagccgtgcttgatggcgcggaacgcctcgcccaccgcatgggccgaggttgcgcacgcggtcaccacgggcagggtcgggccctttgccttgtggcggattgcgatattgcccgatgccatgttggggatcatcatcgcgatcatgtaaggcgatgcgcgacgaggcccccgatcggcgatcgtgtggacgttgtcgacgagcgtctgcatgccgcccacgcccgaccccacgtagacgcccaggcgctcgcgatcgatggcgccttcgacatcaaagcccgcatcgtgcattgcctcgtccgaagccgccatcgcaaactgaacgcagaggtccagatgcttggcgtcacgcttgccaaagtactcgttgccgtcaaagcccttgacctcggccgccaccttgacggcaaacgcatcggtatcgaagtgcgtgatcgggccgatgccgcacgtgccggcgcacatggccgcccaggtggcaagcgcggtgttgccgagcggcgacacggcaccgatgccggtgattgcaactctctgttccatcatggtctcctcatccaagccgttcttcggccctgatttctacatcgccattccgccgtcgacgcgtatgacttcgcccgtaatgtaggcagccgcatcgctcgctaaaaagcgcaccacgccggccacctcctcggggcacgccatgcgcttaaggggaatctggtcctcggtggccgcacgcaccttctcagagagctttgccgtcatatcggtctcgacaaacccgggggcgaccgcgttcactcgtacgccgcggggcgcaagctcgcgcgctaccgccttggtcaggccgatcacgcccgccttagaggcagcgtagttggcttgcccggcattgcccatcaggcccacgaccgagctcatgttgacgacgcagccgccgcgctggcgcataaaggtcttggtgagcgcgcgcgtcgtgttaaacgttcctttaagattgacatcgagcacgcgatcgaaggcgtcatcgcccatgcgcatgagcaggccatcgcgggtgatgccagcgttgttgacgagcgcccaaatggagccaaagtcgttgaggaccgcttccacgcacgcgttgacggcagcggggtcggccacgnnnnnnnnnnccgggtgagggccacgtcgcattgatatgagcgcgccgtggcgccagccgcctcgcaggcgtcgcacgtctcgcgcgccgcatcgacgctgccggcatagacgacggcgatatcgtagccatcctccgccagaccgatagcgcaggcgcggccgataccccgcgagccgcccgtgaccagtgccacgcgacgtgagtcgttgcgctcgagcgcgccattgttcaagttgcccatgtcattcctttcgggttacagccctgtggactatgcgagctcgtcggcaatagctgcgacctgctcggccgtctcgcacgaatacacacgaacgtcgctcagcgtacgcttgaccaggccggacagcgttttgccggggccgacctcaataaatgtgtcgatgccttgatcctgcagagcatgcagcgtatcgacccagcgtacggcatggctcacctgattggccaagacatccgatgccgtctggggatccgccggatagggcgccgctgtcatatttgccaaaacaggaatgagcaacggggacggcgcgtgaccggcctcaatatatgcggcaaggccacaggtcgcctcggccatataggggctatgaaatgcacccgacaccgcgaccttcatggcgcggccgccagcctcttttactaggacgtcgagctcctgcagcgcctcgggcgctccggccacaaccgtctgctgtgggctgttgtagttgactggccagcagtcctcgccggcctgttttgccaggccctcgacttgcgccgcatcgagcttgatgacggcgcgcatgccgcccggatggcgctcggcagccgcggccatcagcgccgcgcgctcgcacacgagctcaaagcccgctcgcgtatcgaacgcccccgcaaaggtgagcgcggcgacctcgcccagcgagaatcccgcacaggcggcaggtaccacgccgcgctcacgcagggcggcagccgctgccaggtcgtgcacgaacacgcaaggctgcgtgttctcgatcttcgagagctcctccttggaggcgctccggcactgctcgctcgtccccgggcgcacctcatcggcaatggcgaacacctcggcagccgccggcgatgtctcgatcaagtcgacgcccatcgcggggtgctgggcaccctggccggcaaacaaaaacgctacgccacccatgcgcacgcacccttcaggacgtgctcggcgccatcgaccaggtcgtcaacgatttcgcgtgcgctctggcgctcgttgaccatgccggcaatctgtccacacaaaaacgaaccctctttgtagttgccgtccttggcggccttacgcagcgcaccggttcccatagcaccgagctcctcggcactcgcgccggaaccctcgctcttggcataggcgttggtgaaggggctcttgagggcgcgcactggatgtcccgtcgagcgaccggtcgcacgcgtcgaagtgtcgttggccttcaggaccatctctttgtactgctccgagacggtgcactcgtctgcgaccagaaagcgcgtacccacttgcacgccttcggcgcccagcataaaggcggccgccacgccgcggccgtcggcaataccgccggcggccacaacgggaatgtcgaccgcatcgacgacctgtggcaccagtgccatcgtcgaggtctcgccaatatggccgcccgattcggtaccctcggcaacaaccgccgtggccccgcgacgcgccacgagacgcgccagcgccaccgaggcaacgaccgggatgaccttgatgcccgcctcgttccacgccttcatgtacttggcgggattgccggcgcccgtcacgacgaccggcactcgctcgtcaatcacgacctgcgcgacctcgtcggcaaacgggctcatgagcatgacgttgacgccaaagggcttatccgtcttggcgcgcagctcatgaatctggtcgcgaagccagttggcgtcggcgttcatggccgcgatgatgcctaagccacccgcctcggacactgcggacgccagcgaggcatcggcaatccaggccataccgccctggaacacgggcttttcgatgccgagcagatcgcagagaggagtcttgagcatctctacttctccaatgccgcctcgaccgtatcggcgaactcgccgaccgtcttggggttctcctcggtatcgagctggatgccaaactcgtcctcgacggcgacgaggatctcgacggtgcccaggctgtcgagaccaatctcctcgagcgtggactcgggcttcatctcgacatcgtcaagaccggcggtctcgcggataacgtcgcaaacgcgctcgaaggtcttctgatctgccatggtagttctcctttgtttgtgccctaggggcgttttttcctatgtgcaactacttccaacgaagcagatagccacctatatccaggccggcgccaaatccaacgagggcgatggtgtcgcccgcattcagtgcgtcggtgcgtgccagacggtcaagcgcaaagggaatgcaggcgctcgaaatgttgccggtctcgcgcagcgttcgaaccacgcgctcatctggcacgccgaggcgcttgaccgcctgactcaggattcgttcgttagcctgatggaatacaaaatggtcgatgtcttcgaccgaaatgcccgcatcgcccgcaagcttatggaccgtgtcgcagatggcgttgacgccgaacttgaacacgcggcggccattcatggacagcacgctcttgctatctgcggaagccttaaacggcgaggtgccgaccagaccgggaacgtgtaacgtctcgacgtcgggcgccgtcgaaagctcaacggcaagggggctgtctcccccagccccaatcactgcggcgcctgccccatcgccaaagagcacgcaggtggcgcggtcgatccagtcgagcgcgcgcgtcatctgctcagcagcaacgataagcacgcgctcggcacgaccgcgctcgatatagccctcggcgacatcgagcgcaaacacgaagccggcacaggccgccgagacatcgaaggcagggcacgccgctcctagtcgctcagcaacggcacacgcctcagcgggaacaaggtggtcacccgtcgtcgtcgagcagacgatcagatccagctggctcgcgtcgattccggacacctggagtgcccgctcgctcgccgctacggcaaggtcgtcaagtgactcggtggtacagacgtggcggctcttgatacctgtgcgggtaaaaatccactcatccgaggtatcgaggaactcagacagctcgtcattggaaacactgcgctcaggaagcgccgagcctgttcccagaatcgtgaaacccatcattagcctcctttgagttgttgacgtgtttacatcgaccaagagaggatagcgcattttagtcgttgttgacgtgttaacattaaattgtccaaatgcgacaaaggcttcacattgtgtctatctctcgacaccattacgcgattgccttattaacttaggaggtagcaaccgttatggatgccaaattaacgatagtcgacgtaaccggatcgaccaacgatgacctgctcgaagcaggaaaacagggagcgccgcacggcacaggacttgccgcccgggctcaaacagcaggacgcggccggcgcgggcacaagtgggactcaaccgtcggcaacttattgctttcgattgtcctgcgcccatgcgttaatcctgcaaagttctctggtcttgccgccgtcagcggcctagcggtgcttgaagcactcgaaaagcagggtcttgcaagcgagattcgccttaaatggcccaacgaccttgtcgcgcgaggacgcaagctcggcggcattctggtcgaggccgcacgcgataacgaaggcaagcccttcgccgtctgcggcattggcgtcaacgtaaactacacgccccaagaggtacccgatggcggtctggcggcaattggcctctcggaccttaacgagagcgttcccaccgtcaacatgctcctcgatgaggtctatcacgcagttatagacgctgtagatgcgtgggcagagcgtcttaacgccatggaagaagacggcggaccgctcgcgcccgtccacggcgaatatgtcactcacctcaattggattggggagcacgttatcgcccgttcccctgccggcgacgaactggcacgcggcatctttaaaaccgtcgatggctttggtcgcgcgtgtatcgaaacggaaggcggtttgcgatccttccattttgaggaggcatcgctgcgtcccgcgagcgaatagggcgccacagccagccgctcggcagccttatccggcggtccaatcccatcatgctaaacaaaagggccccgctaccgtaacggcagcggggccctttaagctatgagcgatatcgcttagagcttgatgtcgatgtcgacgccagcggggaggtcgagacgcatgagcgaatcaacggtgcccgaggtggggtcgaggatgtcgatgaggcgcttgtgagtgcgcatctcgaactgctcacgggagtccttgttcgtgtgcggcgagcggataaccgtgtacaggttgcgctcggtgggcagggggacaggaccggaaacgcgagcgccagtcttctgagcggtctcgacgatgagcttcgcggactgatcgacgacctcgtgatcatagcccttgaggcgaatgcggatcttctgggtagccaacttaaacctccaaagagtgcgagagatgttctcgcggattacgtaacagggagctcgaacttaggcgttcttgctcatgacctcgtccacgatggacttgggcgcgggctcataagagtcgaactgcatcgtgtaggatgcacggccctgggtctgggagcgaaggtcggtagcgtaaccgaacatctcgcccagcggcaccttggcacggatgagcttgctgtttttgcgatcctccatgccctcgatcttgccgcggcgaccggagaggttgcccataacgtcgcccatgtactgctcgggggtctcgacctcgacagccatgatcggctcgagcagctgcggatcggacttcttgagggcgtccttgatagccatggaaccggcgatcttgaaggcggcctcagaggagtcgacctcgtggtaagaaccgtcgaacagggtgaccttaacgtcgaggaccgggaagccggcgataacaccggtgttcagggcctcctggatgcccttgtcgatggacgggatgtactccttaggcacgacgccgccgacgatagcgttgacgaactcgtagccgaagccctcctccatcttctcgagcttgatgacggcgtgaccgtactgaccgcgaccgccggactgacggacgaacttgccctcagccttctcgacgtcgtgaccagcggtctcgcggtaggcaacctggggcttaccaacgttagcgtcaaccttgaactcgcggagcagacggtcgacgatgatctcgaggtgcagctcgcccatgccggcgatgatggtctggccggtctcgtggttggtggacacctggaaggtcgggtcctcctcggcgagcttggtcagagccagggacatcttgtcctgctcggccttggtcttgggctcgatggcaacgtcgataacgggcttagcgaactcgatcttctcgaggacgatctccttgccctcggcgcacagggtgtcaccggtggtggagttcttgaagccgacgcaagcgacgatgtcgccggcggcagcgtcgtcacggtcgatacgctcggcggcgttcatctcgaggatgcggccgaggcgctcgcgctgaccgttggaagcgttgaccacgtaggagccggactcggcgcggccggagtaaacgcggacgtaggtgagcttaccgacgaacgggtcggtcatgatcttgaagaccaggccggagaaaggctcgtcgaaggaaggatgacgctggatctcctcgccggtatccggatcggtaccggtgacggcctcaacgtcgagcgggctgggcaggtagtcgacgacagcgtcgagcagctcctgaacgcccttgttcttgtaggcggagcccacgaagacgaggttgagctcgttggccagaacgcccttacgcagggcagccttgagctcctcgacggtgaagtcctcctccatgaggatcttctccatgagctcgtcgtcaaagctggcagcagcgtcgaggagctcctcgcgcttggtggcagcgatgtcagcaaactcagccgggatctcgtccatcggctcggggtaggtcatgcccttgtcgtcggccttgaagtcccaagcagtcatggtgacgaggtcgatgacgccccagaagttgtcctcggcgcccatcgggacctgagcggccacggcgttggcgtcgagacgatccttcatggtctcgatagcgttgaagaagtctgcgcccacgcggtcatacttgttgatgaaggcgatgcgggggacgttgaaggtagaagcctgacgccaaacggtctcagactggggctgaacgccggcaacggcgtcgaagacggcgacagcgccatcgaggacgcgcaggcagcgctcgacctcggcggtgaagtcaacgtggcccggggtgtcgatgatctggatgcggtagtcggtaccgtccttcttccagaagcacgtggtagcagcggaggtaatggttacgccgcgctcctgctcctgaaccatccagtccatggtggcagcgccctcatggacctcaccgatcttgtgggtcttaccggtgtagtaaagaatacgctcggtcgtggtggtcttaccggcatcgatgtgggccatgatgccgatgttacgggtatcggaaagcttgtacttaggcttagccatgttagttccttaccttaaacttaccaacgatagtgagagaacgcgcggttggcctcggccatcttgaagacgtcctcacgcttcttgacggaagcgcccaggccgttggaagcgtcgaggatctcgttggcgagacgctcggccatggtcttctccttgcgagcgcgggagaagttgacgatccagcggatacccagagcggtggaacgacgggagttgacctccatcgggacctgataggtagcgccaccgacacgcttgggcttaacctcgagcgtgggcttgacgttgtccatagccttcttgaaggtagcgagagcgtcgccaccctcggacttctcggcaacgatctcgaaagcggtgtaaacgatgcgctcagcggtggccttcttgccgtcaagaaggaccttgttgatgagctgagtcaccaggcggttgttgtaaacggcgtcaggctgaacctcacgacgattagctgctgcacgacgcggcatgtgaaatctccttaagtgtctaccgtgcggcgcttaggcggcacacggcgaaagtatcaaaacgttatctggcttatttagccttggggcgcttagcaccgtacttggaacgggcctgcatacggttctggaccggagcagcgtcgtaggcgccacggatgacgtgataacggacaccagggaggtcacggacacgaccgccgcggacgagcacgatggagtgctcctgcaggttgtggccctcacccgggatgtaagcagtaacttcgatgccgttgacgaggcgaacacgggcaaccttacgaagagccgagttcggcttcttggggctcgtggtgaagacgcgggtgcacacgccgcgcttctgggagttgtgctgcagagcagcgttcttggacttcttgggcacggaacgacggccctggcgaaccagctggttaatagtaggcaaagcgtactccttctcgaatgattccagctttctgtaaagtgcaacggcttgaatcgaggggtcagcatccccctacgaaacacgcagttcgataggatacgtggcgttagctgtgccgtcaacagaccacgccgccgggcgtatcccaaaatagccatatttccgcaaagcctacacaaaaggaatcccctcctgtgcgcgggggcggattcccggcccgggcggcccgctgtttaagtttgctgctctacagtcctgcgcaagacggaaagcacattaagtgctttcctttgcgtgcggaactcgcgacaaacttaaacagcgggccgcccggaccgggaatccgacgtgcttgtcggggcaacgttcccttccaaatagggacaggtttattttggtcggttttatctggggaaacgtcgcgctccagcggtgatctgctctcatctgtcgcatggaaatcggcggcgtttccatttaacgcaaaagaggccgcttcccctagtaggaagcgaccccaaatcttacgaatagacgatggtaaagggctctttcgtttcggtctctcctgttgacgtgcacctcgtgccctcaagcgttactgagaccacttgatcgacatcaatcaacttcgttggcacccagatgttctctccgctattgcgcccataagaaaaatataagttgaacacccctgcgtcgtcatcttcgataatctgctccgatccatccttgtagctgacggtcagcttattatcaactgcttcatagcccaaatcatcgatgtgcgtctggatggaaaacgggctaatctcaagaggcgagtcaccggagcggagttcctttgtatcgacgtacgctccaatattgaactcgggtgtcgacgcctcaaaccgcctcgcactctcaccttcaccctcggtccaatggatattccaggtgacagcatgttgcaaatctcgctcgcgatccatagcggcaaagtacatcgtgccattaatgacagtatcgcttgatgtgtccttatcaattgtgctgcgcgtgtcaggccattcctcgccgaacttcatatcgggcgtgccgatgccctgctcttcttcaccatagagaacaagttcgccaatctctgctgctggcttgtagtagttaactccatttggattggacaacgtaaacgtcacggctccgcagccgttttggtcgattgccatctcatggatatcaagcgtatagccgttgccctcgacggacagattaacctcctggactgcgccttccaggctttggggcgcgatgccatcgccaaactctctggtgtaggtatatttagttcccgatgagccgccgttggtccaggtaatggaatccccgttgccgtggtttccccaggcagaggcaaaatagctggaattgacgacggcgtaggcgacccctccggtcgccagcactccggcaaggcatccgatcacggcaacatacagaggcttcgcgtgaccctttcggcgaagcggctcaccagcagcggcataaagaacacggtcagcaagatcgctatcggcttggacggactcgaaggcctgcttgatttgattggatttcacggtcgccctcctctaggatgaacttgagcttcgatctgccgcgagccaaacgcgttcgaacagtcgcggctggcacatgcaataactcggcaatctctgaggtcgaaaagcccagatagtaatagagcatgatgggaacacggaatcgttccggaagtcgcataacgtctgacaggaccgccttggtctcctcctgcgccgccgaaagcgaatcggccaggttctcaatatcctccacacgcctccatggctttcgaaagagcgatttacattcattgatcgtgacccggataagccatcgacgaaggtgttcccaactttcaaaatgtccatcgcttttaagcagcttaagaaagacatcttgggcaatatcgtcggcatcggcacgatcgcgcaggtacgtcaatgcgattcgaaacacgacatcacggtgatcctcgaccgcctgtctaaatgcttgttcttccataatcacctcccggtgatgctgatgtttcttgctgaggccctcaccatagatacgctttgaccgaacggaatgtttcaaattcaagcagtaaaaacctaccaaaataaacctatccccttttggcaggggatcaacggaacgcaacaggttgagcatacgcaagcgagcggcccccagagcgtacaaggtggcatgaaaaaggcagggcattgaccttttggccatgccctgccttttgaatgacagattgtagctctgggggccgcgcagcgacggaggtcgccnnnnnnnnnnggaactaattactcctcgtcgttgtccttggcctcttcggcgtcgtcggtgtccacgagctggttgagcagctcgtcgagggacgccatgtcctcgttgatggcaccgttggcgggagccttcttgtcgtcgatcggggcgcccaggagctcctcgtcggcgtcggcgtgatgcgtcggagcggaggtacccagcaggatatcgtccggaccgtcggggctaaagaccatctgcagcagctgcgagaggtcttcctcgtcggcaacgtcgtcgttgttctcgaggatgtagagcaggtcgtgggcctcaaggccgtcacggagctcctcgatcgccttggcaccgatgccatcgatgcgcagcagatcctcctcggacttaccaaccaggtcgccgaccgtctcgatgccgacctcgctgaacttgttggtccagcgctgcgacacgcccaggtcgtcgaacaggtacaggcgagccttctcggcagagatggtgtgaccgttgcgggtgaacgaaccgtcagcaccgccaaactcgtcgtagccggcccagtcgagctgctgcggaagctgctcgtccaggtccttgagctccacaggagcccactcgggcagcgacttggcgttgggcgaagccgggccgtcgatgtccacgtagccgtcggccgtgcgatacgtcagcttggcgttggcgtaaggcttgaggccagtaccagccgggatcttcttgccgacgatgacgttggacttaaggtcgagcaggtggtcgaccttgccctcgatggcagcctcggtaaggacgccggcggtacggatgaacgaagcgctcgacagccaggagtcgatgttggacgcaaccttgagcgtacccaggatgacgggctcggccacgggagcctgaccgcccagacgggcaacgcgctcgacctcgtcggcgaactcgtagcggtcgacgtactgaccaagcaggtacttggagtcgccggggttggtgatctgaacgcgacgcagcatctgacgtgcgagcacctcgatgtgcttgtcgttcaggtcgacgccctggctggtgtagacgtccttaacgctctcgacgaaggtgtgcatcgtcgactcgatgtcggtcagcttgcgcaggttgcggaagttgacgaagcccttggtgatctgatcgccggcgcgaacctcgcagccgtcctcgatctcgggcataaagcgcaccgatgcggggacgcgacgctcgtcgaggacacgggtgtgatcctcggagtcggtgagcgtcagcacgtactcggacttctcgggcttaatcgagaggtgaccggagtacggagccagctcggcctcgcgacccagaatcttctcgttgacgttgccgacgatatcgaacatacggctgaccgtaggcagaccctgcgtaatatcgtcgacgccagcgacgccgccggagtgaatggtacgcatcgtaagctgcgtacccggctcgccgatggactgggcggcaataataccgaccgcggtaccgatggcgaccggacgacgggtggaaagatcccagccgtagcacttctggcacacgccgtacttggagcggcaggtgagcagcgcgcggagcttgaccttcttaaggccagcatcgaccatcttctggatgtcggcgaccttctcgatgtagccgtcctgctcaaagagcacggtgccatcgggagccacgacatcctcaatgaagcaacggccgacgaggtcggtgttgaggtcggtggtgccggggatgatgaggttgtaggtgacgccctcgtgcgtaccgcagtcctcctcgcggacaatgacgtcctgggccacgtcgaccagacgacgggtcagataaccagagtccgaggtgtgggatgcggtatcgaccaggcccttacgggcgccgtaggtcgaaatgaagtactcgagcggcagcagaccctcgcggaagttcgccttaatgggaaggtcgatcgtctcgccggacatgtctgccatcaggccacgcatgccgccgagctgacgcagctgggtcttagaaccacgggcgccggagtcggccatcatgtacagcgggttctcctcgtcgaacatgtcgagcatgagcgctgcaaccttatcggtacaagcggtccactcgttaacgacttcgatgtggcgctccgtctcgttgatgaagccctcctcgaagtactcgttgatctggtcgacgttggcctgggcgcggtcgagcagctcctgcttctcggcagggatgagagcgtcccacaccgagatggtgaggccagcgcgggtagcgtagtggaaaccggagtacttgatggcgtcgaggatcgggccgaccttggcctcggggtaacgatcgcagcagtcggcaaccagcttggccacatcgcccttgaccatcttgtagttcatgaactcgtagtcttcgggcaggcactggcggttgaagatgatgcggccgatagaggtctcgaagcgcgcggtcttgttgccggtgacgtcgtagtcgacaaactcgttcttgccgttcttgacgcggaagatacgggtgccgtcctcgttgatgacgttggcatcggcagcggacacgcggacctggatcttggcctgcatgtcgacctcggagcggcagtcataggcgtgcagtgcgtcgtcgaagctcgagaacacgtggttctcgcccggcagaccctcgcgaacctgggtgaggtagtacacaccgatgatcatgtcctgcgaaggaatgttgaccggcttgccggatgccggcgagcgcaggttgttcgcagagagcataagcacgcgagcctcggcctgagcctggctggacagcggcacgtggacagacatctggtcgccgtcgaagtcggcgttgaagggcgagcagaccagcggatgcaggtggatagccttgccctcgaccagcaccggctcaaaggcctggatggacagacggtgcagggtcggtgcacggttgagcagcacgacgcggccgtcgatgacctcttcgaggatatcccacacaaaggtggcaccgcggtcgatagcgcgcttggcgcccttgatgttctcgaccttgccaagctcgaccaggcgcttcatgacgaagggcttgaagagctccagcgccatggtcttg

SEQ ID NO: 141 - DNA, 7949 bp, unidentified
  source 1..7949: mol_type = unassigned DNA
tcagccctgataggctttgtttattacttccttgaacttgtcaattccaactctttcaagtgtaaagcggaatctttctcccggattagcattctcattaaagaaattaattgcagcatctgtaactctgaaaagctgctcctttgatgtaacaaccggtataagctcctcgcctctatgtatcttattaccaaataatccgccaaatgacacgatatatccgttttcacccttccatgcatctgttggacaggctttctcacatcttccacaatagttacacttatctgtatcaagcttaagttcaccattttcttctgtgattgcaccctctctgcaggcctttaaacagacaccacacatgatgcaggcatccttatcccaggaaacaattgatgcacccttgattccaacatcattttcctctgccttaagacagttgttttggcatcctgtaacaccaaatttgaacttatgtggaagctcctttgcataatatcttttgtctatttccttagcaatgtcatatgaatcaatgtttccgcttggacagacctgattaccctgacatgcagttactgttctaacacgtggtccgcatactcccggttttacaccaccttctgcaagcaaatccttaacctcatctatattatcaagcttaataaatggaatttccacactctgtcttgaagtaagatgaacatgtccatcaccgtatttctcagcaacctctgctattttcttaagattctcagctgtaagattacctcctaccacctgaagtcttaatgaaaaattgtttttctgtttctggcgcatgaatccaccttttttaagtgttgcataatcaactgccatatttttttcctcctaactaatgataacgtcttttattggttgttgttaatggcattatcaaaatcttttataaggtcttctatgtcttcaattccaacacttattcgtataagatcgccatatacatccgcatcttccttttcctttggtgtactgtgtacgctaagtgttgattccggatgaacaattaaagtctttgtatcacctatattggatacaataagaggaattgtaagacgatccattatatcaaatgctttttccttacttccaactctgatggtaagaatagttccatatccatttttaagaaccttatctgctttttcatgccatttgcttgattccaatccaggatagtttactataattccatctatactgtctatatatttagcaagattcatcgcattttcacaggctctctccattctaagccccagtgtttccattccaatgaggttataaaatgcagtctgtggagacaaacatgcacctgtatttctgaaaagaccattacgaagctttgctgtataggcaaatttgccaaacttcttataatccttcattaatggatatttttcaacatcatatttgaattttccactgtcagttatcacaccacttattgcattgctgtgaccatttataaattttgaagtagaattaacaactatgtctgctccaagctctaatggttttacaagatatgctgttgccactgtattgtctataacaagaggcacctggtattcatgtgcaagctctgacaatgcttcaatatcaattacatcaagcttaggatttccaattgtctctgcaaatattactcttgttttatcatttactgccgctcttacagcatcaaggtcattgccatcaacgaaatttgtctttattccgaaggcctccatatcgtgaaataaatctattgttccaccataaaggcttgtaccggcaacaatttcttctccggatcttacgatattaagaagggcatttgttatagctgccattcctgaggcacatgctactgatgcgattcctccctctaatacagtcattctctgttcaaatgctgctattgtcggattatttattcttgtatatgaaaatccgtccgccttgttattaaataatttctcatgctgttttgcagaaggctgataaaatgcactggactggtatacaggtgtaagtgttgcacctgtaaccttatcccctgttgcagcctggtgtaaaagtgatgtgttaaatcccatattttcctgcctccaagcttttgtaattaatcccatgtttcatctctgaatactattcttctgtatgtttcaaacttaagccatttattgaaaaatgcgctgtctgcgttatatgatacctttttaagctctgcaaagaattcatttgccgaagccttgtcacttacaagaacctcaaatcctctaccgtttataacaggagcattgtcgtattcatacttgtcaaatggaacaatctccttaattactctgtctcttaccttaacggcaacacggtcacgaagtactactacgtcaaagctgtcaggataattatagctttctccctcaaccggaatagtatcattcaatgtgtaggtcttgccctctggtcttaccttggtaattgccattgtttcaaggttgtaataatattcttcgaatatatctccctttgccttaagatttccatatgcaaatgcacatttaagatctgttctgtcgtctacctcagagttttcaacaacaccacatgctgatgtcatatttgttactctgtctataagaataagctctccaagtgttttatgctttgtaaatctgtcaagtacgatttcttcctgaagagatatatcgcatacagcaatctcatttttcttaagaactgatgctggtatgtattcacctgtattgacatctatcttgtactgtatatttttaagaacacctggaatctgctttgttccaacctttacaaggtattcctttcctgctgtaagctctccatcgtccatccagagtattgtggctgtaaatgatttgcttacaggaagctttgttgcctttgaaagaacgcatcctcttgatacatcaacttccttgtcaagctggatagtaacaggtcttcctgtttctgctgttttgctttccttatcaccaataagaattgactttacatgtgcgtgctcattacttggaagtgttatgacctcatctccaactgatacgcttcctgactcaatctgtccctggaaacctctgaaggtatggtctggacggcacactctctgtaccggcatgtagaaaccttcctctgtctttttctcagttacatcaatatcctcaaggtatgataagagtgccccacccttgtaccagggaatgttatctgatttcctggtaacgttgtcaccttctgttgctgatactggaattattttgatgctttcaagtgaaagttcttccttaagctcaagtatctgctcctttatttcttcaaatctcttctcatcgtatccaacaaggtccatcttgttaactgcaaatacaaaatatttaattcccattaatgcacatattcttgcatgtcttcttgtctgtactaaaacaccctgttttgcatctataagaattacggcgaggtcagcaaatgatgcgcctacagccatgtttcttgtatattcctcatgacctggtgtatcagctacaatgaagctcctcttatctgtagtaaaataacgatacgctacatcgattgttattccctgctcacgttcagccataagtccatcaagaagaagtgaatagtcaattgctcctcctctgcttcccactttgctgtcaagctcaagggccttttcctgatctgcatataaaagctttgaatcgtataaaatatgtcctataagtgttgatttaccatcatctacacttccgcatgttataaatttaagtaatccgctcatactagaaatacccctctctctttcttctttccatactgcctgctgcctcgttatcaataactctggttgttctctcagaagatactgctgaaagtgtttcatcaataatctctggaagtgttgtggctgttgactcgcatccaccggtaagaggataacatccaagggttctgaatcttacgctcttcatctcgattttttctcccggtcttaacttcatacggtcatcatccaccatgattatgttgccatccctgtatacaaccggtctttctttggcaaaataaagtggaactatatcaatattctctctctgaatgtacttccatatatctgtttcagtccagttagagattgggaatactcgtatgctctctcccttatgaatcttggaattgtaaagcttccacatctcaggtctctggtttttagggtcccaggcatggttctcattacggaatgaaaagattctttccttggctcttgacttctcctcatctcgtcttccaccaccaaatgcagctgtaaagccccatttgttaagggcctgcttaagggcctgcgttttcataatatctgtataagctgaaccgtgatcaaatggattgatgcctctcttaactccgtcttcgttaatgtattcaagcatctctattccatatttctcagctgtcttatctctgaattcaatcatttccttaaatttccatgttgtgttaacatgtaagaaaggaaatggtggcttctcaggatagaatgctttaagtgccagatgaagcattactgaactgtcctttccgattgagtacagcattacaggcttttcgcattctgctgccacttcccttataatatatattgcttctgcttcaagttcatcaagatgtgataatccgctcatattaaacctcctgtgttgcctcattttctaatacttattggcttcttttttattgattgctattgtctttacagttccatcattcaaggttacattccagttaagaatgtctcccttattctcaactctcataaggcttccattgcctcctgaatcagctccgatatataaagcaatagctccaaacctgcattccttaatacatgatgagcatccccagcagtccttaggatacttcatatatgccttacctgactcatcagctgatatcagtgttcccggacagaccttttcacacctgccgcaagccctgcacttatctttgtcaattgctatgctcatatatttcaccccttcttacaagagctctgtctaatataactatctttccatcctccattctggaattaatgtacttaagatagttatcatccttgtcaggataatcaagattttcatcaaaacagtgccatcttgtttcttttctagctttcaaatgtgctataagcaccttacagactgtaagtctttccctaatctcatatacaaacatcaattcatgcatatcttctgcccctgcattcttagcaagtttctcaattctgtcaatcttatcttctgcaaggcaaagctgcttttcattgaactgataatggcttccgattcctcctgcgtaggaatccataaccttctgcatggcttcctctaactgctccacaccatataagctgtttttattattaagaattttgttatattcttcaattttcttatcaaataaactgttgaaatattcatcatctttatctgccttaggatctgattctctgtcaagctcttcaatcatatgaagcgctgcaatctcaccctcaaccattgctccggttacatatttctgtggacatcctcctgccacatctccggctgcgtaaaggcccttaactgtagtctgtctgttagtatcaacccagtatccactagctgtatgaccacctactatgtaaggctctgttccttctatctcaacattttcctcacttggattcctgccttcttcaatccacttaagtgtctggcttggtgccatattcaaataagcttttttaagggattcgtccttgtcttcgcttataccctttgttctaaggtaacatggccctcttccttcaatattctccttaactgttccataaagacgttctgaagttgtaagaccatatttatcttcataaacctctccaagtgaattgatctgctttgctccaactccctgggctattgttcctgtaggtgctatagtatccttacaccttaaggctatgaatctcatctcaaaggttgtcatctctgcaccggcccttatacccattgcatatcctgcaccggtattaaatggcgggtaccacattttatgtcttgagaaacccggattgttaggcttgtaaagacctgcggctcctcctgtggcacataaaactttttttgccctgatctcataggctgtgccatcttcgattgaaaaaccaaatgctccttcgatttttccatcatttataatataatctgtaatatttaccctgtttaaaatacttatatccttaagatttcttgtagcttctgcaagaagtggtttaatattctctccgttgatcttaatgtttctgttacctcttgaaacatattcgccattctcatccttaagaattacaagaccaagcttttccatcttctcagttacttcgttaagtctttctgacattgtaagcaaaaggtcttctcttacaattccgtcagcatccttcactgcataatccacataatcttctggctttcttccattaattatgtaagcattaattgcattaactccggctgccaggcatccgcttctctctatgttggctttttcagcaattacaatactgtaatcagaatgttctcttatagtaagtgcagcaaagcatcctgctgttccgcctccaattataagaatatctgtatctataacttttttattattaatgttcatatttttcatccctcacattcggagtatgttttgaagtttttgtatttccttcaacctgttggcattatattacacctcaattcccactatgtcaataggaataatataaattaaatataaaatacatcgttttcctgcatttccttattttccatgaaataagtcctgttctcatcaaataagtacaatctgtatataagtacgtgaaccttttcccctacatttacagcatccttttctaaggatctttcaccaacaatgcttattccgttaacgttaacggtaacatcaaccctgttacccctgaagcatacatcctcaacaatgccttcctccgcagcactcatatatctgtcaagctttccgcttttggatatcttcacaaattcaggtcgcaaaaccgctctctcggcattagatattttgtcgaagcccttcagtctgtcataatcttctacaactgttgaattaccaacgaactgtgcaacaaacggagtctgtggctctttatatatttcaaaaggagaacccttttgttcaattcttccatgattaacaattattatctcatcggcaacttccactgcctcatcctgatcgtgggtaacaaatatacttgtaattcctaatttgctaaccatttccttaagccagcttctaagatcttttctaacctttgcatcaattgccgcaaatggctcatcaagaagcagcactcccggattaggcgccagggctctggcaaatgctaccctctgcctctggccacctgacagctcatttggatatcttttctcaagaccttcaagaccggtaagttccaaaagctccttaactctttcctttattttgttctttggcattttctggagctttaatccaaatgcaatgttatcaaatactgtcatgtacctgaaaagtgcataattctgaaacacaaagcctatacccctttttgcggcaggtatatcatttattcgcttgccgtctatgtatatatctcctgaattaggattttccaatcccgcaatcattcgaaggagtgttgtttttccacttccggaaggaccaagaagtgcaactaattttcccttttctattccaaagctcacatcatccgatgcaagaaagcttccgtattgcttgtatatattcttcatttcaacatacat

SEQ ID NO: 142 - DNA, 25022 bp, unidentified
  source 1..25022: mol_type = unassigned DNA
  misc_difference 3005: note = a, c, g, or t
  misc_difference 3006: note = a, c, g, or t
  misc_difference 3007: note = a, c, g, or t
  misc_difference 3008: note = a, c, g, or t
  misc_difference 3009: note = a, c, g, or t
  misc_difference 3010: note = a, c, g, or t
  misc_difference 3011: note = a, c, g, or t
  misc_difference 3012: note = a, c, g, or t
  misc_difference 3013: note = a, c, g, or t
  misc_difference 3014: note = a, c, g, or t
  misc_difference 3015: note = a, c, g, or t
  misc_difference 3016: note = a, c, g, or t
  misc_difference 3017: note = a, c, g, or t
  misc_difference 3018: note = a, c, g, or t
  misc_difference 3019: note = a, c, g, or t
  misc_difference 3020: note = a, c, g, or t
  misc_difference 3021: note = a, c, g, or t
  misc_difference 3022: note = a, c, g, or t
  misc_difference 3023: note = a, c, g, or t
  misc_difference 3024: note = a, c, g, or t
  misc_difference 3025: note = a, c, g, or t
  misc_difference 3026: note = a, c, g, or t
  misc_difference 3027: note = a, c, g, or t
  misc_difference 3028: note = a, c, g, or t
  misc_difference 3029: note = a, c, g, or t
  misc_difference 3030: note = a, c, g, or t
  misc_difference 3031: note = a, c, g, or t
  misc_difference 3032: note = a, c, g, or t
  misc_difference 3033: note = a, c, g, or t
  misc_difference 3034: note = a, c, g, or t
  misc_difference 3035: note = a, c, g, or t
  misc_difference 3036: note = a, c, g, or t
  misc_difference 3037: note = a, c, g, or t
  misc_difference 3038: note = a, c, g, or t
  misc_difference 3039: note = a, c, g, or t
  misc_difference 3040: note = a, c, g, or t
  misc_difference 3041: note = a, c, g, or t
  misc_difference 3042: note = a, c, g, or t
  misc_difference 3043: note = a, c, g, or t
  misc_difference 3044: note = a, c, g, or t
  misc_difference 3045: note = a, c, g, or t
  misc_difference 3046: note = a, c, g, or t
  misc_difference 3047: note = a, c, g, or t
  misc_difference 3048: note = a, c, g, or t
  misc_difference 3049: note = a, c, g, or t
  misc_difference 3050: note = a, c, g, or t
  misc_difference 3051: note = a, c, g, or t
  misc_difference 3052: note = a, c, g, or t
  misc_difference 3053: note = a, c, g, or t
  misc_difference 3054: note = a, c, g, or t
  misc_difference 3055: note = a, c, g, or t
  misc_difference 3056: note = a, c, g, or t
  misc_difference 3057: note = a, c, g, or t
  misc_difference 3058: note = a, c, g, or t
  misc_difference 3059: note = a, c, g, or t
  misc_difference 3060: note = a, c, g, or t
  misc_difference 3061: note = a, c, g, or t
  misc_difference 3062: note = a, c, g, or t
  misc_difference 3063: note = a, c, g, or t
  misc_difference 3064: note = a, c, g, or t
  misc_difference 3065: note = a, c, g, or t
  misc_difference 3066: note = a, c, g, or t
  misc_difference 3067: note = a, c, g, or t
  misc_difference 3068: note = a, c, g, or t
  misc_difference 3069: note = a, c, g, or t
  misc_difference 3070: note = a, c, g, or t
  misc_difference 3071: note = a, c, g, or t
  misc_difference 3072: note = a, c, g, or t
  misc_difference 3073: note = a, c, g, or t
  misc_difference 3074: note = a, c, g, or t
  misc_difference 3075: note = a, c, g, or t
  misc_difference 3076: note = a, c, g, or t
  misc_difference 3077: note = a, c, g, or t
  misc_difference 3078: note = a, c, g, or t
  misc_difference 3079: note = a, c, g, or t
  misc_difference 3080: note = a, c, g, or t
  misc_difference 3081: note = a, c, g, or t
  misc_difference 3082: note = a, c, g, or t
  misc_difference 3083: note = a, c, g, or t
  misc_difference 3084: note = a, c, g, or t
  misc_difference 3085: note = a, c, g, or t
  misc_difference 3086: note = a, c, g, or t
  misc_difference 3087: note = a, c, g, or t
  misc_difference 3088: note = a, c, g, or t
  misc_difference 3089: note = a, c, g, or t
  misc_difference 3090: note = a, c, g, or t
  misc_difference 3091: note = a, c, g, or t
  misc_difference 3092: note = a, c, g, or t
  misc_difference 3093: note = a, c, g, or t
  misc_difference 3094: note = a, c, g, or t
  misc_difference 3095: note = a, c, g, or t
  misc_difference 3096: note = a, c, g, or t
  misc_difference 3097: note = a, c, g, or t
  misc_difference 3098: note = a, c, g, or t
  misc_difference 3099: note = a, c, g, or t
  misc_difference 3100: note = a, c, g, or t
  misc_difference 3101: note = a, c, g, or t
  misc_difference 3102: note = a, c, g, or t
  misc_difference 3103: note = a, c, g, or t
  misc_difference 3104: note = a, c, g, or t
  misc_difference 11017: note = a, c, g, or t
  misc_difference 11018: note = a, c, g, or t
  misc_difference 11019: note = a, c, g, or t
  misc_difference 11020: note = a, c, g, or t
  misc_difference 11021: note = a, c, g, or t
  misc_difference 11022: note = a, c, g, or t
  misc_difference 11023: note = a, c, g, or t
  misc_difference 11024: note = a, c, g, or t
  misc_difference 11025: note = a, c, g, or t
  misc_difference 11026: note = a, c, g, or t
  misc_difference 11027: note = a, c, g, or t
  misc_difference 11028: note = a, c, g, or t
  misc_difference 11029: note = a, c, g, or t
  misc_difference 11030: note = a, c, g, or t
  misc_difference 11031: note = a, c, g, or t
  misc_difference 11032: note = a, c, g, or t
  misc_difference 11033: note = a, c, g, or t
  misc_difference 11034: note = a, c, g, or t
  misc_difference 11035: note = a, c, g, or t
  misc_difference 11036: note = a, c, g, or t
  misc_difference 11037: note = a, c, g, or t
  misc_difference 11038: note = a, c, g, or t
  misc_difference 11039: note = a, c, g, or t
  misc_difference 11040: note = a, c, g, or t
  misc_difference 11041: note = a, c, g, or t
  misc_difference 11042: note = a, c, g, or t
  misc_difference 11043: note = a, c, g, or t
  misc_difference 11044: note = a, c, g, or t
  misc_difference 11045: note = a, c, g, or t
  misc_difference 11046: note = a, c, g, or t
  misc_difference 11047: note = a, c, g, or t
  misc_difference 11048: note = a, c, g, or t
  misc_difference 11049: note = a, c, g, or t
  misc_difference 11050: note = a, c, g, or t
  misc_difference 11051: note = a, c, g, or t
  misc_difference 11052: note = a, c, g, or t
  misc_difference 11053: note = a, c, g, or t
  misc_difference 11054: note = a, c, g, or t
  misc_difference 11055: note = a, c, g, or t
  misc_difference 11056: note = a, c, g, or t
  misc_difference 11057: note = a, c, g, or t
  misc_difference 11058: note = a, c, g, or t
  misc_difference 11059: note = a, c, g, or t
  misc_difference 11060: note = a, c, g, or t
  misc_difference 11061: note = a, c, g, or t
  misc_difference 11062: note = a, c, g, or t
  misc_difference 11063: note = a, c, g, or t
  misc_difference 11064: note = a, c, g, or t
  misc_difference 11065: note = a, c, g, or t
  misc_difference 11066: note = a, c, g, or t
  misc_difference 11067: note = a, c, g, or t
  misc_difference 11068: note = a, c, g, or t
  misc_difference 11069: note = a, c, g, or t
  misc_difference 11070: note = a, c, g, or t
  misc_difference 11071: note = a, c, g, or t
  misc_difference 11072: note = a, c, g, or t
  misc_difference 11073: note = a, c, g, or t
  misc_difference 11074: note = a, c, g, or t
  misc_difference 11075: note = a, c, g, or t
  misc_difference 11076: note = a, c, g, or t
  misc_difference 11077: note = a, c, g, or t
  misc_difference 11078: note = a, c, g, or t
  misc_difference 11079: note = a, c, g, or t
  misc_difference 11080: note = a, c, g, or t
  misc_difference 11081: note = a, c, g, or t
  misc_difference 11082: note = a, c, g, or t
  misc_difference 11083: note = a, c, g, or t
  misc_difference 11084: note = a, c, g, or t
  misc_difference 11085: note = a, c, g, or t
  misc_difference 11086: note = a, c, g, or t
  misc_difference 11087: note = a, c, g, or t
  misc_difference 11088: note = a, c, g, or t
  misc_difference 11089: note = a, c, g, or t
  misc_difference 11090: note = a, c, g, or t
  misc_difference 11091: note = a, c, g, or t
  misc_difference 11092: note = a, c, g, or t
  misc_difference 11093: note = a, c, g, or t
  misc_difference 11094: note = a, c, g, or t
  misc_difference 11095: note = a, c, g, or t
  misc_difference 11096: note = a, c, g, or t
  misc_difference 11097: note = a, c, g, or t
  misc_difference 11098: note = a, c, g, or t
  misc_difference 11099: note = a, c, g, or t
  misc_difference 11100: note = a, c, g, or t
  misc_difference 11101: note = a, c, g, or t
  misc_difference 11102: note = a, c, g, or t
  misc_difference 11103: note = a, c, g, or t
  misc_difference 11104: note = a, c, g, or t
  misc_difference 11105: note = a, c, g, or t
  misc_difference 11106: note = a, c, g, or t
  misc_difference 11107: note = a, c, g, or t
  misc_difference 11108: note = a, c, g, or t
  misc_difference 11109: note = a, c, g, or t
  misc_difference 11110: note = a, c, g, or t
  misc_difference 11111: note = a, c, g, or t
  misc_difference 11112: note = a, c, g, or t
  misc_difference 11113: note = a, c, g, or t
  misc_difference 11114: note = a, c, g, or t
  misc_difference 11115: note = a, c, g, or t
  misc_difference 11116: note = a, c, g, or t
tctgggatacgatctacggcactatcacgcccagcaccatgcgtttattaaacagttcaaccttccggcacattttcagtttgatgtggccgccggatgaacttatgttcttataaccctaaaacccgtaatgaacggtgcgttatgcctgtccatcacgggtttttcgtgttatttcagttttgcgaggatttcatcggcactcatgccttcggcaagcagctttttcagaacggactctgcttctgtctttttcgcttcttctgcagctttggcatctgccttcgctttttttgcttccagagttgccacttctttttgggtcttcttcagagcagtcttcttctctttcaagtcagcctttaaagtgtcaatgttggcggtgatggatgcgatttccgctgtgagtgcttccttcgcggactgcttttccgcaatctgcgttgcaaaatcagcagtcacagttttgggcttgttcttgctactttttgttctgggcataataaataacctccagaaaattatagtaattttagtatagcactctgataaggctgtttcaatattacgcttaataaatgcttattttctggtaggctattttcaatttacagactatatcctctatcacgaatcacatcgacaacttcggaaacatatttctgacaagtatcatgatcagaggcttccaccatcacacgcaccacaggctccgtgccggattcacgaaccagaatacggccagtatcccccagtgcttcagccacattctttaccgctgtctgcacagcctcgtcgttctgtgctgccttcttatccgttacacgaacattctccagcacctgcggataaattttcagcggtgctgccaattcgctcatcggcttctttttagccagcataacttccatcattttcaaactcgtcaggataccatcacctgtgctggcatacttggagaagatgatatgtccgctctgctcaccgccgatacgacagccgttctttgccatatactcatagacgtacttgtcgcccacagcggtcttagcataaccaatgcccttttcgtcaaaggccttatacaaaccaaagttggacataactgtggtgacaacagtattatttaacagcttaccacgttccttcatgtagcaaccgtaaatgtaaaggatatggtcgccagtgataacattgcccttttcgtccacgcacaggcagcggtcggcatccccatcgtaagcaaaaccaacatccaagcccttctccacaacaaacttctgaaggccctcgatatgggttgaacctgcattgttattgatgttcaggccattcggattattattgatgacataggtatctgcgccaagcgcatcgaacacggactttgcgatattccaggagctaccattggcgcaatccaaaccgaccttgacacccttaaaggagtagatgcccagcgagatcaggtagcccatgtagcggttgcgacctgccacatagtccacagtgcagccgatgtgctcacgatgagcaaagggcaactctggccagtccttatcaaagacatggagtttgccatcaatgtagtcctccaccagcagcagagtttcctcaggcattttctctccgtagcagtcgattagcttgatgccattgtcgtagtacggattgtgactggcggagatcataatgccgcaatcaaagtcatccacgcgagcgatgtacgccacagatggagtagtggtaacatggagcaaataggcatctgcaccagaagcggtcagaccagccacaaggctgtactcgaacatgtacgagctgcggcgggtatccttaccaataacaatacgagcagggtcggtgtcaccgttgcgctcacggagaccattataataccagcctaagaagcgaccaaccttataggcgtgatccgctgttaatgtaattccggcttctccacggaagccgtcggttccaaagtattttgacattgttagttttcctttacttttttctttcccaccatccatggagcaagtcttacaacaacctcatatgccgtactgcatattgccatcgtaataactaccactaccatggccagtagaaaattttctctcactgcatctgtacccagattcaacagaattgatacaatttttaccacaattcgatacacagggccgtgaatacaaagaataattagagaaatccgaccaaagtattgcaggattctattctcgttgataagttgagaaatcagaattacagcagcaacaccaatcatggctgttacaaaccacatgattcccatagttaaatgatagcatgataaggaaaagctcaaagcaagcagaactatcgctactattcctgctttcacttttttctttaccgctttcacgcttttccccgctatgaacacacccacagcatagaatcctatgtacttgaatacacgatcaatgccccaaataagtccatgcattggaaccacaataaaagctaaactcattagagcagaaacaagataagccattctccttccgcctagattaaccagtatattaaaaaggattaccgttacaaagaaacatggtaagaaccacaaatggatgttgaactccaaattatcataacagccagagaataaaccgaacaaagaatccataaaactcatatctgaatcccggaatcttctctccatcaattgccagtagataagaaccagaaaaccgaatgagaaatacggaataacaatggtttggattcttcgctttatgtctgctaaaactgttttttctttatacacccatcctgctgccaagaaaaacagcggcatatggaaggaatacaaccaattaaagatggtttgattggaatagatatgccctataacaacaaggattatgcctatcccttttaacacgtcaagccatgataaacgctctgctctgctctgctctgctctgctctgctctgctctgctctgctctgctctnnnnnnnnnnnnnnnnnnnnnnnnnnnnnnnnnnnnnnnnnnnnnnnnnnnnnnnnnnnnnnnnnnnnnnnnnnnnnnnnnnnnnnnnnnnnnnnnnnnngctctgctctgctctgctctgctctgctctgctctgctctgctctgctctgctctcaagattgtgtcatctcccaactctttgtcaatatgaaagtttatcttctaattccaactttagacaaaataatcttgatttcatttttcaaatattctttcggtagtattttcttcatagcaaaatcaaaacccttttctaagttttcaaagaaaaacattcttgatgatggaattctcgatggatattccaattgatgatttaattggatcgctcttgtaatatccgcatcaaatagttccacatttgacttttttagtaattcttctccctttttcgtttgacagagaactaaagatattccctttttcttttcctcttcagacaattcacttccccatgaatcacctaatgaaatatctgaaacacgagattgtgacgcataacgacaggaataacaattctcagtataatcaatacttttcaggaaagcatatgtatacatatcaacaatccgcggaaaaccattatttttccctactgatcttaagccaaatgatgttttctcacggaaattcaacccttctaattcttcgatatccactgatttttcttttaaatacatcttcaacaattcaggtgaaggggacccgtggcatattaaatccactgtatacaaattatcttgattgcgtgagaaatttttcaatgccgcaacttgacatggcaatccaacaaaaaggacttttttcccttcttgtagtttcctttcaatatctatatatattgtttttggattacttttaacatatttagatcctacaaattgctcagccctttgggtcgaatttgtcaattcaaaaacaaattctcccttattaagcatacacgaagcaacatatccaccatttttaataaatgaatatataattgatgaagcaattcctcctgaagatgcattacttctgatttcaggattcaatgcccatccttctttccaaaagatagggttaacctgctccacgcattttacattaggacaaattttttcacacaacccacaattcacgcactttacttcatcaattacggcattatatgtcttgtaatcatctacaatagtaatagcactctttttgcacatatttatgcaagccatacaaccagcacacatatccttagcgcacacggttttcatgcaaaagcacctcccgtgataggcacaagaatatacgctgttttctctattataacattatttcttatacccccccccagttttcgcagccttcttaaatcctatagcttttctaatagccatgagccttggtgaaataaaatagcaacaccacataatttttttcttaatacttttttccatttttaatggcaaaaatatgttttttctaaggttagaaacacactccttatacgtttcattatattctaaaatcatattagatcgaacaaggccatcaattatacttctattgaaacaatacctgtgatattcccatgctttctcaatatcaatattcttttttatccatgcttccttttgcaattccaaagatttgattccacacaagttactctttaaattgaattttctcatcgcactatcaggattaaaagtttgatggtaaactgcgctttcaccaactgccacactgtttacatgttgtagaaactcaacattaaaaagcattccttcaccataccaaattttttcattaaattttatataattctcttcgagcacactctttcgatacatcttattccaaactgctacaaaaagatctcccaaataaatccactcaatagctttttccgcactaatcacagaaaaattattttttgatatatcattgcaacctgaataattattcttattcatcacaacatcgcagcttgatttctctagtaaatcaacaaaatatgtcacatagttagcatcaacccaatcatctccatcgacaaaggtgatatactcacctgaagcgacagccattcctgcatttctagcactagaaacgccatgattttcctgatgtattacaactattcgattgtcttcctctttcagtctatcaatgatataaccacttttatcaggagaaccatcgtcaacaagaattacttctatatttccataatcttgttttaataatgatctaacacacttatcaatatacttttcaacattatatactggaacaataatgctaaccaacttctgcattagctcacccgcttcctttgaattttatttagaaaaaactgtaacatcggaatccaagttttggaaaacaccgtaaatccaatcaaaagaatcacaagttgaagaaggaatcctttcattccatctacaaacattaaaattgcagacacaagcattaataacgaacctaaaatgaattccttatacataatatcatacttaatatattttctagtgtggaacacacggaacataaaaacagcaatataacttatacatgttgctaatgcagcaccatagactcctatcactggaatcaagataaaattcaatagtatattaaacgctgcgccaaacgatccagaaaacaaatagccaaaactatccttatgtacagtataacttgttgccatgaaggtgcccaatgttaaataaacacatccaataatcaaaaacggagtatatttccaagcgtcataataactatcagccacataaactcccaagaatggttttgttaatagcaaaaggccaattcccatcataaacgcaattgcagaaagtgttttgaacattttattgttgtattcagtttcatcactcgtgccttcttcacgaatcgcagaataactccatgcttgattaaatattcctgtcagcgttgatacaagggttggaagtttataagaaacagcatagattccgttagccgctgcaccaatcatgtaggtcaccataaccctatctgaagaattcatgatccaccacataaatgtgttagggataagaacaaccgaataccgaatcatctctttgagtttgcaacgatctatgttgtgaaaagagaacgctttatagccttttcctgcaataatggcataaatcgcaactataaagtttgcaatgatatatgccaataaatatccacctgtttccattttaaagacaagtaaaaatgttatatttaaaatcgctatcatcaatgtctgaaggatatttccaagtgaatacttaagtaacaattcctttccgcgtaaatcgcatagaaacagttgactagcagataaagaaatgacataaaaatatacatacatcgcatagtcagatacttctgtgatgcatctgcatattggaattaaaaccagtccaattatcatcgcaatgagtagaactatgcttccacactgtgtgtttttttccttatctgcatctttgtctaacccgaaccgcataaccgattcagcgatattcaatgtaagcattggccctgcaactgtactaatagtagttataagatccaccgtaccatactggctcgttgttaaaacattagtatacaatggaatcaagaaaaaagaaatcatcctagagccaatattgccaagtgtaaaaatcaatgtgttttttaataagtatctatttcttgactcactacccattttaaatattttcctttaaatacaacgttgtttttttacgctcttgttcaattatttgattagttttataaaaatcaacttcggtattatataatcgctcaatatcctctagtttttccacttttctatccaatttatcaagtttattaagtaatgcttctaatttattgcgatttgaatctcttaccagagtacaaaattttgtattcattttaatagagaagactgtaccatgaaatgtatccgtaatgacataatctgcatttttgaaataggaaaatacatacaacggattgcaaattatatttttatccgcaatatttgaataatgtccaacacatataatcctcttattgtgcctttttgcaaatttttttatatagttttcttcttctctgcttaatctgcccgtgtatgcatataaaatgatataatctctttcataagtcgtatactctgcaatttcttgtgtaaaatcatacatcagaactggatccatatgaatttccggagagtacccgagcaattgcctaacaatatgagcactattttcatcacgcacagaaatagctgcaaatcttgacagcattgttttaatttcgtgtgcaattcctgtatctaccaaatcttcataacgtgtgcttccaaaagaagccgcatatgaaacaatcttggagtgtgcatatccatctccaaataactgcttagaatatcctactggatatggttgaaggcaattaaatacttcatcacttccaatcactaacgtgtcaacctcacagtcataattcagtttatcaaccccaatattctttaaatccaggattaaatttctttctatttctttgaaaaagttcttttttttcagataattccatggggttctgtttttcagaatcttatccactatgctttcagctttagactgcggtttttttaatctatttgtaatatcaacaccaaatctgtaatctataaattcaacttctgattttgaaaccgactcaatcatttttttcaaaccatacgcttgcaaaaaagatccataattaataatcctttgcatagacataataccgatttttttatccatctactcgtttctcctctatctcataaatatatacggtactgtttgatgcgcaccaacaaatacaaaatagtaccaccaataaaacatataatatcctatgattaacggtcgaataattattccgctttttcttggttttaatgcactcattgcctgtgatatgacaagcacctcaaaaatcgcaaagtataaagcaattcttccaccatacccgctcacactggtaaactgtgaaaacaagactgcatatacctccataaccaagaaaaatgaaatgtcttctccatcttttctcaaatatctataactccagatgatcaatattatttgaggaatacggattaaaagctggtttggcataaaaaccaattttcctgtaacgtagctgacatattccccaaatccaacagccgacaaagcagacacaatcgcggacatcataatcatcactacgaaaccaatccccatagatatcagcattctaggagtttcatttctcttactaacattgtttcctgttatgctcaaagttgttcctttgacaatataatcatacagaagataaatcagtaatatcagcaatgagcttgtgtggaataagaaagcaataatcacacagataaacgcatttttcttttctgcatttttccaatattcaaatcccaggactcctaaagacatagcgattgactgacgcatcatattcatcgagggattataaaatgccatgcaaaagacaaacatcgccatcccaaggcttgtgttcttatcttttctaacggcaacatatagtggcagaatcacacataattccagtatagtttgaacgcaatataatgaacctgtaatttttgttacaatcaaaactaataacggaaacaatggttccatatccttcacataatctgttgtccatgtgaaagcatggaaagatgagttcaaatactcaccaatgctatggcttcttttcgctgcctcataaacaggcattaaataaactcgtgtatctgttccaacacccaccgctctcattcctgctaacaaacacaatgccataactgatatgaatacaatcggtttcctttgtgtatatttcacccgatcagaaagcgcaaaaagacctatcgaaatcataaatacaacaatatatggtgtcatctctttttgcctcccctctttacaccttccacttcctgtttctcgcaacgacaaccttaagtgctattctatttccaaataatgatatcgcagcaaaagcccgtaatctctttggggcattaccatcttttagcacatttattcgatgtgctttcaagatgctctgaatacgcttattccggaattctaaaggctgtggatttcttgctgcaatatcatatatgacatttatatattgagtcgataatgcattatcaaactgcgtttttccttttaccgctccggcgatatcatcaacagcatctaaagcttctaaatgcttttccttataacctgagacaactatacttccttcatcccggtaatagtagaaatagccatcaaattctacataagttacgctcttactcttcaagattgttttatagattgtaaaaagatcttcagagaatttaccatatggaaattccacacccttaaataggtttctcttaaaaagtttaccacacgcagatgtgccaaatggtataccatatagcatactaatcaaagcatcttcggatttaaaattagacgttttccaagctgttgaagtgtttttctcatctcgcttactcgttctcttcatatttgcaatagctatgtcggatttattctctaacatagcttcaaagagaatttctataaagtcttttgaaatgtaatcatcactgtcaacaaaagtgattaaatcccctgtcgcaaccttcatacctgcatttctggcatcagacagaccaccatttttcttgtgaacaaccttaatcctcgtatccattttctcataatcatcacacattttcccgcatgaatccggagactcatcgtccactaaaattacctcgatattcttatatgtttgaaaaagaatcgaatcaacacattctttcagataagattcaacattatatattggtacaacaacactaaccagcgacgtcacatctttattcttcatattttctgtcattgcttaatacttcctgatatatgttcttcatggcggcaatagatttagatacatcaaattcttctgccttttttttgcaagcagctgccatctggttccttgcttccggagtcaggtttacgatattttcaatagcttctgcaaactgatgtgcatcgtacggatcacaaagatatcctgtttttcccggaattacatattctcttatcccctgcacatcagatcccacaacaggtacacctgatgcaagtgcctccactcccgtcattccaaatccttctcttacggatggaataacagcaacatccgcacatgcatttatctctggaatatcaagtctatgtcctgccaagaaaatcctgactcctaatctggaggctgtttctttgagttcttcctcgattgttgaattaacaactgctgttccgcagattacaaatatgtactgttcttttctatcaagcgttcctaaggcttctataataattttctggttttttctcgatgacaattcacccacagctaaaaccatatgatcttttgagtttacgccaaatgatgctctatactcatctctgttaattcttaaatttgcaaacctatgattatctaagccaacgctcggaataacataaaccttggggcaatgcattttttttgcattaccatagtcctcatgatttatcgtaataatagcatcacaaaatcttgacattagcttttcagctgtaaaataaacaatccaactcttttttgatgatttgtctgtgaatgcaaatccatgtgtggtatatataactgttgttccagcttttctatatttccttgcagccattctggttaaaatgccaacaataggtgtatgacaatgaatcaaatcatacttattcgttttcaaaataagttttaattgtttataagcctgaatattttgagttgacaccgggctttttgtatcaaattctacctgataatgtgcaatccccatttcttnnnnnnnnnnnnnnnnnnnnnnnnnnnnnnnnnnnnnnnnnnnnnnnnnnnnnnnnnnnnnnnnnnnnnnnnnnnnnnnnnnnnnnnnnnnnnnnnnnnngacaccgggctttttgtatcaaattctacctgataatgtgcaatccccatttcttccagtttaggaatttcaatcaggttagggcctgccgcagaattttcattcattgccactgacacttcatatcccatttcttgaagtgtcgcgatatcattccacagaaaatgtagaaaaccagcaagattcacaactatcaatgctttctttttcatccgttctccttatgctgtttcccatttattagttcttcgtaaattttgcagagtttctctatatagttttccgcatcgcatcgcttttttgcatacgctactatgcgcgcgctcatatttctatactcggtttctgtcaagtttaaagctttctgaatagctactgcaaagctatcaggatttcccggttctgccagatatccagtttcaccatcttgtacaatttcagaaagacctgcaatatcacttgcaacaacaatcttccctttagccaaggcctgtaatgcaacaaatgccccattttcataccattctgacggtacaagaacaactttggcgcgttcaattatacgatccatttcttcgccgaaaattgcaccgtttacttgaacgcgaccctcaagattgtgttccttaacaaaattttttattctttcttcttccgatcccttaccaaccagaaccaatttttcatcacaatgcatcttggcatatgcctttaaaattgtcaaaacgcctttttctcttgcatatcttccaaaatacagaatataattgtcatgctcataataggctttgtactcctgatttatcggcaagaaattattcatcttgattattggtgaatgtgtaaaatgagctttttctactaaatttttataaaaattgcattccgcaatatataagtcaattttgtcataataatgcccatatctaagaaattgagcttctatatatgccaatacactctttgcaagagagcctttcatgcacttatttttcacacaattccaatatccttttgtcgcacaatcactgcatatagttccgtcttgtcgcagcatcgtataacaaggacacactgctgtcaattcatgcaagtgcatcacaaccggaatgttatatttcttcaaaacatcaactaccgaaaatgtaatttggcgatgcaacaatccaatatgggcaatgtctggcttttcatcctgaattagtttttcgatgttatgtttagattcaaaagaatatattaatttaattcccattttgattttcttaaatgtactcaaattgggatcattataatctacatttgaaacaaaatatttatcttgcgcacacggtatatttctttcatcatacattgaaaagaaaatgacttcatgccctgctgcagttaacgcctctgccaaattataatgaaatgtttctgttccacccaacatataatggaacttatgtattaatagtattttcatgttgctattcctctctttggaccaatttttcttttaacagagaaaaagaatcataatgtaggtctttatctgcaataattggcatctcattttcttttataggccaatttatcttcagctctggatcattccacggtattccaatctcatcattcggatgccaatagtcagaaaccttaaaacacacctctgcaatatcagaaatcacataaaatccatgtgcaaaaccttctggtatataaaattgttttttattatctgctgagagttcaacaccataccaatctccgtaggttgaagaagtagtccttgtgtctacagcgacatcgtatatttttcctcttacaactctcaccaatttcccttgcgggaagttcttttgaacatgtaatcctcgcagaacgcccttaacactcatcgactggttttcctgaacaaaagtcatatttaagctatttttaagtagttcttgactgttatatgtttccacaattaaatcttcatcacttttatatgacgctggatttacaacgtacagcccttgtattcctgttttttcaatcgacaaatgttgatccatattctcaattctcaccttaattcatctaatttgtttattgcttttctataaattgttaatcccattaccaataacatcaccaacagtaaataagttgtcatatatctgataactggactttcaattctctccataatacctattttctctacaattctaaagacaaccatgtgagataaatacatctccatgcttaaattgctaatataatttgtaaatttattattcatcaacctattgtcatattccaaagctaaacccagccatccagtataaagtatcaaggttttaataaccactatattgatagaatttattacgtcaggggtaatgtaatagcctaccgtcaaagctaacacaacacaaagactaattactttaaattgatttacaaaacgttcaatttcatctttatacaaatatacaatcccacctatgagaaaatatggcaagcaatacaaaaatgaatgacgcatcacaaaattttccgtaacaaatctttctgtcataaaatagcactggcacatatatgtaattaccaaggatatcacaaaggacactattcccctttttggactatagagaaggaaaacaataaacggaaatataatgtaaaatgcaaatatagcaccaagtgtccatgcaactccgattgtacttaacgtattgtttggcaaaaaaccaaacagcattgttatctccattaagccttcgcatactgtctttggagtgaattcgataacacaatttaaaagtatcagcagtgcaaaaaagggaactgttctcttgtacctttttgaataaaacgcgtctatactataagttcctgtttttaacttttgataatatccgttgcacatcccaaaaccgctgattatcatgaatagataaactagatagtcaaaggatggtataaccttgtctagtacccccccccgtactaaatccggtatttgctttaacatgccaagctataattgccagacatccaaatgttctaagagcatcaatgtttctatattttcttgtatcacccattgtttattttccccacaaatacattttcatactgtccgcagatcttatcccatgtgtactcttctgccacacgcttcttagctctccggcccatctctgcaatttcatctgcactcattcggtctgccttatcaatcaactttgcaaggctacccggcttgcggctccaataaagagcacaatcctctgcgacttctttattaaagccaacatcaactagcaggtttaaatctgtactgccgagagcttcaatcagagacgggttcgtaccaccaaccgtatgaccgtggaaataagcataggcattctcacgaatcttcttcagcagttcctgatcgtaaacagtgccgacaaatttgattctcttatcactcttgaaatgaagtttttcctcaagctcatttaagaacttttcattcacattcgtaataatcgcaaagttctttttgctcttgcttttcatgaactcccgaatcataacttcaaaagagttctccggtacaaaacgaccgacgacaaggtagtagtcctttttcgtcagtcctttttctctataccagttcatcagcttctcatcgtcatcagccaacttactaagggtcagatctgcaccgtacgcaatgaaggttgttttcggactacttccttggatgcccttaccgtcatagcattcatggatatacttttcgatattcacagagtcacagatagcaaggtcgcaatatttgaccatcatctgctcagaaatcttccaatacttccgaattggtgccgaccattttgccctcatccactcatgtccatccgggttcagatacacagttccacccagtttatggatttctctgtaaaaatgactagcaaaaggcccaatgcggcaagccatgatgtaaacaatcggatgcgggatatggtttttcttgatatgttcgcaacaagcctttagtgcagcaacatcataataaattgcctgcgcaggcccaatctgaggaacatcaattttgaagcagtgggcattgtggaattcaaattcgtggtcgttgatttttgtcacgccatcaaatttgctctcatccatgcagccatcgccattggctttgcaggcaacatgatatttgatgttttctttattctggtgatactctgtgagcttgtagacaaaggtctcataacctccgtaagcccccaatgacttcgcgccgacaaggtatacgtgctacacttctttttttgaattcattcctctattccatcctcacattttatcgctaatgttgcatctattcccttatggataaaaacaaacctacggcgggtcgcacaaaggcaatccaccgtaggcttgaactctccttcaatctttatttgctgctcctttttgtgggtcaaaacagagcttccaaaagcctcctacatataaccccggattttccgtatcttgcagtcttttcaacaaataaaacttttgaaggacaactcaagccttgaaaaccctttagttatcgtagtttttcttggttgaccctattatatctctagcccccttcttctcaatggtcggaacaaccttttgacggatgccatcatattcaattgttttgtcatactctgcaccgcttacatgatggcctgctctattgtagcaagttatatcacaaccattctgtgccattcgggtacataactcttttacaacaatctctatcccgccttcacgcgaaagacgtttctgtccgaaaaccgcaagtctgattttttcttccattacttctctccagccgtcattccatagtttctattcttgtcctaggcttatacacaatcccagcagttcttttccttaaattgtcatgctcgtctttcactattcacctttcctacttcatagcacaacaacaagcctgtatacagattgcagcaacaatctatacgcaggcttgtcctcgtacctccttattctgttttctgctctatcagctttcgctgtggtgggttaagtatagagcgcaaccagaagccactaacccccgaaatcacgccggaacgcaacgcaccatggtaaacagaaacaagttaaggtaaaaaaggtcaagccgcgcaaacccgcatgaaatcaggattttttctggttactaacattatttcacacttcccatggacggtaactacaactcttttaccaaacatcttcggcagccatgtaaagaaggccggcctctctgcatcgggtgctcaacaacagttttacgaagcaggtgataaactcatggattctcattgttttctcttgtttttcgccatctcctcaaaacttctgaaaaagctgtgccaattttgtgccgcaggggccaaaagttcggcgttttagttcatatatagttcatataactgtaaaacacgaccggttttagtgccccatatagtgtgcaaagcaggttctttttgatgatgctacgtcagtatggtttatcggccgcacatttccctcttccttatctccaacagcactccggtcaaaatcaccagcgagcaaagcagggtcagccaccagttttcggtaaagccggcgatcaggtagccaacagcacacacggcaatgaccacaaaggcgtactgcatctgggtttgcacatggttgatatggttggactgggcaccggagctggacatgatggtagtatcagaaataggcgaaatatggtcaccgcagacagcaccagccaggacagccgctacagaaatgatcatcatggtcgggtccagttcagcaaacatgttaaccacgatgggcacaaaaatagcaaaggtgccccagctggtgccggaagaaaaggcaataaaaattgcaatgcagaagatgaccagcggcacaaagttcatcaggctggaattcagattgatggccgaacgtacaaaggtaccgatacccagggcgtccgtcatacctttcagagtccaggccagcactaaaatcaggatggcgggcatcataagcttgccaccttcgggaacggaattcataaaatccttgaagccgatgacacggcgcggcagatacagaagcagcaggaatcccactgtgaccaaaccggcaaacaccaacgcttccgaagaagaacagttggcaaagtcctccaccagattctggccgccgttcaggtggccggtccagatcatagctgcgattgccgttgcaatcatgacgaccatgggcgcaatcagatcgatgaccttgcctttggcgtatttgccgccctcggtcgggtcttttgtttcctggttctggaactcttccccgccagaggtgaacagatcacctttggccgcgttctcttcatgctttttcatcaggccgaaatcgaagcctacaatggaggtgaagaacaccatatacagggttaaaattgcatagaggttgaacggaatggttttaacgaacatctcaaaaccggacatggagctgcccgccggaacgtaagagttgacggctgccgcccaggaagaaatcggcgcaatgatgcagactggcgcggcggttgcatcaatgatatacgccagcttggcgcgggaaaccttgtacttatctgtgacagggcgcatgacagagccaaccgtcaggcagttgaagtagtcatccacaaaaatcagcgcaccgagcagagaggtcgttaccaaagcggagcgcttacttttcaggtggccggaggcccattcaccgtaagcgcgggtgccgccggattcctgcatgagcataacgatcatgcccaaaaggatcatgaacatcagaatggaaaaatccacactatcgatcattgtgttaaacagcgtatcaaacgcaatccacgggtggaattctgccgccaacagtgcgccaagggcacaccccgcaaacaatgacaaatacacttctttggtcagcagtgccagcgcaatcgccacaatgggcggcatcagtgaccaccatgttcctacaaacatcctttattcttcttttcctcttttgatctaatcaaagttattctaacatattgtccatgccgattcaatacgtaaaaaataatatatcctagataacgttgtttatttttccccttcgcattctctttcttttgacgcaagctgcacccaagaatcagatttttttgccagaaatcgatattttttggtgtatgccaataccatcttgctgcactctatgctataataaagtcaaatgccatataaaaattggccactaccgccatttttgtcctattttgttatttgctatgcccaacatcccggaccggactacaaacgttccccagaaatccgcgccgcaaagtcaaaaaaggagggcccaccatgttcgtccagaaagtaccacatatcaaggaccagtttttgacgcaggaacgcgccagcatggagctggaaagcggtcagattgccgtgggttggtataccaacgagcaggacagccagtctgttgtacactctcacccgtattatgagcttgtactgcccctggtgggcagcaacgtgcgctattctgtggacggcaacatttatgatataaacctgggggaaatgatcatcttccctgcccggtgctaccatgcgggcatgttcaatatcacggataagatttctgaacgtctgattgcccagatcaacgccgagctatggcaggaagccctgctggccagcgggctggttgcccccacatggctggggcagctggtgatcctggatgcagacgccgtcaccgcatgggatctacgcggcttatttgagcggatggcccagaccgcttacttacacggcagcacccagcacatggtgcagcggtgcgagctggtggagcttttgctgctgatggaccagattgtggccgagcgccgcacggcaccgcccagcgctacaagtgccctggttgccaaggccgttgcttttttgcaggccaattataccgacccgaacctaaccgttggcagccttgccaaatatacctacaccagccgggagcatttgtcccgcgcgttcaaaacctacacgatggaaagtgtacacggctatttgaccaacctgcgcatgcagcattgccgccgtgccattgcagccggcgccagcgtgctggatgcctgcaatgccagcggttttaccaattacaccagttttttgaaaactttccgtagtttatacggcattacgccgtccgaatatcgcaaccagctgcggcgtacgccggagcgggttcactctaccccataaacaatgtaagccgcccgatatcaagtcttggacaacttttttcccaaataaatttgaaaaaggcacaaaaacaggctcatcaaagccaaagcagttttcaatctgtccttggctttgatgaacctttattcaaggcaacaccgcacaattcccgccttacggcttaagcaccgatccggcatctgccgtacctcgctcgccgtatcggcacttagaattatgcggtattgccttaacgcaaaatcccgctgtgtttgtagaaatagaccatattttcgacttttcagatacaccctaaggaaaaaagaaggataaaccggcccgaaaagcggaaaatgaagttgatgaaagaattggaatgaaaacctcaaggcacaatacaatatgcagcttctaaccgccaaggaaaaaactcaaaagcaagttattggcttttcctgatgttttttcctcttttgcaagtggcatgcggcagtccatcgaagttttttccgctggctaaacgctgttcctaatattcaacatgcttcgcatattcactcttctgctggtttactttttcacatcttttgctcgcccctactttgtgcttgctcaactcttaattcacattttttgggcacaaacagctttatgcagtcggttccttccaatttcaacagctggatttttcgctcaacaccacccgcataaccgatcaggctgccgctggcacccaccacacggtggcacgggatgatgagcgaaatggggttatgtcccacggctccgcccaccgcctgggcggacaggcgcgccgtgccatgctttgccgcaagccgggcggccagcgcgccgtatgttgtcgtttgcccgtatgggatttgcagcagcagcgcccacacttcctgccggaagtctgacccgatgggatgcagcggcggcataaaatccggcatttttccgctgaaatacacatccagccagcgctttgcttcggtcaagggcggggtttcgcgctccgtgctctgtggggccaggcccgccgcataatactttgcgcggtcaaaccacaaaccggtcaggcccacttcatccgctgccagcagaatttcccccaagggggactgataatgcgcggtgaacatcatagcatctaccctttctgttgtacttttgatgttttctccgtgtgggaaccagcgggtgctgcctttttggccggggctttctttttgggggcataatccttcaaccccggcaccgcgccgcccgcggcggcccacaggtaaaggctcgccacgctgcaataagggctgaaccgcctgcggtacttttcaaacagtttgcggtcaattttacggtggtggtacaccatgcgcagcccgcgctggatggcaaggtcatcatagctgaacacatcgggcctctgcatgcagaaaagcaaaatcatctccgctgtccacacgccaatgcctttcagggcacttaactcccggatcacttcctcatccggcttctgccagatgccctccaaatcaaactcaccgttctggatttttcgtgcaaagtccgtgatgtactctgccttgcggcagctgatgccaagcagctgtaattgctcgttccctgcttccagaatatgctcggcatccaccgtgccaagggcaccccgcatgcgctgccagatggtagcctgcgccttggtggaaatctgctgccccacaatatggtgcaccacggcagaaaacaggtctgtatccacctcgcgattcacccggcccacctgggcaatcaccgccccaagtttttcatctttgccgctcaggtattccgtttcttcctgcccgtattgaaagtacatggtctttcctttcctgtgttcttttcgtgttctgtgtgttggtttctgcgtttatcctgccatcattataccatgctttgcgcggtttgggcatcggcggcgaaagcgtatttttttatggcaataccgcataattctaagtgccgatactgcgagcgaggtgcggcagatgctaagccaaaagcgcagataatactttgtgtattatcgagcattttggcaacgcagatgccgtgccgcagccgccggagcggtgcttaagccgtaaggcgggaattgtgcggtgttgccttatctccactttcccccgatacaacagccagccgccccaccgtggaacattcctacaggcagggcggctggctgcttttatttttgtttgtttatgggttcagtgcacggtggatcaacatgcgcaggttttttatgggcgttagcgcgcccgggtgcttggaaacatagcacagccctatcaacccacccgccgcagcggaaagcagagccagatcacagtaatcatccggcagggcggggttgatctcccctttttgccgcagggctgccatggttctgtgcagcaccccacgcagggcttgcacacactcgtccataccgcggaggttctcccgtgcgccaatactggaagcgatcacctgataggttcccatccggttgccggaaagatcctgcaggtaggccatcacggcgtcctccagctcttgcagggtggtgcatggctccatcaatacggcaatgcgggcaatctcggtatcaaagcagtacagggccattccctgcaggatctcatccttggaggcaaagtattcatacacggtacccttgccgattccggcttcgtccgcgatctgctgcaccttcatggcggcggggtttacccccttggcaatcaggcgcaaggcggcttcgtacagggcggtttcgcgttctttgcggatatctggtgtcattgtggcgtcccctccccgttttcggtatcgggtttaccgggcagctttaagcggcggcgctcggcggtatccggtgtttcgggttccggctggttcttgccctctgctgcgcggcgggcggcaaattctgcggcaaactcggccgcatcatcgggcaggtcatccatgccgtcatcgcccacatcaatgttgaccggcggcttgcggtagaaaaggtcatacatcaccggcacaataaacagggtcatcagcgttgcataggaaaggccgcccacaataacaatggccatgcctttgcccatctcgctgccggcatctttgctgaagatcatcgttaccatggcaagcacggtggtcagggtcgtcatcaggatggggcgcatacgggtgcggccggttgccaccagggcatcggtacgctccagcccgccaatgcgcagctggttggcgtaatccacaaacacaatgccgttgttgaccaccacgcccatcagcacaaggaagcccatgagcgaaatgaccgaaagctgttcgccgccaatcatcaggccgatcatgccgccggtaaaggccagcggaatggtgaacagcacaatgaagggggaaagcaggctttggaactgcgccaccatgacaaaatagacaaacaacagtgccagggccatcatttttgccatctgctggatcatctcggtcacctgggtggtttcaccggcaatttcagcggtgcagtcatctggcaggtccagtgcttccagctgggggctcagattacgggagatcagggtggtgttgtagccttcggcggtatcgctggtcacgctgatcttgcgggagccgttttcgcgcgcaatggtcgcataggcgttgccgttggtgcgggaggaaaactcgcccagggtatgggtctcgttcacggtgttgccgtcatcgtcggtggtcgttgtgatgaactccatctggaacagatcgtccaggttcggggtatcggtcttatccacaatcgtcacatcataggtatcgcggcccactttcagggtggttgcggtggtatcggtgctgagctttgcggcgatctgctggtacacctgcgccaccgtcaggccaaggcgcatggctttgtccttatcaatgacgatatgcacctcctcgtcgccggtttcctgcccgttggagacattctcgatgccgtccacgttgttcagcaggtccatcacctgctggctggcggtggtcaggctgtccaggttctggccgtagatgtccacctccacgccgctgccggacaatgcgctcatatccatgctgctggcgctgatgtccacttcgcagttcaggtccgcggtatcatcggcgatctgctgctggatggccttgctgttgctggcgccctcgtcagtcagcagaacataataggtaaagctggtgttgtccgtggtgccctcagtgccggtcatcatcagcatgctgctggtgctgtcgctgccgccggacatggcgcccaccgtttccacgccgtcaatgttggtaatggcgtccatcacagcgtctgcggtggcaaaggcatcctctttttcggtatccgcaggcaccgttaccgtaatcgaaagctggttggagcccatatccgggatgagcatcacgcccatggtggcaatgcgccagaccgatacggccagcagcacgatcgccagtgtgagcgggatggccttgcgctttaagcagaagcgcaagagcttttcgtacccgttcaggaaacggtcgaaccaggggtgcttgatctctttttgcttgcgcagtacggtggaaccggcgcagggcaccacggtaagggccacaatgagggatgccagcaggctgaacgtgatggtccatgccatatcggaaagcagctccagcaccatgccggtggtaaacaccatgggcaggaacacgcagactgtggtcagggtggaggacacgatggcccccgccacctggcgtgcgccctgcaccgcagcacgcggggccggaatgccgcgcccgcgcaggcggtaaatattttcgatgacaacgaccgagttatccaccagcatgccaacgcccaaccccaagccggacaggctgagaatgttcagggtaatgccgctgaaatacatcatgacaatggcaaacagcacactgagcggcatgctgatggccaccaccagcgtggggcggatatcctttaagaacagagccagcacgatgatggccagcacagcgccttcgatcaggttggacatgacgctgttcacaatcagcttgatgtaatcgccctgatccatgatggtggtcaggtgcaggccgtcgttttctgccatcagttctttcatagcagcggtgcttgcgttggagacagacgaggtggaagccgtggagcttttatagattgaaagcagcacggcgcggtttttgcccaccttggcgtagctgtcgtccgcgttatcggtcagctcaatgtccgccacatcggaaagccgcacatcgccgatgccgtcaatgctgcacaggaccatacttttcagctcatccacattgtcaaacgcatcgccgacttttaagatgtactggttatcgtccccttccccgccgtcaatgtaaccggcgggcatagagaagttctgcgcggcgatcagctgctttaaggtgttcatgttcagcagctggtccagattggcgcttttcagcgcttcctcgcgggccgattcatactcttcgcgggcggagtccaactg

SEQ ID NO: 143 - DNA, 35362 bp, unidentified
  source 1..35362: mol_type = unassigned DNA
ataagttggttaaggagttcgaagctaagcaagctgaagaataaaagacttcacttcgtctgtttttataatttgttaaagccgttactccctcagaacgaggggtaatggcttttttattaacactgattaagaacatgcgtaaatgtgaacgggaatgattaattttttattaaatttgcaaaccaaacacacgctgatttgttataatgctcgtaatgcaacttaaaaaactcttttcggttaatttacgagaacttgcggttaaatcaggttaataggttaggagtgttaattagggagtgttaattttgtgactatgaagaagtcaacaatatggatattaggcatcgttatggggttatctttcctcagcctcttgtatctgcaaatcagctacatagagaagatggtaaagatgcgtaacgagcaatttgatgaatctgtgaagcgtggactgatggctgcttctaaagaagtggagtccgctgaggttgcccgttggttgcgggaagacatctctgaggcagaaaagagagcgtgggaattgactgagcaaggacaggcattggtgcagacacaacggtttacggtgacgtcgccggatggttccaagtattcggccatggaacttcagacgatcacaaataagccgtcagagctgccgagagcgatgatttcgcgtaagcatggcgctaagacgattcctaaaacagctcgtacacaaattgatttaatgaaagaacgttatgtgtaccagcgtggcttgttggatgaagttgccttgcagatgttatatacggcaagtagcaagccgattgaggaacgcatcaactttaagaacctggatcagtacttaaagtcgggcttggtagataacggcattgatctgggatatcactttaaggtgattgaccgggatggacgggaagtataccgttgttcggactatgtcgatgaaggtagcgagtattcttactcccagcctttgttcctgaatgatccacctgcccgtatgagtatcgtaaagatacattttccgggcaaaagagattatattttcgactcgatcaactttatgataccgtcgatgatattcacctttgtgttgctgattacgtttatcttcacgatttatatcgtgttccgccaaaagaaactgacggagatgaagaatgactttatcaacaatatgacgcatgagtttaaaacgccgatatcgaccatttcgctggcggcgcagatgttgaaagaccctgcagtgggtaagtcgcctgccatgttccagcatatatcgacggtcatcaatgatgagacgaaacggttgaggttccaggtggagaaggtactccagatgtcgatgttcgacaaacagaaagctaccttaaaaatgaaggaactggatgccaatgagttgattaccggtgttatcaatacattcaccctgaaggtagaacgttataacggtaatatagagtcggaactgaacgcaacagacccgaatatctttgcagatgaaatgcatcttacgaatgtgattttcaatctgatggataatgcggtgaagtataagagaccggatgccgatttggaattgaaagtgaagacctggaatgaaccgggcaagctgatgatttctattcaggataacggaataggtattaagaaagaaaatttgaaaaagatatttgaaaagttctaccgcgtgcatacaggtaatctgcacgatgtgaaaggctttggattgggattgtcttatgtgaagaagattattacagaccataagggaactatccgggcagagagtgaactaaacgttggaactaaatttattattgcattacctttacttaaaaattaatgatatggacgagaaactgcgtattttattgtgcgaagatgatgaaaatcttggcatgcttttaagagaatatttacaggcaaaaggttacgctgccgagttatatcccgatggagaagcaggatacaaggctttcctgaagaataaatatgacctgtgtgtgtttgacgtgatgatgccgaagaaggatggctttactttggcacaggaggttcgcgcagcaaatgcggaaattcctattatcttcttgacggccaaaaccttgaaagaagatattctggaaggtttcaaaatcggtgcggacgattatatcaccaaaccgttcagtatggaagagctgactttcagaattgaagcaatcttgagacgtgtccgtggcaagaagaacaaagaaagcagcatttacaagattggtaagtttacgtttgatacccagaaacagattttgtcaacgcctgaaaagcagaccaaactgactacaaaagaatccgaattgctgggcttgctttgtgcacacgccaacgaaatcctgcaacgtgactttgcattgaagactatctggattgacgataactacttcaatgcgcgtagcatggacgtatatattaccaaattgcgtaagcacctgaaagaagatgaatctatcgagattatcaatattcatggaaagggatataaactgataactccggaagccgagtcctgatggggatccggcttcggacaatgggaaataaaaaaaggcggttgcagtgcaatcgcctttttttatttctttttctcggtattaatccgcaattctcttgttgataagaatgtaagaaatcaatcctattacaattaaaacagcgctggtgcccagaatcgcgttgttgtttacattgccggtaaaagaacatgcaaccaagattacagctcctaccaagattaatatcaatcccagattttttaataagcctttcatgtgtgtgtattttaatagattattattttcgtattcttgtcacaaagaaaagcataattctttaacaagcgaaattatttttgcaaaaaaaccatattttaataaagaatgaagaatgacgaatgaaaaacgaagattattaatcactaaaccctaatcactgatcactgaatttcagtctttcgtattgaaaaatatttttctcaatacttcctggcttatgctcagttcttctacggtaatgccgcgtaatgcttcttttaaagtttggttagcgattacccgtgcgcgttcttccagttcttttccatctttggtgaggtggataagattggtgcggcggtcttttttatccgagatacggactaccagatgttgacgttccatgttatcaatcaggcgtgtcatactgggcttgtctttaaaagttgcattgcacaactcttgttgcgtcactccgtctttttcccacaaaaagatgaggacagtccattgttccggagtaatctccaaaccgttctggcggaagttacgggacagttttcggttgattgcggcggaaactttaccattcaggatggcaaaaatcagccggatgtcaaagttaaattgctcgatcatgaaattattgtttaaacaactttgcaaaggtaagtcacttctatgataaatcctaccttcaggcacaaaaaaacattaaatgtttgtagatcaaaataaaattcctacctttgcaccgcaaatttttaaacgaattattaattcattaattaaacaagtatgaatcaatacgaaaccgttttcattttaactcccgttttgtctgatgttcagatgaaggaagcggtagaaaaattcaaaggcatccttactgctgaaggtgctgagattgtaaatgaagaaaactggggactgaaaaagctggcttatcctatccagaagaagtcaaccggtttctatcagctgattgagttcaatgcagaacctactgtaattgagaaattggaaatcaacttccgtcgtgacgagcgcgtaatccgtttcttgactttcaagcaagacaaatacgctgcagagtacgctgcgaagagaagaagtgttaaatcaactaaaaaggaggattaatcatggcacaagttcaatcagaaatcagatatttaactccgccgtcagtggacgttaagaagaaaaaatactgccgtttcaaaaagagtggtattaagtatatcgactataaggatcctgaattcttgaagaaattcttgaatgagcaaggtaaaatccttccgcgtcgcatcaccggtacttctttgaagttccaacgtcgtgtagctcaagctgtaaagagagcccgtcacttggctttgttgccttatgtaactgacatgatgaaataataggaggaggaaagtatggaaattatattgaaagaagacattgtaaacttgggttataagaacgacatcgtaactgttaagtccggttatggtcgtaactacctcatcccgacaggtaaagctgtgattgcttctcctgctgcaaagaaaatgttggctgaagatttgaagcaacgtgctcacaaattggaaaaaatcaagaaggatgctgaagcattggcagctaaattggaaggcgtatctttgaagatcgctactaaagttagctcaaccggtactatcttcggttctgttggtaacatccagattgcagaagaattggctaagttaggtcatgaaattgaccgtaagatcatcgttgtaaaagacgctgtgaaagaagttggccagtacaaagctatcgttaagctgcacaaggaagtttctgtagagattcctttcgaagttgttgctgaagaagcataattaaacttcatatataaaagaagcccggtttccgaaaggaggccgggcttttttattactggttagttctaattgtattctttatcaataaaagtaattgttttatcaattagtttcatgtagtggctgtatgtgagatgcgggttatcatgtataaaagaaatttgccgtatggcagcaagcccttccgggaggtgaagggtgaactcccaggtttctcttagtgacttattttcattagaaatttttctaaattcttgctgactgacgcacttctctacccctgtctcttttgctttggagaatccttcataaaaaagatgtgcattttttattacggcataggcttggatgatttcgacagcaagctctttatttttaatattttgcatgacagaagaagctctgagcatttccatagcatcggtgaccggaagaaaatcttgtgattggaatgggaaatagccgtagtaattcagagagtcggaggatgcttcattcattttgtctttgtattgaagcaggtagcatgcaccttctttgttgattttttcgattttcatcatctcttctattgtttcccggttgataagtaattcgcttttaaccagttgcagggcctgtgccacctcttttttcttattgtgctcctgaatcatatcacttcccacgaatgtgattgcaatacccagtacgactgcaatgaaattgcagatgaaatcacctaatcttcccttgatagctgatcgcttaatttcttctatcagttttgtattcataatattagcataatatgtagattagcaaagataaggattttcagaactaatcaaataggaaaagtgatgaatcactgaagtatctttgggatggtacaaatgggtataaaaaaagtctgttcgtgctttcgcacgtcagactttcaattctctcagtgtgttgttctgaattattcagctacaactgctgcgctatctactgctacagtatcagctgctgcggctgcctcagctgctgctgcggctgcttcttctactgctgcgattgaatcagcaatacggatagaatctgctgctgctttttcagcgtcagcttgtttgttaccacaagatgcgaaagatactgctacgatagctacggccatcaaaactaattttttcattttctttgctttttaaaaacgtaatacaatcaattgctttattaaaacgctgcaaaggtatgtactttttcaatatgttgttctccaaatcccaactttttttatgttttttttggaggttagccccttttgattactttttgtatgtttaataacatactaatcttctgcaatactgttatataagtagcgtttgatgctccttttaggagttttctcaaactcggtaggatagagctgaatctggctgactttctcgtaactggccacactgctattcaggttcttcaagttctcgttcatgatggttttgaggttttcctcttggtttagtccaagggaatccaaagcttcgtaatctgcatagactaaagctaccagttttttattgcgttcgataacgagactttccagtacgaaaggcaggttgttgagacgtgcttcgatttcttcggggaagatgttttgtccgctggaactcaggatcatggtcttactgcggccacgaatatagaggtttcctttttcatccagtttacccaagtcaccggtacgtagccagccgtcttcggtgaagacttctttagtggcttccggatttttataataacctgtcattacattttcgccgcgtacctggatttcgccgatttctgcctccggattttctttgtagatacgggcttccatgatgtcgagcactcgcccggaagaagtcgggatgaattcgttccagggagcgtaactgattaacggcgcacactccgtcatgccataaccgatggtgaacgggaacttgatgcgatggaagaattcttccacttccgggttcatggcagcaccgccgataatgacttctttgaaacggcctcccaaagcatctatcagtttcttccggatttgcccatagatttgtccgtcgagcaaaggaatgctgagtgcccatttcatagtctttttatttataataggttgaatgacattcttatagattttctcgataacgagtggcacggtaataatcaagctgggttttacctcttcgaaggccttcatcagaatttttggagaggggactttgcccaaaagtgtgacgtgagtacccacggcagtagctgtaagaaagtcgaaagcgcaaccgtaggcatgagccaagggtaagaaggagagtactttatctccctttttcaacaactcggtgcggataccgaaagtgacatttcctgcgagattgtttcctgtcagcatcacgcccttactgaaaccggtggtgcccgaggtatagttcagcagcattaccttatcattggaaagagtggtatactgcacgtcttcccggtggaaacctttcggataagttatgtgcatttcttcatctaggtgtttgaggaaacgattgattgtttcaccgtcgcgctgatgcaggcaacggaaatcggaaagggagaatacggcacgcaatccggccaggcgttcttcttccagatgttcccagatggaatcgctcgtaaagaggaaaacagactcggagtggttgacgatatgatgtacatcattcggattaaaatcttgaagaatgggaacaacgatagctccgtaagtgatggtggccatataagcgatgcaccaacgggcattgttcttaccgataatagcaattttgtcgccccggcgcaagctgcaatgtttgaatagcaagtgcaatttggctatctcttgcgccacttgtccataggaataactctcgtcttcaccgtaatcggtatagcaaggaaggtcccagttttcacggaaactctgctcgtagagtttgataaagttctcttgtatcattgcacgaaaattgatgatttgtgcaaaagtagaaaaaatctaataattatatgtaactttgtagcagaaatgtgtttagaatagatatgattgataccaatatatttcaagataagacagcggtttactatacattaggttgtaagttgaacttctcggaaacctctactatcggtaagattttgcgggatgcaggtgtgcgtacggcacgtaaaggcgagaaagcggacatctgtgtggtgaacacttgctcggtgacggaagtggcggataagaaatgccgccaggctatccatcgtttggtgaagcaacatccgggggctttcgtggttgtgaccggatgttatgcccagttgaaacccgaaaccgttgcaaagattgagggtgtggatgtggtgcttggtgccgaacagaaaaaagatttgcttcaatatctcggcaacctgcaaaagaatgagtcgggagaagcttatgcttcggcgctgaaagatatccattcgtttgcaccgtcgtgctcacgtggcgaccgtacccgttattttctgaaagtacaggatggttgcgattatttctgctcttactgcaccattcctttcgcccgcgggcggagtcgcaatggaacaattgcatccatggtggaacaagcccgccaggctgcggccgagggaggaaaagaaattgtgctgacgggtgtcaatatcggggatttcggtaaaactaccggagaaactttcttcgatctggtgaaggcgctggatgaagtggaaggcattgagcgctaccgaatttcctccatagagcccaatttgctgactgacgagatcatagaattcgtttctcattcccgcagtttcatgcctcatttccatattccgttgcagtccggtagtgacgaagtgctgaagctgatgcgccggcgatatgatacggaacttttcgcttccaaagtgcggaaagtgaaagaagtgatgcccgacgcttttatcggcgtggatgtgattgtgggcacacgtggtgaaacggatgaatactttgagcaggcctacgaatttatcaaaagcctggatgtgacccagcttcatgtgtttagctactccgaacgtccggggacgcaggcattaaagatagaccatgtggtaactcccgaggaaaaacaccgtcggagtcagcgtctgttggaactttcggacgaaaagacgcatgcattctatgcccgtcatatcggacaaaccctgcctgtgttgttggaacgttccaagccgggaactcctatgcatggcttcactgctaactatatccgtgtggaggttccccacaatgatacattggataatcaggtggtgcctgttcgtttgggcgattttaatgaagacggaacggcgttgcagggaatggtgctattataataaggtataagaaaagtatgaaatcgaaacttgtctactggctgacttacgctggcatgtggcttctggctctgcttcctttccgggcactttatatattgtccgatggggtttgttttttgatgcgtcatgtggtgcattatcgtcgtaaggtagttcgtaagaatctgaagaattcttttcctgaaaaatccgaggctgaactgcgcgagattgagcgtgagttttatcgctatatctgcgactatatgctggaagaaataaagatgatgcgtatgtcgttcgaagacctttcccgtcgtatggagtatggtaatactgaagaatatcttgccatgctcgaaaaacatggaggtatcgttgtactcattccccattatgccaattttgagtggctgacggcgatgggagccttcatgaagccggaagacgtaccgttgcaagtgtataaacctttgcgaaacaagtatatggatgaaatgttcaagatcatccgtgcccgtcatggtggctataatgtaccgaaacattccactgcccgcgaagtaatccggttgcgccgtgaagggaagcatgtagtgatcggactgattaccgatcagtctcccaatcgcaatgaagcccatcactggacaactttcctgaatcaggataccgtatttatggatggtggtgaacgtattgccagaatgatgagttatcctgttttttattgtgaattggaaaaacggggtagaggatattgcaaagcatactttgatctgttgactgaaaccccgaagcaaactgccgagggagaaataaccgaactatttgtgcgtcgcttggagcagaccattcgccgtgctcctgcttattggttctggtcgcataaacggtggaaactcacacgggaagatttgaagaaacagcatgaataagatagcagttgtcatattaaactggaacgggtgcgatatgctccgctcgtttcttccttccgtagtacgcttttctgaagcggacggtgcggtagtgtatgttgccgataatggttctacggatgcatctgttgatatgctttgtcgtgaattccttaccgtccgactgattctgttggaagaaaatcaaggtttcgctgatggttataatatggcattgcaagaggtcgatgccgagtatgtagtacttctcaattcagatgtggaggtgacggaacattggcttcagccactggttgactatatggatgctcatcctgaagcggcggcttgccaaccgaagatacgcagttggaggcagaaggagatgttcgagtatgccggtgcggcgggtggttttcttgatcgttacggctatccgttctgtcgtggtcggattatgggtgtggtagaagaggataggggacaatatgacactatcattcccgtcttttgggctacaggtgcagctttgtttatccgcctgaaagattatcgtgaagccggtggattggatggacgtttctttgcccacatggaagagattgatctttgctggcggcttcgtgcacgtggccggcagattgcctgtgtgccgcaaagtgtggtttaccatgtaggcggtgctacgctgaagaaagagaatccccgaaagactttcctcaattttcgtaataatcttgtcatgctttacaagaacctgccatccaaggattttgcttccgtgatgcgtacccgtgcagttcttgactatatagctgcattgagttttatacttaaactacagttccccaatgcattggcagttcttcgcgcacggcgtgaatatcgtttgttacgttcttcttttactcctgcacgtgaagagaacctgaaaaaaacttccctttccgtgataccggaatggacaaaaagcagtatcttggcacagtattatttacgtggaaagaaatttttctcgcaattatagctttttctttttaccgattgtttattatttaaacgtattgccttatgacaaaattagttagaaagattggactggtggcgcacgacgccatgaagaaagacctcatagagtgggttctctggaactcagaattgctcatggggcacaagttttactgtacaggtactacgggaactcttattcttgaggctcttaaggaaaagcatcccgatgttgagtgggattttaccattttgaaatccggtcctttgggtggtgaccagcaaatggggtctcgcattgtggatggcgagattgattatcttttcttcttcactgatcctatgacgttgcaaccgcatgatacggatgtgaaagcgctgactcgtcttgccggtgttgagaatatcgttttttgctgtaaccgtagtacggcagaccatattatttcaagcccgctattcgttgatccgacgtatgaacgcactattccagattacaccggctacaccaaacgatttgaaaataaaccggtggttgccgaggcagtggagtctgcaaaaaaacggaagaaaaagagaggataaaggagacggttggttctccgataaggctaaaaagaggggaagaacttcacatcggaaagtccttcccctttttctatatgaagcttccggatgcttataacaaaaatacagacgacttatccgctttattctctacagagtttattttgaaaacagaagtgatagtatttcccatcggcagggcgatacagactaagacactttttttaagaggataaggtttaaggatagaataggataatcttaacggtgcagctattgaagtgtcatttataagctgttttagctatctacatgccacaacagaacgcttggaaacaatcagaaagatgggaagaaagccgtatgaaaaacatgctttgctttattgttttttttcttttgcctgtagctaaacttcgtcccgcagttgtgggctctacgttttccagttgagggctgtgcagcctgcaattgcgggatggacagcccacaactgcgggacgaagtttagctgcgggcataatgacattaacctgaatgctttttgggaaaaagtaaggagcatatcaagttttatatctatcatttgactttctacataatgagagtatggggcttatcatcccttaattcctaacgaaatgctaactttattcactcgtacgacgaataaaagagatatttgcatcaattcggataaaggttgcataacgtatattaagcgcttgtgaattagtgaattacaagattagaagcacgctttttgagccgttttacggtgtagaataaaactttcctacaccttcctacaccacttcctacactacctatttgtctgataatcagataaacataatagccggtgtaggatgtagacaatattgataaaaactcaactgtgtgagatttccttttattgcttactgagttcactttaataaaaaaacagtggaagtgggttaagctctttcacattgcacttccactcctgccgcatctaagtctgcacccatgggtggattacgtttagcgagttttagctcaatagctttaacggtggggaaagtacggaacaggcgttttatgatacgtccgcaaacatgctccagcaatttagaaggtatctccatctcagccttcacattttcgtatacatcggcataactgacggtatgtgtcacgtcgtcagtctcggctgcacgtgcaatatcgactttcaatttcagattaatgacaaactcattacctacttcccgctcttgctgacctacaccgtggtaggcaaagaaacggacgttatcaaggaatatataactgttcatatcaaatagaatattcggtgaatgacaaaaataagaattacctcccagtaaacaaagaaaacaggtgtattcttccataaacaagcgtttgatttggaaaatgagttacgtagtcagccccatacccttcaggggattggggataagtcgatggcattttaaaaaaaaggcacctgctatgggtgcctttttctattataaagattgagagtattatccttttcgtccggtctgttctatcagtcctttgatcttctcgttcagactttccgctttcatcagttgttccagcgtcaggtgcatacggtagcgccagtaatgtctggggttagcaggcacgttgatgcgctcttcctgtacattggggttgcgccattttccgtccatagccatccagtcctgcaaggagaggatgcacaggatggagttgctgtaaagatggttgcgtaccacttgctcgcaaagttccggagtggcaacggcaggtgcagcgccgtagtgtcccagcatggtgttgtagtaccgttgcgtttgctggaaatcttcttcccaccagccgcgcagcgtagacatatcatgcgtagagatggtgcaaaccgagcggtacggataccagtccggatgtccgaattcctgtgaaggatctttcggcatgcgttgtatctccaggctaaggatgcgcaggtcgttcatcacccaagctacacaatcggggatcatgccgaggtcttcaccacataccagcatacgggtggattgcgtcagttgcggcaacttcttcatggcttgttcgcgccagaactcgttgtggcgatgatagtaatactgatcgtacaaacgattgaatgctgccttctcccaatcattcagggcacggtagatgtaatcgtgttgtacgccgatgcgcggatggaatttgtgcgggtcttcacggtcgggcacaaacagtacgtcactgattaatgcgtacaggccatcgcgtatccagatgctgtcttcgtccgtctttccggcaaagtaagcctctactttgcgctgtgtgtcgaactcgggacgcatgcgatatatttcccatgtttccgtaggctctatgaaggtctgctttacataatcagtatgcgggccgaacatttgtccgaggaagtattcatggatatagggtttcgtgaagaaatcttcgcggaatgccattccgtagccttctatttcttcgcgcgtcatcggcagggcgggaacaaactggcccagcagtccgtgtacggcatgcatcgggatttcccaaatgcggaagaaacccaggatgtggtcgatacggtaggcatcgaagtattccgacatcttgcggaaacgcttcatccaccaggaataaccgtctttctccattacgtcccagttgtaagtagggaagccccagttctgaccgttcacggagaagtcatcgggtggtgcgcccgcttgtccgttcaggttgaagtagtagggttctgtccatgcttctacgctgttgcggctgatgccgataggaatgtcacctttcagtactacaccattggctcgtgcgtgttccgttgcagccagcagttgcaggtgcaggtggaactggatgaagaagtagatggcgatatgcggatagtcggcagattccggctggcataacttttctatttcttctgctttgtattctgtgaatttcggccattcgcggaagttgggtgtcttgtaggcatcgcgcagatagctgaacacggcgtatggctgtaaccattctttgttgttttcgaagaacttccggaaggcatcggatgccagaacttgttcgccttcctgtttgtatatcaggcggaagaactcccattttatctggtttactgcttcatagtctacggtaggcagggcattcagctctttctgccgtttgttgaattcttccattgcctttttgtccttcaacgtacccatctgtttcagatcggcatacatggggtggaacgcataaatggatatgctgttgtacggataagaatccgtccatgtatgtgtcatggtggtgtcgttgataggtaatatctgtacggctttctggcgggtaagtacagcccagtctatcatttgtttcaggtcgccaaagtcacctactccgaagctcttttcggagcgcagcgagaagatgggcacggctactccggcacctttccagtcgggtagggcgaagtaaacgtaacggtcaccgatcaccagtgtttcgttagcgcctatctgcggatcggccatgtagcggttggggttgttttcccatgccacggcacgacgctctttcttattataaaggatgaatttatactccagcgggaagctgattttcgatgcgtctacttcaacctgccattccgggaagttggcgtcgctcatcagaacggctttatccgcatcccaatctcccagaactttctggttgccgcaaatgcccagacagtgatcattgtcgatgcatggagcatacgccttgatcaataatcctttcttgtggctctttggagcggcgttacgttcgggatgtgcaagcagggactccgtgaaagcagacgtgtagaagtattgctgttcgggcagattcttccagcagtcttgcaggcggtagactttcttcttgtcagccgatacatagagcgtgcggggaaggctgttccactccgtacgtgtatctttgccgtcgcgataaatgtgataactgtattgtacgatgccgttttcaggcgcttgaatgtccgcatctaaagtccagtgaatgccatccactgtttgtaaaggtatggctttaccgggctgattgttgcccagttcaagaatagatcctaagactctaacctcttcaccccaacttgtgcggtactcgatatgaaaagatagtatcatataatattagatttagtaatagctgcattgattatgcaagtatagacattattccgcataatcaagcagctaccgctatctaagttttttaaattcctatgcaaacgtttgtgcttgcatttcgcagatctgtttttatccgcaacgtgaagctccgcaagtggtacaaatgaggcaaccttcctgatatacaagtgtttcgttgccgcagttcggacatttcttgcctttggcttctgtgccgtccgttatgtatttcttcaatgcgcgttccacaccgttcttccaggtattgatgctttcgctgtccagttgcagagagccgaccagcttgataacctgttcgataggcatacgataacgcaatactccggagatcagtttggcgtagttccaatattccttgttgaacttttcggacagaccttcaatggtgactttatatccgcgtttgttctggaactggaagtcgtaacgcttgctgccgtccttgtccaccttcttaataatgtgtccggaagtaacgttcttcggcagaataatgccttcatcgtcatcctgaagaccggtgaagatttcgtaaggatgtccgtccagcaaaccgacgaatgccacccacttttctttattattctggaaacgtacgatgtcggcatccagaactgtcgggcgggtttctactaccgtaggcggtttgcaaggaggcatttcttctttcttatcgctcttggcagaaatgagtacgcccgaacgtgagccgtcacgataaaccgtacaacctttacaaccggatttccatgcctctacatacaggcggtttaccaggtcttcatccacatcgttcggcaggttgatggtcacgctgatggagtggtctacccatttctggatacgtccctgcatcttgactttcatcagccagtctacgtcgtttgaggttgctttataataaggtgattgctcaaccaatacgtcgatctcttcttgtgtgtaacgtttggaaggattgtgtccttgcgcttccatccatgtaacaaacttggggtggaagacaatatattcttcaaaagcatctccggtttcatccacgaagtctacgtgtacgttagtgtcgttcggatttactttacggcgacgtttgtatacgggcaagaatacaggctcgatacctgaggtagtctgagtcatcagactggtggttcccgtcggtgcaatggtaaggcaggcaatattgcggcggccgtatttcttcatatcctcatacaactggggatctgcttcgcgcaaacgattgatgaacggattattcttttcacgttcggtatcgtaaatttcgaatgcaccacgttcttttgccatttccactgatgaacggtaagcactcagggcaacggtcttgtgcactttttcagagaattcggtagcttcttccgtaccgtaacgcaatcccagtgcagcaagcatatcaccttcggcagtaatacctacaccggtacggcgtccttgtccactcttcttataaatcttgtcccacaatatacgttctgtatgtttcacatcttcgctttcggggtcagcatcaatcttttccatgatgcgttctatcttctccaattccagatcgatgatatcgtccataatgcgttgagccaacgctatatgtttctggaacaattcaaagtcaaagtatgcatccggtttgaaggggtttactacataagaataaagattgatagccaacaaacggcaggagtcatacgggcacaagggaatttcaccacatggattggtggaaacagtgcgatatcccaggtctgcataacaatcgggtacggattcttttaatatggtatcccagaacaatacacccggttctgccgatttccatgcattgtgaacgatcttcttccacaaattggttgcattgatctccttctgcacagttggttcagcggcattgacaggatattgttgaatatatggagtacctgtgatagcagcggtcataaatgcatcgtccagtttcacagatacattggcacctgttactttgccttccgtcattttagcatcgatgaacgcttctgaatcgggatgtttgatagatacacttagcatcagtgcgccacgccgtccgtcctgagcaacttcacgcgtagaattggagtaacgctccataaatggcaccaggccggtggaggttaaagccgaatttttcactggagaacctttcgggcggatgtgcgacaaatcgtgtcctacaccaccacggcgcttcatgagttgtacttgttcttcgtctattttgaagatggcaccataagaatccgcctctccatctactccgatcacgaagcagttagacaaagaagctacctgatagttgttaccaattccggtcatcggacttccctgcggaacgatgtacttgaagtggtcgagcagatcgaatagttcctctgcacttaatggattagagtatttagcctcgatacgggctacttcattggctattctccaatgcatgtctttcggagacttctcgtaaatatttccgaaagagtcttttactgcgtacttgtttacccaaacacgcgcagctaactcgtcgccctgaaaatatcgtaaagattcttcataagcttcctcgtaagaataagtttgtttttccacgattcttttttccttagatttattttttaataagtaagagtgtagaagtgatacctatcattaacaaatgcgattgcaaagctaagaatgttttttattatagcaaaataaaaacagaataaattatgaacaggctatgagatttccatttttgaataatagattgctgatttataaaatattagcattgttgtgtgaacaaaaagtttccaaaaaagaaaattgtttttagactttgattaaacaggctaattgtttttagaaaacgtagataaactttaaactcgttatttgacaacaaattgctattctttttctatatttgcaaaaaaataaaagaatggaaatcctaaaacagagaagaacaatccgcaaatatcaacagaaagatatttcttcagatttgttaaatgatttgcttgattctgcatttcgagcctctacagtcggaaatatgcaggtgtacagtgtaattgtaacgcgtgatgcagaacggaaggctaggttggcaccggctcacttcaatcagccgatggtgaaaactgcacctgtggttttgacgttttgtatagacctgcgccgttttactaaatggtgcgaacagcgaaaagcaactcccgggtataataatttagagtggttcgtaaccggctctgtagatgccctgctggcagcacagactttttgtgtggctgcggaagaaaaaggattaggtatatgttatctgggtacgacgacttacaatccgcaaatgataatcgaagccctggagctaccggaattggtatttcctattacgacagtgacggtaggttggcctgctgaggagcctgcacaggtagatcgattgccgctggaagctattgtgcatgaggagacgtatcatgattatactcctgaagatatagatcgcctgtatgcctataaggaatctttgcccgaaaataagcaatttatttttgaaaacaacaaagaaaccttggctcaagtctttacggacgtgcgttataagaaagaagataacgaagtaatgtcggagaatctttggaaagtaataaaaaagcagggtttttaaccctgcttttttaatgatgcttggatatcatctatttctgcgcggaaagttttgtctacttcccgtaattctttaatggttttgcaggcgtgcaatacggttgcgtgatctttgtggcctattaatgcgcctatcttagccgtcgaaaaatctgtataggatttagcgagaaacatggctatctggcgtgcctgtaccacttcgcgttttcgtgatttagtatggatggtagcggtatccagtgagaaatgcttgcataccacgttgatgatgtcatcaacggtaatagatttactttcactttttactaccttccgtacaatgcgttgcgtcagttccagatcaatttccttattatatatagtagaatgtgccatgatggagatgacgataccttccaggtcacgcacactgtcacccacattttctgcaatataatcgattacttccggagggaactgtaaaccgtcacgatgtatcttattgcgcaggatgttcttgcgtaattctacggttggtctttccagttcagctaccataccccatttgaaacgggtgatgagtcgttcttccatgccttgcaataatacgggagcacggtctgaagtcaggataagctgtttaccgttttggtgtaagtgattaaagatatgaaagaatgtattctgtgttttggtaacaccggcaaattcttgaatatcatcgataatcaatatgtcaattgattggtagaagttgataaaatcgtttgtagtattgttacgtacagagtcggtatattgtacttggaacagatgtgccgatacatatagcactctcttgtccggatagagttctttgatttttgtacctatagcatttgcaaggtgcgtctttcccacgcccgatgctccatagaaaaacagcggattgaaaattgttttcgccgggttttgagcgacagcttctgctacgctgcgtgaaagtttgttgctatagccttctataaatgtttcgaagttgtattcaggattcagatgaggatctaaatctgcaataggagcttgcggtatttctctgccgattacctttttctgtggaataatagtgcggggagtagattcgagattgacggtagtacgtgaactcttatccaccataacattatacaataacttggtgccatcaccaataactttatatagagttttacgcaacaagtcaacaaacttgtcctccaaaaactcatagaagaactggctgggtacctgtacgaccagcgtcttgtcctcatattttaaaggtatgatggggagaaaccatgttttgtatgtctgctccggaacattgtctctgatgatttcaagacagcggttccatagcccgacatgatttaattcactcataacggctttaaatacatttattaattaagcaaaacttctacgcatgcaaaattcgcaatcttatttgagaaaaacaaatgtgttttttcttgctttttatctaaaaacaataatctctttactttcaactacttatcttgtttcatgtaaatagccccacagggaggctattgcatttttataagtatctgtattctagggtgatatataagaaaggaataagttttttaacttttcaaataatctgacagatgggaatactttagtttctacatggacttactgaggctttttcttccaattctgtttgctcctattatttagacttattctatttaaagagatttttcctacttatcttttttgccgaacagggagaaatgaacataccttttcggatgtgatttcaggtcttcaagaaggctggcagcattggctgttgtagcattcaaattattgtaaagcgatggatcgtttaacaacaagccgattgtattgtctttcctgcctaattggtctgtaatcatttttgcatttgctaaagtcgaatctattctggcaaatgcggcagcgtaatctatttctttcagattatcactgacagtgacgaaattatctcctatggtgttcagctttttagtaagctggggaatatctttactcataatggcctgtaactgtctgctggtgacttccatgcttgccattgtgttttgcacgctgtgcagtgtaccgggaattgccgggtctccaaggattgtattcagtgaagcaaggatagagtctagcttgggaagcatcttttctacctgaggcatgatggtggctacctggtccattacaccattgttgacattgccttgtagggtatcacctgtcagatacttctcgcgtggattattggcaagtagtaagttcatttttacaccacccatcagttcggaggctaattcggcggtactgcctttaggaatacgcagttccgggtctacatctatttccgctaccacttttcccggttcattgtagtcataataaaggtcgcgtacaatacctacacgaaagccatcggcaaagaccggacttgatttggtcaatccattaatgttatggaacttgacgtagaaatagttggtaggcttaaacatatgaatgcctttcaggtagttaataccatataccaatatgcagagagcaataatgcccgcaattcctattctaacttctttagtaagatacttcatcatgatgttatagtcttattatttatttcttttctttttaaattcttcgatagcagcgctgacgcttgtcttctttccgtttttgaaagcaatgataaatgcgtctttgaattttggcgctatctcccgtttagttcgtaataccttattataatcggtcgatgcaccgtatgtgtatttacaaagtccgccttcctgataatactctacacctttcagcccttttagtcgtttgtcattggcggcaagcggacgggaagaagtaagtatctgtattttaaacactggagcagcactatcggtttgcctgtcagctactttttctgtattttgtttggtttcggtgttattggaaacgggggatgcaggtatctcttcttctaccctaccggcatccgtatcctccggtagtagggtgcggctgcttcctgtcatccgtatttcatgttcacgtttataagacaggaaagcacggaatattccgttggcaagtgtggtggttcccgcttccgaattgagataacgttcttcttccggattggatatgaaaccgagttctaccaggatgctgggcatggcacttgctttcaatacaaggaacccagcctggtgtacaccacggtctgcacgcttacaggtatggcggaattctttctgtaccaatgaggcaaggtgtacgctctgagacatgtatttatcttgcatgaattcaaagatgatataagattcggctgagtttggattgaatcctgcgtaccgcgtcttgtaatcactttcgtataaaattacggagttctcccgtttagcgacttctaaattggcatccgacttggctaaaccgagcgtccatgtagaggctcctttaactgttttaccgcccgctacggaattggtatgaatggaaatgaataaatcagctttagcattattggctatttccgcacgtctgtcaagtgggataaatacatctctttcacgggtatataccacttttacatcagggcaattcctttttatctgtttgcctaatttgagggcaacattcaggttgatagtcttttctttggagattcggcctaaagcaccagggtcatgaccaccatgtccggcgtcaataacgacaacgaagtcttttgcttcgatgctggtagtgcaaaaaggagagatgaacagcccgaagcaaatacagatatataatatgtgtcgtttatatagtttcatacccaaaagtcgttgcaaatgtagtggaaatttatagaaaactcacgttttacatgaagttttgttacttttccccaggatttgtgagagatttctttaaaacagactaactttgcacccgcaaattaaatagaaaaaaggtatgttagttcgttttcttaagaactggacattgccactggcgatgctttcaggtactttgggatactttattctcgcaaatgtctctttcttggcgcctaccaaaccatatattaatgatttgattgcgtatattactccactgctgatctttgcccaactgttgcttactttttgtaaagtagaaaaactgaatgaactgaaacctaaagcatggcatggctggttgctgctgtttcagacaatttcatgtctggcaattgccgctttgctggtatgctgtccgatggatgaaatatatcgggaagtatttgagggggcgatggtttgtgtgatttgtccaactgctactgcagcggctgtcatcactggcaagttgggaggcagtgcatctacgttgactacttataccttattgtctaatttgctggcggcagtagcggttcctttggtttttccgttagtggagcctcatgctgacatgactttctttgctgctttcctgaaaatcctgagtaaagtgttcccgttgttgttgttccctttcttcctggcgtggtttctgagagtgtttatgccccgtgtgcaccattttttattgggtttccatgatcttgctttttatttgtggggcgtagcgcttgctattgtatccgggcaaactgttcgttccctggcaatcagtgatgcaccggtttcagtggaaatactgatagcctttgccggattagtggcttgttgcctgcaattctttctgggtaagaatataggtggacgttataatgaccgtatcagtggcgggcaggcactgggacagaaaaatacggttcttgctatctggatggcatatacttatctgaatccactttcctccgtgggaccgggatcttatgtcttgtggcagaatctgatcaatagctggcagctatggaaaaagagaaagagggaagaggaagaagcgcaacattaacgcaacagcaattcttcctcgttatatcttggcctgttctttacttcaatgtagattttaccgatatattcgcctacaattcccagggataccaatattgtaccacctaccagccagagggaaatcatcagagatgaccatccgggcacagtgtcgtggaagtagtaagcgcgtagcgtccagatagtgacgcatacggctatcagtataaaaatacagcctagccagaaaaccatgcgcacaggtttgacagaaaaagatgtgattccgtcgatggcaaagtttaacatcttcttgaatggatatttcgactctccggcaaaacgcttgtcgcgattatagtaaacacaggcggtttggtaaccgatgagaggcaccagcccgcgcaaatagagattgcgctcgcggaaacggcaaagttgttggatagcacggcaactcatcaagcgataatccgcatggttataaaccgactttactcccattattttcatcaacttgtagaaagcgagggcagtggtacgtttgaagaaagtgtcggttttacgttcccggcgtacaccataaacgatgtcacatccctctcggtagcgttcgagcatttcgggaatggcgttgacgtcatcttgcaagtcggcatctatggaaatggcgacatcacatcgttctttgacggcattcagtccagccatgagtgcattttggtgtcccacatttccggctagattcagcccacaggcatagggggtattttggtgtaaatccttgatgataggccaagtctgatctgtactgccatcatttacatataagatataactatgctgagagatgtgtcgttctgctatcagtttatccaataggagactgagtcttttatgtgtttcgtataatacagcttcttctttgtagcaaggtactacgatagcgagtactggagatttttccataatcaattattctttttgcaatattcgtaagaaatcgggagaaaaacaaattatctttctttgtatttgaaaacaaatctcactagcaggaagtttaccgggatagcgatggtaaataccggtatgggggcgaagggtttggaaaagcctaaccaaaggaacagattcagtaaacttatatgtaggatatagttgatcagatgggctcccccgaagccaaaagctttcttccaagatggcttctttccgaaggtaaaaagggctgtcagataaaaattagcaataaagctgagtatatagcctatgctgtaggctatatttacattgatgaatcgctggaatataaaatataaaccatagtgcagagcggttgcaaagacgcctaccataatgaaacgaataaattccggcagttttttcagtctcttcatattcatagaattgagaaggcaaagttagggattgttgcagaataattcgtacttttgcgcacagaaatcactaaaaacagaaatatatgtcagatgataggaagaaagcgttctggtttatagcgctactcagtatgcttgtgatactcccttttctgggagaaaccattttctattctaaaggggaaccacgtgaggccattgttgccttttctatgttagagagtggtaactggatacttccggtgaattatggtaccgacatagcttataagcctcctttcctctactgggccatcgctgccatctcttccctttttggaggagtgtcagagtattcatcccgtctgccgtctgctattgcattcctggctatgcagttggtgttcttctcttttatagcaaaacgtaaaggggtaaaaacggcttttctgacttctattcttcttctgtcttcttttgaagtacaccgggcagcggtggcgtgccgtgtagatatgttgcaagtgtcgcttattgttatttcattgtgtttgctgtttcgttgggatgagaaggagtgccgcggtattccctggctggctgttttactgatgggctgtgccacattgaccaaaggaccggtaggttctatattcccatgtgtctgtatcggtctttaccaattgttgcgtggacgttctttctggaagacattcttcttgttattgcttgtaggaatcctttctctgattccttatgcagcctgggcgggcgcggcttatgcacaaggcggacagtcttttgtcgatttaatgttggaagagaataccggtcgcttcatgggaaagatgtcctacggatcacatgagaatccgatatggtataatttcctgactgttatctggggctggataccctggactttggtattgctgctctctctctttggactgaagtggaaaaacatgcgtgtgttacctgaggggacatctttcggcgaacgtatcgggaaagcctggaaaaaattccgttcacagtcgcccttgcaattgttcacatgggtggtaattctctttattttcatattttattgcatccccaagagtaaacgtagcgtttatctgcttcccatctatccatttatggcagtgctgatagctgaatatttattggctttggtgcagcgtggggcaaaagtgtttaaaatctctgcacatatatttgcgtctctgtgtttgatacttacggtaactttcatagcggtacgtttaggactgataccggatagcctttttggaaccggccgtcatgctgctgaaaatgtatcttttatgcatgctttggaagcggtttctctgtctattcctaaatggtgtctggtggcgcttcctttgatagcagctgcctgcacatggatgggagtagcgaagcggaccggcgcttactccttattatacagtatcgccggatgtatgctttgtctttttgtttctctggatggggtctatcaacctacagtgttggcagttaaatcggacaagcacctggttaaccaaatcagggaatatgtgccgcagggaacagtctactcatatgatggcatgagcttctattgtgcaaacttttatatgaatgatcagatgcgtcattttgagaaggatttgccgtccggtgagggatatgttgttttgccggagagaggaaaagaactgttgtttgaagaatttggaaatacatacgactttgaagagattttccttacgaagaagcgcagttgcgatttgcgtgatgagatttatatgtataagtttaaaaagaaataaatgtcacccgttacaatcatcgataaatattatccggaggataatgaacgtaaacacatcttgttggtgcatagtcgtttggtggccgagaaggctctttcaattgctgatcaccatccggagcttcagttggataaagactttttatatgaagccggcatgctgcatgatataggcatctttctgactaatgctccgggtatcttctgttttggagatcagccctatgtctgtcatggctatttaggggcggatctgatgcgtcaggaaggatatccccgtcatgcattggtatgtgaaaggcatacgggtgcagggctatctttggacgatattatttcgcaaaagctgccagtacctcatcgggatatgctcccgattagcctggaagagcaagtcgtttgctttgccgataagttttattccaagactcatctggagcgggaaaaaacagtggagaaagcccgaaaaagtctttctaatttcggcaatgaaggtttgaaacgttttgatcgctggtgcgaacagttcttgtagcaatctaaatttctttaaaaagggagattatccgtataatttacgtacttttgccccttcaagcggaaactataagttgattacgccattgaaagcaaatacattcatatcattcatactactacttgtcttactcctgctctccggcgaggctttttcgcaacgtcggcgtggaagaactgttcccacaggaagcgagcggacagatacctttaatatagaaggtgtacaaagaggagacactttgctgaagggggatactctgcaaaacgatacgatacaattgcagcctgccggtaagaaaaagcagcctttggatgctccggtgatttatgaagctactgactctattgtgttcactcagaatggcattgccaatttatatggagatgggaaggtgaactatcagaagatagagctggctgccgaggtgattactatgaatatggacagtagtacggtttttgcccatggtgtggaagactcattaaaagtcataaaaggaagaccggtcttcaaagatggcgatacaccttatgagacgaatacgattcggtataattttaagagtaaaaaggggctgatcagtaatgtagtcagtcagcaaggcgaagggtatgtgactggtaataatgctaagaagggtatgaacgatgagctgtacatgaagagtggccgttatactacctgtgataatcacgatcatcctcacttctacatgcagatgacctatgctaaagtacgccccaagaaaaatgtagtgacgggccctgcttatctggttattgaggatgtcccgctacctcttgccgtaccgtttttcttctttcctttctccagtagttattcatcgggtttcatcatgccaagttatatggatgactctacccgtggatttggtttgacggatggcggttactatttcgctatcagcgataagatggatttgaagctgcgcggtgatatctttacaaaaggttcctgggctttgaatgcggaaaccaattataatgttcgttataaattctccggtctgtttcaagctagttatcaggtgactaaaaccggtgataaaggcttggatgactatgcagtagcaaaagacttcaaagttgtttggtcacatcgccaggatcccaaagccagcccaaattcgtcattctcggccagtgtgaacttctcgtctagtagctatgagcgtactaatatcggtaatatgtacaattcgcaggctatgacgcagaataccaaaacatccagtgtcagctattcacgtaacttccccgatcagaaactttctattgcagctaccggtaatattgcacaaaacatgaaggactcttcgattgctgtaactttaccggatttgaacattaccttgagtactatttttcctttcaaacggaaaaatgctgtaggtaatgagaaatggtatgagaagatttctcttcgctatagtggccgcctttctaacagcattactacaaaagatgatcttctgttcaaatccaatctggtgaaggactggaagaacggaatgaaacatgaaatacctatcagcgctacgtttacattgttcaagtacttcaatgtaactccatcggtgagttatacggagcgttggtatacacgtaaggtgatgaaagactgggatccgaatataggtaccagtgggcgggaagtagaaacagatactatttatggtttccatcgagtatataactatagtgccagtctgggtgttaatacaaaaatttatggtatgtataaacctttgtttatgaagaaaaaggaaatacagattcgacatgtcataactccttctgtcagtatcagtgcagctcctgactttggttcttcccgctatggttactatgatacttatattaaacccaatgctgatggaacacaagatacgatcacttattctccatatgccggacaaatgttcggagtgcctggacaaggaaaatctggaaatatttcattccagatatccaataacttggaaatgaaatataaggataagaatgactcaatacgcaaggtcagcctgattgatgagttgggtgcgagtatttcttataatacggctgctaaggtgcgtccatggagtaacctgacattaaatttgcgtttgaaattgagtaagaactatacctttagtatgagttcagtctttgctacttatgcttatacctttgataaaaacggtagggttgtaacgagtgaccgcacggagtggtcttacggacgttttggacgtttccaaggctatgggaactctttcagttacacgcttaataacgatacatggaagaagtggaaagcattctttaccggagagaagagtgaggatgatggaaaaggaaacgaacagactgatgcggacagtgaaagtaacgaaactgatgatgcgggaacaagtaatacgcctaccaagcggaagaaggaaaaagctgctgtagatgatgacggttatcaggttttcaaaatgccttggtctataaatctgagtacaggctttaatataacagaagatacctccagaccaatcaacagagagagcatgcgttatccatataagtttagtctgaatgcgcttaatattaatggtaatgttaagatttccaataagtgggcagtcagcttcaactccggttatgactttaatgctaaaaagatagtgcagacttctttcaatataacgcgtgacttgcactgtttcagtatgtctgccagtctttctccatttggtacatggaagtactatagcttcgttatccgtgccaatgccagcattctgcaagacttgaaatatgataagaagagtcagacacagactaatattaaatggtattaagaatccatttgaaattccttttactgcatttgctttttcataaaaaatatccccttctatactgttgaaacgatttatttatcggaatgcttcagtgtagaaggggatatctttatttctgattaggaattgcttttaccacgctatttcttgttctccatgttcttttaaataggcattcgctctgctaaaatgcttatttccaaagaaaccattgtaggcagataggggagagggatgcgcagaagtcagaacaagatgcttgctccggtcgatgaatgcacccttacgctgtgcataagatccccagaggatgaatacgaggtgttcacgctgttcggcaaggacacgtatggcggcgtccgtaaaagtctcccaaccgcggttctgatgagaacctgcctgatgggcacggacagttagggttgcattcaggagcaggacaccttgctcggcccaacgggtcagatttccagtggtgggagcatctgtaccaatatcatcttttatttctttgaatatattaatcaatgaaggagggaaacggactccatcgttcacagaaaagcataaaccatgagcttgtccgggaccatggtaaggatcctgaccgatgataactactttcaccttatcgaatgggcaaagattaaaagcgttgaatatgagctttcccggagggtatatcggataatgactgtattcttcccgtacaaaatccgttagtgtatgaaaataatctttttcaaattccggttccaaacgtgctttccaactttcttctatttgaacgttcataattttgtgtgttaaaagtttcggatgctaagatacaattttaatctgatttctgtaatagagcattctttttatttcttcgaacagagataaacagaaaaggcagaaatcataaaatctctgccttttctatttgtacctggatattaaatcaagtaaatattgtgttccttacattcttcacgcatatcttccggccagatactggcttgaatttcgccgatatgagcttttcgtaaatagaacatacaaagacgtgattgaccgataccaccacctatagaaaggggcaatgtgtcattcatcaggcgtttatggaaatagagttccagtcgtttttcttctccctcttgtttcagctggcgttgcagggcttccttatctacacggatacccatggatgatagctcaatgctgcgctgcaatacattatcccataataaaaggtcaccattcaagcccggaagaccattcaacccttctgtggtatagtcatcatagtccggggcacgtccgtcgtgtttctctccatcgcttagtttacagccaataccgataatgaatacagcaccatattttttcgtaatggcatgttcgcggcatttgggttccagattcggataaagttgacgtaactcttccgcatgaatgaaatgtaacttctgaggcaggcaaggcttaatctgagggtacatttcatacaccatatattctgtacgtatcatggctgcataaatacgggttacaatttctttcaggaagttcacgttccggtcttcggtagtgatgacacgttcccagtcccattggtctacatagagagaatggagatttcccaactcttcgtctgagcgtatggcattcatatccgtataaataccatatccggattcaatattatagtctgccaacgtcaatcgcttccatttggcaagagaatgtactacttcggcttgcgcatctcccaaatctttgataggaaatgatacggcacgttctacgccattcaaatcatcattaatacccatacctttcaatacgaaaagcggggctgtgacgcggcgcaaacgtaattccgatgaaaggttcaattggaagaactctttgatctgtttgattcctaattctgtttgttttaagtccaataagggtttataaccctctggttttatcagataactcataagtgtgtactatgtttttgtccggcaaatataggtataatatttatatttgcatcgtatttggctaattttatgagcaatttgtttcttattaaccagttgtggctctcaaaataatattcttatttataggcttttactgtaaaaaaagacaaatcattaggaatatgcccgatttttttatatttttgtccccgcatttaaggctccgtagcttagtgaatagagcgtcagattccggttctgaaggtcgtgcgtttgaatcgcaccggggtcacacaacaaaaagggggataccatcacggtgtccccctttttccctttccagttgtaaagtcaactctaatgtcctacttccgtcatttctatcggaagagtaggatatattccttttagtccctctagttctgtaccggtagcgtaaataaatacgcatctgtttacagcgggaatctgtatttcttttacttgttctttccatctgcgttttacgtaaatggtagggagataagttatcatgcctttattttccaaagtttctttggtttttctttcttttcggggcaatgtcagtacaatgtaccagtttcgcgtttcgttaaggcggcttttaatgtcttggagtatcataatcaattttgattggcgtaatgataaaattgaaggtattgaagaattgtggtttattgtcaacaaccatgggaagtggtgaaacttccagccgtatgctctaatatttcttttggattttcatgccatttagagcttacacagtaatttttgtctgtgtattgagcttgtatagtggcaggtaaagccaaaaacaataaaatcaagaagcaattctgtcttttgtactttttataatcattgtatatccataatagaattgtcaagatacaaacaggaatcgctataagaataagaatcagtagagtcatggtaatttgattatttattgtttatatcattctgcgacaaaagtatcacaatttatttgataaaacaagtgaattgtgaataaataggtattacaggacagataaatttttatttcacttcctctaggtttggataataaatcgtaccttcatggaaatggaaaagactactatatacatcggtgaagttataaaaaatgtcatggttgaaaaactggtgacaaaggctgaacttgcaaggagactgcaagttaagcctcagagtgttgactatatgttgacacgaaaaagtattgatacagatactttatataatgtttcaaaagctttagattatgattttgccctgctctattctatcgataaagaacagatgaattatgatagggaaaatgaagcttataaactctctactgccaagattttgatagagcttgagttaaaacctgatgaaataataaagttaaatttaaggaaaaaaatcagtgaactattgagataaaatattttcttttccataaatagtaaagcgtccgatttctttattcgaacgctttacgtaagttctcccaattgtcgcaaaaatcctgcatggacgggaataatacatttgctccggcatctagtaagacctgtccgtcaatgggacctgtgttgacagctactgtaaatatacctgctgctgcaccggcttgtacgcccataggcgcattttctactacgatagcttcattgggggctaatcctcctttttgtaaagccatcaggtaaggttccgggtgtggtttcccatattttacatcgaaggcagttaccatcagttcgcgacggaacatgccggggaagttatgcgacaggcggtctaatagtgagtgttgtccggaaccagtgactaccatcggtatcagtccgtccgactttattttctgtagtacttcccatgcgccgggcataggttccggttcggggttactgttgaattctgcactcttttctgcataaatgctctgtatcatttcgggagtggcatcttttccatattgccgttgatagacgatattgatagtagcagctccggttcgtccttcatgcagataagcttcttcacggctcaggtgcaatccatggcgttccattaccttgtgccaggcatcggcatggtaaggcatggaattgaataatacaccgtccatatcgaaaaggacggatttcaattgaattctggagtacccgctggactgaagatagcgggaaattgcttcttgaaacataatacctattgttttatatctgcaaagttactacaaaaaagtgaaatgcggaaagatatagtgatagaattga

SEQ ID NO: 144 - DNA, 25784 bp, unidentified
  source 1..25784: mol_type = unassigned DNA
accccatcaagaaaggtgtccccaattttggggagatgtagacggtgctcaaaaatgttctccgtgcgcacaagtgagtatgctcaaaaatgagcggtcctccatgttctataaaaccaataacgtttgaccaaaagtggtcgaatgaaactgttcccccacaatttcggggagactcataatcaaatcgaaaatccgccgggatgtgtgctgtctgatattaaacgcggctctttaagttcactttctgactgaatactgtataaaatagaaggagccctgctactcgtgtctgagcggcagagccctgttgctgctataggaaatgatggttggtgttagcgttcaatgatctcagtggtaattctggtttgaccttcaccaagaagtttgccatatgcgcggtctgagatccgcttgaattcttctgctttttctcttgattcaaagtgatcttgtcccagcacggaatttccgttctcatgatcgataatttgtaccaagattttattttcagccataagcttacctcctgctgctgatagaagtggtgacgatgggcgcgatgtctattaccgcagctttctcatatatgcttgggacgttcttttctgactctcatagaaggtaacgccggtaacatcatccacgaccagatcatcataagggatgccctttttgttcagatgatcaatgaaccagcgctttttcagatagcaccacggggttctgctgaggtcgccgtaactcgatgcaggccgttcacatgcgttgtaggtcttgccgcagatactccaccattctttacgcacccgctcccgcatttgcagaacctcagaggtgccatgaaggccatgctcttcgccatactgataatctgccttcttgatttttgcgttctgtcccgcgctgactgcaccagccgcaccaagaccgaacaaccctaaaaataacgaaaaagcgcctgccataatagtttcctcctgtattttgaagtgtgtttgcttttgctgtacctgaagtctatcaaactatgcatccgataagatggacttacaagtgtgctgttaaaaatatggagcgttgtggctgccgtcgcgcggactgatggttgaccgcactatagcaggcaaaaagtatccggtaaggcctccggtggcggggcacacctcactccgtcagccccaacagataatcggtcgacacctgatagaattgggcaagctggatcagatgagggatctcgggacatttgtcgtgctcccatgcgtagactgcccggcgggtcacacccatagttcgggcaaggtcggtctgggtatagccgtgcgtcaggcgcagatgctgcaaacgttctgatataatggtcatagctgctctcctttaaataatgggcgtcctctcacagtccggcggatctctgtctttacggatgcatttttaaacaacgtcaagggtaatggtgccgctctctttggtgatgatctcatactcggtggtctggatatcccgcaataccagctttttcaatgctcaggatgctggcaagggggatggaaagcatggtgtgtccggccatgaaatgcagctctgacttgttccggtgcgtgtgcagctggatgtcttggaacgcgatgtctgccccggaaaaaacggcgcacccactggctttgcactcggatgtctcggcaagaaaggtgtcaacagcgattttataagtatccatggaatgtctcctgtgattttatataatagcactactctcactcgtgccctcgctctctgtcctgctatgattagtcagccttcacgaatagctccatgcagtccgcacagatgacccgcacttccttggtgctccggatgatggtaccgcacttgggacatacccaccgccgggtgctgctctttgccttgggaggcttgggtgcgccggtctgaccgctgccgggtgccttgctgcctgctccggtgcctgccatatccgaccacgccagccgctcacccatctggatgtcctgccagccctgaaagatgatgaagtccaacagctcctcggacgggctcgtgatggtccagccgtatttctcgtggtggtcgacagtcagcccgtgtgcctcggcctgctctttaaagcgccggttgtgatagaccccgttgttgctggtatccttgataccggtctccatgcagtactcatgcaccatctcatgcagcagggtggaagcggtctcctcgataggacggtcaagggtagccgacgaaatattgatctcgtacttgttctcgccgcctgcctgccagaccttggagcaggtgatatgaccataggcggacggggtctttttcaggctgatgatgggctcgggcagcttgcctgcaaagtagtgcttgttgagctcgcggaacatcttttccagctgaccggcagcgcgggaggttttgacagtctgtttcatgatttttcggtccttcctcttgataaaaaaggccgggacaggtataatattggtgtagcccgccccggcgggtgttgtgggctctgtacagcgcaaactttggtcggtaggcgctgtatggggcttttctttttcaggtgatgctcagacgggtgccggtgaccgttttgctgtactggttgtacaggtcgggcgctacggccttgatggctttgctgtctagtcgggtgctggagaaatcagacaggcggactttgtggcagcctacttccagatagttggtggagcgctcagccagtgtctcgcggatctggatcttcagctgttcctgttcagcctgtgcggcctcgatcagttgggcggcctccttgtactgctcgacaagggtcagtaaaacgttgatactcatgtgcgtacctctcttcaaatcgttgggtgaatggtcggatgtgagaaccggtgttcccgatggcatgagtatacaactacttgcgcaagtatgcaagatggaatgttgcacaaagaaaagatggctgaattatgcaatttgcatacttgagcaactatgcacggcaaaagacagaaaagctgatatgatataatacctataagagtaaacagaaagatggtgcttcagatgggcggcaaaacgagcgcggcaagtaagaataagtggaacgaaaaaacctatgaccggataaaccttgttgtccgtaaaggtcagaaagagcagattcaggagtatgccaaagagaaggggatgagcctgaacgcctatatcaacgccttgattcaggcagacatgggcgaacacctgaccccgggggtagttaaaaatctggaaggggacactgacccggtagaatgagatagttgtttcatctccccagaccggattaaaatctagcaacagaaggcctctgtctttcacagaaatgtgatcggcaggggcttttttgcgcgaacaaatagcccgatttagagcaggtggtagctgcagtgacgggatgctgattgtacctatatataaataggggcagcaggggagagggtaaaaattatgtggtactgtgcgatatgcctcgtcagaactcctgatcaatgtgacgacataaaccggcttttcagtgcgaggggcgcgttctatttaacggctgtcattacatcggagcggctatcacacctgactgcactctccagcgccttggacaactatatgaccacacattttgtccatcgatgatttcatctggagctttcatgcgaaactgggcaatgtgcaaaaaaagttctggctgaatcgcatttttttctaaaacatggatggatacatttcctcgtatttctattgattcccagatataaccatgatagaataataagagaattcagacggccacgtagaagaactggtatctgctgttttgtgatggaaggatacgccttgattgcggtaaggaggtgaatccagtgggcttatgtctgtttgcgaacaatcatgtgatagatcatgaggaaacccgaatgatagatcaaaataaaaagcccactgctgtttcccttgctggcgtgatgcgcaaaggtgaaaatgaagtgggcttgttgaggttctacaaaaatgtgaaatattgcatactggaagcaatgcacatgcggcgcttgagctgtagcatgacgttctggttttcattacggtcacattgcatttgaaatgaccttgggcgaagcggtcgtccgagggcttttgcttgcccggagatcaggaataacggtctgccgattttaggaaaagaggaacggttatctaaaaggaaggtgcttgcgggaacggtgtgagttaaagggattactttatagcagtttgtgtttttaatgcgcaagcagcatccgcaaactgcatatcgcaaatatgccgtgttgatagggcactatttctgaaaattgcgataaaacgaatgacgataagaagtgcatagacaaggatttatgtgaggagaaaaaatggctacgaatactgttggaatcgataaggaagttgaagttaaccgcaaggaaaatctgcgcgaccatcgcctgtactggatcgggcgtcggacgcaggacgtgattttgtcatcgctggcactggtggtgctgtcgcctgtcatgctggctactgccatcgcaattgtggtggatgacccgtctgcaggccctgtttttagtcaggaacgcatcggccgcaacggcaagcccttcaagttctataagttccgctccatgtgccccaacgcagaggcaaagctggacgatctgctggatcagaacgagatggatggtcctgtgttcaaaatcaaggacgacccccgcattacccgtgtgggcaagtttatccgcaagaccagcctcgatgagctgccccagttgtggaacatcctgaagggtgatatgagcatcgttggtccccgcccggcacttccccgcgaggtggagcagtatggcgactacgaaaagcagcgtctgtatgtgacccccggcttgagctgctattggcagattgccccgcaccgcaatgacctctcttttgaggagtggatggatctcgatgtgaagtatgtcaaggagcgcagcttctgggtggattggaagattatttttaagaccttcaaggtatgtctactggggcgtggagagtaaaagatcgcgataccgcctttcgggatgagtacatagatattgaaaaattaggaatatggaggaaatttaaaatgtctgcatttgataacgcaacccttatgatcactggtggtaccggttcttttggatctaccgttctaaagcacttcttggattctgacctgaaggaaatccgcatcttctcccgcgatgagaaaaagcaggatgatatgcgtcacgaactccaggctaagcatccggaagctgcaaagaaggtcaagttctatatcggtgatgtccgcaacccccagtctatccgtgacgccatgcccggcgttgactacatcttccacgctgccgctctgaagcaggttccgtcctgcgagttcttcccgatgcaggctgttcagactaacatcatcggcactgataatgtcctgcatgctgccattgacgctggtgttaagcgcgttgtctgcctgtccaccgacaaggccgcctatcccatcaacgccatgggcatctccaaggccatgatggagcacgttatctacgccaacgcccgtgtggcggcggagcggggcggcacgaccatctgctgcacccgttacggcaacgtgatgtgcagccgtggttccgttatccctctgttcattgaccagatcaaggctggcaaccccatcaccatcactgatcccaacatgactcgtttcctgatgaatctggacgaggccgtggatctggtgatgttcgccttccagcacgccaatccgggtgatctgttcatccagaagtccgatgcttccaccattggtgacttggcaaaggctgtccagcagctgttcggcgatactggtacgaacatcattggcactcgtcacggtgagaagctgtttgagacgctgatgacccgcgaggagcgtctgcgcagcgaggatatgggccactacttccgtgtggctgcggacaaccgtgatctgaactatgacaagttcgtggtcaaaggcgaagttcacactatggctgacgagtcctacaccagtcacaacaccaaccgcctggatgtggaaggcaccgtcaagaagatcatgaccaccgagtatgtccagaacgagctgaagggcattcctaatgtctaaggaaaaactcctgctggtcggtgctggtggatttggccgtatggtggcggagcaggcgatgctccaatacgactgtgcctttgtggatgatggacagtctgtggggggcgaaatctgtggcattccggtggttgatggtcttgctgatttgcgggagctgcggaaagactatgacctgctggtggtgggcatcggcaataaccggtttcgggcacaggtgtatgagaaagcaaaagcacttgactatgcgttccccaacatcattgctcccagtgcctacatcagtccatacgctaagttgggatgcggttgtgtggtattgcaaaatgcctgtgtccagaacggtgcgtccgttggcgacggtgttctgctgaatgccggaacagaggtccactgtgatgcgacggtaggggactacgcccttatctacaccaacagcgtagttcgcacaggcgcaacggtgggaaactttgcccgcatcggcagcaactgcaccatctgcaatcatgcaactgtgccggatggcgcagatattccggactgcaccgcagtacattaaagaggtgataggatgaacattctagtcacaggtgccaagggcatggtgggaaccgccctgtgtaacaacctgaaaaacatccgagatgggaaaaataagacccgcccggcattgaatattgaagaaatctacgagtatgacctgaactccaccccggcggagctaaatgagtactgccgtaaggcagactttgtgttcaatctggctggtgtgaatcgtccggagaatcctgaggatttcatgaagggcaacttcggctttgcatccgacttgctgaactgcctgaaaaagcacaacaacaaggcgaccatcatgctgtcctcctccattcaagccacgctggcaggccgctttggcaacagcgagtacggccgcagcaagaaggctggcgaggagctgttcttccagtatgctcaggagaccgaggcaaaggtggctgtctatcgctttgtgaacctgatgggacacagccgccccaagtacaacagtgctgtcagcaccttctgctgggcagttgccaacgatgagcccttcaccgtcaacgaccgcagcaccgagctggagctgctgtacatcgacgatcttgtagaaggaatgttcgacctgctggaaggcaaggagcagcactgtgagtttgatggtgtggaaaccgtcctgaaagcagacggtcgatactgctgcgttcccgtgacccataaggtcacgctgggcgaaatcgtggatctgctgcaagagttcaaggcacagccgactacgctcatgatgcccaagatgcccgatggctcctttgctaagaagctttactccctgtacctgacctatctgcccaccgacaagtttaagtacgccctcaagatgaatgtggataaccgcggttctttcacggaactggtgcataccgccgattgcggtcaggtgtccatcaatatcagccgcccgggcatcacgaagggacagcactggcacaactccaagtgggagctgttcattgtggtggcaggtcacggactgattcaggaacggaacatcaataccggggaaacggtagagtttgaagtttctggggataaaatcgaggctgtccacatgattcccggctggacccacaatattatcaatttgtcagagacggaaaatctggtgacggtgatgacctgcaacgagatcttcaacccgaatcacccggacacattcttcgagccggtgtaagagtgggtactggttgacgttaggagatttttatggaacacaattttacatggaaaaatgacgggcgcaccaaggttatgattggctgcggcacccgtccagaaatcatccgactggctgcggttatcaagcgctgccgggaatattttgactgctgcgtggtctactacaaccagaactgggacagaaacctttccaccgttttctgggaagactttgaactgaagaacaccttcggggagtatggcccggacattctggtgccagtagtgggcgagaatctgggtgtgacctgcggcaatattctggggcgcagctatgagcttctgtctgagttgcaaccggagggctatctggtgctgggcgataccaactcctgcctgtctgccatctctgcgaagcggctgcacattcctctgtttcacatggaggccggcaaccgctgcaaggatgagtgcctgcctgaggagactaatcgccgcatcgtggatgtgatttctgacgtgaatatgtgctattccgagtttgcccggaagtatctggcggacaccggactgcccaaggaacgcacctaccagaccggctctcccatggcggaagtcctgcacatgaatctggagaagatccagaaaagcgacgtgctggagcgtctgggactggagaaggacaagtacattctgctgtctgcccaccgtgaggagaacatcgactctgaaaagaacttcctgagcctgttcaccgccatcaatgcactggcggagaagtacgatatgcccatcctgtattcctgccatccccgcagcaagcatcgtttggagaagagtggcttccagctggaccctcgtgttcgcgtcaatgagccgctgggcttcaacgactataacaagctgcaaatgaacgctctggcaatcgtctccgactccggcaccctgcccgaggagagcagcttctatctgtccattggtcatcccattgcagccgtgtgcatccgcacctccaccgagcgccccgaggcactggaagctggtgacttcattctggctggtattaccacccgggaacttctcaacgctaccgatatggcgatcgagatgaagcagaagggtgttctgggtaagccctgccctgattatgtggacgagaccgtgtccatgaaggtggttcgcatcattcaggggtatgtaaacgtggtcaataagatggtgtggagaaaatactgagttacaaagtgagaatgctatgcgacgagtgaatatattaggcgttgaaatttcggctgttaacaaagaaactgcaattcaatatttattaaaaaacatggacaaagcacgaggaagatatatttgtgcttgtaatgttcatactaccgtaacagcacatgaaaatttggactatcaagcggttcaaaacaattcattcatgactttgccagatggaaagcccttatctagtgtaggcattcgtcgcgggtattcggaaatggggcgagtgactggccccgattttatggaacaagtgattgcagccacagaaaaaagtgatgctcgtcactatttttatggaacaacgcaagaaaatctgaatgcactactcgaatacttaaaggtaaattatccccaattgtccattgtcggttgtgagccatcgttgtttagaccgttgacgatacaagaagaaacggaactgtgcgacagaatcaacgaatcgaaagcggattttgtatgggttgcactcggtgcaccacgtcaagaaaaattttgtgcgaaacttagcaaaaatacaaatgccgtttggatagctgttggtggagcatttaatgttatttctggagtgattccacgtgcaccgcagtggatgcaggatcacagcttagaatggttgtatcgatggagcaaggaaccaaaaagattgtttaaacggtatgcagaaacaaattcaaaatttattttttatctgataaaagaaaaggttgaaaaaagatgagaaaaaaagtctgcatggtcgttccgagctttacggcaaagggtggaataacagctgtagtcaatggttatcagaattctcaattgacagaagattacgatgtacgatttatagaaacctattgtgatggcaataaaataaaaaaggtcgcaatatatttaaagtcaatgtttaagtatttatacgcgttgattttttggagagcagaaattatccacattcattcttcctttggcggcagtttctatagaaaaaagttttttatagatttcggtagattgtttaactgtaaaattgtaaatcatattcatggatcatattatgacgagttctattttaaagcttctaactacaaaaaaaagatggttcagaaaacgtatgagaaatgtaatatatttattgtcttgaacgaatcggcagagaaaaatctaaaacaaatcgttccggataagcaagtagttgttattgagaactatggtatcttagaaacatcggcaatacacaactacaagaacaggaacgaaaacgttgtattgttccttggcttcgctacagaaaaaaaagggtgtttcgatatgccccgaatttcagagatagttttacaagaagtaccagatgctcagtttgttttgggtggagtgggagaactcgaaaaacttgaaaaacttgtaaatatgaatcattttaaatttttaggatggatagaaggggaggaaaaaaaggaatggctagagagagcaaaggtgttttttctgccatcatattcagaagctatgccaatgtcaattttagaagcaatgggatacgggttgcctgttgttgcttctaatgttggcggcattccttcaattgtgagaaacaatataaatggatttacctttatccccggagatgttgaaggaatggcggcagcaattattgagattctcaaaaatagtaagttggcaaacaagctatccgagaacagtgcgaaaattattgccgaagaatattcattaaaaagtcatattgatgcagttgagaaactgtatgaggtacaagcatgaaattagtatatagaattctggacatttttcgaagagggttcaacaagttattaattgagccaggaatgaagaaaggtttatcttcttgcggaaaaatggtgaaaattggagcaggatgtgaacttaagccgttaaaaaatatagctatcggagatagaactgaaattggtccgagagctttattttggacaacacgagcaaaaataataataggggatgacgtcatatttgggcctggagtaaccattattacaggagatcatcccacaaatattaaaggccgaacgattaactctataaacgatgaagaaaagccgccatgctgcgatcaagatgttgtaattgataatgatagttggattggatgtaatgtcaccatcctaaaaggtgtgcatattcatgaaggtgccgtcatcgctgcaggaagtgtagtaacaaaggaaattcctccttttacaatctgggggggggtacctgcaagaaaaatcaaaaatagatttgaagaatgaatataaatcagcggtgtaatcatgaaaatctcttataaaaaaattagtacttttatttttgctctggcattttttttgcagtcttttggtgatggatattatattgcgcatggtctagagccaagcattctaaaggtcgcaaaatatggtttgtttgttttgggaatcgtatgggggacatacagtacctctgggaaggattttcactgttatcaaaaagaaacattcagaatcctgattgcacagtttgcaatcttcataatttcgcttacactcgcaataattaataatggaaatatttcaaacattttcgaccaggtttttagatattgtattgcaattctttacgcttatgttattttgaattcgttttcattgcatgaaatatacaagctgatggaatatatcatgatcgtctccattggaggttggcttttggaaaagggaactgatatttttactatggcaaatttcagctccgtttctttttttgattcttcatccccttttgaatcaagctattttgcagcgccctccattaactgctgcgcattttttatgtattatcgaaaaaacagatttgttactgtaatatcttttttgttcgtgctattaacttttaaaaggcctgctgttgttttcgcctttatccttcttattgctccaatatttattgatgttgatttaaaaatcagttctaaaatagtgtttttaggggcgttgctttgtgtgctgactacgtttgtatggtattggcttcttctccctcaaaatgagtggttaatttttaaattgactggcgatacggccgctcattttacgcaaggccgaagcttaacgctattaagcgtcttgagatctggatataagcccgccggaataggaacctcttataatgtagtccatcgaattatagaaatggatttgattcaattctatttagaaaccacaattattggtttgataatcattgtgtttgcatatattttttccgcaggaaacgtattgtatgctttgatttttatggcgttccaaatgttatcatgtttgaccggatctggaatgtataatgcatttggctgggttccaatctttataacgtttggttgtattaattataaaaaagattccaatttgaatgtgagttatcctgttttaaaattaaaaaggagaaaaaggcaccatgtctgaacaatatgatttgatatccattattgtccctgtatataatgtcaagaattatttggaacaatgtttgaacagtctcgccaatcagacatataaaaacattgaagtgctccttgtaaatgacggatcaacagatggtagcgacaaaatttgcgaaaagtattctctgaaagattcacgctttaaaaaatttgataaacccaattctggtccagctgatgcaagaaatttgggcatcaaaaactcacatggaaaatatattgcatttgttgactcggacgactatgtggatcatggattcatccttgaattatataccattctgcaaaaatataaggccaatatttctattgctggctacactgtgttttatgaaaacacaaattttcgtagcagtttctcatatgatcggtctggtgttatttccgcagaagctgttttgtcttctatcttaacagatgaaacaattgccaattttgtatgcaacaaactgtttgaaaaagaattatttaacagagtcaaatttccatcaggaaaagcatatgaagatgttgcagtgttttacaagttagttgctgcatctaaaaaactttgcataacttcaaaatgcctatattattatagaaaacgctttggttcaattacaacatctgtaaatcctaagagcactttagatggattagaagctgcaactgccagaaatttatatgtttcttcgcactttccaactttgaaaaaagaatgtatcaacagtgacttttctatgttggtctattcttataatcaactggcaaaatccggaaagcctgtcagcgatatcgaatgcatccataacagaatttcatatcagttgaagcatcacttcaaagaattacatggaaacaaataccgcccattcggaatagtgatatccatctttcctaaaaccttctatcgcacagtcggcctcgtggaaagagtaaaaaaaggttggcatcgatgagcaacataaaatattctatcattatcccagtttataatgccgagaaatttttaaaagaatgtctctttagcgttttgtcatcagatcggtctgacattgagatcattgccatcgacgacgggtctacagacaatagcttgcaaatcctgaaaagcattcaatcgcttgatcatcgccttatgattttttcacagaaaaatgctggtgtttcggctgcaagaaataaagggttacttgaggcaactggtgaatggattctttttttggactctgacgattatttcacaacggaaccattcaattatttcgattggattattgcaagtcatataaactgtaaagtcttttacttctctagcaaagcagataaagccatctcgatggacctttttcggcaagatgttgttttagctactttgggaacccgcggtataaaaaatgaatttacggaactgtgccaattttcttctgtttggagtagactatataattcgaacgatattaaaactaatggaatgacctttgatacggatttggtgatgggagaagatcttttctttaatttgaagattcaaagctttgtaaaagaaattgttctatcaactttttcatattatttttatagaaataacagtgattctataactcataaattgaatactgaaattccgttgaaagattatttgtttcagcataaattgctgaaatattgtgaatctaataattttaaaaaagttatagatttagcttataacaaatctgtcttggagggcattctagtttcctgtaacacttgctttcatcgttacccatggaatcagtatattactgcaagaagagcattttttcaattcataaatcaagaaccatataaaaccattttaaagaaaaaaattaattatcgcgacttcaatatattacagggaacaattttatggtgtgcaaaacacaatttcttttttccgggctattttattcgaagtggagttactttgtatcaaaataaaaaataagaaagagagatgtctgatgaaaaaaatattgacaataagtgttgctgcttacaatgcagcgcgggatcttccaaaatgtttggattccataactgcatgtttgaatatcgataaaattgaaatatttattgttgatgatggttcaacggacgccacaagagacgttgcattgaaatactgtatccaatttccgcaaagtgtttttctgatttccaaaaagaatggaggccatggctcaacaattaatgcgtctatccagaagtcatctgctaccttttttaagattgtagatgcagatgactggatttatacagccaatctagataaattaattggctatcttgagggcactagcgcggatatgattttaaacccatactacgaggtttctgccaatcaacagttaaacaaaaaaattgtatttccgtgtaatcaaacattgattgaaaacagaaaagaaatatcaatcgctgactgctcaaatgagatatacttatatatgcattctataacttttcgaacggcttgcctaaagaaatgtggacctataatcgatgaacattgcttttatgttgacgcggaatatactgttttccccatcccgtatgtaaatactgttgcctgtttggaatatcctatttataattatctacttggaacccaaacgcaaagcatgaacatgaaaaatttgcaaaagagaagagatcagcatctacgtgttacaaagcggcttgttgacttctataataatttatcaacaaatgtttcaactgctcaaaaaaatgtcataagagttcgaatcatcggcgttgtaatattgcaatatattattttgttaacagttgatggtaacgttggaaagcaagaaataaaagaatatgatttatggctaaatgatacatcgccagagttgtataatttagtgcctcaatatgcagagggtggctatataaaagtagcgttgtttgctcggaaaacaaaattcatattttattcagtttataggactattttgaaaaagttgcaccttattaaagagtaatataaactatgatgttttttatgatttaaaggacgtttgccaaatgaaatacgattatttgatagttggatctggtttgtacggcaccatctttgcccatgaggccaagactcatggtaaaacagttctggtagtggataaacggcccaatattgctggtaacatttacactaaaaaaattgaaggaatcaatgtccataaatatggcgcgcatattttccataccaataacaaaaaagtatggaattatatcacgcagtttgcagagttcaaccgttttaccaactctcctgttgcgaactataagggcgaactctactcgctgcccttcaacatgtatacctttaataagatgtggggcgtcgtgacgccggaggaagctgccgccaagattgaggagcagcgtaaggaaatcacccacgaaccgcagaatctggaggaacaggccatctccctcgttggccgagacatttacgaaaaactcatcaagggctataccgagaagcagtggggccgtgactgtaaggagcttcctgcgttcatcatcaagcgtctacctgtgcggctgaccttcgacaataactacttcaacgcgctgtaccagggcatccccatcggcggatacaccaaactgattgaaaatctgctgggcggcattgaagtacgcctgaatacggactatctggaacacaagtctgagttggatgcattggcagataaggtggtttatactggtcccattgatgcctactttgactataagctgggcacactggaataccgttctgtccgatttgagaatgagctgttggacaagcccagcttccagggtaacgctgccgtcaactacaccgaccgcgagacgccgtggacccgtatcatcgaacacaagtggtttgagttcggcaaggatgagaacggaaatgacctgcccaagaccatcatcagccgtgagtattcctccgagtggaaacccggtgacgagccctactatcctgtgaacgatgccaagaacagcgcactctatgccgaatataagaagctggcagatgcagagggtaaagtgatttttggcggccgtctgggcgagtacaaatactacgatatggatcgggtcattgctgctgcgctgtataaaagttccgttgaactgaagtgagtttaaagtgtagggagagagttaaacgatgaaaatactgtattataattgggatatcatcgatgatcattcaggatgaggcgtcacagcctatcaaagaaatcttttgtcagaaatggttaaacagaaagatgtcaatgtatattttataaattcttgctttctatatgttgacatattgattagcttggcgtggatgatatcgaacagcaatgtagaatgactgacattgcattttatgttgtgcttcaatttgtaagagagaaaagaaacaaaaggaaaccagtgaatgaaagagcctagcataaagaaaaatttcatatatagtacagcttatcagattttgaacgtaatcactccctttatctccgccccatatatttcgagagtacttggcgcagagggaatcggaatccaaagctatacggcatctatacagcagtattttttgctgttggcatcattgggaactttgagctatggcgctagagaaatctcgatgaatcgcaacgacgagtataagcgaagcaagatattctgggaaattgagttgatgagtatcggaacaacgctgattgcattggctggctggatcatactttgctttttgacaccaaaatatcgtgtgtattacattgttctgacgataggaatttttgcagcggcgtttgatatttcatggttctttaatggcattgaagaatttaaattgactgttatcagaaactctatatttaagatttttggaatcatcctgatgtttctgtatattaaaacgagggaagatttgttgctatatgtttttattacagcggcaacatctttcttatccaatttgtccttgtggccgtatatgaggcgttatcttgttaaggtcaatattcgtgaattgaaattcaaaaagcatttcagtgagacgctggtttattttataccaacaattgcgacatcggtatataccgttttggacaaaacacttctcggcttgatcacaaacgatgcggtacagaatggatactatcagcaagctgaaaaaattatcaatcttgcaaaaagtgtagtgtttacagcgataaattcggttgttggtgtaagaaattcttatttgttttctgaaaaaaagtttgcggaaattcacgagaaaatagaggcatcttttaattttattttctttatgggatttgcttgttgctttggaattatgggcattgccaaaacttttgtaccattgttttttggcgcagggtacgaccaggttgttgggctactgtacaccttttcttcaatcattgttattattggagtcagcaattgtctcggctcacaatattatacaccttgtggaaaacggagagaaagtacaaattatttgatttttggatcagttgttaatttgattttgaatctcctactaattccaaattttggagcggaaggcgcagctgttgcatcggttatagcggaggcaatggtttccgttttatatgtgcactttagctgcggatatggcgactttgctttgctggtcaaaactggagggaaaaagctacttgtcggttttgtaatgttcgttgtaatttttgccatgaataacctgtcgttaaatagtttagttttgatttctttacaggttgttacgggagctttaatatacgtgcttggcttgattttgctacgagacgactggacaatggatatggcgcaaaatatggaaaggagaataaaacgtggttgatctaaatatcgtgttgccagatggctttttgaatgaagaagtccgatgcgggtatacagttaccaagcagatgaaagaagtttgggctgtggaattggatatgttggagaaattgctttcggtatgcaagaagcatgatataaagatttttgcaagcggtggaacgatgctaggggcggtcaggcaccaaggattcattccatgggatgatgacatcgatatgatgatgtttcgggacgattatgaaaagttgtgcaaagttgcgcaggaagagtttgaatatccctatttttttcaaacagaatatacggatgtagggagccttcgtggacatgcgcaattgagaaattcagcaacaactggaatcctggctggagaaagaaatcaaaagtatagctttaatcagggaatatttcttgatatttttccacttgacaatattccagatgataaacggcaacgggaaaaccaagcgaaaaaaatcagacattataaaaatagagcatgtttttgggctaaatttacaacacggtatagcgggacaagcaaatcggttttaaaacaaaacgtaaagaaaatgatatctggtctcttcggaaatttcatggagaaatatcagctcgaaaaacgggattattgcagatttgagaaagcgtgtgaagagtttgattttgataaaacattgcttgtctctacattgtcactggatgaatcaaatgaagcgttctataaatataaagaagactatattgagacgatagatatgccgtttgaattcatttcgattccggttggaaaaaaatatgaccatgcacttcaaaaaagatatggaaattatatggaaattgtaaaaggcggaagttgccatgggggcgttttctttgatacagaaaagtcatattgtgagtatgtaaagtgaaagaggtaattgtatgaacattgcaattttaacagctggtggtatcggatcgcgtacacatcaagatatcccaaagcaatttttgaatgtagataataaaccgattattatctataccttggaagctttccagcaacaccctaatattgacgagatttgtgttgcgattttggaaggatgggaccaaatcctttgggcgtatgcaaaacagttcaatataacgaagctgaagtatgtcgtaactggtggatcaactggacaagaatctatttttaatggactaaaggcgattcggcaagaccacaaagatgatgatgttgtagtagtacatgatggaaatcgtcctatggtaagccaggatattatcactgataatctcgttaaacaaaaacaatatggctcagctgtagcaacaattccatgtactgaggttgtttttgtttctgaaaataagatggattcggacaaatctattccacgcgaaaatcttcagagaacgcagacaccgcattcttatagattgagcgatttgtgggatgcccacatgagggcaaaagaacttggcattacgaacacggcggcttcatgttcgttgatggaggctctgggaaagaaaacgtatttttctaagggttcagagaaaaaccttaaaatcacgacagttgaggatattgagattttcaaggctcttttgagcgctaagaatgaggaatggataaaatgaataatcttgaaatggaagcagtgaaacgagttgcatcactaccatatgattggagtagatttaataataaggttctactgatttccgggggcaccggttttatagggtcattcttgatagaggttttgcgccatcgcacaaattatttcggaaacacaattaagattgtttcactctcacgaagaggaggagtgtccgatgattatctggagaatttggcggtcgatgtctgcaatccgatagattatacaggagatgtggattttgttcttcatcttgcatctaacacgcatccgaaacagtatgcagaagatccgatcggaacgattctgaccaatatagatggatgtaacaacctgctgagactggcagttgagaagaaggctcgttttttacttgcatcgagtgttgaaatatacggtcagggaaccgagaaaccaatggacgaacattattgcggatatatagattgcaatcaagcaagagctggctataacgaggcaaagcgtacctgtgaagcattgacacaatcttatcgtcaacggttcggaattgatgctgtcattgtaagatttgcaagagtttttggcccagacaagaaaaaagacacaaaagcaatgagccaattcatggacaaagcggtcttaggcgatgagatagtgatgaaaagctatggtgaacaacgctactcttatgtttatattgcagatgcagtaagcgctctaatcaagattcttctggatggagtagacgttgaggcctacaatatatccgatgatgatgatggaagaacacttcgaggatatgctgagtatcttgcgaccgtttcaaatcagaaagtaaaatttgaaatcgaagataactcagcagtgtcgaaggctacatttgccttaatggatacaactaaactgaaagacctggggtggaagccgctctatacggtatgccagggtctaaaggaaacatatacaatcaaacaacaagaaaatacagatagcacaagaagataatcctgacggacctgaggcatgaaaactaacaaatcgtatttactatgtttgtaaatgagtagacaagtagatttttatatggaaagatagttttgagttttatagaagtttgattttagccatgctcaaagcatggctacgccatccagatatgctgcctctccgtggtgagcagcaggcaacgagagttccctctcggctaaagcatgtattcgttaattcactctttggatgaggaaaaactataatgggaaagtattttggaaccgatggcttccgtggcgaagctggaatcacgctgaccgctgaccatgcctacaaggttggccgctttttgggctggtattacaatatgctccgcgagcgcaatggcaacaacgagcctgcacgcatcgtcattggcaaggatacccgccgtagctcttatatgttcgagtatagtctggtcgctggtttgactgcttccggcgcagatgcctacctgctgcacgtcactaccactccttctgttgcttacatcgcccgggtggatgatttcgattgcggcatcatgatctccgccagccacaacccctactacgataacggcatcaagctgatcgactgctacggtgagaagatgcccgaggagaccctgctgctggtggaggactacatcgacggcaagctccacgtgttcgacaaggactggccggagctgccctttgcccaccgtgagcatatcggctgcactgtggactatgtggcaggccgtaaccgttacatgggctacctgatcagcctcggtatctactcttttaagggtgtcaaggttggtctggactgcgccaacggtagttcttggaacatcgctaagtctgtgttcgatgcgctgggtgctgacacctacgtcatcaatgcacagcccaacggtctgaacatcaacaacaatgcaggttccacccacatcgagggcttgcagaagttcgtggttgaaaagggcctggacatcggttttgcctatgacggcgatgctgaccgttgcctgtgtgtggatgaaaagggtaatgttattaccggcgatcatatcctgtacatctatggctgctacatgaaggaacacggcgaactgatgaacaacacggtggtcactaccgtcatgtccaactttggcctgtacaaggcttttgatgagcagggcatcggctacgctaaaactgctgtaggcgataagtacgtctacgagtacatggctaagaacggctgccgtattggcggtgagcagagcggtcatattatcttcagcaagtacgccagcaccggtgatggtattctgaccagcctgaagatgatggaggtcatgctggccaaaaaactgcccatgagcaagctggctgtgccgctgaaaatctacccgcaggtgttggagaatgtccgtgtgaccgacaagaaagctgcacagaacgacccggcagtgcaggcagcagtcaaggctgtggcagaagcactgggcgataccggccgtatccttgtccgtgagtccggcacggagcctctggtgcgcgtaatggtggaagcccctgaccatgatacctgtcagaagtacgtctctcaggtcgtggaggtcattaaggataagggctacgctgtctgaacgtgggtagtaaatacaggttgatgtatatttcactgttacccttgaaaactaatttttaaaggattatatttgagccgtgggaagtttctcacggcttgctttgtacacctctatgagatggacggcagacaactcttattatcatataagcggctaggatacagaacgcatcataatctctatattgccatgcttacatatcataaaatcttcaaggctaccaacaacctatcaatctgcctatcgaacccagagccaattgcggcctgtaatgatgaatttttgcttcgtcttacagaagctaaaaacaaaggcgaacttcatgaagcaaaagtctctatattgaaggactttcagactatttatgcctttgatgtaaccgatgctgaattcccggaacctgttggccacttttcaaaaaaacagggggaagatggatttttacaggaaaaacgtgaatttgtaaagaaaagaattttactacaggacgtatggttctatttgggaaatacctttggagaatatcatgtatataagattaatacagaaggctctcttccggtaattgaagggaaaagactagccattaattacagagaaatctactgtaaggcgctggaagactatgtggaaacaatcagaaatggaaacaaacatgctatcgcagcatcctttattcttcccgctttgattgagcaaagccttggaatgaccttacaaaaccggatgttaagaaaatgtatggccggagtgaaagagttatcggaggaagaatcaaaactgctgactccctttcatggtgaaagccatatcttctatggctcggaagagtacattatgggtaaagtctataaactctttgtgagaaaaggtgtgttaaaggactctccggataacgagataatattgactggaagtagccgaagaaagagaagaacactgggagggttgattagttctcggtatgccaaagaagagatgctaccggagtattatgagttgatgaaggatatctttattaaactcaacatccgaaattgtatcatgcatgggctgggggaatcatttgactatttggatcgtggaatcgccgccattatgttccaactgttgtgggatataagtggtggagaggtatttcaagcggaagtgtgaagaatgtggaggtaaaaagttatgtcacttaatacttatttggataatactgcatcaaacttgattattaaaggcgacgaaaaagatgctattgccaaatctctagatgtctttaaatcacggatggagaattacttcttttggaatgaaacagtaaacttaaaagaaatcaaagtatttgggtcttatgcgcgtgatacagatttgccacaagcaattgatagcggaaccgatgtggatataatgcttgtgatggatgatgacggagcaactccgcagacgtatctggatcgagtgcggcgagcagtggaggcgaagtattcgacctcagatatcaagcaatcttcgcccactatcgttttgcagatgaatcatatcaaattcgaaataactccagctattcagtcctattcacagtataagattaaagatcagtggagtggctggatgtataccaactgcttaaccgattttgttaatttgaaaacggcaaatacaaataactactgtaaaatcaagccagtaattagacttgtgaaatactggaataagacgagaaatggtcgtgggtttgcctcgtaccagattgaaaagaatatagttgactattatcagagcaatagacatcaagaatacgatacaaagagatatttacttacagcgctacagtgtttgcgctcacttccaatatatgagttccagcgtaaaactttagaaagtgcaatcagtaacgtccaagaagcaatcaatgatgaagaacaatttccaacgtcagcaatgagcgaactcaagaaggttataggtgaattgtgatgtcaaatggaatcaaccagcgacaaaacgaagaaaaatgcgtagcaatgcttgcggcacaaaggcagttgtacaatgatgcaaagaaacttgattggacatctacagtgctttctgttctgattccatttcttttatcgtgcatcttattattcgtatcaaaggattctccggttggagtgatttcatatatagtttcgattgtcagtatgattttttcattctgtgtttcaggacatattaaaaatgaaaaaagaatggcagcttttattcaacaaaagtttgatacctatgtttacacaatgccgtggaatagaagaatatttggcgacgacaaaaatgtgagttcggaaattgcacagtattcggagaaaattctgtctaataatgctgaaaaggaaaagctaaaaaactggtacacggttgaggcagacagaaagccattaaacgagggaattctggtatgtcaaagggaaaacttcacatgggacgctggattgagaaaacggtttcgaaggttgagcattggagtagtggtgctcttatctggtgctgtattgattatgggagtcattttgaatgaaagcgtaatagagctactctgtcgaatagcattctgggcaccaatgttacaatggctatttgaaaccgtgaaaatgctaaatgatgacttggaaaatctgaatgaactggacgttgcgataaactcgaaagaggaaaagagcatggaagatcttcaggatattcaaaaactgatatacgaacatcgaaaaggttgcttgacgatacctaatttcttctatggatatttcaaggacaatgacgaagacagagcacacagaatggcaa

(The sequence listing continues in the following parts.)
